United States Patent Application Publication US 2011/0182862 A1 - sequence listing, part 20

SEQ ID NO: 28786 - protein, 144 aa, Muscodor strobelii
  misc_feature: SGI Peptide ID NO. 569876
  misc_feature (15)..(45): Pfam Id: PF00467 Pfam Desc: KOW motif
  misc_feature (56)..(132): Pfam Id: PF01929 Pfam Desc: Ribosomal protein L14
  misc_feature (4)..(144): NCBI GI: 171683851 Blast Desc: protein product [Podospora anserina] gi|170941886|emb|CAP67538.1| protein product [Podospora anserina]
  misc_feature (4)..(144): NCBI GI: 119173307 Blast Desc: CIMG_10151 [Coccidioides immitis RS] gi|240111798|gb|EER29943.1| 60S ribosomal protein L14-A, [Coccidioides posadasii C735 delta SOWgp]
  misc_feature (4)..(144): NCBI GI: 226277956 Blast Desc: ribosomal protein L14 [Paracoccidioides brasiliensis Pb01]
  misc_feature (1)..(144): NCBI GI: 212526422 Blast Desc: ribosomal protein L14 [Penicillium marneffei ATCC 18224] gi|210072766|gb|EEA26853.1| ribosomal protein L14 [Penicillium marneffei ATCC 18224]
  misc_feature (4)..(144): NCBI GI: 225683849 Blast Desc: ribosomal protein L14 [Paracoccidioides brasiliensis Pb03]
  misc_feature (1)..(144): NCBI GI: 242780858 Blast Desc: ribosomal protein L14 [Talaromyces stipitatus ATCC 10500] gi|242780863|ref|XP_002479685.1| ribosomal protein L14 [Talaromyces stipitatus ATCC 10500] gi|218719831|gb|EED19250.1|
  misc_feature (4)..(144): NCBI GI: 226293232 Blast Desc: ribosomal protein L14 [Paracoccidioides brasiliensis Pb18]
  misc_feature (3)..(144): NCBI GI: 261353516 Blast Desc: 60S ribosomal protein L14-B [Verticillium albo-atrum VaMs.102]
  misc_feature (3)..(144): NCBI GI: 46128367 Blast Desc: FG08561.1 [Gibberella zeae PH-1]
  misc_feature (4)..(144): NCBI GI: 145250389 Blast Desc: An15g01690 [Aspergillus niger] gi|134082227|emb|CAL00982.1| protein product [Aspergillus niger]
  misc_feature: Useful for introducing or modulating the production of volatile compounds
MSANIESPSWRTVEVGRLVLISQGPFAGRVAAITEIISEKRVLVDGPSSNEKAVVPKGPVALSDVFLTDIKLDIPRALRTGTLKKVWENEGVDKKWADSKWAKRSERTEKRKALTDFQRFQLLRAKKQQRYEVRKALAKVKASA

SEQ ID NO: 28787 - DNA, 1448 bp, Muscodor strobelii
  misc_feature: SGI EST ID NO. CUFF.68420.0
  misc_feature: Variant of the nucleotide sequence at SEQ ID NO 28785
gtgtgctctcgctctgccacacaaccccgaaattttgggttgtgtggacaaaatccaagatttcggcgtcccctccaaaagagcaacgactacatcgacaccggtgatctcaacccaagcggcacatttccgaacaccacccaattctgtaagtacgctacccttgaatttcaatcttattctttgactctgcgaccgactctgcacacaactgcatctcccaaaaaccactctacctccatctcgaaatccgaccgcgcctaccccggctccaatcttcgaaacagcatctatctcatacatcgtcaataccttgccaacttcgcgctggatttcctgcgaccgaccttggaagagaaacaatacaacaccctatctgacacaacacgtctcacacagaattcaccatgtccgccaacatcgagtccccgtcgtggcgtacggtcgaggtcggccgcctcgtcctcatcagccaaggccccttcgccggccgggttgccgccatcaccgagatcatttctgagaagcgtgtcctcgtcgatggccccagctccaacgagaaggccgtagtccccaagggacccgtcgccctgtccgacgtcttcctcaccgacatcaagctcgacataccccgtgccctccgcaccggcacgctgaagaaggtctgggagaacgagggtgtcgacaagaagtgggccgacagcaaatgggccaagcgcagcgagcggacggagaagagaaaggctctgaccgacttccagcgcttccagctcctccgcgccaagaagcagcagcgctacgaggtccgcaaggccctcgccaaggtcaaggcctccgcctaagctactcgacaacaacgcgaacgaagggagaacaaagtacgaagaggagaaaggtgtgagagggcgattacgagcggccctcgcgccgggcaagggagcgcgggttttcttctggtctgcatggcacaacatcggcacagggttcgagagggattctcgttttgctttgctgcatcatcgtctggcaggacctgtatgtcacacacacaaaaacactcttatttcacgaggtgactggcgtcaatgattacgggagtcattcaaaacaggcaaaacaagacaaaaaaactacaagaaccctctggctgtgtcgcctgtgacgtggaagatgcccaagagaggaagccgaaagagcaccttgtagagagagctgcttggctgcggcctctcttcctaatgatacctacaggacccaagataccatggtatcccaattactgatcaggttctcgtttcccatagtgccaagtgacatgaagcgtgtattcgaacgagtgctgattaagccaatggcgattgattgtctcttttgaggacatttcctaacctcttacctaaggtagttgcagtctatacctgaaagtgcctgcgtatcatatgtcccag

SEQ ID NO: 28788 - DNA, 615 bp, Muscodor strobelii
  misc_feature: SGI cDNA ID NO. 569877
  misc_feature: Reduced expression when VOC is produced
  misc_feature: Encodes the peptide sequence at SEQ ID NO 28789
atggccaacccgcgtgtcgaagagctgcccgacgacgagcctaagaaggtcggtgtcgaggagcaggacgacgacgacagctccgactcggagatcgaggctggcgagtccggtcccaccggctcccaggccgtcatccactcccgcaacgagaagaaggctcgcaaggccatcgagaagctgcacctcctccgcgtacccaacatcacccgcgtcacccttcgccgccccaagaacatcttgttcgtcatcaacaaccccgaggtctacaagtctcccaacagcaacacctacattgtgttcggcgaggccaagatcgaggatctgaactcggctgcccagcaggctgccgcccagcaactcgctgcgcagggcggtgagcacgaccacgccggccacgaccacagccacggcgacgccaccaaggccgtcgagggtgctgaggacaagaaggacgacgacgatgacgatgaggaggtggacgccgacggacttgaggataaggacatcgagctggtcatgacgcaagctaatgtctcgcgaaagaaggccatcaaggcattgaaggagaacgacaatgacatagtgaattccatcatggccctcagcgtctag

SEQ ID NO: 28789 - protein, 204 aa, Muscodor strobelii
  misc_feature: SGI Peptide ID NO. 569877
  misc_feature (49)..(108): Pfam Id: PF01849 Pfam Desc: NAC domain
  misc_feature (165)..(202): Pfam Id: PF00627 Pfam Desc: UBA/TS-N domain
  misc_feature (1)..(204): NCBI GI: 85074815 Blast Desc: NCU00635 [Neurospora crassa OR74A] gi|74619062|sp|Q7SI17.1|NACA_NEUCR RecName: Full=Nascent polypeptide-associated complex subunit alpha; Short=NAC-alpha;
  misc_feature (1)..(204): NCBI GI: 171683853 Blast Desc: protein product [Podospora anserina] gi|170941887|emb|CAP67539.1| protein product [Podospora anserina]
  misc_feature (1)..(204): NCBI GI: 46128365 Blast Desc: FG08560.1 [Gibberella zeae PH-1] gi|121811824|sp|Q4I2J8.1|NACA_GIBZE RecName: Full=Nascent polypeptide-associated complex subunit alpha; Short=NAC-alpha;
  misc_feature (1)..(204): NCBI GI: 124015171 Blast Desc: FG08560.1 [Gibberella zeae PH-1] gi|121811824|sp|Q4I2J8.1|NACA_GIBZE RecName: Full=Nascent polypeptide-associated complex subunit alpha; Short=NAC-alpha;
  misc_feature (1)..(204): NCBI GI: 39970387 Blast Desc: MGG_02660 [Magnaporthe grisea 70-15] gi|152032611|sp|A4RC89.1|NACA_MAGGR RecName: Full=Nascent polypeptide-associated complex subunit alpha; Short=NAC-alpha;
  misc_feature (1)..(204): NCBI GI: 212526420 Blast Desc: nascent polypeptide-associated complex (NAC) subunit, [Penicillium marneffei ATCC 18224] gi|210072765|gb|EEA26852.1| nascent polypeptide-associated complex (NAC) subunit, marneffei
  misc_feature (1)..(204): NCBI GI: 156055864 Blast Desc: SS1G_05284 [Sclerotinia sclerotiorum 1980] gi|160409955|sp|A7EIZ1.1|NACA_SCLS1 RecName: Full=Nascent polypeptide-associated complex subunit alpha; Short=NAC-alpha;
  misc_feature (1)..(204): NCBI GI: 160409998 Blast Desc: SS1G_05284 [Sclerotinia sclerotiorum 1980] gi|160409955|sp|A7EIZ1.1|NACA_SCLS1 RecName: Full=Nascent polypeptide-associated complex subunit alpha; Short=NAC-alpha;
  misc_feature (1)..(204): NCBI GI: 242780854 Blast Desc: nascent polypeptide-associated complex (NAC) subunit, [Talaromyces stipitatus ATCC 10500] gi|218719830|gb|EED19249.1| nascent polypeptide-associated complex (NAC) subunit, stipitatus
  misc_feature (1)..(204): NCBI GI: 225561039 Blast Desc: nascent polypeptide-associated complex subunit alpha [Ajellomyces capsulatus G186AR]
  misc_feature: Useful for introducing or modulating the production of volatile compounds
MANPRVEELPDDEPKKVGVEEQDDDDSSDSEIEAGESGPTGSQAVIHSRNEKKARKAIEKLHLLRVPNITRVTLRRPKNILFVINNPEVYKSPNSNTYIVFGEAKIEDLNSAAQQAAAQQLAAQGGEHDHAGHDHSHGDATKAVEGAEDKKDDDDDDEEVDADGLEDKDIELVMTQANVSRKKAIKALKENDNDIVNSIMALSV

SEQ ID NO: 28790 - DNA, 1476 bp, Muscodor strobelii
  misc_feature: SGI EST ID NO. CUFF.68774.0
  misc_feature: Variant of the nucleotide sequence at SEQ ID NO 28788
cgaggttggcactgccctggtgctcgcccaccaggtggcttggggcagtgggcggccgaaaaaaccctagccagtgggctgaattgagatgaatttgtgtagagctaccatttttgctcgccaaactctagaggtaccatcgccgtgtgccactacccccgctactaccactccccataccatccctccaaaaggtgcatttgcgatattgtgtctatctattgtgagtgtgatttcctagtgttgcgatctttgtatatgagctagcttttggcttttgattcgagtcgagtggtctgccctacatagctgtgcgttgcgccttctctaggtattggtggtggtggtggtgtggactggtcgctgcagctcctcgaacaacacctgttaccagacccgagtgttgcctcacttgcgacagcccagctgactattggcttgttgactatagtcccacacataaaacaccatggccaacccgcgtgtcgaagagctgcccgacgacgagcctaagaaggtcggtgtcgaggagcaggacgacgacgacagctccgactcggagatcgaggctggcgagtccggtcccaccggctcccaggccgtcatccactcccgcaacgagaagaaggctcgcaaggccatcgagaagctgcacctcctccgcgtacccaacatcacccgcgtcacccttcgccgccccaagaacatcttgttcgtcatcaacaaccccgaggtctacaagtctcccaacagcaacacctacattgtgttcggcgaggccaagatcgaggatctgaactcggctgcccagcaggctgccgcccagcaactcgctgcgcagggcggtgagcacgaccacgccggccacgaccacagccacggcgacgccaccaaggccgtcgagggtgctgaggacaagaaggacgacgacgatgacgatgaggaggtggacgccgacggacttgaggataaggacatcgagctggtcatgacgcaagctaatgtctcgcgaaagaaggccatcaaggcattgaaggagaacgacaatgacatagtgaattccatcatggccctcagcgtctagggttctttttactacggatgtaactggtagtggaacatagtggtccagcaagggcatcccgagttgatattttgctcgggtagatgcatcattcggcaaacaatgtcgtaatcgcgtcggatacaaaaaaagggaaacaaattatgggatgaatcattacaaagtctgtgttatgcattgcaccttgttgataacagtgaatattgatgccacgcatgctgtcgagttgcttgcgttccggcccagcatcccaaacacatggcgtccctctcaatactcatcatcgcatcacatgtaccatcaatgctaatgacatgaccgagtcttattctgtctagtctctcaattatagaggagttacaggcgagagcattccacatagatgaacaagc

SEQ ID NO: 28791 - DNA, 528 bp, Muscodor strobelii
  misc_feature: SGI cDNA ID NO. 569878
  misc_feature: Encodes the peptide sequence at SEQ ID NO 28792
atggccacaccagcacgcagcgccgccttgaagctcgactgggccaaggtcacacagtccctcggcctgcgcggccagaccgtcgcctcgctgcaggccttcaagcagcgcaacgagaacgcccgccggaaggtgcaggtcctgtccgagcagcccaccaccgtcgacttcgcccactaccgctccctcctcaagaaccaggccgtcatcgacgagatcgagaagcgcttcgcctccttccagccctccaagtacgacgtcgcccgccagctcaaggccatcgaggccttcgaggttgaggccgtcaagaacgccgaggccaccaaggagaaggtcgaccttgagctcaaggacctcgaggccaccctcaagaacatcgagaccgctcgccccttcgacgagctgactgtcgacgaggtcgccgctgccgagccctccatcgacgagaagacctccaacctcgtctccaagggccgctggtccgtccccggatacaaggaaaaattcggcgatctctccgtactgtag

SEQ ID NO: 28792 - protein, 175 aa, Muscodor strobelii
  misc_feature: SGI Peptide ID NO. 569878
  misc_feature (5)..(175): NCBI GI: 171683855 Blast Desc: protein product [Podospora anserina] gi|170941888|emb|CAP67540.1| protein product [Podospora anserina]
  misc_feature (5)..(175): NCBI GI: 85074817 Blast Desc: ATP synthase D chain, mitochondrial [Neurospora crassa OR74A] gi|52782733|sp|Q7SI16.1|ATP7_NEUCR RecName: Full=ATP synthase subunit d, mitochondrial gi|28927589|gb|EAA36540.1| ATP
  misc_feature (5)..(175): NCBI GI: 116193113 Blast Desc: CHGG_06274 [Chaetomium globosum CBS 148.51] gi|88182187|gb|EAQ89655.1| CHGG_06274 [Chaetomium globosum CBS 148.51]
  misc_feature (1)..(175): NCBI GI: 256733607 Blast Desc: [Nectria haematococca mpVI 77-13-4]
  misc_feature (5)..(175): NCBI GI: 156055866 Blast Desc: ATP synthase D chain, mitochondrial [Sclerotinia sclerotiorum 1980] gi|154703069|gb|EDO02808.1| ATP synthase D chain, mitochondrial [Sclerotinia sclerotiorum 1980]
  misc_feature (5)..(175): NCBI GI: 154302396 Blast Desc: ATP synthase d subunit [Botryotinia fuckeliana B05.10] gi|150855470|gb|EDN30662.1| ATP synthase d subunit [Botryotinia fuckeliana B05.10]
  misc_feature (5)..(175): NCBI GI: 124007118 Blast Desc: ATP synthase d subunit [Botryotinia fuckeliana B05.10] gi|150855470|gb|EDN30662.1| ATP synthase d subunit [Botryotinia fuckeliana B05.10]
  misc_feature (5)..(169): NCBI GI: 145610189 Blast Desc: ATP synthase D chain, mitochondrial [Magnaporthe grisea 70-15] gi|145017546|gb|EDK01909.1| ATP synthase D chain, mitochondrial [Magnaporthe grisea 70-15]
  misc_feature (6)..(175): NCBI GI: 115386450 Blast Desc: ATP synthase D chain, mitochondrial [Aspergillus terreus NIH2624] gi|114190764|gb|EAU32464.1| ATP synthase D chain, mitochondrial [Aspergillus terreus NIH2624]
  misc_feature (5)..(175): NCBI GI: 169777157 Blast Desc: [Aspergillus oryzae RIB40] gi|83771781|dbj|BAE61911.1| protein product [Aspergillus oryzae]
MATPARSAALKLDWAKVTQSLGLRGQTVASLQAFKQRNENARRKVQVLSEQPTTVDFAHYRSLLKNQAVIDEIEKRFASFQPSKYDVARQLKAIEAFEVEAVKNAEATKEKVDLELKDLEATLKNIETARPFDELTVDEVAAAEPSIDEKTSNLVSKGRWSVPGYKEKFGDLSVL

SEQ ID NO: 28793 - DNA, 853 bp, Muscodor strobelii
  misc_feature: SGI EST ID NO. CUFF.67908.0
  misc_feature: Variant of the nucleotide sequence at SEQ ID NO 28791
ctgggccaggatggaacaacctctgctgtgagttgcttcagatctccactcatttcgcaacctcaccacatcgcaaacatggccacaccagcacgcagcgccgccttgaagctcgactgggccaaggtcacacagtccctcggcctgcgcggccagaccgtcgcctcgctgcaggccttcaagcagcgcaacgagaacgcccgccggaaggtgcaggtcctgtccgagcagcccaccaccgtcgacttcgcccactaccgctccctcctcaagaaccaggccgtcatcgacgagatcgagaagcgcttcgcctccttccagccctccaagtacgacgtcgcccgccagctcaaggccatcgaggccttcgaggttgaggccgtcaagaacgccgaggccaccaaggagaaggtcgaccttgagctcaaggacctcgaggccaccctcaagaacatcgagaccgctcgccccttcgacgagctgactgtcgacgaggtcgccgctgccgagccctccatcgacgagaagacctccaacctcgtctccaagggccgctggtccgtccccggatacaaggaaaaattcggcgatctctccgtactgtagacatagactgcgtggtgcatcatcctgccgctttcttccctttgtgtacatcagcattgtagatagtcagctcgccagagagctcggtatcggaaaaagacaacctaattcttccaatctctgctcgactcgcgtgctttgttttcgtgtcccccctttcaggcgcctggtggttgagaggggtggaatgctagccatccatctcaggtgtcaaatgcatcctcggatgcgtggctggagacgtcgt

SEQ ID NO: 28794 - DNA, 330 bp, Muscodor strobelii
  misc_feature: SGI cDNA ID NO. 569879
  misc_feature: Elevated expression when VOC is produced
  misc_feature: Encodes the peptide sequence at SEQ ID NO 28795
atgatagtcgtcgatagcgccgctaacgacaacgagaccttcaatgtggtgtttgttgttggagagaaagcaggtgtctctgaggtcaaactgcgcctgaaaggccctttgcgcacaaaagacgacatcaacgctaaacatatctatggcggaggagataagattgatgttggcgaagagcaaaatgctgctggagatcctatccctatcgacgaggcaaaggacatctgggagtggaaactactggcttggacacaatacttgacccaaactgtggacgtagagcagttcaagaagactctcgccctactctggagtagtagcagctga

SEQ ID NO: 28795 - protein, 109 aa, Muscodor strobelii
  misc_feature: SGI Peptide ID NO. 569879
  misc_feature: Useful for introducing or modulating the production of volatile compounds
MIVVDSAANDNETFNVVFVVGEKAGVSEVKLRLKGPLRTKDDINAKHIYGGGDKIDVGEEQNAAGDPIPIDEAKDIWEWKLLAWTQYLTQTVDVEQFKKTLALLWSSSS

SEQ ID NO: 28796 - DNA, 984 bp, Muscodor strobelii
  misc_feature: SGI cDNA ID NO. 569880
  misc_feature: Encodes the peptide sequence at SEQ ID NO 28797
atggcttcccccgcggggatagtcgatcccaccaaggctggcaaatatcgcgttgttctcagcgatgcgctcttgggcaaagactccaaggaactctacactggcatcaggtacaaccacagaccgaccctctccaccgcgaccgcaccacaccaagcccgcataaaaccctcgggctcttctgctccggactcgtcctatgacctcaacttcctcgacgatggtgggcgctatacgtatcagggcacccgcggccaggaaggcaaccaatacgtcctcatcttcgatccagagagagaggtctttgtcctgcaccgcgtagactccatgttcaacatgaacctcacccgcacgcccgacaactccgacgctgccagcctacgccaagagcatcgccagctcgatgcccacaagcccagcgccaaacccccagccagcaaacccaagaaggccgctcccaagccagccacatctaaaaaggcgccgccgccaccgaaacccgctcccaagaagaaaccacccaaggactcagacgaggaaagctccgatgacgaccttctcaccatcgaggaccccggcggtgcagcccccgcctccaacagggacttctcaccaggttttatcgagaagcctaggcgtttctccgaattcgtgcagcagcgcgaagaggagagcgaggatggggagcgcgacgccgatggcgaagacgaagacgacgatgacgatgcttttgagcatttcaccctgccgagccctatcaaccggcagctagaggccgctgccccgccagcgcaacacacgcagcacgaggaagtggtctcggacgaggacgaggacatggaggatgtgggtggggccggcaacgcggaagatgcggagggcgatgatgacgtcgatgtcgacttggaggctgagctcatggccgagctggagcaggacgatgagcagggtggggacgagagtgacgtctccgaggaggagtga

SEQ ID NO: 28797 - protein, 327 aa, Muscodor strobelii
  misc_feature: SGI Peptide ID NO. 569880
  misc_feature (5)..(327): NCBI GI: 46128525 Blast Desc: FG08640.1 [Gibberella zeae PH-1]
  misc_feature (1)..(227): NCBI GI: 116193603 Blast Desc: CHGG_06519 [Chaetomium globosum CBS 148.51] gi|88182432|gb|EAQ89900.1| CHGG_06519 [Chaetomium globosum CBS 148.51]
  misc_feature (5)..(327): NCBI GI: 256734143 Blast Desc: NECHADRAFT_67562 [Nectria haematococca mpVI 77-13-4]
  misc_feature (1)..(327): NCBI GI: 85114211 Blast Desc: NCU02033 [Neurospora crassa OR74A] gi|28926445|gb|EAA35419.1| NCU02033 [Neurospora crassa OR74A]
  misc_feature (1)..(327): NCBI GI: 16945406 Blast Desc: [Neurospora crassa]
  misc_feature (8)..(135): NCBI GI: 171684937 Blast Desc: protein product [Podospora anserina] gi|170942429|emb|CAP68081.1| protein product [Podospora anserina]
  misc_feature (1)..(137): NCBI GI: 145610008 Blast Desc: MGG_02794 [Magnaporthe grisea 70-15] gi|149210131|ref|XP_001522440.1| MGCH7_ch7g547 [Magnaporthe grisea 70-15] gi|86196502|gb|EAQ71140.1| MGCH7_ch7g547 grisea
  misc_feature (5)..(313): NCBI GI: 156055546 Blast Desc: SS1G_05125 [Sclerotinia sclerotiorum 1980] gi|154702909|gb|EDO02648.1| SS1G_05125 [Sclerotinia sclerotiorum 1980]
  misc_feature (6)..(130): NCBI GI: 261352160 Blast Desc: conserved [Verticillium albo-atrum VaMs.102]
  misc_feature (2)..(119): NCBI GI: 212526950 Blast Desc: conserved [Penicillium marneffei ATCC 18224] gi|210073030|gb|EEA27117.1| conserved [Penicillium marneffei ATCC 18224]
MASPAGIVDPTKAGKYRVVLSDALLGKDSKELYTGIRYNHRPTLSTATAPHQARIKPSGSSAPDSSYDLNFLDDGGRYTYQGTRGQEGNQYVLIFDPEREVFVLHRVDSMFNMNLTRTPDNSDAASLRQEHRQLDAHKPSAKPPASKPKKAAPKPATSKKAPPPPKPAPKKKPPKDSDEESSDDDLLTIEDPGGAAPASNRDFSPGFIEKPRRFSEFVQQREEESEDGERDADGEDEDDDDDAFEHFTLPSPINRQLEAAAPPAQHTQHEEVVSDEDEDMEDVGGAGNAEDAEGDDDVDVDLEAELMAELEQDDEQGGDESDVSEEE

SEQ ID NO: 28798 - DNA, 1725 bp, Muscodor strobelii
  misc_feature: SGI EST ID NO. CUFF.67930.0
  misc_feature: Variant of the nucleotide sequence at SEQ ID NO 28796
ctagttcgtctcttgtcgctgtgagtcgctggatcatccacgaactccccccaatctagactaccctcccgccggcttcccgcccggccgtacctatccgtctcccatcctctacgaggaccgttgcacatccctctccatttctctccactaccgaccatcgccattccctcccactcatctctttcccgacgaatcagcccccacccaccatcgaaagttacactatcctttgacgaccttgacgacgttgaaaattaaaagcctcaccgtcgtcctcggctgactgtggcggacatggcttcccccgcggggatagtcgatcccaccaaggctggcaaatatcgcgttgttctcagcgatgcgctcttgggcaaagactccaaggaactctacactggcatcaggtacaaccacagaccgaccctctccaccgcgaccgcaccacaccaagcccgcataaaaccctcgggctcttctgctccggactcgtcctatgacctcaacttcctcgacgatggtgggcgctatacgtatcagggcacccgcggccaggaaggcaaccaatacgtcctcatcttcgatccagagagagaggtctttgtcctgcaccgcgtagactccatgttcaacatgaacctcacccgcacgcccgacaactccgacgctgccagcctacgccaagagcatcgccagctcgatgcccacaagcccagcgccaaacccccagccagcaaacccaagaaggccgctcccaagccagccacatctaaaaaggcgccgccgccaccgaaacccgctcccaagaagaaaccacccaaggactcagacgaggaaagctccgatgacgaccttctcaccatcgaggaccccggcggtgcagcccccgcctccaacagggacttctcaccaggttttatcgagaagcctaggcgtttctccgaattcgtgcagcagcgcgaagaggagagcgaggatggggagcgcgacgccgatggcgaagacgaagacgacgatgacgatgcttttgagcatttcaccctgccgagccctatcaaccggcagctagaggccgctgccccgccagcgcaacacacgcagcacgaggaagtggtctcggacgaggacgaggacatggaggatgtgggtggggccggcaacgcggaagatgcggagggcgatgatgacgtcgatgtcgacttggaggctgagctcatggccgagctggagcaggacgatgagcagggtggggacgagagtgacgtctccgaggaggagtgatggggcatcttgggcactagcggatcttgtggcattttgatgaatttatttgagagcgggtgtatatctttcagcgtcactccttcttggtccgatttttctgatctccggcgagagacattctgggttctgtatacgcacgcgcatcggatggattctaggacaagaaaggggaaagcatatatggacggcgtttggtgtgttttagaataccattctttacacatttgcatcacgaggggatcttagttgtgggatagagaaaaggagatatctatgggtgattagggacttgacattcatcttcgggaacgtcgagagtagtcagaaagcgagttggagaggtttatatacaatgagaagcattttattaatctagattatcgcgcatgcacatcgcataacggtagcccgaatagtcacctcgccttttgcttcgcgcac

SEQ ID NO: 28799 - DNA, 1791 bp, Muscodor strobelii
  misc_feature: SGI cDNA ID NO. 569881
  misc_feature: Reduced expression when VOC is produced
  misc_feature: Encodes the peptide sequence at SEQ ID NO 28800
atggaccaaatccccccggagatactctacgtgatcgtctcgttcctagacgtcgatgcaattcagaatgtccgactcgtgaatcgcaaattggcagatgtaggcgcagcctacatgctgcctgaagtcacattctacatgcactcggaagagctcgcacgtctacaagccatatcacagcaccctgtgttctctaaacatgtccactcactcacatatttcgctcacgccctcgactcacctaaagtcagctggcgtgaatttctgcgagattacaaactagagttacgatggaacagtcgtctgaagaagctcaattatcatcccaatcaacttatggctgagtataagaaatattgcgatgcggcagcaaagcaggatcttatcatgaacagtgaggcagatatcactctgctcaaggaaattctgccgagattccccaagttggagtcgatgacgatgtcctcgggcgggagattctatgaaggcagtcatcataatacaaaacgccacaaacctttagatgacatattgcgagggagcacctttcacagcctcaatcccgaaggcagccgaccacttgaggctttattggtggccaatgccgaggcgaaatgcgccttgaagagctttcgcgcaggcttcttacactggaaattctttaagcgacccgaatgggtcctccggcgcatgttcacaccactggccaaccttacgtctatcgaaatcagcatcagcctcgactcgggagaagaggagacagacaggttccacgaccatgactcactcgtcaaatgtcagcgggtcatgtcaaagggtagtctgcggcatattctcaagtcgatgccacacctgcaaacaatttgcgtggagttactcgatatggacgttgatgagttgaccaagggagcgacattggccgatatcattgaaccgggcttccattggcctcatcttcaggagttggcccttggcggcttatcgtgtgaccggaaggagctgatggactgtttaaggcgacacaaggacacccttcaagtattatgcctacgagacatggcgctaaagtcgagttcttggtgcaaactactgccggatatccggaagaagatgaaccttgctgatgcatgcatttgcggggtgctctacgggtatcgcgaggctgaccagttcggcgacgcagcgcttgaatactgggatctatcagtgcctgaagtcggagatcatgacatgagggattcggtcaacgtctattgtcgacatggcggaaccgagtatccggacgagcttcccctcagcaacatggtcgtgacgaagtactacgaagagtacgtgcgcaagcattatcgcgatgacgaggacgatgatgatggcgacgctgtgctcaacgccgaggaccaagacgatcagaattgggaggatgtgtcggacgaggaggagatcagtgacgagatgagcacggggtcgttggactcgctagagatgcaagcggccttcacacagactgtcatgggcgacgattacatgatggggctgatgaatgcttcgatggcgatggacccgatgtggccaaactgggggggttacgatacggatgactatatgatggaccagtggagcgatcgcgacgatgaggatgtgtacgacgacgaagatgaggaagaggaaggtgtcagcaacatgtgggaaaatatactgacggtgcggacgagtgccttggcatctgcaccagggccgcagtggatgaccacatgggaggagaaccagaacggtgcgagtgcgagtacctag

SEQ ID NO: 28800 - protein, 596 aa, Muscodor strobelii
  misc_feature: SGI Peptide ID NO. 569881
  misc_feature (4)..(405): NCBI GI: 85079393 Blast Desc: NCU05033 [Neurospora crassa OR74A] gi|28917401|gb|EAA27105.1| [Neurospora crassa OR74A]
  misc_feature (2)..(384): NCBI GI: 116197220 Blast Desc: [Chaetomium globosum CBS 148.51] gi|88181121|gb|EAQ88589.1| [Chaetomium globosum CBS 148.51]
  misc_feature (1)..(369): NCBI GI: 240275744 Blast Desc: methyltransferase [Ajellomyces capsulatus H143]
  misc_feature (1)..(369): NCBI GI: 225563164 Blast Desc: [Ajellomyces capsulatus G186AR]
  misc_feature (192)..(364): NCBI GI: 85110679 Blast Desc: NCU08717 [Neurospora crassa OR74A] gi|9453809|emb|CAB99377.1| [Neurospora crassa] gi|28925263|gb|EAA34342.1| [Neurospora crassa OR74A]
  misc_feature (1)..(350): NCBI GI: 145603284 Blast Desc: MGG_06146 [Magnaporthe grisea 70-15] gi|145011549|gb|EDJ96205.1| MGG_06146 [Magnaporthe grisea 70-15]
  misc_feature (3)..(398): NCBI GI: 189191356 Blast Desc: [Pyrenophora tritici-repentis Pt-1C-BFP] gi|187973623|gb|EDU41122.1| [Pyrenophora tritici-repentis Pt-1C-BFP]
  misc_feature (3)..(368): NCBI GI: 171679249 Blast Desc: protein product [Podospora anserina] gi|170939250|emb|CAP64478.1| protein product [Podospora anserina]
  misc_feature (21)..(373): NCBI GI: 226291562 Blast Desc: F-box domain-containing protein [Paracoccidioides brasiliensis Pb18]
  misc_feature (1)..(71): NCBI GI: 46139813 Blast Desc: FG11421.1 [Gibberella zeae PH-1]
  misc_feature: Useful for introducing or modulating the production of volatile compounds
MDQIPPEILYVIVSFLDVDAIQNVRLVNRKLADVGAAYMLPEVTFYMHSEELARLQAISQHPVFSKHVHSLTYFAHALDSPKVSWREFLRDYKLELRWNSRLKKLNYHPNQLMAEYKKYCDAAAKQDLIMNSEADITLLKEILPRFPKLESMTMSSGGRFYEGSHHNTKRHKPLDDILRGSTFHSLNPEGSRPLEALLVANAEAKCALKSFRAGFLHWKFFKRPEWVLRRMFTPLANLTSIEISISLDSGEEETDRFHDHDSLVKCQRVMSKGSLRHILKSMPHLQTICVELLDMDVDELTKGATLADIIEPGFHWPHLQELALGGLSCDRKELMDCLRRHKDTLQVLCLRDMALKSSSWCKLLPDIRKKMNLADACICGVLYGYREADQFGDAALEYWDLSVPEVGDHDMRDSVNVYCRHGGTEYPDELPLSNMVVTKYYEEYVRKHYRDDEDDDDGDAVLNAEDQDDQNWEDVSDEEEISDEMSTGSLDSLEMQAAFTQTVMGDDYMMGLMNASMAMDPMWPNWGGYDTDDYMMDQWSDRDDEDVYDDEDEEEEGVSNMWENILTVRTSALASAPGPQWMTTWEENQNGASAST

SEQ ID NO: 28801 - DNA, 2457 bp, Muscodor strobelii
  misc_feature: SGI EST ID NO. CUFF.67969.1
  misc_feature: Variant of the nucleotide sequence at SEQ ID NO 28799
ttataggcatatgcgcatccttcccaccgggtcgttatctagcaagggtgttcatgcagcttcccagcaggtgctgtatctcctgtcgatgaaccaacggaatcttaaaaatcaccgtgccctatttcatcatctctttaccacgggattcctcgactccatgtccaatctcaaatctctcataccatcatcatacgattctcccaggcgtcgcatgaggtgattgattcgccgccgccatggaccaaatccccccggagatactctacgtgatcgtctcgttcctagacgtcgatgcaattcagaatgtccgactcgtgaatcgcaaattggcagatgtaggcgcagcctacatgctgcctgaagtcacattctacatgcactcggaagagctcgcacgtctacaagccatatcacagcaccctgtgttctctaaacatgtccactcactcacatatttcgctcacgccctcgactcacctaaagtcagctggcgtgaatttctgcgagattacaaactagagttacgatggaacagtcgtctgaagaagctcaattatcatcccaatcaacttatggctgagtataagaaatattgcgatgcggcagcaaagcaggatcttatcatgaacagtgaggcagatatcactctgctcaaggaaattctgccgagattccccaagttggagtcgatgacgatgtcctcgggcgggagattctatgaaggcagtcatcataatacaaaacgccacaaacctttagatgacatattgcgagggagcacctttcacagcctcaatcccgaaggcagccgaccacttgaggctttattggtggccaatgccgaggcgaaatgcgccttgaagagctttcgcgcaggcttcttacactggaaattctttaagcgacccgaatgggtcctccggcgcatgttcacaccactggccaaccttacgtctatcgaaatcagcatcagcctcgactcgggagaagaggagacagacaggttccacgaccatgactcactcgtcaaatgtcagcgggtcatgtcaaagggtagtctgcggcatattctcaagtcgatgccacacctgcaaacaatttgcgtggagttactcgatatggacgttgatgagttgaccaagggagcgacattggccgatatcattgaaccgggcttccattggcctcatcttcaggagttggcccttggcggcttatcgtgtgaccggaaggagctgatggactgtttaaggcgacacaaggacacccttcaagtattatgcctacgagacatggcgctaaagtcgagttcttggtgcaaactactgccggatatccggaagaagatgaaccttgctgatgcatgcatttgcggggtgctctacgggtatcgcgaggctgaccagttcggcgacgcagcgcttgaatactgggatctatcagtgcctgaagtcggagatcatgacatgagggattcggtcaacgtctattgtcgacatggcggaaccgagtatccggacgagcttcccctcagcaacatggtcgtgacgaagtactacgaagagtacgtgcgcaagcattatcgcgatgacgaggacgatgatgatggcgacgctgtgctcaacgccgaggaccaagacgatcagaattgggaggatgtgtcggacgaggaggagatcagtgacgagatgagcacggggtcgttggactcgctagagatgcaagcggccttcacacagactgtcatgggcgacgattacatgatggggctgatgaatgcttcgatggcgatggacccgatgtggccaaactgggggggttacgatacggatgactatatgatggaccagtggagcgatcgcgacgatgaggatgtgtacgacgacgaagatgaggaagaggaaggtgtcagcaacatgtgggaaaatatactgacggtgcggacgagtgccttggcatctgcaccagggccgcagtggatgaccacatgggaggagaaccagaacggtgcgagtgcgagtacctagcgaggggccagggcctgccgcgttggtggctgatgcatggacaggtgttggaagagtgacgagagagtgacaagatggtggtgaagaagctcaagatgtgatgcttaaccatccattgcatttcaacaattctctgagcaccgagaagatttcgagaaatgggttactgatgcatgtctcactttgttaccccgctgccgtacatgcgtgcaatgcaatgtgacacacacttcgagtgacgggagactgggcttacatgacgatcattgtctactgcaggttcccttgacaggctttctagattaaatcggtgatccaattgaggaatacaattaggtagaggcgatgagacttaggcttctatcttatggtaagaggcatatgcagctcgatagattgatgattctgatgatgaatttggtgctca

SEQ ID NO: 28802 - DNA, 1407 bp, Muscodor strobelii
  misc_feature: SGI cDNA ID NO. 569882
  misc_feature: Encodes the peptide sequence at SEQ ID NO 28803
atggatccggtcgagaatctcttcagcaagcttccagaccctgtggctgacggcgttgcacacgaggaggaaatctgtcgtatcctcaaatccgtgttgcctaacacgcttcttcaatcttctgatcctgactgcgttttcatctctaagagattgcaatctttccaggattcccagattgtagagagatggcatggcgggcttggtcattgcgccgttgccgggcctatccctgagaatggctcagcaaagtctcgacacctgaaattccatgcttgggtttcacggggccgcaaagatgaggacaaccccttcaaagacagccagtcttctcacattaaatcggccaacgaccacgcattcctgcccgcagaatcaagagatcttcagacatgtgctcactgcggtaaagcgggcgccgtgagtggttgcactggctgccgggttgagacgggttcccacatcgtcatgaagacggtatattgcgacaagacttgtcagaaacagcattggaacgagcacagggtgcagtgtgtggcaagacgaaagatttctcgcgccgcatcgttgctcctcgatttaatcattatgctgcagaagaacgcatggatgggccagacaatcgtcaacaccttcgagcaaaacggtatcatgtacatcaagcgcgaggacttagaggaacgagcgctccagggatgccctttggttgacgttttcccgatccacaaagctgcatgttcagaacatgctctcgccgcaatgatggacagcgagtgcgattcgatcatgagttgctgtcaaggtctcataaaactccttctggaacctgcttgtcaaacactagatgtcgtcactgccgtttacggctggcgtgaggttatagcgccatgggagagttggaagagtcatcgtgtctccagtgatctgaaattattttctctggaacatactctgcgacaaataagcatgggcactgtgtcgaccaagcagtacataagaatttgtgactcacaaaagttatcgctcgcgcagaaaatgcagacagctatccaagacaagatgcaagagtccaagatctcatctgtggctgagctactggtgctcccagacaccacgttcagctcatacaggcaagatgtattggcaagcgcagaaaaggccctcagcgatggccttctcgagatccgtcaatcaaagattggccttttgtatttcgacgcgggtgggcattggcaggtcaccacatcaaaagagcaggccaaggctctgagaagagtctggctaagcaaagacgacatgaaaaaggcgaaacaggaaaagaaagaccctcgttcaatctacctactgcgatgcaacaatgaggagcgtagacaaaggttcaaggacgagggcctcgatatgccttga

SEQ ID NO: 28803 - protein, 468 aa, Muscodor strobelii
  misc_feature: SGI Peptide ID NO. 569882
  misc_feature (132)..(178): Pfam Id: PF01753 Pfam Desc: MYND finger
  misc_feature (76)..(190): NCBI GI: 171676728 Blast Desc: protein product [Podospora anserina] gi|170936431|emb|CAP61088.1| protein product [Podospora anserina]
  misc_feature (124)..(284): NCBI GI: 256735452 Blast Desc: NECHADRAFT_30705 [Nectria haematococca mpVI 77-13-4]
  misc_feature (127)..(275): NCBI GI: 169781864 Blast Desc: [Aspergillus oryzae RIB40] gi|83774137|dbj|BAE64262.1| protein product [Aspergillus oryzae]
  misc_feature (130)..(189): NCBI GI: 159474880 Blast Desc: [Chlamydomonas reinhardtii] gi|158275562|gb|EDP01338.1| [Chlamydomonas reinhardtii]
  misc_feature (2)..(245): NCBI GI: 261352871 Blast Desc: [Verticillium albo-atrum VaMs.102]
MDPVENLFSKLPDPVADGVAHEEEICRILKSVLPNTLLQSSDPDCVFISKRLQSFQDSQIVERWHGGLGHCAVAGPIPENGSAKSRHLKFHAWVSRGRKDEDNPFKDSQSSHIKSANDHAFLPAESRDLQTCAHCGKAGAVSGCTGCRVETGSHIVMKTVYCDKTCQKQHWNEHRVQCVARRKISRAASLLLDLIIMLQKNAWMGQTIVNTFEQNGIMYIKREDLEERALQGCPLVDVFPIHKAACSEHALAAMMDSECDSIMSCCQGLIKLLLEPACQTLDVVTAVYGWREVIAPWESWKSHRVSSDLKLFSLEHTLRQISMGTVSTKQYIRICDSQKLSLAQKMQTAIQDKMQESKISSVAELLVLPDTTFSSYRQDVLASAEKALSDGLLEIRQSKIGLLYFDAGGHWQVTTSKEQAKALRRVWLSKDDMKKAKQEKKDPRSIYLLRCNNEERRQRFKDEGLDMP

SEQ ID NO: 28804 - DNA, 1962 bp, Muscodor strobelii
  misc_feature: SGI cDNA ID NO. 569883
  misc_feature: Reduced expression when VOC is produced
  misc_feature: Encodes the peptide sequence at SEQ ID NO 28805
atggccgtcacttggcgttcggggcccgtcattgccccccgcggtcagagcctgtcccatggcgccatcgccggtgctgttgtcgggagtgtgctgggggccagtatattactattgatccttggatttgtgtactttcgctataagcggatggcgagggaagctcatgctgaagaggcattgtctgcacccaaggccgaacccacatattcatcctggcaaggcgtcttcccacagcagcaggccgctgcctatcagggcggccgtcctccgtcctccaaggatgaaaggcctgatggccccgttcccgccttaccggtggattcaagttcgccgtcatcactcacaacgcctcatggagaagactggttgagaaacaacacaatctatcctccacccccgtctggccacgatattctaccacaagaattcaataactatcctccttcccggcaacagacctttccggtcacgtcggagcctacggcgatagaacctttggatcatgcctcgacagcacctgctgctgcaaacttgagctactatgatatgagggtatccatggattctgacccagtacaagcagccagtggcccctctaggcagatgagcgatatgtatgaagcgcaaaagaaagcggccgacgagtaccgaagaaacaattcattccccaagcgggtttgggataatgttactcagcgatggtcttcgatgcgcagctcaacccggacttctggagacggtacgcaatctacatcaggccaaaatgtacgaattaaaagagagccaggtttggagtcaccgcgagatttggactggcaaggccaacttgaagctccccaaatcttccaagagccagcagatatgaccgagagcaatgcagttccaggcgcagaaggccaacagcagcagcagcgacgaccaggccgctcaacacgtgatacccaatatggagaacgtataccgcatcaggattcgagcattatggagtctacagaaagagaccctgaactgccgtcatctgtcattcgaactgactccacatttcagtcttggttacctcaggagtcacctcccgaggctgcgccccacagtccagccaaagaacgccttaagagtccagacatcccagagcccatggatattgatggccttgcaatggaacattatattggtcgccaatctcctttctcgcattcgccgccgctgccctcggagtcattcgttaatcccatggccatcttgcatcccaccaacgccgtcgaacaagacgcctataatgtataccagatcaaacactcagcatcgccgcccgccatgcaacaaccgccgccagaaattgtaactcggagagcaacccagcaggagaccgttgagtctcctccgcctggtgacgaggacgatgccatgggagagtttcttgacctacccagtgatgatgaagatcgtcgtgggtctagcgagtcatacgaatatcctatgaccccggggcagagttcaactgctggctactcaagtggcagaactcctcttactcatccgacagtctcaccgtcgccaaatccatccggacccggttctccgcctatcaagcatgaaccacaatatatgtcgccacaagacaattcgaagcccctgaccactccggctgtattaatatgtcccacgtgtcagaggacgtttgaccaaattcacaaactaaaccaccataagcgttaccatgaccgtagtcacgaatgtacttgggaggggtgtgacaagaagtttggtactaagactcaccttgaccgacatatcaacgatcgccacctgaaaatgaaatcatatcattgcacagaaccgtcgtgcccgtacttcaagggtggcaaatctttcccccgaaaggacaactggaggcggcacatgacgaagaaacacggcacaacatcgcagcagttagagagcatggacattgagccttag

SEQ ID NO: 28805 - protein, 653 aa, Muscodor strobelii
  misc_feature: SGI Peptide ID NO. 569883
  misc_feature (578)..(603): Pfam Id: PF00096 Pfam Desc: Zinc finger, C2H2 type
  misc_feature (505)..(642): NCBI GI: 171684815 Blast Desc: protein product [Podospora anserina] gi|170942368|emb|CAP68020.1| protein product [Podospora anserina]
  misc_feature (535)..(639): NCBI GI: 149210249 Blast Desc: MGCH7_ch7g602 [Magnaporthe grisea 70-15] gi|86196557|gb|EAQ71195.1| MGCH7_ch7g602 [Magnaporthe grisea 70-15]
  misc_feature (535)..(639): NCBI GI: 145609956 Blast Desc: MGG_02845 [Magnaporthe grisea 70-15] gi|145017339|gb|EDK01702.1| MGG_02845 [Magnaporthe grisea 70-15]
  misc_feature (555)..(652): NCBI GI: 256733646 Blast Desc: NECHADRAFT_36483 [Nectria haematococca mpVI 77-13-4]
  misc_feature (550)..(646): NCBI GI: 46128537 Blast Desc: FG08646.1 [Gibberella zeae PH-1]
  misc_feature (503)..(650): NCBI GI: 116193289 Blast Desc: CHGG_06362 [Chaetomium globosum CBS 148.51] gi|88182275|gb|EAQ89743.1| CHGG_06362 [Chaetomium globosum CBS 148.51]
  misc_feature (512)..(639): NCBI GI: 256723657 Blast Desc: NECHADRAFT_86719 [Nectria haematococca mpVI 77-13-4]
  misc_feature (545)..(634): NCBI GI: 195388958 Blast Desc: GJ23725 [Drosophila virilis] gi|194151231|gb|EDW66665.1| GJ23725 [Drosophila virilis]
  misc_feature (547)..(651): NCBI GI: 195349402 Blast Desc: GM15150 [Drosophila sechellia] gi|194122839|gb|EDW44882.1| GM15150 [Drosophila sechellia]
  misc_feature (552)..(651): NCBI GI: 281361910 Blast Desc: poils au dos [Drosophila melanogaster] gi|66571268|gb|AAY51599.1| IP01015p [Drosophila melanogaster] gi|272477013|gb|AAF55301.2| poils au dos [Drosophila
  misc_feature: Useful for introducing or modulating the production of volatile compounds
MAVTWRSGPVIAPRGQSLSHGAIAGAVVGSVLGASILLLILGFVYFRYKRMAREAHAEEALSAPKAEPTYSSWQGVFPQQQAAAYQGGRPPSSKDERPDGPVPALPVDSSSPSSLTTPHGEDWLRNNTIYPPPPSGHDILPQEFNNYPPSRQQTFPVTSEPTAIEPLDHASTAPAAANLSYYDMRVSMDSDPVQAASGPSRQMSDMYEAQKKAADEYRRNNSFPKRVWDNVTQRWSSMRSSTRTSGDGTQSTSGQNVRIKREPGLESPRDLDWQGQLEAPQIFQEPADMTESNAVPGAEGQQQQQRRPGRSTRDTQYGERIPHQDSSIMESTERDPELPSSVIRTDSTFQSWLPQESPPEAAPHSPAKERLKSPDIPEPMDIDGLAMEHYIGRQSPFSHSPPLPSESFVNPMAILHPTNAVEQDAYNVYQIKHSASPPAMQQPPPEIVTRRATQQETVESPPPGDEDDAMGEFLDLPSDDEDRRGSSESYEYPMTPGQSSTAGYSSGRTPLTHPTVSPSPNPSGPGSPPIKHEPQYMSPQDNSKPLTTPAVLICPTCQRTFDQIHKLNHHKRYHDRSHECTWEGCDKKFGTKTHLDRHINDRHLKMKSYHCTEPSCPYFKGGKSFPRKDNWRRHMTKKHGTTSQQLESMDIEP

SEQ ID NO: 28806 - DNA, 3290 bp, Muscodor strobelii
  misc_feature: SGI EST ID NO. CUFF.67944.0
  misc_feature: Variant of the nucleotide sequence at SEQ ID NO 28804
attttccctctctaatgctccgatcaggttttgagtgcgtacctagcacctccctctcacccgcgctcgtctcatttgcttgctgacaacaattgctccgtgaggctgaagagctggaggccatcaatattcaattaactgaacgtcattccatcccatccccttacccgaccacatcatgctcgtcgccaatctgccattctctctttgctagcacccggaggcccacgggcacttaccggccactcacttacctctagctgcgtgtgtgtctctcactagccccaatcggcggcctcgccggctcatggtatcgattcgcagcacctcacctcaactaccgcgcaatcatcctatctttcaattgcttaccggcgcagtcatcatctagatttccctggggtagcacggcctcactggtgtatcgtttctcgtttggagctgcttaatagtctgcaaagttataatcaatgaacctgaacgtcatcgtgatcctcttgaagagcacgcacgggtatcagcctagtctacctgccacttcaggtcaaccacttcatatgccataatagcaacgcgtttactggagtcatctgcactaagacatagatctcttccaggccttccgccttagacttgcacgcatagtctatcagtcatggccgtcacttggcgttcggggcccgtcattgccccccgcggtcagagcctgtcccatggcgccatcgccggtgctgttgtcgggagtgtgctgggggccagtatattactattgatccttggatttgtgtactttcgctataagcggatggcgagggaagctcatgctgaagaggcattgtctgcacccaaggccgaacccacatattcatcctggcaaggcgtcttcccacagcagcaggccgctgcctatcagggcggccgtcctccgtcctccaaggatgaaaggcctgatggccccgttcccgccttaccggtggattcaagttcgccgtcatcactcacaacgcctcatggagaagactggttgagaaacaacacaatctatcctccacccccgtctggccacgatattctaccacaagaattcaataactatcctccttcccggcaacagacctttccggtcacgtcggagcctacggcgatagaacctttggatcatgcctcgacagcacctgctgctgcaaacttgagctactatgatatgagggtatccatggattctgacccagtacaagcagccagtggcccctctaggcagatgagcgatatgtatgaagcgcaaaagaaagcggccgacgagtaccgaagaaacaattcattccccaagcgggtttgggataatgttactcagcgatggtcttcgatgcgcagctcaacccggacttctggagacggtacgcaatctacatcaggccaaaatgtacgaattaaaagagagccaggtttggagtcaccgcgagatttggactggcaaggccaacttgaagctccccaaatcttccaagagccagcagatatgaccgagagcaatgcagttccaggcgcagaaggccaacagcagcagcagcgacgaccaggccgctcaacacgtgatacccaatatggagaacgtataccgcatcaggattcgagcattatggagtctacagaaagagaccctgaactgccgtcatctgtcattcgaactgactccacatttcagtcttggttacctcaggagtcacctcccgaggctgcgccccacagtccagccaaagaacgccttaagagtccagacatcccagagcccatggatattgatggccttgcaatggaacattatattggtcgccaatctcctttctcgcattcgccgccgctgccctcggagtcattcgttaatcccatggccatcttgcatcccaccaacgccgtcgaacaagacgcctataatgtataccagatcaaacactcagcatcgccgcccgccatgcaacaaccgccgccagaaattgtaactcggagagcaacccagcaggagaccgttgagtctcctccgcctggtgacgaggacgatgccatgggagagtttcttgacctacccagtgatgatgaagatcgtcgtgggtctagcgagtcatacgaatatcctatgaccccggggcagagttcaactgctggctactcaagtggcagaactcctcttactcatccgacagtctcaccgtcgccaaatccatccggacccggttctccgcctatcaagcatgaaccacaatatatgtcgccacaagacaattcgaagcccctgaccactccggctgtattaatatgtcccacgtgtcagaggacgtttgaccaaattcacaaactaaaccaccataagcgttaccatgaccgtagtcacgaatgtacttgggaggggtgtgacaagaagtttggtactaagactcaccttgaccgacatatcaacgatcgccacctgaaaatgaaatcatatcattgcacagaaccgtcgtgcccgtacttcaagggtggcaaatctttcccccgaaaggacaactggaggcggcacatgacgaagaaacacggcacaacatcgcagcagttagagagcatggacattgagccttagcctaagttcacttatttttccgttatatcatgtatgtatgtatgtatacccctttcgcacatgatggcgttggcattttggcgagatcacaggcgtctccgctctccatcgttaggatatttacctgtcgcgtggaacattggacattgctgtttagcaatataaaaaggcattgggaattataagcgtatgggattttctctcttttggagcgtttttgtaacatggacggagtgcacagaggcatgtccgtggattctctgtgatcaacatagcgtttcgttgaacactcagaggctacacaaaatttaaacacatgttccgaaacacaggttatcatgtctcacgtagtgagagctggacgctgtataggggtcgccgatagggtgatatcggtgcaaccttcgcttgccctgctctggaaagagcaaacaaggatgagtcgtgttatcttcatgcatccacaattgcactttctccgcaggcatgcattttctggaaaattggtgaagattgccgttgcacaccccgaatactcaaaagttacgagatcgcttcaggttcttccctcccctcttcaatctgtagtccttgtccttacctttatgcagctgtgttgaaacatacaaggcaagttcattgagcgtccatttgacagataattttgtatccg

SEQ ID NO: 28807 - DNA, 1710 bp, Muscodor strobelii
  misc_feature: SGI cDNA ID NO. 569884
  misc_feature: Reduced expression when VOC is produced
  misc_feature: Encodes the peptide sequence at SEQ ID NO 28808
atgaaggagaatcttgtagacttaggaaatgatctaacaatacgcatcggtcgacaagatgaggttttgaaagacctaatacaagggcttggagagagccaaaagaaagttggagcggtgtggatggcagcggaggaaggctacgaagaggaacaagctgaaaaagctgtattagaggtatgctctggtcttggtgtcgaatttcgtacctgggttgatgagaaatactttatggacgaccgagatctcagactggacaccccccaagatctgccggatgtcttcactacctaccgaaagatgatcgagcctttacgtgaacgcccacgagcaaccaaacccaggccatctttcaactcgctccctcaagctattgaaagctcggcgatacctacacaacaacaccccttcgatatcccatcttcatttgcagctttcgaaaacgctctccttcgcccattggcttctgcgttgccgaaagctgctcaagcagataccagtaaatctgctcatccatttcagggtggcgaggacaatgccttgaaacggcttgactacctgatcacttcgggtattgccgtcgagtataggagctcacgcaatggcttgatagggaccgatttcagtactaagctgtcggcttatcttgcgcaaggttgcatcactgctcgcctcatccatgaaaaactcatgcatctagaagatggaacagattcgaaatacactaacagcagcgggttcggccaaggagaatgtgaagggaccaaggctattcgattcgaattactgtggcgtgactatatgagactctgcacgcgtaaattccgtgtcaagctcttcaatctttatggatttcgcggtgattactctcatcagtggaagccaggacaaaaagaagatgctgattcggtaccctactccacgtgccgcctctctcctactttgcgccgagtacttgagggttcgaccggacaaagcttgattgatgcttcgcaacgagagctcatacatacagggtacacgtccaaccgagcacgacaaaacgtgggaagcttcctagcaaaacacctaaatatcgactggcgctacggtgctgaatggtatgagatgatgctggtagattacgacgtaaactcgaattgggcaaattggcaatacgtggcaggagtaggcaacgatcctcggggcgaagctcggattttcaacccagtcaagcaagcttttgattatgacaagaccggcgaatatgctcgattgtggattccagagattcggaaagtggagaaactagagaacttgtttcagccttggacgacagctcaggaagactgggagcgatttggtctgaagggcgtcaatttagccgaagacccggtgaagaagattgacttctccgtcgaagggaagcccaaaagctcgcgaagaccatttgttcgtcgacgtggccagaatcaaagcaacggaaacggctatgtgaatacgaagccaacggggggcgataaagtgccacccaaccagccgagaaactattcgacaagaacggactcgaatggcggtccgcgtggtggattccgcgggggacgtggatatgggcgtgggcgagggaatgatcgaggcccgaggggcggatttcaaggtggacgcggagggtggcagcaatatcagggacaagcatacggatggcctcagtctcacaacattgcccattag

SEQ ID NO: 28808 - protein, 569 aa, Muscodor strobelii
  misc_feature: SGI Peptide ID NO. 569884
  misc_feature (174)..(451): Pfam Id: PF03441 Pfam Desc: FAD binding domain of DNA photolyase
  misc_feature (320)..(429): Pfam Id: PF03441 Pfam Desc: FAD binding domain of DNA photolyase
  misc_feature (1)..(477): NCBI GI: 261352169 Blast Desc: cryptochrome DASH [Verticillium albo-atrum VaMs.102]
  misc_feature (1)..(490): NCBI GI: 74696815 Blast Desc: CRYD_NEUCR RecName: Full= cryptochrome DASH, mitochondrial; Flags: Precursor gi|38567324|emb|CAE76612.1| related to deoxyribodipyrimidine photo-lyase [Neurospora crassa]
  misc_feature (1)..(490): NCBI GI: 164428444 Blast Desc: NCU00582 [Neurospora crassa OR74A] gi|157072149|gb|EAA36486.2| conserved [Neurospora crassa OR74A]
  misc_feature (1)..(477): NCBI GI: 256733708 Blast Desc: NECHADRAFT_22205 [Nectria haematococca mpVI 77-13-4]
  misc_feature (1)..(474): NCBI GI: 149210621 Blast Desc: MGCH7_ch7g783 [Magnaporthe grisea 70-15] gi|86196738|gb|EAQ71376.1| MGCH7_ch7g783 [Magnaporthe grisea 70-15]
  misc_feature (1)..(474): NCBI GI: 39971071 Blast Desc: MGG_03002 [Magnaporthe grisea 70-15] gi|145017156|gb|EDK01519.1| MGG_03002 [Magnaporthe grisea 70-15]
  misc_feature (1)..(466): NCBI GI: 154305828 Blast Desc: BC1G_08145 [Botryotinia fuckeliana B05.10] gi|150853030|gb|EDN28222.1| BC1G_08145 [Botryotinia fuckeliana B05.10]
  misc_feature (1)..(466): NCBI GI: 156055622 Blast Desc: SS1G_05163 [Sclerotinia sclerotiorum 1980] gi|154702947|gb|EDO02686.1| SS1G_05163 [Sclerotinia sclerotiorum 1980]
  misc_feature (1)..(466): NCBI GI: 189200290 Blast Desc: cryptochrome DASH [Pyrenophora tritici-repentis Pt-1C-BFP] gi|187983581|gb|EDU49069.1| cryptochrome DASH [Pyrenophora tritici-repentis Pt-1C-BFP]
  misc_feature (1)..(481): NCBI GI: 46129334 Blast Desc: FG08852.1 [Gibberella zeae PH-1] gi|97047717|sp|Q4I1Q6.1|CRYD_GIBZE RecName: Full= cryptochrome DASH
  misc_feature (176)..(469): SWISSPROT Homolog: EC 4.1.99.3 Deoxyribodipyrimidine photo-lyase
  misc_feature: Useful for introducing or modulating the production of volatile compounds
MKENLVDLGNDLTIRIGRQDEVLKDLIQGLGESQKKVGAVWMAAEEGYEEEQAEKAVLEVCSGLGVEFRTWVDEKYFMDDRDLRLDTPQDLPDVFTTYRKMIEPLRERPRATKPRPSFNSLPQAIESSAIPTQQHPFDIPSSFAAFENALLRPLASALPKAAQADTSKSAHPFQGGEDNALKRLDYLITSGIAVEYRSSRNGLIGTDFSTKLSAYLAQGCITARLIHEKLMHLEDGTDSKYTNSSGFGQGECEGTKAIRFELLWRDYMRLCTRKFRVKLFNLYGFRGDYSHQWKPGQKEDADSVPYSTCRLSPTLRRVLEGSTGQSLIDASQRELIHTGYTSNRARQNVGSFLAKHLNIDWRYGAEWYEMMLVDYDVNSNWANWQYVAGVGNDPRGEARIFNPVKQAFDYDKTGEYARLWIPEIRKVEKLENLFQPWTTAQEDWERFGLKGVNLAEDPVKKIDFSVEGKPKSSRRPFVRRRGQNQSNGNGYVNTKPTGGDKVPPNQPRNYSTRTDSNGGPRGGFRGGRGYGRGRGNDRGPRGGFQGGRGGWQQYQGQAYGWPQSHNIAH

SEQ ID NO: 28809 - DNA, 4395 bp, Muscodor strobelii
  misc_feature: SGI EST ID NO. CUFF.68102.0
  misc_feature: Variant of the nucleotide sequence at SEQ ID NO 28807
ccgcaacctgggctatgaacaccgagagatacacatactagatttagatcccggagcaacatagcagtcatggggcgaatgtttgaagaagcgacatctacagataagattctgtgtgtcttaaactcatccttctcacacctcaatgtacaataacactttgcgttacacctgttgtccaaactgttccaaccgatcctctgtaaatcctcacggccgtctctatatctctgtacactatacttcttgcgcgatacgaatcagaaaactttgaaacttcaacaaaaaatagtcggcaaaggaccccttgaagaaggtgtctaaacaaaaggttgtaatcaatcctaattctaaaagtgacttcgatcatttagttttcttcccttagcggtttgtttcatagacgggactgggtaattcgctcggctacggagtcttgacgttgatattcttttgaaactttgggttcgccccatggcaatctagatctatgaccgactagtgtagagtgttagatcacgtaacatcttgcaacccagctcaacacactgggacggctcttctgcggcggaaccttattccaacacttttagagcccggcacaacggtgttacattggcactatgtccgaacccaacgtcctcatatacatcgtacggcatgacctccgagtcgccgataacccaattctccaccatcttgccacaactgaccatggattcacacaccttttgccgctctgcgttattcctacctaccagatggaggtgtctggatttctggaagatggaaaagagtcaccgtttcctgaagccagaagtcgtcttggtgggttctggagatgcggaccacatcgcgcgcgtttcatcgcccaatcgatttggaacatgaaggagaatcttgtagacttaggaaatgatctaacaatacgcatcggtcgacaagatgaggttttgaaagacctaatacaagggcttggagagagccaaaagaaagttggagcggtgtggatggcagcggaggaaggctacgaagaggaacaagctgaaaaagctgtattagaggtatgctctggtcttggtgtcgaatttcgtacctgggttgatgagaaatactttatggacgaccgagatctcagactggacaccccccaagatctgccggatgtcttcactacctaccgaaagatgatcgagcctttacgtgaacgcccacgagcaaccaaacccaggccatctttcaactcgctccctcaagctattgaaagctcggcgatacctacacaacaacaccccttcgatatcccatcttcatttgcagctttcgaaaacgctctccttcgcccattggcttctgcgttgccgaaagctgctcaagcagataccagtaaatctgctcatccatttcagggtggcgaggacaatgccttgaaacggcttgactacctgatcacttcgggtattgccgtcgagtataggagctcacgcaatggcttgatagggaccgatttcagtactaagctgtcggcttatcttgcgcaaggttgcatcactgctcgcctcatccatgaaaaactcatgcatctagaagatggaacagattcgaaatacactaacagcagcgggttcggccaaggagaatgtgaagggaccaaggctattcgattcgaattactgtggcgtgactatatgagactctgcacgcgtaaattccgtgtcaagctcttcaatctttatggatttcgcggtgattactctcatcagtggaagccaggacaaaaagaagatgctgattcggtaccctactccacgtgccgcctctctcctactttgcgccgagtacttgagggttcgaccggacaaagcttgattgatgcttcgcaacgagagctcatacatacagggtacacgtccaaccgagcacgacaaaacgtgggaagcttcctagcaaaacacctaaatatcgactggcgctacggtgctgaatggtatgagatgatgctggtagattacgacgtaaactcgaattgggcaaattggcaatacgtggcaggagtaggcaacgatcctcggggcgaagctcggattttcaacccagtcaagcaagcttttgattatgacaagaccggcgaatatgctcgattgtggattccagagattcggaaagtggagaaactagagaacttgtttcagccttggacgacagctcaggaagactgggagcgatttggtctgaagggcgtcaatttagccgaagacccggtgaagaagattgacttctccgtcgaagggaagcccaaaagctcgcgaagaccatttgttcgtcgacgtggccagaatcaaagcaacggaaacggctatgtgaatacgaagccaacggggggcgataaagtgccacccaaccagccgagaaactattcgacaagaacggactcgaatggcggtccgcgtggtggattccgcgggggacgtggatatgggcgtgggcgagggaatgatcgaggcccgaggggcggatttcaaggtggacgcggagggtggcagcaatatcagggacaagcatacggatggcctcagtctcacaacattgcccattaggattggcatatcccggccgttgtccatcttcacccgccctcggtatacacgttattcaactcgaactaccctctatacgaataatgcccatgccttgacaaatggactggccagcgtgaagggccaatcaccccctttgtatcactaggttgcctcgtctcgatcggcttcttgggttgtagctattagatgtacgatatgtgtcacatagttaacggtagaccaagcttttatctcattgctcagatttggagtcaatgtaataactgataacgatcatcactagtcgagacggtgactgatcgatagagcttgcccatactagaggcacaggagtggcacagaagtaggcaagctttctaaattgaccagatgcgcaagggggtgacacaccactttttcgtgagcagtgttcgatggcacagagggcgtgatccttcagctcctaagaatgaaaataaccatgatacatatgtacagcttgggcgctatgaggtcaacacccggcccaattacacttatccgaacgccactctatgctaaaatatgccacgaagggccttctgagaatttaatctcgagctggaatgcctggcggctcataacttaaagccgttgaatggcccgcaaagacatggcagatggtttcttcgtcctgccatagtcaagtcctaggcattctacctctagaatccctcggcaagagggttgagctggatagccttaggcacaacaaacagcgccttggcctcgacacacaacttgcccttttccgtctgcatgctggcctgcgtccacagcttccgatcacttcttctcgatccatcagcagccaccgtttcgtcgccctctgtgacaacaggccgagagcggataatgtagaagttattggtgagggtgggggcacgatatgagaggtccaagttcgcggtgacaccggtgcgagcagggaagcgcaggatagcacaccgtcccatggtctcatccaacacggtcgcgatggcacccccatgcacgacgccgggccaccccgccaagccggcgccgaagtagacaacagtgacgacctcgccggtgccgacgttgtggaatatgcgctggaaagcaagaccagacgatccggccatgggaccactcgttatcctagtttgtgcatgggagatacggcccgctgcaggggtgcgcgaaacgccggcgtaggcgtcccagcttgtccaggacgggtctgcagacagctctttgactatggggagtgcggcacccgcggcctggatcttggcctgcaggtactggtcttcgtcggagccttgcgatggcaaggcgggcggcgccacggttagacggaggaaggttccgcctgtcgtgccgagcaagaggaagataatggcgtagtagaggccgcgcctccgccgcggcggtggtggaggttttgtctgtgttggtgagggaatttctggtgtgagaggagtggattccgtctgtgataaggtaggcacctccgcggacgtgcatcttgtcgtcgagaagccgtgctgcgtaggcactttgagggttggccaggccacgcgcggaattatcgggcgcaaggggccaattggcctgcacaatgccctgaagcacatgtgctgcgacggacggagcatggcgctcgtatctccagattggtcaggtcggagacgatgctcacgacagcgtcttcggcttgtgtgtacatcttcccccggcgatgtatcgcgccttaggtaatcatggtgtttgccagtagatctgcttatacgaatatatacgtgctacgcta

SEQ ID NO: 28810 - DNA, 957 bp, Muscodor strobelii
  misc_feature: SGI cDNA ID NO. 569885
  misc_feature: Encodes the peptide sequence at SEQ ID NO 28811
atgctccgtccgtcgcagcacatgtgcttcagggcattgtgcaggccaattggccccttgcgcccgataattccgcgcgtggcctggccaaccctcaaagtgcctacgcagcacggcttctcgacgacaagatgcacgtccgcggaggtgcctaccttatcacagacggaatccactcctctcacaccagaaattccctcaccaacacagacaaaacctccaccaccgccgcggcggaggcgcggcctctactacgccattatcttcctcttgctcggcacgacaggcggaaccttcctccgtctaaccgtggcgccgcccgccttgccatcgcaaggctccgacgaagaccagtacctgcaggccaagatccaggccgcgggtgccgcactccccatagtcaaagagctgtctgcagacccgtcctggacaagctgggacgcctacgccggcgtttcgcgcacccctgcagcgggccgtatctcccatgcacaaactaggataacgagtggtcccatggccggatcgtctggtcttgctttccagcgcatattccacaacgtcggcaccggcgaggtcgtcactgttgtctacttcggcgccggcttggcggggtggcccggcgtcgtgcatgggggtgccatcgcgaccgtgttggatgagaccatgggacggtgtgctatcctgcgcttccctgctcgcaccggtgtcaccgcgaacttggacctctcatatcgtgcccccaccctcaccaataacttctacattatccgctctcggcctgttgtcacagagggcgacgaaacggtggctgctgatggatcgagaagaagtgatcggaagctgtggacgcaggccagcatgcagacggaaaagggcaagttgtgtgtcgaggccaaggcgctgtttgttgtgcctaaggctatccagctcaaccctcttgccgagggattctag

SEQ ID NO: 28811 - protein, 318 aa, Muscodor strobelii
  misc_feature: SGI Peptide ID NO. 569885
  misc_feature (207)..(248): Pfam Id: PF03061 Pfam Desc: Thioesterase superfamily
  misc_feature (54)..(318): NCBI GI: 154300022 Blast Desc: BC1G_11200 [Botryotinia fuckeliana B05.10] gi|150856813|gb|EDN32005.1| BC1G_11200 [Botryotinia fuckeliana B05.10]
  misc_feature (78)..(318): NCBI GI: 156055604 Blast Desc: SS1G_05154 [Sclerotinia sclerotiorum 1980] gi|154702938|gb|EDO02677.1| SS1G_05154 [Sclerotinia sclerotiorum 1980]
  misc_feature (17)..(318): NCBI GI: 119467238 Blast Desc: thioesterase family protein [Neosartorya fischeri NRRL 181] gi|119405577|gb|EAW15528.1| thioesterase family protein [Neosartorya fischeri NRRL 181]
  misc_feature (41)..(318): NCBI GI: 70984663 Blast Desc: thioesterase family protein [Aspergillus fumigatus Af293] gi|66845465|gb|EAL85800.1| thioesterase family protein [Aspergillus fumigatus Af293] gi|159122622|gb|EDP47743.1| family
  misc_feature (76)..(318): NCBI GI: 255950966 Blast Desc: Pc22g23590 [Penicillium chrysogenum Wisconsin 54-1255] gi|211593267|emb|CAP99647.1| Pc22g23590 [Penicillium chrysogenum Wisconsin 54-1255]
  misc_feature (74)..(318): NCBI GI: 145247276 Blast Desc: An12g08360 [Aspergillus niger] gi|134080620|emb|CAK41286.1| protein product [Aspergillus niger]
  misc_feature (40)..(318): NCBI GI: 238499411 Blast Desc: thioesterase family protein [Aspergillus flavus NRRL3357] gi|220692693|gb|EED49039.1| thioesterase family protein [Aspergillus flavus NRRL3357]
  misc_feature (40)..(318): NCBI GI: 169778837 Blast Desc: [Aspergillus oryzae RIB40] gi|83772622|dbj|BAE62750.1| protein product [Aspergillus oryzae]
  misc_feature (41)..(318): NCBI GI: 121704056 Blast Desc: thioesterase family protein [Aspergillus clavatus NRRL 1] gi|119398436|gb|EAW08866.1| thioesterase family protein [Aspergillus clavatus NRRL 1]
  misc_feature (78)..(318): NCBI GI: 154280525 Blast Desc: conserved [Ajellomyces capsulatus NAm1] gi|150411254|gb|EDN06642.1| conserved [Ajellomyces capsulatus NAm1]
MLRPSQHMCFRALCRPIGPLRPIIPRVAWPTLKVPTQHGFSTTRCTSAEVPTLSQTESTPLTPEIPSPTQTKPPPPPRRRRGLYYAIIFLLLGTTGGTFLRLTVAPPALPSQGSDEDQYLQAKIQAAGAALPIVKELSADPSWTSWDAYAGVSRTPAAGRISHAQTRITSGPMAGSSGLAFQRIFHNVGTGEVVTVVYFGAGLAGWPGVVHGGAIATVLDETMGRCAILRFPARTGVTANLDLSYRAPTLTNNFYIIRSRPVVTEGDETVAADGSRRSDRKLWTQASMQTEKGKLCVEAKALFVVPKAIQLNPLAEGF

SEQ ID NO: 28812 - DNA, 1776 bp, Muscodor strobelii
  misc_feature: SGI cDNA ID NO. 569886
  misc_feature: Encodes the peptide sequence at SEQ ID NO 28813
atggcttatgaatatgcctttgtgcatctcaagtacaccattcccctggccggtgtcctaacattcatattaaagcctcttctaactcggcttgatctatgtaaggctctggctttggttgtcgtcgcattcacagctacattaccatgggactcgtatttaatacacagaggcatctggacttaccctccagatgccattattggaccacgcctttttggtattcccgccgaagagctgtttttcttcatcatacaaacttacataaccgccatgctatacatcctgctgaataagcctattcttcacgcacagtatctcaccaatgacaccgagtcttcaacacggactcgtcgcattaagtttattggtcagcttgccttggctgttgctaccctgactggagccgctcttgtgataaaaggaggacgaggcacgtatataggtctcattctagtatgggcatgcccatttgccctgcttacttggtcattgtcgggctctttcttgataaatctacccttggccaacatcgctattcccatccttgcacccactgcttatctctgggtggtggatgagctagccttgggccgtggaacctgggcaattgaatcaggaacaaagctgggatggtgtttatggggcagcctcgagttagaagaagccgttttctttttggcaacaaattcactcattgtctttggcatggttgcatgcgaccgggccctggctgtacttgatactttcccagagctatttgctggtcctcatgagactctgtctttgacgcctgcactgatgatcaaggcaaatatcataaatccggccaaatacgatatgactcgagttcagggtataagagaagcagtcagtacccttaggaggaaaagccgaagcttctaccttgccagttccgtctttcctggacgccttcgtattgatatggtcctgttatattcattctgtcgtgtcgccgatgatcttgtggatgagtcttccacagaggtcgaggctcaagactggatcaataagatcaagagctaccttgatgtggcgtatactccatctcttccagaaattcaaccggccgaagttgcgaccttcgtggaacaaatgtttccgtcacccataaagtccgccttcaagctcttaccaacccagctgctcccaagaaagcctctctacgaactattggaaggatttgaaatggacttgggcttcagtcactccgagttccccattgaaaacgaggcagatttacaaacatatgcgcaccgagttgcaagcacagtcggcgaactatgcctgtggctggtcttccatcacatccccacgaagctatccgaggaaaataagatgaaactaatacaagcggctctcaccatgggtcacgcccttcagtatgtaaatattgcgcgagacatacaagtcgacgccgagataggtcgcgtctacctaccgactggctggctcaaagaagaaagtttgacacctcaagatattctggccagccccaaacaaccaaaagcagaacagctcaggcagaggttactcgatctagcttttaaggaatactcaaggtcgaggccgacgatgaatctgcttcctggtgagattcgcggcccattgatagttgctgttgagagctacatggagataggccgcgttctaagggaaaagagcggcgtgccttcgaaaacgaagaaaggacgagcgactgtgcctcgttcgaggcgtttgtgggttgcttggagaaatctgcttacttcatga

SEQ ID NO: 28813 - protein, 591 aa, Muscodor strobelii
  misc_feature: SGI Peptide ID NO. 569886
  misc_feature (294)..(590): Pfam Id: PF00494 Pfam Desc: Squalene/phytoene synthase
  misc_feature (294)..(560): Pfam Id: PF00494 Pfam Desc: Squalene/phytoene synthase
  misc_feature (1)..(591): NCBI GI: 171684041 Blast Desc: protein product [Podospora anserina] gi|170941981|emb|CAP67633.1| protein product [Podospora anserina]
  misc_feature (3)..(588): NCBI GI: 585750 Blast Desc: PSY_NEUCR RecName: Full=Phytoene synthase; AltName: Full=Protein albino-2 gi|38567321|emb|CAE76609.1| geranylgeranyl-diphosphate geranylgeranyltransferase (AL-2)
  misc_feature (9)..(588): NCBI GI: 506623 Blast Desc: phytoene synthase [Neurospora crassa]
  misc_feature (1)..(588): NCBI GI: 189202724 Blast Desc: phytoene synthase [Pyrenophora tritici-repentis Pt-1C-BFP] gi|187984797|gb|EDU50285.1| phytoene synthase [Pyrenophora tritici-repentis Pt-1C-BFP]
  misc_feature (1)..(591): NCBI GI: 169595210 Blast Desc: SNOG_00339 [Phaeosphaeria nodorum SN15] gi|111070714|gb|EAT91834.1| SNOG_00339 [Phaeosphaeria nodorum SN15]
  misc_feature (1)..(588): NCBI GI: 46114448 Blast Desc: FG03066.1 [Gibberella zeae PH-1]
  misc_feature (1)..(588): NCBI GI: 18307500 Blast Desc: carotene cyclase [Gibberella fujikuroi]
  misc_feature (9)..(588): NCBI GI: 256723690 Blast Desc: NECHADRAFT_52106 [Nectria haematococca mpVI 77-13-4]
  misc_feature (39)..(588): NCBI GI: 164428447 Blast Desc: NCU00585 [Neurospora crassa OR74A] gi|157072150|gb|EAA36489.2| [Neurospora crassa OR74A]
  misc_feature (1)..(588): NCBI GI: 169780110 Blast Desc: [Aspergillus oryzae RIB40] gi|83773259|dbj|BAE63386.1| protein product [Aspergillus oryzae]
  misc_feature (3)..(588): SWISSPROT Homolog: EC 2.5.1.32 Phytoene synthase
MAYEYAFVHLKYTIPLAGVLTFILKPLLTRLDLCKALALVVVAFTATLPWDSYLIHRGIWTYPPDAIIGPRLFGIPAEELFFFIIQTYITAMLYILLNKPILHAQYLTNDTESSTRTRRIKFIGQLALAVATLTGAALVIKGGRGTYIGLILVWACPFALLTWSLSGSFLINLPLANIAIPILAPTAYLWVVDELALGRGTWAIESGTKLGWCLWGSLELEEAVFFLATNSLIVFGMVACDRALAVLDTFPELFAGPHETLSLTPALMIKANIINPAKYDMTRVQGIREAVSTLRRKSRSFYLASSVFPGRLRIDMVLLYSFCRVADDLVDESSTEVEAQDWINKIKSYLDVAYTPSLPEIQPAEVATFVEQMFPSPIKSAFKLLPTQLLPRKPLYELLEGFEMDLGFSHSEFPIENEADLQTYAHRVASTVGELCLWLVFHHIPTKLSEENKMKLIQAALTMGHALQYVNIARDIQVDAEIGRVYLPTGWLKEESLTPQDILASPKQPKAEQLRQRLLDLAFKEYSRSRPTMNLLPGEIRGPLIVAVESYMEIGRVLREKSGVPSKTKKGRATVPRSRRLWVAWRNLLTS

SEQ ID NO: 28814 - DNA, 1740 bp, Muscodor strobelii
  misc_feature: SGI cDNA ID NO. 569887
  misc_feature: Encodes the peptide sequence at SEQ ID NO 28815
atggagaaaggacttcgtaaaaaggtgatcgttgtagatctaggtgctggcgctggaggcattgcaacagcagcacgactagcgaaagccgggttctctgttacggttctagagaagaattcgttcacgggcggaagatgtagtttgatcacacatgaagggcataggtttgaccaaggcccatcgctactcttacttccaaagctatttcaggaagtattccacgatctcgacaccacaatggaggccgaaggcattgagttgctgcgttgtccgacgaattataacgtgtggttcgcagatggtgagaattttgagcttacgaccgatctcgcgcgtatgaagacgcaaattgagcgatatgagggcaaagacggtttcgcccgctacttggcttggctacgagaggcgcacgcgcattacgaactcagtgtttctgatgttttaagtcgtaatttcacgaacttctggcagttagccgcaccgaaattcgtccttacaggcctaaagttacaccctttgcatagtatatggggccgagcaagcaaatatttctggtctgagagattacgacgtgtcttcactttcgccacgatgtatatgggcatgagtcccttcgatgcgcccgccacatactctttgcttcagtacactgagcttgctgagggtatatggtatcctcgtggaggttttaatgtcgttctcgctgctttacagcgagtcggcgaaaggctgggtgttcagtaccgacttaacactcccgtcaagcaaattttgacgcattccgatggcaagactgcgtgtggtgtgcttctcgaatccggcgaaacgcttgatgcggatattgtagtcgtgaatgcggatctagtgtacgcctatagcaatttgttccctcagaccacatccagcatgcagaagcacagcagaaatcttcgccaaaaagatggatcttgcagttcgatttctttctactggagtcttaattgcaaggtccccgagctccagactcataacattttcctagcagatgaatatcgagattcatttgacgctattttcgatcgccagactctgccaagtgagccgagtttttacattaacgtacccagtcgcattgatcccacggccgcaccctcagaccgcgactccgtcattgcactcgtacccgttggccatcttctagaatcccgtggattctccgcctcggataaggagcaaggaatttcccgagaacaggattgggaagccttggtatctcgtgctcgatccgcagtcctttcaaccatcacagcacgaactggctgcgcacctatcgagtcatctataacaaatgagataattaacgatccatttacctgggagaacaaatttaacctcgacaagggttcaatactcggacttagccacagtttcttcaacgttctcgcttttcgacctcgcacaagggccaaggggctcgataacacatatttcgttggtgcgagcacacatccgggcacaggtgttcctatcgtacttgcgggctccaagataacgtctgagcagattttgcaagatttgaggatggacgtgccgtggaggggccgccctaaactcattcaggatgagggcgtgcctcaaaacgccatgacggggagcttggataggttgcaggaaccttatggaaaatctgctattgttgcattgcttttaacaatctggttatggtttgcattggcatattggcgtccatttttctag

SEQ ID NO: 28815 - protein, 579 aa, Muscodor strobelii
  misc_feature: SGI Peptide ID NO. 569887
  misc_feature (18)..(517): Pfam Id: PF01593 Pfam Desc: Flavin containing amine oxidoreductase
  misc_feature (8)..(515): Pfam Id: PF01266 Pfam Desc: FAD dependent oxidoreductase
  misc_feature (18)..(388): Pfam Id: PF01593 Pfam Desc: Flavin containing amine oxidoreductase
  misc_feature (8)..(45): Pfam Id: PF01266 Pfam Desc: FAD dependent oxidoreductase
  misc_feature (6)..(574): NCBI GI: 154293536 Blast Desc: BC1G_13907 [Botryotinia fuckeliana B05.10] gi|150845288|gb|EDN20481.1| BC1G_13907 [Botryotinia fuckeliana B05.10]
  misc_feature (26)..(574): NCBI GI: 156057219 Blast Desc: SS1G_04340 [Sclerotinia sclerotiorum 1980] gi|154702126|gb|EDO01865.1| SS1G_04340 [Sclerotinia sclerotiorum 1980]
  misc_feature (24)..(526): NCBI GI: 171683991 Blast Desc: protein product [Podospora anserina] gi|170941956|emb|CAP67608.1| protein product [Podospora anserina]
  misc_feature (26)..(576): NCBI GI: 261352172 Blast Desc: phytoene dehydrogenase [Verticillium albo-atrum VaMs.102]
  misc_feature (5)..(526): NCBI GI: 53748609 Blast Desc: phytoene dehydrogenase [Gibberella fujikuroi]
  misc_feature (1)..(519): NCBI GI: 256723691 Blast Desc: [Nectria haematococca mpVI 77-13-4]
  misc_feature (26)..(526): NCBI GI: 85114548 Blast Desc: phytoene dehydrogenase [Neurospora crassa OR74A] gi|117517|sp|P21334.1|CRTI_NEUCR RecName: Full=Phytoene dehydrogenase; AltName: Full=Phytoene desaturase; AltName: crassa
  misc_feature (7)..(570): NCBI GI: 1345837 Blast Desc: CRTI_CERNC RecName: Full=Phytoene dehydrogenase; AltName: Full=Phytoene desaturase gi|433145|gb|AAB86988.1| phytoene dehydrogenase [Cercospora nicotianae]
  misc_feature (31)..(568): NCBI GI: 189202718 Blast Desc: phytoene dehydrogenase [Pyrenophora tritici-repentis Pt-1C-BFP] gi|187984794|gb|EDU50282.1| phytoene dehydrogenase [Pyrenophora tritici-repentis Pt-1C-BFP]
  misc_feature (31)..(520): NCBI GI: 169595216 Blast Desc: SNOG_00342 [Phaeosphaeria nodorum SN15] gi|160701042|gb|EAT91837.2| SNOG_00342 [Phaeosphaeria nodorum SN15]
  misc_feature (33)..(375): SWISSPROT Homolog: EC 1.3.99.23 All-trans-retinol 13,14-reductase
MEKGLRKKVIVVDLGAGAGGIATAARLAKAGFSVTVLEKNSFTGGRCSLITHEGHRFDQGPSLLLLPKLFQEVFHDLDTTMEAEGIELLRCPTNYNVWFADGENFELTTDLARMKTQIERYEGKDGFARYLAWLREAHAHYELSVSDVLSRNFTNFWQLAAPKFVLTGLKLHPLHSIWGRASKYFWSERLRRVFTFATMYMGMSPFDAPATYSLLQYTELAEGIWYPRGGFNVVLAALQRVGERLGVQYRLNTPVKQILTHSDGKTACGVLLESGETLDADIVVVNADLVYAYSNLFPQTTSSMQKHSRNLRQKDGSCSSISFYWSLNCKVPELQTHNIFLADEYRDSFDAIFDRQTLPSEPSFYINVPSRIDPTAAPSDRDSVIALVPVGHLLESRGFSASDKEQGISREQDWEALVSRARSAVLSTITARTGCAPIESSITNEIINDPFTWENKFNLDKGSILGLSHSFFNVLAFRPRTRAKGLDNTYFVGASTHPGTGVPIVLAGSKITSEQILQDLRMDVPWRGRPKLIQDEGVPQNAMTGSLDRLQEPYGKSAIVALLLTIWLWFALAYWRPFF

SEQ ID NO: 28816 - DNA, 426 bp, Muscodor strobelii
  misc_feature: SGI cDNA ID NO. 569888
  misc_feature: Elevated expression when VOC is produced
  misc_feature: Encodes the peptide sequence at SEQ ID NO 28817
atgcaactatcttatctctttgtcgctatcttcgcggcatttgtcactgcgctcccgaaaaataccgacgtgcctctcacacttgaaaaacgcgatgcacccatttgcgccgggtccatcaacgtgggtgcaatatcgaacaaagctttgacggctgattgccgtgcaatgctggcgcggaacatatctacagcgcagctttggacaggcgccaagtttcaaggagatgctggcgaggtggttcagctcatgaagtcaggtagctgcgcgctttggattggtggcactggtatcttcgccctccaggatatgttcaatgttgtccagtacagcatcgaccatttttccacagccggcaagaccggggccaacggaatcaagaagtgctctggcggaacggtgaactggactgttggtcattcttaa

SEQ ID NO: 28817 - protein, 141 aa, Muscodor strobelii
  misc_feature: SGI Peptide ID NO. 569888
  misc_feature: Useful for introducing or modulating the production of volatile compounds
MQLSYLFVAIFAAFVTALPKNTDVPLTLEKRDAPICAGSINVGAISNKALTADCRAMLARNISTAQLWTGAKFQGDAGEVVQLMKSGSCALWIGGTGIFALQDMFNVVQYSIDHFSTAGKTGANGIKKCSGGTVNWTVGHS

SEQ ID NO: 28818 - DNA, 946 bp, Muscodor strobelii
  misc_feature: SGI EST ID NO. CUFF.67965.0
  misc_feature: Variant of the nucleotide sequence at SEQ ID NO 28816
tataaatactatcagatcactttcatcgtattgtgaatttttacttcgtcagtcattcacttttctcacctagtcattccttacttcgcgatcttcgcattactctcctttaagacgtcgttctatcaacatactccgatacaaatcccattcgccactgagatacacgtatatctcttaatcaataactattaatatcgccatccattcaaccctttcaaaatgcaactatcttatctctttgtcgctatcttcgcggcatttgtcactgcgctcccgaaaaataccgacgtgcctctcacacttgaaaaacgcgatgcacccatttgcgccgggtccatcaacgtgggtgcaatatcgaacaaagctttgacggctgattgccgtgcaatgctggcgcggaacatatctacagcgcagctttggacaggcgccaagtttcaaggagatgctggcgaggtggttcagctcatgaagtcaggtagctgcgcgctttggattggtggcactggtatcttcgccctccaggatatgttcaatgttgtccagtacagcatcgaccatttttccacagccggcaagaccggggccaacggaatcaagaagtgctctggcggaacggtgaactggactgttggtcattcttaaattctttctcctatactaaaagccaatgtttgaaatttgaggatttcaaatctacacaattaatgcggttgaggagggcgacttgacttggcggtctgaggacgcagtgcgagatgggtttatttcaatgtcaaaacttatcacatactcaacaataacagcagtcaattttaatacaccgtcgagccgtcgtaagcgcaattttgaattacataagtaaccattgtatctatataaaatcattatcgctatctaccctaaagagaaaataaacggaaggggataaactctagaaaaa

SEQ ID NO: 28819 - DNA, 2604 bp, Muscodor strobelii
  misc_feature: SGI cDNA ID NO. 569889
  misc_feature: Reduced expression when VOC is produced
  misc_feature: Encodes the peptide sequence at SEQ ID NO 28820
atgcaagccagccaaccagccccctctcgagagctcgcgaccggcgaatcaggagctgcgcgagtcctgcgcctcgcggcatctccagatctcctcattagtcacgatatcttgcgcctcggtatcgcagcattcgccaggactattattgacgacttcacagctatgtctctgcaggtgggaggcagcggggcccgagggcgttcgaaatcgcccgctgcacgcgaccgaaaccgcgtagagcagtctccgtccatcaacgccgtccgcatgccctcgccgccagccggattcagctacgacgactccgctcctcggcacaatccctacggatatagtcacaatggcaaccgggactcctaccgcatgacctcgccgacgcaggagtccaattactaccgtcggagcagtgaaggtattgacatgccaacaatgcccgatgagcatagtggacactacaacaaattcggcgctcgtgagcctaagaagtccaagggtgatgtcgatgtcgtggatgcagtccaagatacaatccggcgtggcgccgacgcatttctccctgccaaatacgcggcgaagctgcgcgattcggatagcgatcgcgaccacaagaagaacagcaaaaaggcgaaagccgaagacgacttggcgtacggtagcactgcggcgctggtgacagacgtgaaaccagccctgaaaccaagcagtagtatccacaagccgccagagcctgcaccgaactacgcgatgccgggccaatgggtatacgataaacccgacgagaatatctcatacaataccgtcaacgcggcgccacctgcacaggggcatgctcaccgtccttcttacggcgctgatccccggacgtcgggtgccaacgtcctcacagccgatccggcctctcgtggtcggcgagataaatcgccaatgccaccaacacagcgcatgtctacgctaagcgtgaacacgggccaccactcagcatcgttctcatacggcagctcgggcggtgcgcctcctgcatcccctcttcttgaatcttatcacggtacctaccagcagtcatcccccatgccatccccactcctgctcgcagcacacagtccccgcacaagcgggcttgagatcatcgagcccctttcgccgggcttttctgatggagagggcggggagaagaaggccaaaagacgagctcgcttctacgatccggaagaggacgcagatcggctcgcgcaggcgctcaagggcgagcatcgagccccgaacacagagacgctcatcgagattctgcccggtcttacgcacgagcaagtcctcgagctgcggtcgcagtacaagaaactcgtgaaaacggggccggataagcgcggtgttaacatcgccaagcacatccggcttcgtctgaaggatgaagatcccgtgctcatgaaagcttgttatgccaccgcgctcggaaaatgggagtctgaggcttattgggcgaatttctggtatcagggtgataagacgaggagggagttgctgatagaaagtttgatggggaggaccaatgatgagattaggaagattaaggatgcgttttccgataaaaaatatcgcgattcgctaacgcagtgtatgaagacggagttgaaggaggacaaatttaagaaagcggtactactggttcttgaggagaaacgtatggaggatagagaccaatatgggagattgttgccgattgatcggagactggtcgaggccgatgttgaagagttgtatagggcggtgagagcggaaaaaggaggtgaaacggcgatgattcagattgtgctgttgcgcagtgatgagcatttaagagaggtcatgaagttgtatgagaaggtgtgcgagagcaattttgcacgagatgcgcttaggaagagtggaaatcttgtcggcgagcttctgacacatatcctcaacggtatcattaataagcccgttcgagacgtcattcttctacatcacgcctttacagcatctaagaaagacggtcttcgccgtgagttactgatcagccgtcttgtccgtttccattgggatcgtcagcaccttgcggccgtgaaaagggtataccgcgagagataccatgaggacctctcagaggctgtcaaagaagggacgagtggggagtggggtctgttttgcgagcagctggtcgtgaccagaatgccagatgatgtcaagagatttcagacagcggagaaagtcactgactcgcactcacgtgatcacgaggagcgtttgagggagcgtgagagagaacttgaccgcgagcgtgctaaacagaaagagagggagcgcgaggacagacatagagaacgtgaacgtgaggagaggctcagggagagggagcgggagctgaaggaacgggagcgcgaagagaggaagagagaggagaaggaggatagacgaagggagaaagagagagagcgtgagcgcgagagggaaaaggaacgggagagggagaggggaagacatcacgggcacaggtctagtgaggggttgttggttgtcaaggattcgaagcacagagaccatagtaggagccgagagcgtagccggagtcgaagacgcgaataa

SEQ ID NO: 28820 - protein, 867 aa, Muscodor strobelii
  misc_feature: SGI Peptide ID NO. 569889
  misc_feature (247)..(734): NCBI GI: 39943268 Blast Desc: MGG_03714 [Magnaporthe grisea 70-15] gi|145009689|gb|EDJ94345.1| MGG_03714 [Magnaporthe grisea 70-15]
  misc_feature (172)..(739): NCBI GI: 116193357 Blast Desc: CHGG_06396 [Chaetomium globosum CBS 148.51] gi|88182309|gb|EAQ89777.1| CHGG_06396 [Chaetomium globosum CBS 148.51]
  misc_feature (302)..(738): NCBI GI: 256734007 Blast Desc: NECHADRAFT_67271 [Nectria haematococca mpVI 77-13-4]
  misc_feature (304)..(738): NCBI GI: 46128723 Blast Desc: FG08739.1 [Gibberella zeae PH-1]
  misc_feature (56)..(739): NCBI GI: 85112184 Blast Desc: NCU02139 [Neurospora crassa OR74A] gi|28926073|gb|EAA35061.1| conserved [Neurospora crassa OR74A]
  misc_feature (304)..(733): NCBI GI: 171684523 Blast Desc: protein product [Podospora anserina] gi|170942222|emb|CAP67874.1| protein product [Podospora anserina]
  misc_feature (296)..(736): NCBI GI: 154322112 Blast Desc: BC1G_01203 [Botryotinia fuckeliana B05.10] gi|150850450|gb|EDN25643.1| BC1G_01203 [Botryotinia fuckeliana B05.10]
  misc_feature (439)..(742): NCBI GI: 261353114 Blast Desc: annexin ANXC4 [Verticillium albo-atrum VaMs.102]
  misc_feature (56)..(639): NCBI GI: 156060881 Blast Desc: SS1G_02583 [Sclerotinia sclerotiorum 1980] gi|154699987|gb|EDN99725.1| SS1G_02583 [Sclerotinia sclerotiorum 1980]
  misc_feature (235)..(727): NCBI GI: 259482344 Blast Desc: TPA: annexin ANXC4 (AFU_orthologue; AFUA_3G07020) [Aspergillus nidulans FGSC A4]
  misc_feature: Useful for introducing or modulating the production of volatile compounds
MQASQPAPSRELATGESGAARVLRLAASPDLLISHDILRLGIAAFARTIIDDFTAMSLQVGGSGARGRSKSPAARDRNRVEQSPSINAVRMPSPPAGFSYDDSAPRHNPYGYSHNGNRDSYRMTSPTQESNYYRRSSEGIDMPTMPDEHSGHYNKFGAREPKKSKGDVDVVDAVQDTIRRGADAFLPAKYAAKLRDSDSDRDHKKNSKKAKAEDDLAYGSTAALVTDVKPALKPSSSIHKPPEPAPNYAMPGQWVYDKPDENISYNTVNAAPPAQGHAHRPSYGADPRTSGANVLTADPASRGRRDKSPMPPTQRMSTLSVNTGHHSASFSYGSSGGAPPASPLLESYHGTYQQSSPMPSPLLLAAHSPRTSGLEIIEPLSPGFSDGEGGEKKAKRRARFYDPEEDADRLAQALKGEHRAPNTETLIEILPGLTHEQVLELRSQYKKLVKTGPDKRGVNIAKHIRLRLKDEDPVLMKACYATALGKWESEAYWANFWYQGDKTRRELLIESLMGRTNDEIRKIKDAFSDKKYRDSLTQCMKTELKEDKFKKAVLLVLEEKRMEDRDQYGRLLPIDRRLVEADVEELYRAVRAEKGGETAMIQIVLLRSDEHLREVMKLYEKVCESNFARDALRKSGNLVGELLTHILNGIINKPVRDVILLHHAFTASKKDGLRRELLISRLVRFHWDRQHLAAVKRVYRERYHEDLSEAVKEGTSGEWGLFCEQLVVTRMPDDVKRFQTAEKVTDSHSRDHEERLRERERELDRERAKQKEREREDRHREREREERLRERERELKEREREERKREEKEDRRREKEREREREREKERERERGRHHGHRSSEGLLVVKDSKHRDHSRSRERSRSRRRE

SEQ ID NO: 28821 - DNA, 3788 bp, Muscodor strobelii
  misc_feature: SGI EST ID NO. CUFF.68784.1
  misc_feature: Variant of the nucleotide sequence at SEQ ID NO 28819
ttggggaaaggcgttgtgcaccttggctcttctcacatattcgcgacagcacattgatgcactctccgactgagcgctgccgatgcggctatgcggtgaaactcgttgtgctgtatctggccgtcgatgcatcctccgctctgccatgcctcgtatgccctcagtcgccgtggtcgcacggtaggctgctggcaaaatgatctggtgacaaacgggccaacaaactgacgcagttgccctacacacacgactggagctcgctcatccatcctctggctttgcctagtctacgtggacattgaccgacattgaggcaagctgactgagacgagtatttgcctccaaaggcgattagatgcaccacgttgtcgatctgccacaactttcatttcatcggctacagccatacgtggtgcttgtggacgaggtgcgatgtataacacatattggccatatacgcgcctagcaagcagtagcggaaagccgttcatgcaccacgatcctctcccgtcgcctgtccacggatgaggacccgacctgaaatcgcctggctcactttggctggcctgtacggcccccaacttgggccttgcattggcgcatgccgcctccatgcacgatgcaagccagccaaccagccccctctcgagagctcgcgaccggcgaatcaggagctgcgcgagtcctgcgcctcgcggcatctccagatctcctcattagtcacgatatcttgtgctgaagtgataatgtcttgtgttgccagtgtcgtttccagcttttcttctctcttctcattattctctctgcggacaagctgtgtaagaccaaacttcatccagcgcatctacgagcatatcaagtttattaacaggtgcatgagggcatagctccgaaacagcaaaaccagcatccttcgcaaagtcctggactccactacggcggaaataccaagcattcgtgctccagattcccagccctacaattagttgttgccttacaaaagtaccccgcaatatctgcaattggttttgcgaatatttgtcgggcattctattttgtttccgtgagacattgacattgcatcggatcgcagtttgctcgactggccaggcgcctcggtatcgcagcattcgccaggactattattgacgacttcacagctatgtctctgcaggtgggaggcagcggggcccgagggcgttcgaaatcgcccgctgcacgcgaccgaaaccgcgtagagcagtctccgtccatcaacgccgtccgcatgccctcgccgccagccggattcagctacgacgactccgctcctcggcacaatccctacggatatagtcacaatggcaaccgggactcctaccgcatgacctcgccgacgcaggagtccaattactaccgtcggagcagtgaaggtattgacatgccaacaatgcccgatgagcatagtggacactacaacaaattcggcgctcgtgagcctaagaagtccaagggtgatgtcgatgtcgtggatgcagtccaagatacaatccggcgtggcgccgacgcatttctccctgccaaatacgcggcgaagctgcgcgattcggatagcgatcgcgaccacaagaagaacagcaaaaaggcgaaagccgaagacgacttggcgtacggtagcactgcggcgctggtgacagacgtgaaaccagccctgaaaccaagcagtagtatccacaagccgccagagcctgcaccgaactacgcgatgccgggccaatgggtatacgataaacccgacgagaatatctcatacaataccgtcaacgcggcgccacctgcacaggggcatgctcaccgtccttcttacggcgctgatccccggacgtcgggtgccaacgtcctcacagccgatccggcctctcgtggtcggcgagataaatcgccaatgccaccaacacagcgcatgtctacgctaagcgtgaacacgggccaccactcagcatcgttctcatacggcagctcgggcggtgcgcctcctgcatcccctcttcttgaatcttatcacggtacctaccagcagtcatcccccatgccatccccactcctgctcgcagcacacagtccccgcacaagcgggcttgagatcatcgagcccctttcgccgggcttttctgatggagagggcggggagaagaaggccaaaagacgagctcgcttctacgatccggaagaggacgcagatcggctcgcgcaggcgctcaagggcgagcatcgagccccgaacacagagacgctcatcgagattctgcccggtcttacgcacgagcaagtcctcgagctgcggtcgcagtacaagaaactcgtgaaaacggggccggataagcgcggtgttaacatcgccaagcacatccggcttcgtctgaaggatgaagatcccgtgctcatgaaagcttgttatgccaccgcgctcggaaaatgggagtctgaggcttattgggcgaatttctggtatcagggtgataagacgaggagggagttgctgatagaaagtttgatggggaggaccaatgatgagattaggaagattaaggatgcgttttccgataaaaaatatcgcgattcgctaacgcagtgtatgaagacggagttgaaggaggacaaatttaagaaagcggtactactggttcttgaggagaaacgtatggaggatagagaccaatatgggagattgttgccgattgatcggagactggtcgaggccgatgttgaagagttgtatagggcggtgagagcggaaaaaggaggtgaaacggcgatgattcagattgtgctgttgcgcagtgatgagcatttaagagaggtcatgaagttgtatgagaaggtgtgcgagagcaattttgcacgagatgcgcttaggaagagtggaaatcttgtcggcgagcttctgacacatatcctcaacggtatcattaataagcccgttcgagacgtcattcttctacatcacgcctttacagcatctaagaaagacggtcttcgccgtgagttactgatcagccgtcttgtccgtttccattgggatcgtcagcaccttgcggccgtgaaaagggtataccgcgagagataccatgaggacctctcagaggctgtcaaagaagggacgagtggggagtggggtctgttttgcgagcagctggtcgtgaccagaatgccagatgatgtcaagagatttcagacagcggagaaagtcactgactcgcactcacgtgatcacgaggagcgtttgagggagcgtgagagagaacttgaccgcgagcgtgctaaacagaaagagagggagcgcgaggacagacatagagaacgtgaacgtgaggagaggctcagggagagggagcgggagctgaaggaacgggagcgcgaagagaggaagagagaggagaaggaggatagacgaagggagaaagagagagagcgtgagcgcgagagggaaaaggaacgggagagggagaggggaagacatcacgggcacaggtctagtgaggggttgttggttgtcaaggattcgaagcacagagaccatagtaggagccgagagcgtagccggagtcgaagacgcgaataaggggttagggtggtactgagggacatatgagattttccaatcacgataatgatatatgatccatacctacataatgaagtgtgatgtgggttgttgttgttggtgacttgtctgcttcgtgcatgagttggaagcgatgttaaaatgaggttgagtgtcggaactggataaccaatgaaaatcctcc

SEQ ID NO: 28822 - DNA, 726 bp, Muscodor strobelii
  misc_feature: SGI cDNA ID NO. 569890
  misc_feature: Reduced expression when VOC is produced
  misc_feature: Encodes the peptide sequence at SEQ ID NO 28823
atgaagtggcccgccgctctttgcgctctggcggtctcgttgaccctggcagctccattgtccactgtcgttgatagggtgccgactcgagttggtaccgttcaggccgcacaacagccagtaggcttcgttagcgtcgatctccagcaaacaagccaagagaaatccaaacctcccaagggacagagtcatccccagaaaagcgcggcaaaatcaaaaacgaagaagaagggcacttccggcaaatccaagtctttactcaactcgatatctcgtcaatggctacctaaaaatccgtttgtaaaggactccgctatcataaaggaggagaccaaggctgtcaatgcagagtgggagtccgaggcaaccattgttgattgggagacgaaggcgtcgcgcgaatcttgggtttggatcccttgtgtctcgagcggcaagaaacttcattacaagcgtgtacgcatctacgccgacatgctcgtagtgggattggttcttagttttgtcgccatcttgctcgtgatcgagctgtggacgccagctgttcaaaagatccgtcgcttacgatccggtcacggtgcgatatatcttgatgagaaccaagaagcatatatgcttaacagcataaaaaagccatgcaatgcctgcgctgtacacatacccgaattagcagatgagagtcagcaagaccatgacacagagaagggtcgcttccctgtggcttaa

SEQ ID NO: 28823 - protein, 241 aa, Muscodor strobelii
  misc_feature: SGI Peptide ID NO. 569890
  misc_feature: Useful for introducing or modulating the production of volatile compounds
MKWPAALCALAVSLTLAAPLSTVVDRVPTRVGTVQAAQQPVGFVSVDLQQTSQEKSKPPKGQSHPQKSAAKSKTKKKGTSGKSKSLLNSISRQWLPKNPFVKDSAIIKEETKAVNAEWESEATIVDWETKASRESWVWIPCVSSGKKLHYKRVRIYADMLVVGLVLSFVAILLVIELWTPAVQKIRRLRSGHGAIYLDENQEAYMLNSIKKPCNACAVHIPELADESQQDHDTEKGRFPVA

SEQ ID NO: 28824 - DNA, 4027 bp, Muscodor strobelii
  misc_feature: SGI EST ID NO. CUFF.69063.1
  misc_feature: Variant of the nucleotide sequence at SEQ ID NO 28822
cacgagcgctacctgcggtccgaatagatgctcgaatcatttctcttatatgcttgcatgcatttccctatctaggtagttgagagcccttgagagccacccagcttgaaagttatggtctgaactgtttctcgactgacttcttccatttacatgactcgcctacaccgctacgctgtacagcctgtgtaagcagcctcagctggcccaacttcttctgcaaataggataaatacgcgtacctccctctgctgtatacgtagatcatggaaagatcagagtcatggatcgccaggcgctgacgaatcttcatcgtggcttgtagaggtgacagacggcagtcggggaagattgaggatgtcggcgatgccccagatgagcttttccactgagaatagaagggacctggattgatttagacatacaatgaggtccatactacggtagatcatctaccacccgcccgactgccgacatctcgatgcatgaaaagtgaaacaagccatgccaggcccaacaaggggacgcgcaccaacgcccagggtacttcgcgcagcggcttttgacatttgcattcgaggaatggtaaccagaggattcaatcggactcatcacctccagtcctgaaggaattcggatatcatacacgaaaagaatacacaaactctcggacagcggacggattgagagggtaacacgccctccgtagctcaaagcaatcatttcctatatctgaaacaaaatcacgactggggagagcgaaagccctccgaggaggtattttagcgcacaagacggtaaattatcaacaaattaccaaagcatcgtggggagtgatcgtcgctatatcgctagcacatatccaccttctcgaccatgtccggattctgcccgacacctgctacgtcatataccatcaaacaagatcagtccaaggtaggcatagtcgagacagctcgacagtagaaatgctcgagagtcgtcgcatgtttggacagtggggagtatgtagcggaattttccaggatacgagaaagaatggagacggtagcacagtaatagaagaattggcgatagatgggccgagtgagatcgtgagaccctcacagctggaagaatctcccaataccgtttcttccagagctttcatggacaagagacgaacaggctgaagatctggcttggctttttgttaactccacgcttggccaagacatgctatagaagaagtgggcaactggtatcgtcaacactgccaaaatgggcgattgatagtacaaagccggaagctgagtggccagtcactgtctgttcctgaacaacccttggtggcccacgactccacggcaaggaatgtgagcttggcaatcttggtgctactgggaacgcacgactaggatgacgtgtatgaagggggctcagttctttagggtcccccaaggtgagccagttgccaggctcgccagctctctcgcagaccggcacacgaagctcatgagctgcattgcattagctgaactcagtgcgagctcctgaccttccgctgatatggacgacacagttttgcttcggacatgagacgaagaagtcacagaatagtgcgaaagggccgggtactggtgccgtcgcgaggaaaaaggagctagccaatggggagaggattggtgatggaatcagcttttgactttttcaagatgccatcgtctccatctcgttttaccgattgcggtaaatcaccacatctgcaactatcttgttgcccagtcatgcattgcgggccatgggctataagccatcttgtgtcgtcagccgcgtacacgtcgatagtctgtagggtccgttgtttttagacgcaccaagagctgcaaaagagaagcccatccaggcggccatccaatgcacttcttacagccctgaattggccgtaattgtgaaacaccaccttcaaagcattgcccacacattgcctgcgcacggaacagccgcccacatttcgcgttcctatgttcgtttgaggccaatacaacccacctagcgtccctcagtccattccagtgccgtcaagcccccgcccccatcggaggagacaaggtatctctccaagggctatcgcatgtcttgcatcactgctacaagtacttgatgagagatgcgcaccttggcaatcatcccttctgattccatttttcctgtccaacgacatacatcatagacattattgtccaactatcttccaactatctccatttcatttatcttcccaggatagtctcggccgaacctactgactgtcgccttccctcgagactacctgacaagctctattgctgtttctcgaactctctactacattataagctccaactcggccgttcgttgcgaccctgccctgttacctcctgtatttcgtctcttccttggcaaaggttgtctttccacttcctcgggttgttgtgcttggcatctccagtagtctagacttgcgtcctgacttgcgcgcaagacaaacacccagaatctgtcctgcatgcaacacatagccgttgcgctgtggtaatctcgtcaacagtgctacacgccaacctgccattgctaggctatgacttgttgagagcctggactgcattactctatctcgcttagtattggtcggcactttgggctcttaatatctgaggctcccctcatctaccaagagatacccggcagatcaatcttgccgcctccttactacttatccctccttttacccgcctgtgacaatttgttggttcgacccgaaatcccattgcttcaaggatccgcataccgcataatttaaaactcatttggatttgtccacccctctcgggccgcttgagagtcaaaactccaaatccatttggacaacagcagtggaaacctgagttgcaagcatcatgaagtggcccgccgctctttgcgctctggcggtctcgttgaccctggcagctccattgtccactgtcgttgatagggtgccgactcgagttggtaccgttcaggccgcacaacagccagtaggcttcgttagcgtcgatctccagcaaacaagccaagagaaatccaaacctcccaagggacagagtcatccccagaaaagcgcggcaaaatcaaaaacgaagaagaagggcacttccggcaaatccaagtctttactcaactcgatatctcgtcaatggctacctaaaaatccgtttgtaaaggactccgctatcataaaggaggagaccaaggctgtcaatgcagagtgggagtccgaggcaaccattgttgattgggagacgaaggcgtcgcgcgaatcttgggtttggatcccttgtgtctcgagcggcaagaaacttcattacaagcgtgtacgcatctacgccgacatgctcgtagtgggattggttcttagttttgtcgccatcttgctcgtgatcgagctgtggacgccagctgttcaaaagatccgtcgcttacgatccggtcacggtgcgatatatcttgatgagaaccaagaagcatatatgcttaacagcataaaaaagccatgcaatgcctgcgctgtacacatacccgaattagcagatgagagtcagcaagaccatgacacagagaagggtcgcttccctgtggcttaagacgattttcttgttttacctgtgctgtttcttgggctgaatttttatgcgctggcgttttggagttgtgagctggcatgcttgcacaggacatcgaaccaaagatatgagtgcccaaggcaaagacgatacgatgggaaatgcgcattagaagtacagacattgtttggggctcgaatgatcaaaggtgaacggcttacgtagctccgattcaagccagggcacgagagccgagctgaaaaactcgatgtgctggatgacggccctggccaccacgagaggtttgaccgccaatccaaaggcccgttattgtaactgggcatggcttcgagaaccaaattaacattatatatactcaccaatattatacaatgcacatgaac

SEQ ID NO: 28825 - DNA, 384 bp, Muscodor strobelii
  misc_feature: SGI cDNA ID NO. 569891
  misc_feature: Encodes the peptide sequence at SEQ ID NO 28826
atgcgtatcctacgacagcccgagctagacatggtggcctattctaagatttccaagtccttggctatcccatacatcggtgcctggggtaattttgagagccgcgacacttggccggctattcccagggttggagaagcgattgagaaatggccatcttcccaggaagccaaagagactcgagtctcagtcgcgatagacctggcaaccaagtttaataacctcaagctggttgtagaggatgcggctatgattgtcgaaggcgccgaagtcccagacgcgttaaaggagcgcgttcggttcatgccacaggagctctttgcgacccagaccgtcgacaaatacgctgtcaacatcctgaaagcccagattccggcactctga

SEQ ID NO: 28826 - protein, 127 aa, Muscodor strobelii
  misc_feature: SGI Peptide ID NO. 569891
  misc_feature (1)..(127): NCBI GI: 156030706 Blast Desc: SS1G_14292 [Sclerotinia sclerotiorum 1980] gi|154700683|gb|EDO00422.1| SS1G_14292 [Sclerotinia sclerotiorum 1980]
  misc_feature (1)..(127): NCBI GI: 238841485 Blast Desc: sterigmatocystin 8-O-methyltransferase [Microsporum canis CBS 113480]
  misc_feature (65)..(127): NCBI GI: 116206014 Blast Desc: CHGG_02300 [Chaetomium globosum CBS 148.51] gi|88182897|gb|EAQ90365.1| CHGG_02300 [Chaetomium globosum CBS 148.51]
  misc_feature (61)..(127): NCBI GI: 145614843 Blast Desc: MGG_14022 [Magnaporthe grisea 70-15] gi|145021775|gb|EDK05852.1| MGG_14022 [Magnaporthe grisea 70-15]
  misc_feature (61)..(127): NCBI GI: 145604617 Blast Desc: MGG_13861 [Magnaporthe grisea 70-15] gi|145012605|gb|EDJ97259.1| MGG_13861 [Magnaporthe grisea 70-15]
  misc_feature (61)..(127): NCBI GI: 149209215 Blast Desc: MGCH7_ch7g100 [Magnaporthe grisea 70-15] gi|86196055|gb|EAQ70693.1| MGCH7_ch7g100 [Magnaporthe grisea 70-15]
  misc_feature (1)..(75): NCBI GI: 171677656 Blast Desc: protein product [Podospora anserina] gi|170936896|emb|CAP61555.1| protein product [Podospora anserina]
  misc_feature (1)..(67): NCBI GI: 116206014 Blast Desc: CHGG_02300 [Chaetomium globosum CBS 148.51] gi|88182897|gb|EAQ90365.1| CHGG_02300 [Chaetomium globosum CBS 148.51]
  misc_feature (63)..(127): NCBI GI: 154312904 Blast Desc: BC1G_05153 [Botryotinia fuckeliana B05.10] gi|150849855|gb|EDN25048.1| BC1G_05153 [Botryotinia fuckeliana B05.10]
  misc_feature (64)..(127): NCBI GI: 156051750 Blast Desc: SS1G_07282 [Sclerotinia sclerotiorum 1980] gi|154705060|gb|EDO04799.1| SS1G_07282 [Sclerotinia sclerotiorum 1980]
MRILRQPELDMVAYSKISKSLAIPYIGAWGNFESRDTWPAIPRVGEAIEKWPSSQEAKETRVSVAIDLATKFNNLKLVVEDAAMIVEGAEVPDALKERVRFMPQELFATQTVDKYAVNILKAQIPAL

SEQ ID NO: 28827 - DNA, 381 bp, Muscodor strobelii
  misc_feature: SGI cDNA ID NO. 569892
  misc_feature: Encodes the peptide sequence at SEQ ID NO 28828
atgatgccctacgaagaccaaaaggcggaaagccagcgacgtagccaatactgggtcaagaaccgtctacccacgcatcttgattattggcaaaaggctctgacgggcgacaaggagacggaggggccgtggttattggggacaacgctcacctacgccgatttagtcctcttccagtgcctcgacgggaccatatatgctttccccaatgccatgaaacacgccagagagaccggaaaatacgacgaggtgttcagactgtgggaggcggtgaaggcgagaccaaatatagctgcgtatcttggcagcaacaggaggcaaaagtaccaggactggggtatctatcggcactatccggacaatgacttagctacagagtaa

SEQ ID NO: 28828 - protein, 126 aa, Muscodor strobelii
  misc_feature: SGI Peptide ID NO. 569892
  misc_feature (18)..(95): Pfam Id: PF00043 Pfam Desc: Glutathione S-transferase, C-terminal domain
  misc_feature (1)..(126): NCBI GI: 154289559 Blast Desc: BC1G_16073 [Botryotinia fuckeliana B05.10] gi|150849028|gb|EDN24221.1| BC1G_16073 [Botryotinia fuckeliana B05.10]
  misc_feature (2)..(122): NCBI GI: 261354641 Blast Desc: glutathione S-transferase [Verticillium albo-atrum VaMs.102]
  misc_feature (4)..(120): NCBI GI: 256726160 Blast Desc: NECHADRAFT_62085 [Nectria haematococca mpVI 77-13-4]
  misc_feature (4)..(123): NCBI GI: 116179728 Blast Desc: CHGG_00492 [Chaetomium globosum CBS 148.51] gi|88184789|gb|EAQ92257.1| CHGG_00492 [Chaetomium globosum CBS 148.51]
  misc_feature (4)..(120): NCBI GI: 46116630 Blast Desc: FG04157.1 [Gibberella zeae PH-1]
  misc_feature (4)..(123): NCBI GI: 171691647 Blast Desc: protein product [Podospora anserina] gi|170945772|emb|CAP72572.1| protein product [Podospora anserina]
  misc_feature (4)..(122): NCBI GI: 169784552 Blast Desc: [Aspergillus oryzae RIB40] gi|83775484|dbj|BAE65604.1| protein product [Aspergillus oryzae]
  misc_feature (4)..(122): NCBI GI: 238508282 Blast Desc: glutathione S-transferase family protein, [Aspergillus flavus NRRL3357] gi|220688857|gb|EED45209.1| glutathione S-transferase family protein, [Aspergillus flavus NRRL3357]
  misc_feature (4)..(124): NCBI GI: 145615364 Blast Desc: MGG_13106 [Magnaporthe grisea 70-15] gi|145022205|gb|EDK06225.1| MGG_13106 [Magnaporthe grisea 70-15]
  misc_feature (4)..(123): NCBI GI: 164425285 Blast Desc: NCU04676 [Neurospora crassa OR74A] gi|157070866|gb|EAA29983.2| NCU04676 [Neurospora crassa OR74A]
MMPYEDQKAESQRRSQYWVKNRLPTHLDYWQKALTGDKETEGPWLLGTTLTYADLVLFQCLDGTIYAFPNAMKHARETGKYDEVFRLWEAVKARPNIAAYLGSNRRQKYQDWGIYRHYPDNDLATE

SEQ ID NO: 28829 - DNA, 509 bp, Muscodor strobelii
  misc_feature: SGI EST ID NO. CUFF.67988.2
  misc_feature: Variant of the nucleotide sequence at SEQ ID NO 28827
atttagtcctcttccagtgcctcgacgggaccatatatgctttccccaatgccatgaaacacgccagagagaccggaaaatacgacgaggtgttcagactgtgggaggcggtgaaggcgagaccaaatatagctgcgtatcttggcagcaacaggaggcaaaagtaccaggactggggtatctatcggcactatccggacaatgacttagctacagagtaatctagtaccgtaatcaactggacaggaagggaagcgggatatcgtgactagagtcgaaggatgtaaaaagttaccagatttctatgaggaaatgtcttggcgagatattttcgaaaagtctcgcgccttcttgccgccggaagcaaagcacacgctgtactatcgcactggcattacttacgtcgaggccttagcacgaacgttgatatgtgacagccttggggacaatgatagaccagattcagatttgccgtacctgaatgcagttacacctgtggtgaagcaaat

SEQ ID NO: 28830 - DNA, 1755 bp, Muscodor strobelii
  misc_feature: SGI cDNA ID NO. 569893
  misc_feature: Encodes the peptide sequence at SEQ ID NO 28831
atgaaggatctccaaggtcgcgcccacgttatcgcggcagctgtcgctctactttgcctccaatcatgcactgcgttggccactattgagcttgccgccccggcagccgtgtgctcaaacgtctcgaccacggatacatatgactacatcattgttgggtcaggagccggcgggataccactcgcggaccgattatcggcggccggtcataccgttctgcttatcgagaaaggcccaccgtctactgcgctatggggagggattatgaagccagcatggctgaacaaccagagtcttacacgtttcgatgttcccggccttgcaaacgagatttgggccgatcccaccggcattgtttgcaccgatgtggaccaaatggccggctgcgtgctcggtggtggaacagccgtgaactcgggcttatggtggcgcccacacccacaagattgggactatctgtggcctgctggctggaagagtacggatctggctgatgctactgatagagtattcaagcagatccctgggacgacagcacccagtatggacggcaagctatacctacagcagggatatgagatgctcactagtggtttgaatgcgagtggctggaagttcgtcgtgcccaataatcatcccgacgagaagaatcaaacttacggccattcaacacatatgttcgcaggaggcgagagaggaggacccttggcgacatatctcttgtctgccagcaaacgcaaggagttcacgctctggatgaacactacagcgaaacgagttgtgcgtactgggggtcatgccaccggagtcgaggtcgattgtacaagtactaagggagatggtcacaccggcgtagtctccgtcactcctggaaccggtcgtgtggttctggctgcgggtgctttcggatctgcaaagctgttgttcagaagcgggattggcccaactgatcagttgaacgttgttaaaaattctacggacggaccgaccatgattgcctcggattcgtggatcaatctaccggtcggctataatcttgatgatcacgttggcacagatattgaagtttctcatcctagtgttgtcttctatgacttctacgccgcttacaaaactcctatcgaggcggatgcgcaggaatatcttgcaaatcggactggcattctagcacaagccgcaccaaatctcggacctattttctgggaaattatcacaggagctgatggtgtagatcggcacctacattggcaatcacgcgttgaaggtgcgacgagtacatccatgacaatcacccaatacctcggcacaggcgcaaagtcccgtggtcgtatggtaattaccgcagcactcaatacacgcgttgctacatcgccgtatctcaacgatgccgaggataaagcgacagtaatcaggggcttggagaaggtccagggatatttcgcgaacattgcaaatctgacttgggttcgaccggcgccaggacaaaatgcgacgtcctatgtgaactctatccccgcaaccccttcatcccgctgttcaaatcactggataggaaccgcaaagataggtctcgacgatggacgtaaggcaaacggcacaagcgtcgtagacttggatacgaaagtctacggaatggataatctgttcattgttgatgcttcgatcttcccgggtatgatgactgggaacccgtcggctatgatcgtcagtgcgagcgagcatgcggcggatcgtatattggctttgaagagttaa

SEQ ID NO: 28831 - protein, 584 aa, Muscodor strobelii
  misc_feature: SGI Peptide ID NO. 569893
  misc_feature (431)..(575): Pfam Id: PF05199 Pfam Desc: GMC oxidoreductase
  misc_feature (47)..(344): Pfam Id: PF00732 Pfam Desc: GMC oxidoreductase
  misc_feature (48)..(83): Pfam Id: PF00890 Pfam Desc: FAD binding domain
  misc_feature (513)..(575): Pfam Id: PF05199 Pfam Desc: GMC oxidoreductase
  misc_feature (48)..(88): Pfam Id: PF07992 Pfam Desc: Pyridine nucleotide-disulphide oxidoreductase
  misc_feature (32)..(583): NCBI GI: 85090051 Blast Desc: NCU05923 [Neurospora crassa OR74A] gi|28919573|gb|EAA28998.1| NCU05923 [Neurospora crassa OR74A]
  misc_feature (46)..(584): NCBI GI: 171683734 Blast Desc: protein product [Podospora anserina] gi|170941827|emb|CAP67480.1| protein product [Podospora anserina]
  misc_feature (40)..(582): NCBI GI: 116200241 Blast Desc: CHGG_08276 [Chaetomium globosum CBS 148.51] gi|88179555|gb|EAQ87023.1| CHGG_08276 [Chaetomium globosum CBS 148.51]
  misc_feature (20)..(583): NCBI GI: 7739769 Blast Desc: cellobiose dehydrogenase [Humicola insolens]
  misc_feature (46)..(582): NCBI GI: 145616732 Blast Desc: MGG_11036 [Magnaporthe grisea 70-15] gi|145023159|gb|EDK06699.1| MGG_11036 [Magnaporthe grisea 70-15]
  misc_feature (47)..(583): NCBI GI: 121717196 Blast Desc: cellobiose dehydrogenase [Aspergillus clavatus NRRL 1] gi|119404194|gb|EAW14611.1| cellobiose dehydrogenase [Aspergillus clavatus NRRL 1]
  misc_feature (46)..(582): NCBI GI: 169775671 Blast Desc: [Aspergillus oryzae RIB40] gi|83771037|dbj|BAE61169.1| protein product [Aspergillus oryzae]
  misc_feature (24)..(582): NCBI GI: 46133891 Blast Desc: FG09085.1 [Gibberella zeae PH-1]
  misc_feature (46)..(584): NCBI GI: 119482417 Blast Desc: cellobiose dehydrogenase [Neosartorya fischeri NRRL 181] gi|119409391|gb|EAW19340.1| cellobiose dehydrogenase [Neosartorya fischeri NRRL 181]
  misc_feature (41)..(582): NCBI GI: 116208174 Blast Desc: CHGG_03380 [Chaetomium globosum CBS 148.51] gi|88183977|gb|EAQ91445.1| CHGG_03380 [Chaetomium globosum CBS 148.51]
  misc_feature (47)..(582): SWISSPROT Homolog: EC 1.1.99.18 Cellobiose dehydrogenase (acceptor)
MKDLQGRAHVIAAAVALLCLQSCTALATIELAAPAAVCSNVSTTDTYDYIIVGSGAGGIPLADRLSAAGHTVLLIEKGPPSTALWGGIMKPAWLNNQSLTRFDVPGLANEIWADPTGIVCTDVDQMAGCVLGGGTAVNSGLWWRPHPQDWDYLWPAGWKSTDLADATDRVFKQIPGTTAPSMDGKLYLQQGYEMLTSGLNASGWKFVVPNNHPDEKNQTYGHSTHMFAGGERGGPLATYLLSASKRKEFTLWMNTTAKRVVRTGGHATGVEVDCTSTKGDGHTGVVSVTPGTGRVVLAAGAFGSAKLLFRSGIGPTDQLNVVKNSTDGPTMIASDSWINLPVGYNLDDHVGTDIEVSHPSVVFYDFYAAYKTPIEADAQEYLANRTGILAQAAPNLGPIFWEIITGADGVDRHLHWQSRVEGATSTSMTITQYLGTGAKSRGRMVITAALNTRVATSPYLNDAEDKATVIRGLEKVQGYFANIANLTWVRPAPGQNATSYVNSIPATPSSRCSNHWIGTAKIGLDDGRKANGTSVVDLDTKVYGMDNLFIVDASIFPGMMTGNPSAMIVSASEHAADRILALKS

SEQ ID NO: 28832 - DNA, 3971 bp, Muscodor strobelii
  misc_feature: SGI EST ID NO. CUFF.68059.0
  misc_feature: Variant of the nucleotide sequence at SEQ ID NO 28830
tgtgctgagaacgagggtgctcccctggtctattggggcaagcagtgcatagcattcttctagcccgtgtttgagcgacagtaaagtcttttgtaaattgttgaggagccatgttaattcgcggtcctgtgtattgtgtgagcgagatacttcggagtttgagagtgacgatgaaagagagtccgttgggctctctggagggcttgggggaagcggacgttgcgtatatggcgagatcttaggtaaggggggaggtgacggtggtgagcgacgacaatgagctggcgcagtgggtggcacaggatgtgtgagtgtttcgggataaggctcaacaaccacaaagtcatctactatgagcatgtttactcgtgtggctttggaattgtatgtgaatgagggtgtaatgaatcacaaaagctagggtggtatgagcgagggtctgggagtattagatctcacctgtgtcgcatcctcttggattttaagttggtcgggcgcaatgcgaggccagatttcaacagacatggttatggttatggtcgtagtgtactattgatgttagcaaatcagctagcataggcagccgtatgcatgtctaaggcatgttaatatgataagtatgaggatgagctgatgcacatgaagctgtggcacatcgtatgaatagagtatgacgatgctagtcgaagttggagacggcgtcgcggtggagactggagacctgcaaggcaccggagatccagcgctaggctccgccattggcgcctcactctagggtcttagtggcctgtaaaggagcttaaccccactacgcgaaagtcaacacagcgccaaaccagtcaaggctgccgtatattcatcgtctattgcaccgatgactcgagtaaacgccacgaaactcacgagaggcagcagcatttatcctttgtactcggctgcctgaggactatcgaacacaacagcccagtcaactaagttgaaagtaccaagtctcgcaaccgctgtccaatctgctaggaaaatggacaaccaggctacgaaacccgcaaggcagcccgacaggccggtcacgaagaagctaccacgtgttgcaaaaggatcaaccgtacgaaggcgaccgcttccctcagggcccgcgccctcgtcgcatgccacgcgcaccatccatgtcaccgccaaaacgcccttccaatcgatcaccacccgcgtacgcaagcagctcgacaagaacttgcgacagtctgcttcagccagaggtaccttcaccaacaagctgtctcagaacaaagacgcttcgttcgccaaccgagtccgtcagatccagagacaggccagggatgccccttctaatggtctcggcctcggactggaaaactcgggagaggtcctgctcctggctaccggacgcgccatcgaaaacctcattaacgtcgccttgttctttcaaaaccagaaggattgcatcgtccagctacggacccgaagtgtagccgccatagacgatgttgtgggtcccgaggatgacggccttgagggcgacgtcgacgagagagctaggatgatcagctgtctcgaggtctccatcaaactccgatgaagtggtgaaggacatcaaaagttcacatctgaggcttcaattacaattggcagctcacgtgattggctaccaataatcgcgaacgtacagaaaacacgacttaacaggttcatgcatgcgtctatggtatccaatgcgtgctacaccagcgagcacatactcctggaggcctttgcgaacatcactagatatggtgcggccttgcaagccagtcggaagatttagatcaacgcccctgagtacaaattgttaatacggcaatagcaaatggtggcgatggcttgagagctttggatggctaattagcaatacctggagcgtagctatcatcatgcctcttgttgataagggctgaatcggcctagtcctggtctataactcccccctgagtatgggccgaatttacccggaggccagagcgcttgtcaatttcaatgacaaatctaacaatcttgcaagcacactttgatcaaatcaagtgttttgccgccgcgagtcagcaatggagtctagcagacaagtagcttgcgtttgaaaatgacattcccagtgacggcacagctttgagcattcaactgcagagcatgagatcaaaaaatagcaccaaatagacaagtagtcccgcatgctcaaattcagtcggcaattgaattttatccgtctttgcgtccaaaactgtcaccaatgcattgggccagccgctcttgtcgctagctgagtcgcattgcataccccagatttcgtttctcggctaagtagccgtaagctgagaatgacacgctgggccatactgcctaattataaagtgcaccgggagctcacgtggagacatggaccattcgggatttttatcttgacaagcaaatcatggtcactgagattccgcatgcctttcccggacgaaacaaacgccacgtccttatcgccgaatcatcaatggcataggggaaatgggtgcaatctaccatcgacggtacactacggctcttataatgtaggcgtgatgcccgtgtgatatgctgttccttggcttggctctgggtctctttggacgtgtgactcttactgcaaccaaccaatatgaaggatctccaaggtcgcgcccacgttatcgcggcagctgtcgctctactttgtaagctctcttaagtgcctcgggagttggaaacagcgcgacatcttgataatgtccgcaaacaagagacggctcaacatgcataagtgcatccagctgacgcgataggaaactcttaaggcctccaatcatgcactgcgttggccactattgagcttgccgccccggcagccgtgtgctcaaacgtctcgaccacggatacatatgactacatcattgttgggtcaggagccggcgggataccactcgcggaccgattatcggcggccggtcataccgttctgcttatcgagaaaggcccaccgtctactgcgctatggggagggattatgaagccagcatggctgaacaaccagagtcttacacgtttcgatgttcccggccttgcaaacgagatttgggccgatcccaccggcattgtttgcaccgatgtggaccaaatggccggctgcgtgctcggtggtggaacagccgtgaactcgggcttatggtggcgcccacacccacaagattgggactatctgtggcctgctggctggaagagtacggatctggctgatgctactgatagagtattcaagcagatccctgggacgacagcacccagtatggacggcaagctatacctacagcagggatatgagatgctcactagtggtttgaatgcgagtggctggaagttcgtcgtgcccaataatcatcccgacgagaagaatcaaacttacggccattcaacacatatgttcgcaggaggcgagagaggaggacccttggcgacatatctcttgtctgccagcaaacgcaaggagttcacgctctggatgaacactacagcgaaacgagttgtgcgtactgggggtcatgccaccggagtcgaggtcgattgtacaagtactaagggagatggtcacaccggcgtagtctccgtcactcctggaaccggtcgtgtggttctggctgcgggtgctttcggatctgcaaagctgttgttcagaagcgggattggcccaactgatcagttgaacgttgttaaaaattctacggacggaccgaccatgattgcctcggattcgtggatcaatctaccggtcggctataatcttgatgatcacgttggcatattgaagtttctcatcctagtgttgtcttctatgacttctacgccgcttacaaaactcctatcgaggcggatgcgcaggaatatcttgcaaatcggactggcattctagcacaagccgc

SEQ ID NO: 28833 - DNA, 576 bp, Muscodor strobelii
  misc_feature: SGI cDNA ID NO. 569894
  misc_feature: Encodes the peptide sequence at SEQ ID NO 28834
atggacaaccaggctacgaaacccgcaaggcagcccgacaggccggtcacgaagaagctaccacgtgttgcaaaaggatcaaccgtacgaaggcgaccgcttccctcagggcccgcgccctcgtcgcatgccacgcgcaccatccatgtcaccgccaaaacgcccttccaatcgatcaccacccgcgtacgcaagcagctcgacaagaacttgcgacagtctgcttcagccagaggtaccttcaccaacaagctgtctcagaacaaagacgcttcgttcgccaaccgagtccgtcagatccagagacaggccagggatgccccttctaatggtctcggcctcggactggaaaactcgggagaggtcctgctcctggctaccggacgcgccatcgaaaacctcattaacgtcgccttgttctttcaaaaccagaaggattgcatcgtccagctacggacccgaagtgtagccgccatagacgatgttgtgggtcccgaggatgacggccttgagggcgacgtcgacgagagagctaggatgatcagctgtctcgaggtctccatcaaactccgatga

SEQ ID NO: 28834 - protein, 191 aa, Muscodor strobelii
  misc_feature: SGI Peptide ID NO. 569894
  misc_feature (18)..(191): NCBI GI: 261353732 Blast Desc: conserved [Verticillium albo-atrum VaMs.102]
  misc_feature (19)..(191): NCBI GI: 46135823 Blast Desc: FG09427.1 [Gibberella zeae PH-1]
  misc_feature (1)..(191): NCBI GI: 256727653 Blast Desc: NECHADRAFT_76695 [Nectria haematococca mpVI 77-13-4]
  misc_feature (19)..(188): NCBI GI: 154289051 Blast Desc: BC1G_16269 [Botryotinia fuckeliana B05.10] gi|150851627|gb|EDN26820.1| BC1G_16269 [Botryotinia fuckeliana B05.10]
  misc_feature (19)..(188): NCBI GI: 156046733 Blast Desc: SS1G_09451 [Sclerotinia sclerotiorum 1980] gi|154693846|gb|EDN93584.1| SS1G_09451 [Sclerotinia sclerotiorum 1980]
  misc_feature (6)..(190): NCBI GI: 169596202 Blast Desc: SNOG_00854 [Phaeosphaeria nodorum SN15] gi|111071229|gb|EAT92349.1| SNOG_00854 [Phaeosphaeria nodorum SN15]
  misc_feature (6)..(179): NCBI GI: 226293639 Blast Desc: conserved [Paracoccidioides brasiliensis Pb18]
  misc_feature (6)..(179): NCBI GI: 225678803 Blast Desc: conserved [Paracoccidioides brasiliensis Pb03]
  misc_feature (6)..(176): NCBI GI: 154278202 Blast Desc: [Ajellomyces capsulatus NAm1] gi|150413504|gb|EDN08887.1| [Ajellomyces capsulatus NAm1]
  misc_feature (12)..(190): NCBI GI: 116194067 Blast Desc: [Chaetomium globosum CBS 148.51] gi|88182664|gb|EAQ90132.1| [Chaetomium globosum CBS 148.51]
MDNQATKPARQPDRPVTKKLPRVAKGSTVRRRPLPSGPAPSSHATRTIHVTAKTPFQSITTRVRKQLDKNLRQSASARGTFTNKLSQNKDASFANRVRQIQRQARDAPSNGLGLGLENSGEVLLLATGRAIENLINVALFFQNQKDCIVQLRTRSVAAIDDVVGPEDDGLEGDVDERARMISCLEVSIKLR

SEQ ID NO: 28835 - DNA, 3971 bp, Muscodor strobelii; identical to SEQ ID NO: 28832
  misc_feature: SGI EST ID NO. CUFF.68059.0
  misc_feature: Variant of the nucleotide sequence at SEQ ID NO 28833

SEQ ID NO: 28836 - DNA, 609 bp, Muscodor strobelii
  misc_feature: SGI cDNA ID NO. 569895
  misc_feature: Encodes the peptide sequence at SEQ ID NO 28837
atgtctaccactggcaatacccggtacgacagcatggtcaactcgtttgatgaagctgagcagcgtacaacagagcttaccgctacccacatcgcagctctccaaatacggttggaggagcaagtacgtcctgaaaatattgacacgcatggtgacgtttcaagtccggagagtcattacttcgccgccgacaaatacattgcattggctaatgaggcctttggctccaatggttggtcatcgagtattcagggtctccacattgactttcttgaagagaacactcagacctccgaggtttccctagacctatccgtgactgttcgcgtcactctaagagacggcacctaccacgaacacacggggtacagtcatgttagagattgtaaagggaaagccgctgcattcgaaacagcaaagaaagaggcaacaagtaatgcattaaaccgaacgttagaacgcttaaacgacctacgaaaaagtcgtaccaccaatgaggtctctttacctgagttctccaatattgatggggatacttttcccgtaccaaatcggatgtctccgtcgggcgacgatgagacaactacaaggacgcaggccgctgagtga

SEQ ID NO: 28837 - protein, 202 aa, Muscodor strobelii
  misc_feature: SGI Peptide ID NO. 569895
  misc_feature (29)..(174): Pfam Id: PF04098 Pfam Desc: Rad52/22 family double-strand break repair protein
  misc_feature (29)..(152): Pfam Id: PF04098 Pfam Desc: Rad52/22 family double-strand break repair protein
  misc_feature (1)..(158): NCBI GI: 145604450 Blast Desc: MGG_08585 [Magnaporthe grisea 70-15] gi|145012445|gb|EDJ97101.1| MGG_08585 [Magnaporthe grisea 70-15]
  misc_feature (1)..(158): NCBI GI: 52783233 Blast Desc: RAD52_MAGGR RecName: Full=DNA repair and recombination protein rhm52; AltName: Full=RAD52 homolog gi|22775418|dbj|BAC11860.1| recombinational repair protein
  misc_feature (1)..(158): NCBI GI: 261352115 Blast Desc: DNA repair and recombination protein rad22 [Verticillium albo-atrum VaMs.102]
  misc_feature (1)..(158): NCBI GI: 256732158 Blast Desc: NECHADRAFT_100571 [Nectria haematococca mpVI 77-13-4]
  misc_feature (2)..(158): NCBI GI: 226281725 Blast Desc: RAD52 DNA repair protein RADC [Paracoccidioides brasiliensis Pb01]
  misc_feature (2)..(158): NCBI GI: 226287833 Blast Desc: RAD52 DNA repair protein RADC [Paracoccidioides brasiliensis Pb18]
  misc_feature (2)..(158): NCBI GI: 225680194 Blast Desc: RAD52 DNA repair protein RADC [Paracoccidioides brasiliensis Pb03]
  misc_feature (14)..(158): NCBI GI: 240280058 Blast Desc: RAD52 DNA repair protein RADC [Ajellomyces capsulatus H143]
  misc_feature (1)..(158): NCBI GI: 212528506 Blast Desc: RAD52 DNA repair protein RADC [Penicillium marneffei ATCC 18224] gi|210073808|gb|EEA27895.1| RAD52 DNA repair protein RADC [Penicillium marneffei ATCC 18224]
  misc_feature (13)..(158): NCBI GI: 111380642 Blast Desc: RAD52-like protein [Penicillium marneffei]
MSTTGNTRYDSMVNSFDEAEQRTTELTATHIAALQIRLEEQVRPENIDTHGDVSSPESHYFAADKYIALANEAFGSNGWSSSIQGLHIDFLEENTQTSEVSLDLSVTVRVTLRDGTYHEHTGYSHVRDCKGKAAAFETAKKEATSNALNRTLERLNDLRKSRTTNEVSLPEFSNIDGDTFPVPNRMSPSGDDETTTRTQAAE

SEQ ID NO: 28838 - DNA, 1020 bp, Muscodor strobelii
  misc_feature: SGI EST ID NO. CUFF.68013.1
  misc_feature: Variant of the nucleotide sequence at SEQ ID NO 28836
aaaaaaataagcacttgtgacacaatcacgataacagaagccttacgaaactactgtcaccaccatgacttcctagacatggtcggtagtccagtcgatcacctttggcggtccctcaacaacaaaatgaaggttgcacccggagcactgagctacgggaagcacgtcctggcttgaactggccattgtcggaaggtgaggagaactgtagtagtgggttgggtatgggccaagaggtaggaagagtaggtaggaagagtaggtaggaagagtaggtaggtaggtgtattgtggaggtggatagattgaaaggtagtgcaccggaagttccttgatctatcttgtcagctgagccaccacagccacttttaactgtaaacaatccctacctctcgacgacacacagctggggccagctgtcgatccgtaaagcccaaccgccacgggatgagaatggatgggctgtacaacgtttggttgatgataagagagaaggatgagcgcagaaaagttggcaactgccgtcagagctgggaagagaggtaaccttgcctaggcggcaacagctagcctagattgtcttagtttggggtctgggagaggggagagtgcgggaaggcaacggcgcggaccgctgcgcgtagaaatagcgactttggctactagactactccgtagcattccactttctccatcagtccacagatggcaactggctggcgaaggtctttaactcaacggtgctcatttcgcctagttttaaatagctaacactatagtaaaagtcacacttagttactcaataattggagcgtaggagacgaacacctaataagaactacctagaacgatcggcgctgcgagttcgaacacccagccgcccgtcggaaagttgttaggtgcttccagtgctcgatcacgcaaggatttcagcatgtctaccactggcaatacccggtacgacagcatggtcaactcgtttgatgaagctgagcagcgtacaacagagcttaccgctac

SEQ ID NO: 28839 - DNA, 1080 bp, Muscodor strobelii
  misc_feature: SGI cDNA ID NO. 569896
  misc_feature: Encodes the peptide sequence at SEQ ID NO 28840
atggctggactaactggctttgccccggatttgagtccgcaaagggaagctgtgctctacttattgaagtcttacttatcactcctctacatccctcagcaaggagagaggctgctcgaagatcaacagctgccgtttgccccaacactggttcaaatttccaaagagccggtcctgtcagatgacctgaaatctctgcttgaaattcttataggaaacaatcttgtgaactccattctcatttggcgacattatcttcaacaacatatggccacgtacaagcaggaggccgccctgtgtggactttactccagagagtgggacgaagacgaaggcttgcgagaggcacaagtccggatttctactaatctagatatgctgttcctaacactcttagaagaaagcaataggatcatcaaagtcaaggaccaaaacaacatggatttgggagacattccgcttcgattctctgactggctagatgaggcccacagaggttgcattggtctcttcaccctttcccgagagtatgcaacgacggacgagatcaacatcgattgctttggagattcacttatccccgcaagattcgaggttcgatacacttcgtatctttcaaatcatgatccatccgtcattacaatgctagaccaatcgccaggaaacatcagactgaccgatttcaatgcattcggccggtgccaaccagacaatgatcacttttggtttgctgtcatttaccacttcttgaagagagccctttcgactatagttactgagccccgacctttcgagaactcgggtagctacgaagagaactgggatgataattcaaatagttccgatagttcggagctaacagactctagcacatcgtccgtattatcatcatttacagctgcatctagtgttggatctgtcgactccgcatggcaagattttgagccgagatatactcataacaatccactttcgcgcctgtattgcgttgaggcacgctgctttagtcctccatccaaggctaagatcggctacagctacgcttatctcacaacattatgtagaatttgcaaaggttga

SEQ ID NO: 28840 - protein, 359 aa, Muscodor strobelii
  misc_feature: SGI Peptide ID NO. 569896
MAGLTGFAPDLSPQREAVLYLLKSYLSLLYIPQQGERLLEDQQLPFAPTLVQISKEPVLSDDLKSLLEILIGNNLVNSILIWRHYLQQHMATYKQEAALCGLYSREWDEDEGLREAQVRISTNLDMLFLTLLEESNRIIKVKDQNNMDLGDIPLRFSDWLDEAHRGCIGLFTLSREYATTDEINIDCFGDSLIPARFEVRYTSYLSNHDPSVITMLDQSPGNIRLTDFNAFGRCQPDNDHFWFAVIYHFLKRALSTIVTEPRPFENSGSYEENWDDNSNSSDSSELTDSSTSSVLSSFTAASSVGSVDSAWQDFEPRYTHNNPLSRLYCVEARCFSPPSKAKIGYSYAYLTTLCRICKG

SEQ ID NO: 28841 - DNA, 1953 bp, Muscodor strobelii
  misc_feature: SGI cDNA ID NO. 569897
  misc_feature: Encodes the peptide sequence at SEQ ID NO 28842
atgaagataagaatctctcttcttttcttatgcatcacactcggctcatgcgcctgtgcgaagaggaacaccacagaatatgaatacatcgttattggatcaggcccaggtggaggaccgcttgctgcaaatctagctcgtgagggccattcagttctgcttcttgaggctggcgaagatcgcgaagacttgctcttgcaggtaccaagatgggccgataccaattctgagacggacgacttatcatggaggttctggacaactcattaccaagacgagatgacaggtcggcgagataaggctttcacctaccaattgactaatggatctctatacgttggcctgaaccctccggaaggcgcgattgcgaagggaatcttctatcctcgtggcaatacagtaggcggctccgccaacgctaatgcaatgaacattgtgcttccgcgggatgatgactggaacttcatagcggactcaacgggtgacgaatcctggagagctgagaagatgagagaccacttcgtagagctcgagcgaaatacttacatgtctccggcgacacctggttatgggcatgacggttacatcgggaccaatcgaaacaacattacctatgtgaccaattcgcccggtacaatgcgagtcgtccgcaatgccctcttgatgacagaaggagtcgaagatgcaagtgaagaagaggtcattactcgcatggaacgtgatctcaatcgacctgatgctcccggtcgctattcccctggtgtatatcaagttcctctccacatcgacgaaaatcgccgccgaaccagtccccatgattacatcaagtcgactcttgccgcaaaattcgaagacggttccgcgcgatatccactgacattgagcacacgcagtctcgccacaaaaattctctttgagaagataaacggcaaggcaaaagctgttggtgttgaatatgaagtgggcactgccctctacgaaggcgatcgtcggtacgatccgtcagttcatggcgaacagaagactgctaaagctacgcgagaggtcattgtcgctggtggtgctttcaatactccccagatcttgaaactcagtggtattggaccccgccaagagcttgagcagcatggaatccctgttgtggccgatctccccgcagtgggtaaatacctccgcgacaactatgaaattggcatcaaccttcaatcgaccaaagtatgggagaaccccgccggtgctgattgtctttgggaccctagcacctccacaccttcaactgacccttgttttgcgcaatgggagcagggttatggcccgtacggcgagggtgcagctcctatctttttgctctatcgaagcagcgttgcccccactgaagacaccgacttgatcatctttggctctgcaggcgctgttttcgacggccactatcccgggttcagttccgttccgtggcctccttcatccttcttctgggtcgtcgtcaagatgcctagcgagaacaatgcaggcacggtaacactgaagtcagcaaatcctcgagagctaccggagatcaacttcaacttcttccaaaaggatgccgatacagacttacgcgcacttagcgaaggtctgcagcacatgctaaatatcatgaatgcaaccggcgagccttacgaacccttcacattcattgagcctgcggctggattcgattctgatatgagtagtcttgagcaacatgcgcgggaacgcacttgggggcaccatgccatggggagttgtcgtatggggccaaaggataacaccaactactgcgttgactccgagtttaaggtgaacggggttgatggtttgcgtgttgtcgatgggtccatcttccctgttaacatggctggtttcccggttggcgctacatttacaattagtcagaaagctttccatgctatcatgagcgatgcaacccgctaa

SEQ ID NO: 28842 - protein, 650 aa, Muscodor strobelii
  misc_feature: SGI Peptide ID NO. 569897
  misc_feature (493)..(640): Pfam Id: PF05199 Pfam Desc: GMC oxidoreductase
  misc_feature (27)..(411): Pfam Id: PF00732 Pfam Desc: GMC oxidoreductase
  misc_feature (584)..(640): Pfam Id: PF05199 Pfam Desc: GMC oxidoreductase
  misc_feature (300)..(389): Pfam Id: PF00732 Pfam Desc: GMC oxidoreductase
  misc_feature (28)..(60): Pfam Id: PF07992 Pfam Desc: Pyridine nucleotide-disulphide oxidoreductase
  misc_feature (23)..(645): NCBI GI: 256726464 Blast Desc: NECHADRAFT_39574 [Nectria haematococca mpVI 77-13-4]
  misc_feature (6)..(644): NCBI GI: 256727900 Blast Desc: NECHADRAFT_83489 [Nectria haematococca mpVI 77-13-4]
  misc_feature (2)..(647): NCBI GI: 46127809 Blast Desc: FG08282.1 [Gibberella zeae PH-1]
  misc_feature (18)..(648): NCBI GI: 189195680 Blast Desc: choline dehydrogenase, mitochondrial precursor [Pyrenophora tritici-repentis Pt-1C-BFP] gi|187980057|gb|EDU46683.1| choline dehydrogenase, mitochondrial
  misc_feature (27)..(649): NCBI GI: 154321511 Blast Desc: BC1G_01630 [Botryotinia fuckeliana B05.10] gi|150852168|gb|EDN27360.1| BC1G_01630 [Botryotinia fuckeliana B05.10]
  misc_feature (5)..(647): NCBI GI: 261354183 Blast Desc: choline dehydrogenase [Verticillium albo-atrum VaMs.102]
  misc_feature (21)..(648): NCBI GI: 242791737 Blast Desc: choline dehydrogenase, [Talaromyces stipitatus ATCC 10500] gi|218718402|gb|EED17822.1| choline dehydrogenase, [Talaromyces stipitatus ATCC 10500]
  misc_feature (20)..(648): NCBI GI: 240275508 Blast Desc: GMC oxidoreductase [Ajellomyces capsulatus H143]
  misc_feature (20)..(649): NCBI GI: 261197980 Blast Desc: choline dehydrogenase [Ajellomyces dermatitidis SLH14081] gi|239595355|gb|EEQ77936.1| choline dehydrogenase [Ajellomyces dermatitidis SLH14081]
  misc_feature (24)..(648): NCBI GI: 225561900 Blast Desc: glucose-methanol-choline oxidoreductase [Ajellomyces capsulatus G186AR]
  misc_feature (26)..(645): SWISSPROT Homolog: EC 1.1.99.1 Choline dehydrogenase
MKIRISLLFLCITLGSCACAKRNTTEYEYIVIGSGPGGGPLAANLAREGHSVLLLEAGEDREDLLLQVPRWADTNSETDDLSWRFWTTHYQDEMTGRRDKAFTYQLTNGSLYVGLNPPEGAIAKGIFYPRGNTVGGSANANAMNIVLPRDDDWNFIADSTGDESWRAEKMRDHFVELERNTYMSPATPGYGHDGYIGTNRNNITYVTNSPGTMRVVRNALLMTEGVEDASEEEVITRMERDLNRPDAPGRYSPGVYQVPLHIDENRRRTSPHDYIKSTLAAKFEDGSARYPLTLSTRSLATKILFEKINGKAKAVGVEYEVGTALYEGDRRYDPSVHGEQKTAKATREVIVAGGAFNTPQILKLSGIGPRQELEQHGIPVVADLPAVGKYLRDNYEIGINLQSTKVWENPAGADCLWDPSTSTPSTDPCFAQWEQGYGPYGEGAAPIFLLYRSSVAPTEDTDLIIFGSAGAVFDGHYPGFSSVPWPPSSFFWVVVKMPSENNAGTVTLKSANPRELPEINFNFFQKDADTDLRALSEGLQHMLNIMNATGEPYEPFTFIEPAAGFDSDMSSLEQHARERTWGHHAMGSCRMGPKDNTNYCVDSEFKVNGVDGLRVVDGSIFPVNMAGFPVGATFTISQKAFHAIMSDATR

SEQ ID NO: 28843 - DNA, 537 bp, Muscodor strobelii
  misc_feature: SGI cDNA ID NO. 569898
  misc_feature: Encodes the peptide sequence at SEQ ID NO 28844
atgcgttttgtctattccgtcattttcagcctcatccacttgggttcggctctggacatcaagttcaaatctggcagtggctgctccggcaacagcgtgcaatgcacaaacgccgagcccagtgtctgttgtacccaggggtacactcaatccgcaagtgttggatactatggcatcgttcccagctgggacattactatcaagagctaccaaggcaacggctgtcagaccgtaagggatacttcacgtgttcacgggcctaacttccaatgccatagtagcggtggctatactgggggaaagtacggcttcaacggcaagaagatcgcagccagggctggggcatcgtgcgagaggagccaaaaccctgacactttgactctcgtggatgtacgtgaaaatgccgtgtattatcggtcgttgcttgcgtattattcgactgaccagggcctaatgcttagcgcggacgctaccgtgaatatcaccactgctgcagaagttccatcggagtacaagcatctggagatctcaaagtag

SEQ ID NO: 28844 - protein, 178 aa, Muscodor strobelii
  misc_feature: SGI Peptide ID NO. 569898
  misc_feature (1)..(177): NCBI GI: 39946278 Blast Desc: MGG_08373 [Magnaporthe grisea 70-15] gi|145019972|gb|EDK04200.1| MGG_08373 [Magnaporthe grisea 70-15]
  misc_feature (1)..(130): NCBI GI: 39954909 Blast Desc: MGG_08962 [Magnaporthe grisea 70-15] gi|145021079|gb|EDK05208.1| MGG_08962 [Magnaporthe grisea 70-15]
  misc_feature (3)..(175): NCBI GI: 46115516 Blast Desc: FG03600.1 [Gibberella zeae PH-1]
  misc_feature (1)..(133): NCBI GI: 171689170 Blast Desc: protein product [Podospora anserina] gi|170944547|emb|CAP70658.1| protein product [Podospora anserina]
  misc_feature (6)..(130): NCBI GI: 46127233 Blast Desc: FG07994.1 [Gibberella zeae PH-1]
  misc_feature (1)..(109): NCBI GI: 171694692 Blast Desc: protein product [Podospora anserina] gi|170947588|emb|CAP59749.1| protein product [Podospora anserina]
  misc_feature (1)..(178): NCBI GI: 238838965 Blast Desc: [Microsporum canis CBS 113480]
MRFVYSVIFSLIHLGSALDIKFKSGSGCSGNSVQCTNAEPSVCCTQGYTQSASVGYYGIVPSWDITIKSYQGNGCQTVRDTSRVHGPNFQCHSSGGYTGGKYGFNGKKIAARAGASCERSQNPDTLTLVDVRENAVYYRSLLAYYSTDQGLMLSADATVNITTAAEVPSEYKHLEISK

SEQ ID NO: 28845 - DNA, 786 bp, Muscodor strobelii
  misc_feature: SGI cDNA ID NO. 569899
  misc_feature: Encodes the peptide sequence at SEQ ID NO 28846
atgaacacatcaacaccagagcgccttcattctgacaaagaggccacccatggcatgtttcatttagaaaaggctgggctagaagtcgcgccaatagaggtgactttagaacagcccaagcaatatgccaatcagcaattttctatgcaccagcaacacccgctacagaggccattgaaagaatcaactatctgcggcgtcagacgagtaacgttcctcctatcggtcattctcatattcgtgattttggcggccacgataggaggcggtgtgggcggctcaatggcagtccagaacgctaagagcgcatacacaaatggtggtgcgaatttatccgcgcccggcggctcttcttgctcagttacagccacgataacagctcagtcaacagcagcgatcgacgagccattagttgtaccaacaggtgttgtggcgctagactgccccgggatgaacgacacggatcaggtcgtgaatctaggccttggagaaaactcccggtcgtgggtgttctctgcgacctgcaatcgtgacttcgtaggctatgacatcagcggactcattgcctactcgttccatgactgccttcatgcgtgcgcagcacacaacacttttagcggcaatatatcgtgcacggcgcttacgtttgccgccaaccagaccgcctatattccaggattccttggcaactgctggcttaaatacgggttgccgacatcattttcgggcactgtaaattctggtttgcttgctagcgctttgctcaaaagcgtaccgccctcttag

SEQ ID NO: 28846 - protein, 261 aa, Muscodor strobelii
  misc_feature: SGI Peptide ID NO. 569899
  misc_feature (63)..(251): NCBI GI: 171681678 Blast Desc: protein product [Podospora anserina] gi|170940798|emb|CAP66447.1| protein product [Podospora anserina]
  misc_feature (128)..(259): NCBI GI: 116201765 Blast Desc: [Chaetomium globosum CBS 148.51] gi|88177285|gb|EAQ84753.1| [Chaetomium globosum CBS 148.51]
  misc_feature (137)..(206): NCBI GI: 145606424 Blast Desc: [Magnaporthe grisea 70-15] gi|145014088|gb|EDJ98729.1| [Magnaporthe grisea 70-15]
  misc_feature (50)..(234): NCBI GI: 256730172 Blast Desc: NECHADRAFT_82894 [Nectria haematococca mpVI 77-13-4]
  misc_feature (50)..(248): NCBI GI: 39952173 Blast Desc: MGG_01729 [Magnaporthe grisea 70-15] gi|145020426|gb|EDK04555.1| MGG_01729 [Magnaporthe grisea 70-15]
  misc_feature (183)..(234): NCBI GI: 145611834 Blast Desc: [Magnaporthe grisea 70-15] gi|145019074|gb|EDK03353.1| [Magnaporthe grisea 70-15]
  misc_feature (50)..(202): NCBI GI: 261361403 Blast Desc: conserved [Verticillium albo-atrum VaMs.102]
MNTSTPERLHSDKEATHGMFHLEKAGLEVAPIEVTLEQPKQYANQQFSMHQQHPLQRPLKESTICGVRRVTFLLSVILIFVILAATIGGGVGGSMAVQNAKSAYTNGGANLSAPGGSSCSVTATITAQSTAAIDEPLVVPTGVVALDCPGMNDTDQVVNLGLGENSRSWVFSATCNRDFVGYDISGLIAYSFHDCLHACAAHNTFSGNISCTALTFAANQTAYIPGFLGNCWLKYGLPTSFSGTVNSGLLASALLKSVPPS

SEQ ID NO: 28847 - DNA, 2262 bp, Muscodor strobelii
  misc_feature: SGI cDNA ID NO. 569900
  misc_feature: Encodes the peptide sequence at SEQ ID NO 28848
atgtcaaagcctacaagaggtctcttttcaataccagcagcccctcctagaggtaatgcacgaattatcggactggtgactagtgacgagaggagaattcattttcctagcagcatatttagaaacagcctgcaaccactcaaccaatctgacaatcaagcgccacaagcgccaaacaccgtaaatgatggagtgtctcagggaacacagacaaaccccgaggagagcgcaacatctaggtctccatggctcggacgattcgattttcccgatatagcaagaaaggacgtcgaaaaccattccggattcgcccccgagttcccgcgattgaacgatcctttgtactatggcgaattccccgacgtgacctccataggcccgcaagatttcacagaatctgatactctatttttcgaggaagaattccaaaggcgaaaacttctaggtttgaagacatgggaagcggctgccctcaatcgctatattagattctcatccgagaacgatttcatgtctggcggacatggactggaggaccatacaccagttgtggctcatctgctatggcaccgagatcgaattgccgttaacgaagacaattggctacctttgttccgcaaagatagatggtacgattggatagagttcaagccggacactacagctgagcagcggggcaagacctggaccgtagatgactcattgctttgggacgagatgaggatctctcttgagctggctgaccgaatcatgaaagccattattcatgagcaatctgatagtgtaggtgataatgtaccgctttccttcgacaaggacgaggacattctgctgaatcctcacagtttcgaacaatttttgcttcgacatacaaatgaacagtggattgaaagatttaacttattaactaagaatactctatggagtatgacgcgagaggatctcatgggaacaacactaaacattgaccagagagtcccggctgagtgcatcgcgttcgatgtagggccacttgaggcactaataaccaaaagattgagtcttgcggagcggtgtatgctgcattatatactagccatcacttttgtgcatgaacttatgcatgccattacttttcaacgtcgattcaatgataattacagagggacagatgtccaggtcgtgggggagaggggcttaaatgacgaaccgttcatagacgctgtcggtatctccgaactaggctcgaacatcgagtctgctatctttggtgggcggcttgatacttaccctgcctccgacatcccattgattataactgccactggctatccaaatgtcttggcctacggttcacaggttcccaatagctggtttgaatggcaagatgtaatgatacgccaatcctgcataacacctgcttatatctcgaagctattgtccgaagctttttggaacgatcaaagatatccgacaagaactaccaattacttccaccgcaaccccgttatcgtatcgcaatcgcgcgttggcactgagatagacaaacctgaaaggtggggcgattttcacgtcggagacttgagattgttccaagaagagaatgccgaagacgaccggatggtagaagcttggacggaaaggcatgattattgggatcttgtgagagcggtatggagggacataatgtcctgcgcaaagcttgcagatagtgtcttgagacattcggggtggacgagatttgaccaagactggatcatcgccgtgttaccaactgcagatctagcatcgccatattggttctactgggcaatagggcttctcatgctggcagcacttcctttgcagcatcaacgaattgatcagccgagtcaagagacatcgccagtgtacatattctttgccagccctagtagagaagcatcggctgcgggccgaaggggtattaataggcagaggggtaatgtgacatatggtgccttcagtcaactggattacatcgacatcgttgatgatctactgaggcgcattagggacaacgagggtcttgtctggttatcgtgtgtacgctctgttttggagtgtagtgcagcactacgaacacagataagccgacaaactagagaatacccgagacgtggacactggttcaagtgggcaccgctctggccactaaaattccccgaagcttcggaagaccttggaagttttgacccggtgcggggcgcctggagagcaaaagtgaaagatccgaatacagatcgatacatgtggattccttga

SEQ ID NO: 28848 - protein, 753 aa, Muscodor strobelii
  misc_feature: SGI Peptide ID NO. 569900
  misc_feature (101)..(309): NCBI GI: 85089861 Blast Desc: NCU09292 [Neurospora crassa OR74A] gi|28919473|gb|EAA28908.1| NCU09292 [Neurospora crassa OR74A]
  misc_feature (320)..(450): NCBI GI: 156045343 Blast Desc: [Sclerotinia sclerotiorum 1980] gi|154694255|gb|EDN93993.1| [Sclerotinia sclerotiorum 1980]
MSKPTRGLFSIPAAPPRGNARIIGLVTSDERRIHFPSSIFRNSLQPLNQSDNQAPQAPNTVNDGVSQGTQTNPEESATSRSPWLGRFDFPDIARKDVENHSGFAPEFPRLNDPLYYGEFPDVTSIGPQDFTESDTLFFEEEFQRRKLLGLKTWEAAALNRYIRFSSENDFMSGGHGLEDHTPVVAHLLWHRDRIAVNEDNWLPLFRKDRWYDWIEFKPDTTAEQRGKTWTVDDSLLWDEMRISLELADRIMKAIIHEQSDSVGDNVPLSFDKDEDILLNPHSFEQFLLRHTNEQWIERFNLLTKNTLWSMTREDLMGTTLNIDQRVPAECIAFDVGPLEALITKRLSLAERCMLHYILAITFVHELMHAITFQRRFNDNYRGTDVQVVGERGLNDEPFIDAVGISELGSNIESAIFGGRLDTYPASDIPLIITATGYPNVLAYGSQVPNSWFEWQDVMIRQSCITPAYISKLLSEAFWNDQRYPTRTTNYFHRNPVIVSQSRVGTEIDKPERWGDFHVGDLRLFQEENAEDDRMVEAWTERHDYWDLVRAVWRDIMSCAKLADSVLRHSGWTRFDQDWIIAVLPTADLASPYWFYWAIGLLMLAALPLQHQRIDQPSQETSPVYIFFASPSREASAAGRRGINRQRGNVTYGAFSQLDYIDIVDDLLRRIRDNEGLVWLSCVRSVLECSAALRTQISRQTREYPRRGHWFKWAPLWPLKFPEASEDLGSFDPVRGAWRAKVKDPNTDRYMWIP

SEQ ID NO: 28849 - DNA, 453 bp, Muscodor strobelii
  misc_feature: SGI EST ID NO. CUFF.68075.0
  misc_feature: Variant of the nucleotide sequence at SEQ ID NO 28847
gtttgaatggcaagatgtaatgatacgccaatcctgcataacacctgcttatatctcgaagctattgtccgaagctttttggaacgatcaaagatatccgacaagaactaccaattacttccaccgcaaccccgttatcgtatcgcaatcgcgcgttggcactgagatagacaaacctgaaaggtggggcgattttcacgtcggagacttgagattgttccaagaagagaatgccgaagacgaccggatggtagaagcttggacggaaaggcatgattattgggatcttgtgagagcggtatggtatgatcggtataaaaatattgtaagtcctcaattcggtgagctacagcgtgcctgattattatagagcagctgtactaacgtattcaaagtgggacgtatcgcctgtgggtaaatcacttcttcgccagatgagacccttaatactaa

SEQ ID NO: 28850 - DNA, 1038 bp, Muscodor strobelii
  misc_feature: SGI cDNA ID NO. 569901
  misc_feature: Reduced expression when VOC is produced
  misc_feature: Encodes the peptide sequence at SEQ ID NO 28851
atgactttcaaaatcttcataactggcgtcacaggtctagtgggcggagacacgctccacgagttaaacgggaaatatcccgacatcgaatacgcagctcttgtgcgtagcgaggataaagcaaacaaggtcagagctgcatatcccaaggtccgtgtcatattgggatcgctcgatgattctacactattgaagaaagaagcagcatgggcggatctcgtcttacatgctgcggacgcatcagaccacgagggagccgctcgtgccatagctgaaggacttgtagaaggccactcagcctctcgcccgggttactggctgcacacgagcgggaccggtatccttacatacttcgacactgctgagggacgcttaggcgagccacctttagacaaacactttgatgactttgatcatgttgagtcgatgacgaagctacctgatgaggcattccatcgtaatgtcgataagattgtgctcgagtgtgggacacagcatgcagatgtggtccgcaccgctgttatttgcccacctacaatctatggaaagggtcgcggacccgtctcgggacgtagtcgccaggcttacgtaatggccaatctgatacttaccaaaggcttcattcccatcatcggccgaggcctatctcgaatgaacaatattcacatctacgacctcacgaagggatacttgttgctgactgaagcagctttggcggggaataactcacccgaggtctggggcgagcggggctattacctgtgcgaaagcggagtgcacgagtggggtcctctcgcccgcaagatcgcgagccaggcatacgagaagggtctcttgaaaagcaagcccgaggagaaacagctcgagaaagacgaagcgatcaagatcgctggcttcgaggccttgagttggggcttgaactcgattgctgacgcgcagagatttagcaaactattcggatggaaagctgaagctggttcgcttgacgatgagatccctcaaatcctagagtccgaggccaagctgcttgggatgtag

SEQ ID NO: 28851 - protein, 345 aa, Muscodor strobelii
  misc_feature: SGI Peptide ID NO. 569901
  misc_feature (5)..(248): Pfam Id: PF01370 Pfam Desc: NAD dependent epimerase/dehydratase family
  misc_feature (4)..(343): NCBI GI: 67904002 Blast Desc: AN8988.2 [Aspergillus nidulans FGSC A4] gi|40745164|gb|EAA64320.1| AN8988.2 [Aspergillus nidulans FGSC A4] gi|259486562|tpe|CBF84510.1| TPA: conserved [Aspergillus FGSC
  misc_feature (1)..(345): NCBI GI: 145230710 Blast Desc: An01g12110 [Aspergillus niger] gi|134055738|emb|CAK44111.1| protein product [Aspergillus niger]
  misc_feature (4)..(343): NCBI GI: 145250967 Blast Desc: An15g04620 [Aspergillus niger] gi|134082524|emb|CAK42440.1| protein product [Aspergillus niger]
  misc_feature (1)..(345): NCBI GI: 156049359 Blast Desc: SS1G_08386 [Sclerotinia sclerotiorum 1980] gi|154692785|gb|EDN92523.1| SS1G_08386 [Sclerotinia sclerotiorum 1980]
  misc_feature (1)..(343): NCBI GI: 189188010 Blast Desc: conserved [Pyrenophora tritici-repentis Pt-1C-BFP] gi|187971950|gb|EDU39449.1| conserved [Pyrenophora tritici-repentis Pt-1C-BFP]
  misc_feature (4)..(343): NCBI GI: 115401594 Blast Desc: conserved [Aspergillus terreus NIH2624] gi|114190326|gb|EAU32026.1| conserved [Aspergillus terreus NIH2624]
  misc_feature (1)..(345): NCBI GI: 154303671 Blast Desc: BC1G_08720 [Botryotinia fuckeliana B05.10] gi|150854514|gb|EDN29706.1| BC1G_08720 [Botryotinia fuckeliana B05.10]
  misc_feature (1)..(343): NCBI GI: 46102862 Blast Desc: FG00066.1 [Gibberella zeae PH-1]
  misc_feature (4)..(339): NCBI GI: 242783706 Blast Desc: nucleoside-diphosphate-sugar epimerase, [Talaromyces stipitatus ATCC 10500] gi|218720387|gb|EED19806.1| nucleoside-diphosphate-sugar epimerase, [Talaromyces stipitatus
  misc_feature (4)..(345): NCBI GI: 226278304 Blast Desc: conserved [Paracoccidioides brasiliensis Pb01]
  misc_feature: Useful for introducing or modulating the production of volatile compounds
MTFKIFITGVTGLVGGDTLHELNGKYPDIEYAALVRSEDKANKVRAAYPKVRVILGSLDDSTLLKKEAAWADLVLHAADASDHEGAARAIAEGLVEGHSASRPGYWLHTSGTGILTYFDTAEGRLGEPPLDKHFDDFDHVESMTKLPDEAFHRNVDKIVLECGTQHADVVRTAVICPPTIYGKGRGPVSGRSRQAYVMANLILTKGFIPIIGRGLSRMNNIHIYDLTKGYLLLTEAALAGNNSPEVWGERGYYLCESGVHEWGPLARKIASQAYEKGLLKSKPEEKQLEKDEAIKIAGFEALSWGLNSIADAQRFSKLFGWKAEAGSLDDEIPQILESEAKLLGM

SEQ ID NO: 28852 - DNA, 2085 bp, Muscodor strobelii
  misc_feature: SGI EST ID NO. CUFF.68563.1
  misc_feature: Variant of the nucleotide sequence at SEQ ID NO 28850
gatcggtatactctgcctcattgttcaaccacatcatatcgcgggccgtagggacctgtaagactagtgcattgccagcgaaagaagttatcgaacgtttcaatgttctttgataggttcggagagatagattcacgacaacccacggactactacactggatctggccaaaaaggaagagcgactcaactggtattagatgtccaaaatcgcctccgtttgcattgtggtagctgtagcacgcttcatggctcttgtgcaatggaaatatcaattaccacaggctccctacctttatgctaagtggtgtcttcattttgcgtgatatagttcagatcacaaaagcgcggtgatggagctcacgtgacaagcccgcaattacatcatcgtttctcaagtattgtgggagaaaatgagaccgccataccgagtgcttagaaatcggcgttgaccagcacggcaatgctaacgctagtttgacacgatacattctgaacatctaggcgtaaatttacaaattgttctaaatcatcgcccgtcagctatcggatacaacatattggtttcaatttaactggcgtcacaggtctagtgggcggagacacgctccacgagttaaacgggaaatatcccgacatcgaatacgcagctcttgtgcgtagcgaggataaagcaaacaaggtcagagctgcatatcccaaggtccgtgtcatattgggatcgctcgatgattctacactattgaagaaagaagcagcatgggcggatctcgtcttacatgctgcggacgcatcagaccacgagggagccgctcgtgccatagctgaaggacttgtagaaggccactcagcctctcgcccgggttactggctgcacacgagcgggaccggtatccttacatacttcgacactgctgagggacgcttaggcgagccacctttagacaaacactttgatgactttgatcatgttgagtcgatgacgaagctacctgatgaggcattccatcgtaatgtcgataagattgtgctcgagtgtgggacacagcatgcagatgtggtccgcaccgctgttatttgcccacctacaatctatggaaagggtcgcggacccgtctcgggacgtagtcgccaggcttacgtaatggccaatctgatacttaccaaaggcttcattcccatcatcggccgaggcctatctcgaatgaacaatattcacatctacgacctcacgaagggatacttgttgctgactgaagcagctttggcggggaataactcacccgaggtctggggcgagcggggctattacctgtgcgaaagcggagtgcacgagtggggtcctctcgcccgcaagatcgcgagccaggcatacgagaagggtctcttgaaaagcaagcccgaggagaaacagctcgagaaagacgaagcgatcaagatcgctggcttcgaggccttgagttggggcttgaactcgattgctgacgcgcagagatttagcaaactattcggatggaaagctgaagctggttcgcttgacgatgagatccctcaaatcctagagtccgaggccaagctgcttgggatgtagcattcttgcaagatgatttaatatcaaatactctggtttccgcatgagattcactgctctcgatgcgcaaagtgtgactcggagtagagcttgtactaccaggagtcaaagtagatccagatcaaccaactgagatggcgtggattatattcaacatgatgtagtattgttgctcagagtggctgtctgtctagtatgtcattaggactaagtcaaagtgattcgcctgcaagctttcactccacaaccagagaacgtgccttattcacaaaaagacaacattatacatattcagatactgagctcacaccttctccaaaatcgtatttgctagccactcaagcttctccaccacccaacccggatcagataggaaaggcgaatgggaaccgctgaactctgccaccagcggctctggttgtatatacgaagccatttgctgctgtagccaaattgggatggcttggtcatctttgcagtagaggtacgcgcaag

SEQ ID NO: 28853 - DNA, 753 bp, Muscodor strobelii
  misc_feature: SGI cDNA ID NO. 569902
  misc_feature: Encodes the peptide sequence at SEQ ID NO 28854
atggacgcgaccttcgttttcgttcatggcgcttggcactcagtagagagttggacagaagtccgcgatgagttgagtaacaaaggctgggagaccgaggccgtcgcgtacccctctcctggtggaccctcaaccaatgtagggctacaggacgatgcacaagccattcgacaggtcatagaaggactctgcgacgagggcaagaaggtcgttcttgttgcccactcctacggagcctgcccgggcgccaccgccagccaaggcttctcatggtaccgccaaagagtcgctgagggcaagaagggaggcattgtcatgtttgtctatctgactggcttcgtcatccccaaaggggagagtttgacggacgccctaggtggccagttccccaggatcatgctcctagatgaggagacgaactgggtcaccgttaattcgccggaaaacgtcttctaccacgatgtggagcccgaggtgaagtcgaagttcgtccagcttctccggcccgagccgaagcgggtcttcctcgaccccgtgacgtacgaaccttggaccgacataccttgcgcgtacctctactgcaaagatgaccaagccatcccaatttggctacagcagcaaatggcttcgtatatacaaccagagccgctggtggcagagttcagcggttcccattcgcctttcctatctgatccgggttgggtggtggagaagcttgagtggctagcaaatacgattttggagaaggtgtga

SEQ ID NO: 28854 - protein, 250 aa, Muscodor strobelii
  misc_feature: SGI Peptide ID NO. 569902
  misc_feature (4)..(250): NCBI GI: 256720361 Blast Desc: NECHADRAFT_56035 [Nectria haematococca mpVI 77-13-4]
  misc_feature (4)..(249): NCBI GI: 46137141 Blast Desc: FG10086.1 [Gibberella zeae PH-1]
  misc_feature (4)..(250): NCBI GI: 46115632 Blast Desc: FG03658.1 [Gibberella zeae PH-1]
  misc_feature (5)..(240): NCBI GI: 67524189 Blast Desc: AN2552.2 [Aspergillus nidulans FGSC A4] gi|40745501|gb|EAA64657.1| AN2552.2 [Aspergillus nidulans FGSC A4]
  misc_feature (5)..(240): NCBI GI: 259487984 Blast Desc: TPA: conserved [Aspergillus nidulans FGSC A4]
  misc_feature (1)..(240): NCBI GI: 255939366 Blast Desc: Pc16g00290 [Penicillium chrysogenum Wisconsin 54-1255] gi|211585075|emb|CAP92699.1| Pc16g00290 [Penicillium chrysogenum Wisconsin 54-1255]
  misc_feature (2)..(246): NCBI GI: 119182859 Blast Desc: CIMG_06428 [Coccidioides immitis RS]
  misc_feature (4)..(240): NCBI GI: 255955955 Blast Desc: Pc21g17320 [Penicillium chrysogenum Wisconsin 54-1255] gi|211590441|emb|CAP96629.1| Pc21g17320 [Penicillium chrysogenum Wisconsin 54-1255]
  misc_feature (2)..(232): NCBI GI: 145242936 Blast Desc: An11g00150 [Aspergillus niger] gi|134078686|emb|CAK48248.1| protein product [Aspergillus niger]
  misc_feature (4)..(247): NCBI GI: 145235585 Blast Desc: An03g05620 [Aspergillus niger] gi|134058128|emb|CAK38322.1| protein product [Aspergillus niger]
MDATFVFVHGAWHSVESWTEVRDELSNKGWETEAVAYPSPGGPSTNVGLQDDAQAIRQVIEGLCDEGKKVVLVAHSYGACPGATASQGFSWYRQRVAEGKKGGIVMFVYLTGFVIPKGESLTDALGGQFPRIMLLDEETNWVTVNSPENVFYHDVEPEVKSKFVQLLRPEPKRVFLDPVTYEPWTDIPCAYLYCKDDQAIPIWLQQQMASYIQPEPLVAEFSGSHSPFLSDPGWVVEKLEWLANTILEKV

SEQ ID NO: 28855 - DNA, 1383 bp, Muscodor strobelii
  misc_feature: SGI cDNA ID NO. 569903
  misc_feature: Encodes the peptide sequence at SEQ ID NO 28856
atgtcgacattggaatctaaactgcccttccgtgcgatagtcgtcggaggcggccccgtcgggttaattgctgcacactgtttcgataaagctggcatagacttcgtcgtgctcgagcggcagccgacgataattgcagatgtcggcgccagcctggttcttagcccatccactttgagggtattcgcacaattgggattactagacgagtttttcactctcagccacggcctggagcattacatgcattggactatggacggcagattgatgaaacacagcaagatgtttgacgtggtcaaggagaaccatggcgcgccaccatgttgttgccatcgtgccgatctgattgaactcatctatgagtcgctttctgggtcagctaggagccggatacttgtcaacaagtacgtcacaggtgtatcgactagcaatgagggggtctttgctcactgcgctgacgacacgaactatgggggaacaatcatggtcggcgccgatggcatcggcagtcgggcgcggcgagccatgaatcgaaacaatgcgagctctaaagagccgttcacagcacagtatcgatgtttatggttctcgctaccgaaacagccgaacgtcaaagacggcaccgcctacgagacgcatggagcgggctttgcagcccagctgctgcaggctcatgaaaaagcatgggtctttgtctacgagcgcctggaggcgtctgtatcacgaggcgatgcaacaaagtacacagacgcggacatcgacaatatgatcaagcgctggggtcatgcacacatggacgccgatacgacagtaaaacagatgttcgaccaacggtacaaagccggtatgacgaatgtagatgagggcacagtagaacagtggagttcggggcggacggtgctagtcggtgattctgcacataaaatgacgccgaactttgctcagggcttcaacaatggagttcaggatgttgttgcacttacaaacgagttgtacagtcttctacgatctactgaggacgacgagaaattcggggagaaaggcgaagcaactacgaagattctaacaaatgatgcaataagagcagcatttgagcgttatgagacgaagcgactagaatcttgcaagcaagatgtctcgatctcgagcatggcattgagaggctcagcgtgggctaatttattctaccagttcttagacagggtgatcttgccgtctctctctgatcgtgccaatacgtggcttttgacgcgattgaccgcaccttcctattcgcagggagtcgtgctggattgtgtcgaatgtgaagagccgcttatgggaaaatttccgtgggcgaacgcaatgagacgaaagaatgcggagaaattgcaaatctaa

SEQ ID NO: 28856 - protein, 460 aa, Muscodor strobelii
  misc_feature: SGI Peptide ID NO. 569903
  misc_feature (9)..(353): Pfam Id: PF01494 Pfam Desc: FAD binding domain
  misc_feature (9)..(71): Pfam Id: PF01494 Pfam Desc: FAD binding domain
  misc_feature (291)..(328): Pfam Id: PF01494 Pfam Desc: FAD binding domain
  misc_feature (9)..(457): NCBI GI: 145234591 Blast Desc: An03g00370 [Aspergillus niger] gi|134057615|emb|CAK38015.1| protein product [Aspergillus niger]
  misc_feature (10)..(450): NCBI GI: 256734858 Blast Desc: NECHADRAFT_75548 [Nectria haematococca mpVI 77-13-4]
  misc_feature (6)..(446): NCBI GI: 145241766 Blast Desc: An09g02150 [Aspergillus niger] gi|134078069|emb|CAK40152.1| protein product [Aspergillus niger]
  misc_feature (10)..(456): NCBI GI: 189197565 Blast Desc: FAD binding domain containing protein [Pyrenophora tritici-repentis Pt-1C-BFP] gi|187981068|gb|EDU47694.1| FAD binding domain containing protein [Pyrenophora tritici-repentis
  misc_feature (12)..(450): NCBI GI: 171676910 Blast Desc: protein product [Podospora anserina] gi|170936522|emb|CAP61182.1| protein product [Podospora anserina]
  misc_feature (10)..(447): NCBI GI: 46115866 Blast Desc: FG03775.1 [Gibberella zeae PH-1]
  misc_feature (11)..(458): NCBI GI: 145606496 Blast Desc: MGG_02292 [Magnaporthe grisea 70-15] gi|145014141|gb|EDJ98782.1| MGG_02292 [Magnaporthe grisea 70-15]
  misc_feature (10)..(450): NCBI GI: 256728204 Blast Desc: NECHADRAFT_54017 [Nectria haematococca mpVI 77-13-4]
  misc_feature (10)..(457): NCBI GI: 256722361 Blast Desc: NECHADRAFT_82202 [Nectria haematococca mpVI 77-13-4]
  misc_feature (10)..(384): NCBI GI: 154313266 Blast Desc: BC1G_05330 [Botryotinia fuckeliana B05.10] gi|150849399|gb|EDN24592.1| BC1G_05330 [Botryotinia fuckeliana B05.10]
MSTLESKLPFRAIVVGGGPVGLIAAHCFDKAGIDFVVLERQPTIIADVGASLVLSPSTLRVFAQLGLLDEFFTLSHGLEHYMHWTMDGRLMKHSKMFDVVKENHGAPPCCCHRADLIELIYESLSGSARSRILVNKYVTGVSTSNEGVFAHCADDTNYGGTIMVGADGIGSRARRAMNRNNASSKEPFTAQYRCLWFSLPKQPNVKDGTAYETHGAGFAAQLLQAHEKAWVFVYERLEASVSRGDATKYTDADIDNMIKRWGHAHMDADTTVKQMFDQRYKAGMTNVDEGTVEQWSSGRTVLVGDSAHKMTPNFAQGFNNGVQDVVALTNELYSLLRSTEDDEKFGEKGEATTKILTNDAIRAAFERYETKRLESCKQDVSISSMALRGSAWANLFYQFLDRVILPSLSDRANTWLLTRLTAPSYSQGVVLDCVECEEPLMGKFPWANAMRRKNAEKLQI

SEQ ID NO: 28857 - DNA, 606 bp, Muscodor strobelii
  misc_feature: SGI EST ID NO. CUFF.68105.0
  misc_feature: Variant of the nucleotide sequence at SEQ ID NO 28855
gtggaactttgcggaggaagaaatgcccattttcttcaaatctccgccaggtctccccagctcagtggtacagaggcacgcaaacagtggtataacgttccttgatcagtcacgtcttgacaactctccgtggctcgaagacaatattgtcttctcgcaatgtcgacattggaatctaaactgcccttccgtgcgatagtcgtcggaggcggccccgtcgggttaattgctgcacactgtttcgataaagctggcatagacttcgtcgtgctcgagcggcagccgacgataattgcagatgtcggcgccagcctggttcttagcccatccactttgagggtattcgcacaattgggattactagacgagtttttcactctcagccacggcctggagcattacatgcattggactatggacggcagattgatgaaacacagcaagatgtttgacgtggtcaaggagaaccatggcgcgccaccatgttgttgccatcgtgccgatctgattgaactcatctatgagtcgctttctgggtcagctaggagccggatacttgtcaacaagtacgtcacaggtgtatcgactagcaatgagggggtcttt

SEQ ID NO: 28858 - DNA, 459 bp, Muscodor strobelii
  misc_feature: SGI cDNA ID NO. 569904
  misc_feature: Encodes the peptide sequence at SEQ ID NO 28859
atgaagatctccatcctcgctctcgccctctctgcagctagcaccgtcacggcgctgacacccacctgggagaaactagccctatcagtgaacctcatggaggcgaacttaaactcggaccggggccgcgtggacaattacctgacgttggcgggcgtcaaaggagtcgatggtaacgcgctaaatgggacgcaggcagaagtagccgacgctttattcgataaactgctagccgccaatgctatgcagatcaaggcgttgagcgacttacgtagctacttattctaccctgaagcggacccggcgcagtactacggtgccgataaccgcgatgtcgagtctatcgacttcaagctgcctgagggtttgctcgagacacagggtgtcttcgatgataaggatagcgtgcgacccgtcactgatatccctgggtgcgaggtgtgcgctttgaactggtag

SEQ ID NO: 28859 - protein, 152 aa, Muscodor strobelii
  misc_feature: SGI Peptide ID NO. 569904
MKISILALALSAASTVTALTPTWEKLALSVNLMEANLNSDRGRVDNYLTLAGVKGVDGNALNGTQAEVADALFDKLLAANAMQIKALSDLRSYLFYPEADPAQYYGADNRDVESIDFKLPEGLLETQGVFDDKDSVRPVTDIPGCEVCALNW

SEQ ID NO: 28860 - DNA, 2331 bp, Muscodor strobelii
  misc_feature: SGI cDNA ID NO. 569905
  misc_feature: Encodes the peptide sequence at SEQ ID NO 28861
atgaagacgaagttagacgcaaatcagacgactgatcccatcgacacggacagttgtgtagccaagctcaaagacatacaaaaaacatttgtctcctattatgttggtaacgagagggagatcaaaaatcgctggtgtgcgctctcgccaatagagcgcaaatcagcagttgttgcaagctctatgcagtatgagtcaggccatcccatgctgctcaagtattcagcggatagctcacatggcttccttatatattacacaccggagtggaacctccaggatctcttggactctcatcctaaatacttgttcgatcttctcgatcacagatcttcttcctctcttctatatctatacaagactgggtttggaaagtttcaaggagacttcgcttccatcaccaaggttatgcgcgccgatctcgaattcgactggaagaaagttagaaaaagcgacttatatgtgttcttcatgaccgacgaacaatatggacaacttcgcactgtcgaagaagcgtctgcagacatcgctttcacgtcagataattgggcgcaaagtgtctctgacggcctttgggtgaagaagtcgattgcagacgtgataattgagcgccagtttctcttagcacaacgtctgttgcaattgattcattacatattagtgggagacttcagaaaggagacaggggacgaaatgagtctcgactcgaaaacagatacgacagcggtatccaagtcgccaagccaggcaagtaatgagttggatttgtccgacctcatcataatggctgaagagcaggtcgaagttctgaaaaatcaattcatggtgtgcgtcagccatacttcttgcttcaagcacatggtggacgattattttcagagtcgacctgagcttcttgcagacgataatggccacaaaggaaaagaccatgacgtggacgaacttgggtttgtgttggacgcactgatcaattgtatagagggtccgactacatggcagtatatgtacaatttactgctgtctttccgcgacgccggagagaaagataaagagcaacgcatagccttgctacaagaactatcaaatgtcggccatcatgagtattgtcggaaacagaactggctgctgcgccattattctgtgacgtctcagggggaaagattatacagaaaggtttacggaaatggaaattcccatgcaaagcttaagaaggggattgtaattccaggggacgattcgttatggtcttgtattcttcgcctttgtcagccgaatactaaagtcgaggaggctgcagagcttatgcgcaaactagaggggcttgagaacacacaagatcccggagaacaggagttggatgaaaacaccatcgctgctctagatgatctgtcaatcacagtcaaattcatgtcaggaatccgaaaagcgctaccgatcccaagtcccagggtcaagaaagtttctggatttatcgaagcctttggtaaagtcgatgaacgaatctgcgaaataagacccaaactggatcagattcgctcgcagatatcggttccatctatgggcgaggagcagtactttcgacaggcactgcatgagcttggcaaattctttgcgaaagagctaggacatgaccttgtcaggtggtacaccaccatttttgcagattgctttgcccaggtcgcccatccattgaacgaggcacccgccgcaacagatcgaactgcaggtgtccaagctcggagacagataagcaagcagagatttacagaggggctagtagcctcttcagcttccgtgggctccaaaatctccaggacagcttcatcgatgcttccggcgcatcagcttacccaagactttgtgcctttcccgcactctcatgatgcatcccagcgtccgaactggcgaaaagaacagaaaccagtgaaagaaaagactcgtccaacacagcaattctttcgctacgaaggtgcaaacccacatgacgatgaagatgatgcgccggagcttgaagaagggcgaaaagtagacgcagaaaccgctgctgtgtttcaacaactatttgataagtccgaagcctatggaccgctgccttgggacaaatttgccaaggcgttaacaagcaaaggtgttgacttcgcaatggaaccatcgggtggatccgccttcaccttcatcccacccgcgcacgaatcggacaaagcaccgatcaccttccacatgccacatggagcacaaggacagaagattccacgacataagcaacacttttgggcccgcaggctatcggaaaaatacaactggggtgccaggacttttattgcagagtaa

SEQ ID NO: 28861 - protein, 776 aa, Muscodor strobelii
  misc_feature: SGI Peptide ID NO. 569905
  misc_feature (187)..(776): NCBI GI: 238508370 Blast Desc: conserved [Aspergillus flavus NRRL3357] gi|220688899|gb|EED45251.1| conserved [Aspergillus flavus NRRL3357]
  misc_feature (11)..(773): NCBI GI: 156031186 Blast Desc: SS1G_14201 [Sclerotinia sclerotiorum 1980] gi|154700592|gb|EDO00331.1| SS1G_14201 [Sclerotinia sclerotiorum 1980]
  misc_feature (88)..(773): NCBI GI: 119501795 Blast Desc: NFIA_045770 [Neosartorya fischeri NRRL 181] gi|119415820|gb|EAW25757.1| conserved [Neosartorya fischeri NRRL 181]
  misc_feature (20)..(743): NCBI GI: 166163610 Blast Desc: ipa protein [Leptosphaeria maculans]
  misc_feature (40)..(699): NCBI GI: 169615022 Blast Desc: SNOG_10665 [Phaeosphaeria nodorum SN15] gi|160702866|gb|EAT82059.2| SNOG_10665 [Phaeosphaeria nodorum SN15]
  misc_feature (23)..(498): NCBI GI: 242822361 Blast Desc: TSTA_002810 [Talaromyces stipitatus ATCC 10500] gi|218712792|gb|EED12217.1| TSTA_002810 [Talaromyces stipitatus ATCC 10500]
  misc_feature (71)..(636): NCBI GI: 212546799 Blast Desc: conserved [Penicillium marneffei ATCC 18224] gi|210065073|gb|EEA19168.1| conserved [Penicillium marneffei ATCC 18224]
  misc_feature (21)..(483): NCBI GI: 159123455 Blast Desc: conserved [Aspergillus fumigatus A1163]
  misc_feature (629)..(773): NCBI GI: 256735640 Blast Desc: NECHADRAFT_75698 [Nectria haematococca mpVI 77-13-4]
  misc_feature (318)..(571): NCBI GI: 159121943 Blast Desc: conserved [Aspergillus fumigatus A1163]
MKTKLDANQTTDPIDTDSCVAKLKDIQKTFVSYYVGNEREIKNRWCALSPIERKSAVVASSMQYESGHPMLLKYSADSSHGFLIYYTPEWNLQDLLDSHPKYLFDLLDHRSSSSLLYLYKTGFGKFQGDFASITKVMRADLEFDWKKVRKSDLYVFFMTDEQYGQLRTVEEASADIAFTSDNWAQSVSDGLWVKKSIADVIIERQFLLAQRLLQLIHYILVGDFRKETGDEMSLDSKTDTTAVSKSPSQASNELDLSDLIIMAEEQVEVLKNQFMVCVSHTSCFKHMVDDYFQSRPELLADDNGHKGKDHDVDELGFVLDALINCIEGPTTWQYMYNLLLSFRDAGEKDKEQRIALLQELSNVGHHEYCRKQNWLLRHYSVTSQGERLYRKVYGNGNSHAKLKKGIVIPGDDSLWSCILRLCQPNTKVEEAAELMRKLEGLENTQDPGEQELDENTIAALDDLSITVKFMSGIRKALPIPSPRVKKVSGFIEAFGKVDERICEIRPKLDQIRSQISVPSMGEEQYFRQALHELGKFFAKELGHDLVRWYTTIFADCFAQVAHPLNEAPAATDRTAGVQARRQISKQRFTEGLVASSASVGSKISRTASSMLPAHQLTQDFVPFPHSHDASQRPNWRKEQKPVKEKTRPTQQFFRYEGANPHDDEDDAPELEEGRKVDAETAAVFQQLFDKSEAYGPLPWDKFAKALTSKGVDFAMEPSGGSAFTFIPPAHESDKAPITFHMPHGAQGQKIPRHKQHFWARRLSEKYNWGARTFIAE

SEQ ID NO: 28862 - DNA, 259 bp, Muscodor strobelii
  misc_feature: SGI EST ID NO. CUFF.68117.0
  misc_feature: Variant of the nucleotide sequence at SEQ ID NO 28860
caacaactatttgataagtccgaagcctatggaccgctgccttgggacaaatttgccaaggcgttaacaagcaaaggtgttgacttcgcaatggaaccatcgggtggatccgccttcaccttcatcccacccgcgcacgaatcggacaaagcaccgatcaccttccacatgccacatggagcacaaggacagaagattccacgacataagcaacacttttgggcccgcaggctatcggaaaaatacaactggggtgcca

SEQ ID NO: 28863 - DNA, 762 bp, Muscodor strobelii
  misc_feature: SGI cDNA ID NO. 569906
  misc_feature: Encodes the peptide sequence at SEQ ID NO 28864
atgatgttcgaatacaccaacttcgactatgtgttcggatctgtcagcccatacccctaccaccggcccttcatccagaagatcgaggcctcgcgcaagagcttggacggttccctcttcctcgaccgggtcctgaaggctgtcaacctgccccaagcggctagcttgtaccctcccaagaacgagaacaccctccgccagctgcaccaggtcatctgcgacgccgacaacatcaccccgcaccacaagctctccatcctctactatctgctcctcgacatcgacgagcgcaccaacagcgaggacaacaaggcccagatcttcgccggccgctccggcatccccaagcgctacatgaccttcatgcagggcctgtgtctccaatcccccaccgctctcgagctgatcttcgacgccatagccaagtctagcgtcatcgaggcttttgatttcacccgctcgcatgccgagtacatgcgacggcagctgttcaatagactagtcatcgccgtcgtagactccaagaagaacgaggagtccgccgagcgtgctttcgagctgacgagtttacccttcgatgcagaggaagaagagtggtttacggaatgtctagagtcaggtgaaggaaagcgatcaaagtctgccaaggataccctgctcatgcgccgcattgctacgggtcagcctcccgctgcgggtgagaagggcacttgggctacggtgctggaggggtttaaggtcggtaatggtagtcgtgtctag

SEQ ID NO: 28864 - protein, 253 aa, Muscodor strobelii
  misc_feature: SGI Peptide ID NO. 569906
  misc_feature (2)..(253): NCBI GI: 261355023 Blast Desc: conserved [Verticillium albo-atrum VaMs.102]
  misc_feature (2)..(248): NCBI GI: 256729034 Blast Desc: NECHADRAFT_39863 [Nectria haematococca mpVI 77-13-4]
  misc_feature (2)..(248): NCBI GI: 46138861 Blast Desc: FG10945.1 [Gibberella zeae PH-1]
  misc_feature (2)..(228): NCBI GI: 116203625 Blast Desc: CHGG_09696 [Chaetomium globosum CBS 148.51] gi|88175824|gb|EAQ83292.1| CHGG_09696 [Chaetomium globosum CBS 148.51]
  misc_feature (2)..(228): NCBI GI: 156042454 Blast Desc: SS1G_11024 [Sclerotinia sclerotiorum 1980] gi|154695411|gb|EDN95149.1| SS1G_11024 [Sclerotinia sclerotiorum 1980]
  misc_feature (3)..(234): NCBI GI: 39942594 Blast Desc: MGG_03377 [Magnaporthe grisea 70-15] gi|145015608|gb|EDK00098.1| MGG_03377 [Magnaporthe grisea 70-15]
  misc_feature (2)..(228): NCBI GI: 258564987 Blast Desc: conserved [Uncinocarpus reesii 1704] gi|237906939|gb|EEP81340.1| conserved [Uncinocarpus reesii 1704]
  misc_feature (2)..(228): NCBI GI: 119190939 Blast Desc: CIMG_05517 [Coccidioides immitis RS] gi|240107369|gb|EER25554.1| CPC735_066540 [Coccidioides posadasii C735 delta SOWgp]
  misc_feature (2)..(228): NCBI GI: 226285468 Blast Desc: conserved [Paracoccidioides brasiliensis Pb01]
  misc_feature (2)..(228): NCBI GI: 226295005 Blast Desc: conserved [Paracoccidioides brasiliensis Pb18]
MMFEYTNFDYVFGSVSPYPYHRPFIQKIEASRKSLDGSLFLDRVLKAVNLPQAASLYPPKNENTLRQLHQVICDADNITPHHKLSILYYLLLDIDERTNSEDNKAQIFAGRSGIPKRYMTFMQGLCLQSPTALELIFDAIAKSSVIEAFDFTRSHAEYMRRQLFNRLVIAVVDSKKNEESAERAFELTSLPFDAEEEEWFTECLESGEGKRSKSAKDTLLMRRIATGQPPAAGEKGTWATVLEGFKVGNGSRV

SEQ ID NO: 28865 - DNA, 1334 bp, Muscodor strobelii
  misc_feature: SGI EST ID NO. CUFF.68299.1
  misc_feature: Variant of the nucleotide sequence at SEQ ID NO 28863
gcattgcctgcactctaaggcaggtacagaccttatctggtcttggcattactgtaaacggacctcaagctggagctcaagctcgtccattttcaaccttcaaacccagtgcatcagccttggagttgcgactgcgacaattgaattgtgtactccctaaaacctaccgctgcagttcccaatcaacttcaagatgatgttcgaatacaccaacttcgactatgtgttcggatctgtcagcccatacccctaccaccggcccttcatccagaagatcgaggcctcgcgcaagagcttggacggttccctcttcctcgaccgggtcctgaaggctgtcaacctgccccaagcggctagcttgtaccctcccaagaacgagaacaccctccgccagctgcaccaggtcatctgcgacgccgacaacatcaccccgcaccacaagctctccatcctctactatctgctcctcgacatcgacgagcgcaccaacagcgaggacaacaaggcccagatcttcgccggccgctccggcatccccaagcgctacatgaccttcatgcagggcctgtggtacatggactctctgcagttcgagaccgccctcgaatacctgaccccatccctccctcatctccgacttcgccgacgatatcatcaccgtcctcgtgcgccgtgtcaaggacggcgactactccctccctctcgcatactaccacaccgtccagcccagtctccaatcccccaccgctctcgagctgatcttcgacgccatagccaagtctagcgtcatcgaggcttttgatttcacccgctcgcatgccgagtacatgcgacggcagctgttcaatagactagtcatcgccgtcgtagactccaagaagaacgaggagtccgccgagcgtgctttcgagctgacgagtttacccttcgatgcagaggaagaagagtggtttacggaatgtctagagtcaggtgaaggaaagcgatcaaagtctgccaaggataccctgctcatgcgccgcattgctacgggtcagcctcccgctgcgggtgagaagggcacttgggctacggtgctggaggggtttaaggtcggtaatggtagtcgtgtctagtatttggtgagaatgaagtcggaaccgtgtttcttttgtaattgcatagcattggagttcaggtaaaggggcggactgcgccttagaaatgttgcgtcgttgcaatgtaggacgaagcttcgatatctcaatggcattttctatgagaacccattctgtcttaggcaagacaacgtgcataatgacatgagaatcaaaggaagattatagtagcaaaag

SEQ ID NO: 28866 - DNA, 4422 bp, Muscodor strobelii
  misc_feature: SGI cDNA ID NO. 569907
  misc_feature: Encodes the peptide sequence at SEQ ID NO 28867
atgtcgacccgaacccgtcgcgccgccgccaacaggcgtgccatcatcgagtcggacgatgaagatgatattgtcgcaaacaccaccacttctaagataaaacaggaggaagaagacgagtttgacccagactcagtcgcacctgcgcccagttctcgccgtcaaacacagagcagaaggaaatcggctgctcctgcggcaccacgcgccagccgatcgagaaagagcgtagcccccgacacatcggtactcgaatccacagagatagccgacccagatgaatcttcagccactgtcatagctccatctgagccggataccaaaccttcccctcgcaagcgcaagagtgttgcggccagcaggaggacgagccaagcttcttccacacctgatactcaacctgtattctcaactccagccccatctgaagctcgctctgaggcttttgctacgcctctatctgatataacaaatcaaagtgtgaatgaacctaaagcgaaagagtcttcggccgacgggactcccacccaggtgaagccaataaaagccatggacaccatactcgagaagcccatggacattgtcctcaagtcgcgccagatgcccatgcccgtcgtcgaggagaccggtcccaaggcccgcaccgtcatcacccacctgatcctcaacaacttcaagagttacgctggtcgccaagaagttgggccctttcactcttccttctcctccgtcgttgggcccaatggctccggcaagtccaacgtcatcgactctctgttgtttgtcttcggcttcagggctagcaagatgcgacaggggaagatctctgccctcattcataattctgcagcataccccgatctcgatcattgtgaggtcgctgttcatttccaggaagttatggataaccctggcggtgcaaccgaggtcatccccaactcacagctcatcgtctcgcgacgcgctttcaaaaacaactccagcaaatactacatcgacggcaaggagtccaacttcaccgctgttaccaccttattgcgcgaccgcggagtcgacttggaccacaagcgtttcctcatcctgcagggtgaagtcgaatccattgcccagatgaagcccaaggctgccaacgagcacgatgatggcttgcttgaatatctcgaggacattatcggcacgtccaagtacaagacgcccatcgaagaatcggcagccgaggtcgaggcattaaatgagatctgcatggaaaagagcggccgtgtccagcatgtcgagaaggagaagaatagtctcgaggacaagaagaacaaggctttggcatacatcagagatgagaatgacctggccttgaagcaatcggcgctctatcagctatatatcagcgaatgcagtgacaacgtcgcagtgacagaggaagcaattaaccaaatgcaggctcaacttgatgtcgagctggagaagcatcaaggtagcgagtcggtcatcaagaagctccaaaaagaatattcgaagggcaccaaagaatttgaagtgcaggagaagaatgtccaagcgcttgtcaaagaagcgtccaagttcgagcaggagcgagtcaaattcgacgagaagcgcaaatttttgacggataagcagaagaaactcgagaagactatcggtaatgccgaaaagtcaacaactgaggctgatgagacgatcgaacaatgcacggaggagattgctacccgagctgaggaagtcgtccagctggaacaacaagttcaagaggaagaagccgaactcacgacaattcgtgagaatctgaagggcaaaactcaggttttctccgaccagatcgctgccaagcaaaagtctctcgagccgtggcaagagaagatcaaccagaaacagggagcaattgctgtggccgagtcggaaatgacaatcttgcaagagaaggccaatgccggagctgtggcattggaggagctacagacaaagattgcggccatcgaggagggtcgcgattccaaacttgtacagctcgaagaatgtcaagctgaaaagaacaagctagaggaagaagccaaggagaccgagaccgagatcggtaactttgccaaaatggaacccaatgtgcgtgagaaggtgtcacgtgcaagacaaaaggcagacgaggcaagatccagcttgtctcagaaccagaaccgcggcaatgttctcacagctctcatgcgaatgaaggagtctggtcgaattgacggtttccacggtcgactcggcaatcttggcaccatcgacgagaagtacgatgtggctatctcgacagcatgtggtgccctcgacaactttgtgaccgataccgtggaggctggacagcagtgcattgagtacctccgaaagacaaaccttggccgaggcaactttatgtgtctggacaagctacgcacacgagatatccagccaatacagacgccagagaatgcaccccgcttgtttgacttggtcaaggccaaggacgacatcttccgtcctgctttctaccatgccctacaagacaccttggtggcaaaggacttggcccaagccaaccgtattgcatacggagccaagagatggcgtgtcgtcactctagatggtgagcttatcgacaagagcggtaccatgtccggtggtggaaagactgtcaagcgaggattgatgtcaagcaagcttgtcgccgacacgtctaaggagcaggtggcgaagctagagagcgaacgcgacacccttgagggcaggttccaagaattccaggatcgacaacgggagctggaaacgcgactcagagagatccatggccagctacctcgtctggaaaccaagatgcagaagctcggcttggaagtccaaagtgcagagaagaatattgctgactcacaacggcgaatcaaggagctgagcaaagagcacaaaccgtccgaggctgacgacaaccgcaaagccactctcgagaaggagatcgccaagctgaacaaagaagtcgctaagcttcatgccgagactgagggtgtcgaagctgggatcaaggagcttcaagacaagatcatggaggttggtggtgagaaccttcgggcacagagagccaaggtcgatggtctcaaggaggagatcgcttctcacaacgaggaaacatccaatgctgaagtcaagaaagtcaaggccgagaagtccaagaccaagcttcaaaaggatcatgccaaggcttcaagagaacttgatggcgctgtcaacgacctcgagaaacttgaggccgaggtagagaaccaaggcagcattgctgacgacctgaaggcacaagtcgaggccgctgaagagacactgcgggagaagaagcaagaacttgcttccatgaagtcggagctcgatgagaaagtttcggaactcaatgagacgcgggctgttgaaatcgagatgaagaaccagcttgaggagaaccagaaggcccttgtcgagaatcagaagcgtctgcgatactgggatgagaagctcaataagatcgttcttcaaaatgtcagtgatctcatgggtcctccggctccggcgcatgccccagcgagcaaacctagggagggacaggagggggacgaggctccagaaggtgaagaggaggaggaggaggagcaagaacagcaggaaacaccaactgagcaacctgcggagcttcctaggtacactgaagatgagctgaaggatatgagcaaagataccctcaaggccgagatcgctgcgctcgaggagaagacgcagaacgtcaacgtcgatgtcagtgtcttagctgaataccgccgccgtgtcgaggagcacgcagctcgatcctcagacctcgcaacggcagtcacacaacgtgactcggccaagaagcgctgcgatgacctgcgtcgtctacgtctcgaggggttcatggaaggcttcagcaccatctccctccgactgaaggagatgtaccagatgatcacgatgggcggaaacgcagagctcgagcttgttgatagtctggatccgttcagcgagggtattttgttttctgtcatgccgccgaagaagagctggaagaacatcagcaatttgtctggtggcgagaagacactgtctagtcttgcattggtgtttgcgctgcatcattataagccgactccgctttatgtcatggatgagattgatgctgctttggatttccggaatgtgtcaatcgtagcgaactacatcaaagagcgcacgaagaatgcacagttcatcgtcatttcgctgcgcaacaacatgtttgagcttgctgctagattggtcggcgtgtataaggttaaccatatgacgaagagtgtaacaattgagaataaggactttattgatagaccggcgccccggccacagttccacggtggggttactaggacggttattcgataa

SEQ ID NO: 28867 - protein, 1473 aa, Muscodor strobelii
  misc_feature: SGI Peptide ID NO. 569907
  misc_feature (745)..(859): Pfam Id: PF06470 Pfam Desc: SMC proteins Flexible Hinge Domain
  misc_feature (216)..(1445): Pfam Id: PF02463 Pfam Desc: RecF/RecN/SMC N terminal domain
  misc_feature (15)..(1446): NCBI GI: 256728862 Blast Desc: condensin complex component SMC4 [Nectria haematococca mpVI 77-13-4]
  misc_feature (33)..(1458): NCBI GI: 145608106 Blast Desc: MGG_03378 [Magnaporthe grisea 70-15] gi|145015607|gb|EDK00097.1| MGG_03378 [Magnaporthe grisea 70-15]
  misc_feature (1)..(1472): NCBI GI: 46138859 Blast Desc: FG10944.1 [Gibberella zeae PH-1]
  misc_feature (15)..(1454): NCBI GI: 116203627 Blast Desc: CHGG_09697 [Chaetomium globosum CBS 148.51] gi|88175825|gb|EAQ83293.1| CHGG_09697 [Chaetomium globosum CBS 148.51]
  misc_feature (1)..(1454): NCBI GI: 171679495 Blast Desc: protein product [Podospora anserina] gi|170939373|emb|CAP64601.1| protein product [Podospora anserina]
  misc_feature (13)..(1454): NCBI GI: 156042456 Blast Desc: SS1G_11025 [Sclerotinia sclerotiorum 1980] gi|154695412|gb|EDN95150.1| SS1G_11025 [Sclerotinia sclerotiorum 1980]
  misc_feature (46)..(1454): NCBI GI: 261195865 Blast Desc: nuclear condensin complex subunit Smc4 [Ajellomyces dermatitidis SLH14081] gi|239587469|gb|EEQ70112.1| nuclear condensin complex subunit Smc4 [Ajellomyces dermatitidis nuclear
  misc_feature (5)..(1454): NCBI GI: 226285467 Blast Desc: conserved [Paracoccidioides brasiliensis Pb01]
  misc_feature (5)..(1454): NCBI GI: 226295006 Blast Desc: conserved [Paracoccidioides brasiliensis Pb18]
  misc_feature (48)..(1454): NCBI GI: 146322765 Blast Desc: nuclear condensin complex subunit Smc4 [Aspergillus fumigatus Af293] gi|129556791|gb|EAL87314.2| nuclear condensin complex subunit Smc4, [Aspergillus fumigatus Af293]
MSTRTRRAAANRRAIIESDDEDDIVANTTTSKIKQEEEDEFDPDSVAPAPSSRRQTQSRRKSAAPAAPRASRSRKSVAPDTSVLESTEIADPDESSATVIAPSEPDTKPSPRKRKSVAASRRTSQASSTPDTQPVFSTPAPSEARSEAFATPLSDITNQSVNEPKAKESSADGTPTQVKPIKAMDTILEKPMDIVLKSRQMPMPVVEETGPKARTVITHLILNNFKSYAGRQEVGPFHSSFSSVVGPNGSGKSNVIDSLLFVFGFRASKMRQGKISALIHNSAAYPDLDHCEVAVHFQEVMDNPGGATEVIPNSQLIVSRRAFKNNSSKYYIDGKESNFTAVTTLLRDRGVDLDHKRFLILQGEVESIAQMKPKAANEHDDGLLEYLEDIIGTSKYKTPIEESAAEVEALNEICMEKSGRVQHVEKEKNSLEDKKNKALAYIRDENDLALKQSALYQLYISECSDNVAVTEEAINQMQAQLDVELEKHQGSESVIKKLQKEYSKGTKEFEVQEKNVQALVKEASKFEQERVKFDEKRKFLTDKQKKLEKTIGNAEKSTTEADETIEQCTEEIATRAEEVVQLEQQVQEEEAELTTIRENLKGKTQVFSDQIAAKQKSLEPWQEKINQKQGAIAVAESEMTILQEKANAGAVALEELQTKIAAIEEGRDSKLVQLEECQAEKNKLEEEAKETETEIGNFAKMEPNVREKVSRARQKADEARSSLSQNQNRGNVLTALMRMKESGRIDGFHGRLGNLGTIDEKYDVAISTACGALDNFVTDTVEAGQQCIEYLRKTNLGRGNFMCLDKLRTRDIQPIQTPENAPRLFDLVKAKDDIFRPAFYHALQDTLVAKDLAQANRIAYGAKRWRVVTLDGELIDKSGTMSGGGKTVKRGLMSSKLVADTSKEQVAKLESERDTLEGRFQEFQDRQRELETRLREIHGQLPRLETKMQKLGLEVQSAEKNIADSQRRIKELSKEHKPSEADDNRKATLEKEIAKLNKEVAKLHAETEGVEAGIKELQDKIMEVGGENLRAQRAKVDGLKEEIASHNEETSNAEVKKVKAEKSKTKLQKDHAKASRELDGAVNDLEKLEAEVENQGSIADDLKAQVEAAEETLREKKQELASMKSELDEKVSELNETRAVEIEMKNQLEENQKALVENQKRLRYWDEKLNKIVLQNVSDLMGPPAPAHAPASKPREGQEGDEAPEGEEEEEEEQEQQETPTEQPAELPRYTEDELKDMSKDTLKAEIAALEEKTQNVNVDVSVLAEYRRRVEEHAARSSDLATAVTQRDSAKKRCDDLRRLRLEGFMEGFSTISLRLKEMYQMITMGGNAELELVDSLDPFSEGILFSVMPPKKSWKNISNLSGGEKTLSSLALVFALHHYKPTPLYVMDEIDAALDFRNVSIVANYIKERTKNAQFIVISLRNNMFELAARLVGVYKVNHMTKSVTIENKDFIDRPAPRPQFHGGVTRTVIR

SEQ ID NO: 28868 - DNA, 4867 bp, Muscodor strobelii
  misc_feature: SGI EST ID NO. CUFF.68135.0
  misc_feature: Variant of the nucleotide sequence at SEQ ID NO 28866
cggcatacaaccaggcatcgcatcgtctttctcatatgcaattgaatattttggcggcaatcacatactaatcatctagctgcaacgacgttgtcttttccactacgcattgaataatcatcggcgctaccaccgaatttcattcgcgctgatagacagacgaacaccatgtcgacccgaacccgtcgcgccgccgccaacaggcgtgccatcatcgagtcggacgatgaagatgatattgtcgcaaacaccaccacttctaagataaaacaggaggaagaagacgagtttgacccagactcagtcgcacctgcgcccagttctcgccgtcaaacacagagcagaaggaaatcggctgctcctgcggcaccacgcgccagccgatcgagaaagagcgtagcccccgacacatcggtactcgaatccacagagatagccgacccagatgaatcttcagccactgtcatagctccatctgagccggataccaaaccttcccctcgcaagcgcaagagtgttgcggccagcaggaggacgagccaagcttcttccacacctgatactcaacctgtattctcaactccagccccatctgaagctcgctctgaggcttttgctacgcctctatctgatataacaaatcaaagtgtgaatgaacctaaagcgaaagagtcttcggccgacgggactcccacccaggtgaagccaataaaagccatggacaccatactcgagaagcccatggacattgtcctcaagtcgcgccagatgcccatgcccgtcgtcgaggagaccggtcccaaggcccgcaccgtcatcacccacctgatcctcaacaacttcaagagttacgctggtcgccaagaagttgggccctttcactcttccttctcctccgtcgttgggcccaatggctccggcaagtccaacgtcatcgactctctgttgtttgtcttcggcttcagggctagcaagatgcgacaggggaagatctctgccctcattcataattctgcagcataccccgatctcgatcattgtgaggtcgctgttcatttccaggaagttatggataaccctggcggtgcaaccgaggtcatccccaactcacagctcatcgtctcgcgacgcgctttcaaaaacaactccagcaaatactacatcgacggcaaggagtccaacttcaccgctgttaccaccttattgcgcgaccgcggagtcgacttggaccacaagcgtttcctcatcctgcagggtgaagtcgaatccattgcccagatgaagcccaaggctgccaacgagcacgatgatggcttgcttgaatatctcgaggacattatcggcacgtccaagtacaagacgcccatcgaagaatcggcagccgaggtcgaggcattaaatgagatctgcatggaaaagagcggccgtgtccagcatgtcgagaaggagaagaatagtctcgaggacaagaagaacaaggctttggcatacatcagagatgagaatgacctggccttgaagcaatcggcgctctatcagctatatatcagcgaatgcagtgacaacgtcgcagtgacagaggaagcaattaaccaaatgcaggctcaacttgatgtcgagctggagaagcatcaaggtagcgagtcggtcatcaagaagctccaaaaagaatattcgaagggcaccaaagaatttgaagtgcaggagaagaatgtccaagcgcttgtcaaagaagcgtccaagttcgagcaggagcgagtcaaattcgacgagaagcgcaaatttttgacggataagcagaagaaactcgagaagactatcggtaatgccgaaaagtcaacaactgaggctgatgagacgatcgaacaatgcacggaggagattgctacccgagctgaggaagtcgtccagctggaacaacaagttcaagaggaagaagccgaactcacgacaattcgtgagaatctgaagggcaaaactcaggttttctccgaccagatcgctgccaagcaaaagtctctcgagccgtggcaagagaagatcaaccagaaacagggagcaattgctgtggccgagtcggaaatgacaatcttgcaagagaaggccaatgccggagctgtggcattggaggagctacagacaaagattgcggccatcgaggagggtcgcgattccaaacttgtacagctcgaagaatgtcaagctgaaaagaacaagctagaggaagaagccaaggagaccgagaccgagatcggtaactttgccaaaatggaacccaatgtgcgtgagaaggtgtcacgtgcaagacaaaaggcagacgaggcaagatccagcttgtctcagaaccagaaccgcggcaatgttctcacagctctcatgcgaatgaaggagtctggtcgaattgacggtttccacggtcgactcggcaatcttggcaccatcgacgagaagtacgatgtggctatctcgacagcatgtggtgccctcgacaactttgtgaccgataccgtggaggctggacagcagtgcattgagtacctccgaaagacaaaccttggccgaggcaactttatgtgtctggacaagctacgcacacgagatatccagccaatacagacgccagagaatgcaccccgcttgtttgacttggtcaaggccaaggacgacatcttccgtcctgctttctaccatgccctacaagacaccttggtggcaaaggacttggcccaagccaaccgtattgcatacggagccaagagatggcgtgtcgtcactctagatggtgagcttatcgacaagagcggtaccatgtccggtggtggaaagactgtcaagcgaggattgatgtcaagcaagcttgtcgccgacacgtctaaggagcaggtggcgaagctagagagcgaacgcgacacccttgagggcaggttccaagaattccaggatcgacaacgggagctggaaacgcgactcagagagatccatggccagctacctcgtctggaaaccaagatgcagaagctcggcttggaagtccaaagtgcagagaagaatattgctgactcacaacggcgaatcaaggagctgagcaaagagcacaaaccgtccgaggctgacgacaaccgcaaagccactctcgagaaggagatcgccaagctgaacaaagaagtcgctaagcttcatgccgagactgagggtgtcgaagctgggatcaaggagcttcaagacaagatcatggaggttggtggtgagaaccttcgggcacagagagccaaggtcgatggtctcaaggaggagatcgcttctcacaacgaggaaacatccaatgctgaagtcaagaaagtcaaggccgagaagtccaagaccaagcttcaaaaggatcatgccaaggcttcaagagaacttgatggcgctgtcaacgacctcgagaaacttgaggccgaggtagagaaccaaggcagcattgctgacgacctgaaggcacaagtcgaggccgctgaagagacactgcgggagaagaagcaagaacttgcttccatgaagtcggagctcgatgagaaagtttcggaactcaatgagacgcgggctgttgaaatcgagatgaagaaccagcttgaggagaaccagaaggcccttgtcgagaatcagaagcgtctgcgatactgggatgagaagctcaataagatcgttcttcaaaatgtcagtgatctcatgggtcctccggctccggcgcatgccccagcgagcaaacctagggagggacaggagggggacgaggctccagaaggtgaagaggaggaggaggaggagcaagaacagcaggaaacaccaactgagcaacctgcggagcttcctaggtacactgaagatgagctgaaggatatgagcaaagataccctcaaggccgagatcgctgcgctcgaggagaagacgcagaacgtcaacgtcgatgtcagtgtcttagctgaataccgccgccgtgtcgaggagcacgcagctcgatcctcagacctcgcaacggcagtcacacaacgtgactcggccaagaagcgctgcgatgacctgcgtcgtctacgtctcgaggggttcatggaaggcttcagcaccatctccctccgactgaaggagatgtaccagatgatcacgatgggcggaaacgcagagctcgagcttgttgatagtctggatccgttcagcgagggtattttgttttctgtcatgccgccgaagaagagctggaagaacatcagcaatttgtctggtggcgagaagacactgtctagtcttgcattggtgtttgcgctgcatcattataagccgactccgctttatgtcatggatgagattgatgctgctttggatttccggaatgtgtcaatcgtagcgaactacatcaaagagcgcacgaagaatgcacagttcatcgtcatttcgctgcgcaacaacatgtttgagcttgctgctagattggtcggcgtgtataaggttaaccatatgacgaagagtgtaacaattgagaataaggactttattgatagaccggcgccccggccacagttccacggtggggttactaggacggttattcgataagggtcctgtgagtgatggagatgagaagatgcttgaaagagcaggacggggtaatatgatgtgatacgagagatgaagttttgggattacgaggattggaattggtgtacatgtggactgcgaaatgcgtggcgttatgttttgcgtgttgttttgcgaggtctggtgtcaataccctattgagagagcataataaactggctgtttgcgaccttttcgatatgatgcatcttatataatatctgatctaattgatgcaaaggcctttttgtagttc

SEQ ID NO: 28869 - DNA, 801 bp, Muscodor strobelii
  misc_feature: SGI cDNA ID NO. 569908
  misc_feature: Encodes the peptide sequence at SEQ ID NO 28870
atgtcgccctcgccctcgccaccaccaccacgacggtcatcaccatcatcaacgccaccgacatttctggacaccatagataaaatattagacacactatcaaagacatcaagatcgccaccgccaggataccgctcgtcagatcatctagagggttctggttctgtggagggaacagaactctcatggcatacagcgccagtgagtctagtctctgaaccgcagcaacaagaggagagcagtacaagtccctgggaacacaggctctcgaccctgacacaagatgacaactcgactggttttcgagatcattcggcgatcggtactgctgagttgctgcccaatggagagagtccatcggagaaatcaagaggcaaagctagggaaacgaatacgggccagaccaggtggccttttctgagtaggctatcgacaccgagcccggttttgcttgatgatgaggatgaggatgtggatgatgattacatggtgtcgagtcttagtggatctagtgatggagaagaatacggaggaggtccgtcggcagagatgaaggggaaaggaagactgagagacatcaacaagacgggcagaagagagtcggtcgatgactggtaccacttgacacccaacccccataatgcccaccgctccaccaccaacccatcaacgacctcaccgaccaccctccccatacccagtaaccatccccccaacagcccgggcgtcctccccgcaccacacccatacatctacctccaccacctcctccgattctggtcacactcgaggtacttctga

SEQ ID NO: 28870 - protein, 266 aa, Muscodor strobelii
  misc_feature: SGI Peptide ID NO. 569908
MSPSPSPPPPRRSSPSSTPPTFLDTIDKILDTLSKTSRSPPPGYRSSDHLEGSGSVEGTELSWHTAPVSLVSEPQQQEESSTSPWEHRLSTLTQDDNSTGFRDHSAIGTAELLPNGESPSEKSRGKARETNTGQTRWPFLSRLSTPSPVLLDDEDEDVDDDYMVSSLSGSSDGEEYGGGPSAEMKGKGRLRDINKTGRRESVDDWYHLTPNPHNAHRSTTNPSTTSPTTLPIPSNHPPNSPGVLPAPHPYIYLHHLLRFWSHSRYF

SEQ ID NO: 28871 - DNA, 612 bp, Muscodor strobelii
  misc_feature: SGI cDNA ID NO. 569909
  misc_feature: Encodes the peptide sequence at SEQ ID NO 28872
atgcatccgagcagcaccccccgaggcagcggccttggctttcccagctgtgcctctacagcgaccacggcgacgctgtccgactctacaagtaccggaaccgtcattcccacacccgcttcatcagatatcagcgacagaatggacttccgcgccaatctccagccgactccagctattctcacatctggttttgtcgatacccgaagtactacggcatggagaatggcgtaccctcaagtgggacagttcgccatgacagcgtctcaggaagtagttgcagctggcccccatggtctcttttacttccagcgtgtgctggatcatccttccacaccgtggaccgaagcccgtgctctccccaagaccatgcatgcgctcaatagtgacactgtcactggcctggcgatacaccgatgcaaggaggcaggtaaagatcttctggcagtatactgcgtcgcttatggaaagctgcatgtctttcattgttccgaagataagggaacggactttgtggcagaccaggtgtctcccttcaccgagtataccataaatagtactccatctgttgcgaccgttgtcgataaaaggttatcgagtggtgactcatga

SEQ ID NO: 28872 - protein, 203 aa, Muscodor strobelii
  misc_feature: SGI Peptide ID NO. 569909
MHPSSTPRGSGLGFPSCASTATTATLSDSTSTGTVIPTPASSDISDRMDFRANLQPTPAILTSGFVDTRSTTAWRMAYPQVGQFAMTASQEVVAAGPHGLFYFQRVLDHPSTPWTEARALPKTMHALNSDTVTGLAIHRCKEAGKDLLAVYCVAYGKLHVFHCSEDKGTDFVADQVSPFTEYTINSTPSVATVVDKRLSSGDS

SEQ ID NO: 28873 - DNA, 1260 bp, Muscodor strobelii
  misc_feature: SGI cDNA ID NO. 569910
  misc_feature: Encodes the peptide sequence at SEQ ID NO 28874
atgatgtccgacgtgaaaagtgaaacacggggtttcattcaatcacatcggtctgatctagtcagttacgcgcaatcattagttcaaacggcatcaccaaacccacccggtgatgtttctgcaatcgcagccaaagtagccgatctaatacggacggcgataccctccgcgaaagtgtcgacctatgtcactgcaccaggactcaccagcgttgtcgccgtgatttcgtccggtcggccagggaaaactctagtgtttaacggacatctagatacatatcccattgacgataccaagcagtggagtgtcccaccagttggcggggtgctatccgatgatggaacgagattatatgggcgaggggcagcagatatgaaaggtgggatcgccgcttcgattctcgcggcacaagcactttctgaagtgaaagaacaatggcaaggagacatagtccttgcactagcaggcgatgaagagtcgatgggagagctaggatcagcttggctactcgaaaatgtcgatgccgtacgcgatgcagatgctatgatctgcggagatgccgggtctccattagtcgttcgaaacggtgagaagggcttcatatggcttgagattcaagctactggtaaggctgcgcatggcgcacatgtgcacagaggcaaaaatgccatcgaactactgatcgaagctgttagcaagttgaaggcacttgaaaatgtgtctctggagccctcagataaggttgaagcgatcatcgagaacgccaaggcagttagtgagcctctcggcgggagtggcgagagcgaaacactacgcagaattactgtcaatgtcgggactattagtggtggaatcagcaccaacttggtaccagacactgcaaaagcgacagccgatatcagattgcccatggggatatcgacggcgaaatttctagaccacatacacagtgtcctggacccgttggaagggatcctaatccaagttcagcggtcggctgagcccagttggacatcgccgtctgagtcggcatctaaggagattgtcggcgcgaacgctgttgtcaatatgagagttggcgctagcgactctagactatttagagcaaagggtatttcgaccgtcgtcgtcggcttgactcctttcaatatgggtgcagctgatgaatatttgtccgtcgaggaattaaaccaggttgcgcagattcatgcgcttgctgctctaaactatctgaacgtcggtgggattctctttggatga

SEQ ID NO: 28874 - protein, 419 aa, Muscodor strobelii
  misc_feature: SGI Peptide ID NO. 569910
  misc_feature (195)..(327): Pfam Id: PF07687 Pfam Desc: Peptidase dimerisation domain
  misc_feature (85)..(409): Pfam Id: PF01546 Pfam Desc: Peptidase family M20/M25/M40
  misc_feature (6)..(412): NCBI GI: 169604374 Blast Desc: SNOG_05199 [Phaeosphaeria nodorum SN15] gi|111066470|gb|EAT87590.1| SNOG_05199 [Phaeosphaeria nodorum SN15]
  misc_feature (13)..(411): NCBI GI: 238837769 Blast Desc: acetylornithine deacetylase or succinyl-diaminopimelate desuccinylase [Microsporum canis CBS 113480]
  misc_feature (4)..(412): NCBI GI: 119186711 Blast Desc: CIMG_03403 [Coccidioides immitis RS]
  misc_feature (4)..(412): NCBI GI: 240108464 Blast Desc: acetylornithine deacetylase, [Coccidioides posadasii C735 delta SOWgp]
  misc_feature (6)..(264): NCBI GI: 258563418 Blast Desc: [Uncinocarpus reesii 1704] gi|237907961|gb|EEP82362.1| [Uncinocarpus reesii 1704]
  misc_feature (13)..(412): NCBI GI: 33601341 Blast Desc: peptidase [Bordetella bronchiseptica RB50] gi|33575777|emb|CAE32855.1| peptidase [Bordetella bronchiseptica RB50]
  misc_feature (13)..(412): NCBI GI: 33595961 Blast Desc: peptidase [Bordetella parapertussis 12822] gi|33572964|emb|CAE36597.1| peptidase [Bordetella parapertussis]
  misc_feature (13)..(411): NCBI GI: 126653338 Blast Desc: BB14905_11852 [Bacillus sp. B14905] gi|126589935|gb|EAZ84065.1| BB14905_11852 [Bacillus sp. B14905]
  misc_feature (20)..(404): NCBI GI: 222480833 Blast Desc: acetylornithine deacetylase or succinyl-diaminopimelate desuccinylase [Halorubrum lacusprofundi ATCC 49239] gi|222453735|gb|ACM58000.1| acetylornithine or ATCC
  misc_feature (13)..(411): NCBI GI: 169829689 Blast Desc: succinyl-diaminopimelate desuccinylase [Lysinibacillus sphaericus C3-41] gi|168994177|gb|ACA41717.1| Succinyl-diaminopimelate desuccinylase [Lysinibacillus sphaericus
  misc_feature (66)..(411): SWISSPROT Homolog: EC 3.5.1.18 Succinyl-diaminopimelate desuccinylase
MMSDVKSETRGFIQSHRSDLVSYAQSLVQTASPNPPGDVSAIAAKVADLIRTAIPSAKVSTYVTAPGLTSVVAVISSGRPGKTLVFNGHLDTYPIDDTKQWSVPPVGGVLSDDGTRLYGRGAADMKGGIAASILAAQALSEVKEQWQGDIVLALAGDEESMGELGSAWLLENVDAVRDADAMICGDAGSPLVVRNGEKGFIWLEIQATGKAAHGAHVHRGKNAIELLIEAVSKLKALENVSLEPSDKVEAIIENAKAVSEPLGGSGESETLRRITVNVGTISGGISTNLVPDTAKATADIRLPMGISTAKFLDHIHSVLDPLEGILIQVQRSAEPSWTSPSESASKEIVGANAVVNMRVGASDSRLFRAKGISTVVVGLTPFNMGAADEYLSVEELNQVAQIHALAALNYLNVGGILFG

SEQ ID NO: 28875 - DNA, 1575 bp, Muscodor strobelii
  misc_feature: SGI cDNA ID NO. 569911
  misc_feature: Encodes the peptide sequence at SEQ ID NO 28876
atggagacaaacaatcgaaatattctcggcttctatttcacggctagcggggaatatcggccctctgctttgtacgctgccgtggagtctgctgcttcttcggagaatagccccgtgatggacctgctcctcgcatatcgacctctgagtgatatcaacagccaagaagcttcggctatcgttctagctatagtaagacgccaatgggaccttgcatatcgactcttaggcggcgcaccaggacttatggagatagctgatgaagacccggttagctggggacggggtattacacctctcctagccgcctgcatgtccgaaaattccgaactcgtcgatacaatgatccagataggatatactgtccagattgcagacctccatgcttttttccaagctttgatttataaagactctgatgaaaagtcagtggtcatcactgatggcgcgcgagcctgtttccgcaacgcatcgccattcacgaaaggaacgccaatgtggtatagaaacttgcttatctacgcgatccaggcacatgaaaacgatatcatacgaacttgtatcaatcatctcgatacccttgactttacctgcactgttgacgcgggggtttggttgagatatggagaaagtcacgaatactgcccgttgatactcgcaaccaagaaggctcacgaagataccatcgagcttctactggaagcgggtgctgatatcgactatatttccaccaatggcctcaatgcattgcagcatgcagcgggtgtacagaattttaccatagccagattacttattaaccgcggtgtaggtgtcaatgcaccggtacatcgcggcgcaaccacactggcatacgcagcgataagtggtgatttgaagctggctcaattgttgctcgaaaaagaagctcatgtgagcgcactaccgatcaagtatggtcttacacctctggagtgcgcggcacagttcggccgcctggatatggtgcagctccttcttgaaaacgacgctgacataagtcaagcaagaaggctgcactacgtccgagcagtcgtctatgcccgaaacaacggtcatcttgctgttgcaaaccatctcaagcaacacgggtcttggacccgagccgatgagaccctagcgcaactgcctcacttatgtgacgtggctggtgcacatgcttggtatgaggaggagtctgacagatggcatgttcactacaaggcaaagttatacgacgacgaattggtgtccacgggctcatctgcttacgaagctctggatgacgatgatcaaggcttggacagcagttcggactttgagggctgcaatgggaacgatttgcacgagacaaatgacagattgtctgatatcccaagcgagcaaggcgacaatctggtcgaggaagaagacacaagccatcagttatcaaataggtctggcgcgggagggctcacattacgggttctggatgcgatgccagtagttgcgaactcggtggagcaatctgcttttgtcacttcatatgatccattctgggggacggaagaggcagatagtttatcattacatatctga

SEQ ID NO: 28876 - protein, 524 aa, Muscodor strobelii
  misc_feature: SGI Peptide ID NO. 569911
  misc_feature (312)..(344): Pfam Id: PF00023 Pfam Desc: Ankyrin repeat
  misc_feature (212)..(244): Pfam Id: PF00023 Pfam Desc: Ankyrin repeat
  misc_feature (232)..(366): NCBI GI: 240110365 Blast Desc: ankyrin repeat containing protein [Coccidioides posadasii C735 delta SOWgp]
  misc_feature (216)..(440): NCBI GI: 256730275 Blast Desc: NECHADRAFT_82615 [Nectria haematococca mpVI 77-13-4]
  misc_feature (10)..(371): NCBI GI: 242816359 Blast Desc: multiple ankyrin repeats single kh domain protein, [Talaromyces stipitatus ATCC 10500] gi|218715100|gb|EED14523.1| multiple ankyrin repeats single kh domain protein, [Talaromyces
  misc_feature (194)..(382): NCBI GI: 115492243 Blast Desc: [Aspergillus terreus NIH2624] gi|114197609|gb|EAU39309.1| [Aspergillus terreus NIH2624]
  misc_feature (98)..(392): NCBI GI: 123488884 Blast Desc: inversin protein alternative isoform [Trichomonas vaginalis G3] gi|121908158|gb|EAY13038.1| inversin protein alternative isoform, [Trichomonas vaginalis G3]
  misc_feature (187)..(398): NCBI GI: 67516937 Blast Desc: AN0750.2 [Aspergillus nidulans FGSC A4] gi|40746236|gb|EAA65392.1| AN0750.2 [Aspergillus nidulans FGSC A4] gi|259488972|tpe|CBF88858.1| TPA: [Aspergillus nidulans FGSC
  misc_feature (95)..(383): NCBI GI: 115754960 Blast Desc: : similar to ankyrin 2,3/unc44 [Strongylocentrotus purpuratus] gi|115945500|ref|XP_001193502.1| : similar to ankyrin 2,3/unc44 [Strongylocentrotus purpuratus]
  misc_feature (96)..(383): NCBI GI: 123471666 Blast Desc: inversin protein alternative isoform [Trichomonas vaginalis G3] gi|121901805|gb|EAY06808.1| inversin protein alternative isoform, [Trichomonas vaginalis G3]
  misc_feature (216)..(376): NCBI GI: 226294082 Blast Desc: [Paracoccidioides brasiliensis Pb18]
  misc_feature (214)..(363): NCBI GI: 281342206 Blast Desc: PANDA_007067 [Ailuropoda melanoleuca]
METNNRNILGFYFTASGEYRPSALYAAVESAASSENSPVMDLLLAYRPLSDINSQEASAIVLAIVRRQWDLAYRLLGGAPGLMEIADEDPVSWGRGITPLLAACMSENSELVDTMIQIGYTVQIADLHAFFQALIYKDSDEKSVVITDGARACFRNASPFTKGTPMWYRNLLIYAIQAHENDIIRTCINHLDTLDFTCTVDAGVWLRYGESHEYCPLILATKKAHEDTIELLLEAGADIDYISTNGLNALQHAAGVQNFTIARLLINRGVGVNAPVHRGATTLAYAAISGDLKLAQLLLEKEAHVSALPIKYGLTPLECAAQFGRLDMVQLLLENDADISQARRLHYVRAVVYARNNGHLAVANHLKQHGSWTRADETLAQLPHLCDVAGAHAWYEEESDRWHVHYKAKLYDDELVSTGSSAYEALDDDDQGLDSSSDFEGCNGNDLHETNDRLSDIPSEQGDNLVEEEDTSHQLSNRSGAGGLTLRVLDAMPVVANSVEQSAFVTSYDPFWGTEEADSLSLHI

SEQ ID NO: 28877 - DNA, 300 bp, Muscodor strobelii
  misc_feature: SGI cDNA ID NO. 569912
  misc_feature: Encodes the peptide sequence at SEQ ID NO 28878
atggcgtcttaccaacaaatcttcgaccaactggccgagcaggcagacagacaagaagtgatagtcgcccagtccttcaaggactgtgctggattattcctcgtgtggatcgatgaaaaacaccttcactatctgattgaaaaggccagagttgccgagaaggcgctgaaggaccgagaggagagagcggaaacccgagccgagtggatcgaggatctcaagaacgagaatgcggccctcaagagaaagctgaggcacgtcaaaacaactctggaacgcctcgcgcacccctctacctaa

SEQ ID NO: 28878 - protein, 99 aa, Muscodor strobelii
  misc_feature: SGI Peptide ID NO. 569912
MASYQQIFDQLAEQADRQEVIVAQSFKDCAGLFLVWIDEKHLHYLIEKARVAEKALKDREERAETRAEWIEDLKNENAALKRKLRHVKTTLERLAHPST

SEQ ID NO: 28879 - DNA, 295 bp, Muscodor strobelii
  misc_feature: SGI EST ID NO. CUFF.68214.0
  misc_feature: Variant of the nucleotide sequence at SEQ ID NO 28877
gcaacgtgaataggagtaagttcgtgtgtgacgaaaccgagttcggagtccttcctaccttcctcctattatgtgaaagccttgcgctttccgaaagacagcatgacgacactgcggaagcatggtggtataatatatgtagcaatctagggacttagttagtgtagcttttagatgatcaagccatcgaagggctgaagggtaatacgagattttctacgcaatggcgtcttaccaacaaatcttcgaccaactggccgagcaggcagacagacaagaagtgatagtcgcccag

SEQ ID NO: 28880 - DNA, 1149 bp, Muscodor strobelii
  misc_feature: SGI cDNA ID NO. 569913
  misc_feature: Encodes the peptide sequence at SEQ ID NO 28881
atggggacctcccactccaaaatcaagcgagacagctcgttagacagcaccaatgacgatgcttggctttatgctcaagatttccacccagattccaagattgggacaaataggtcgtccacgagaccgagcaacgcaaacatcgacatttcgcaagtcgtcagagaggtctatccatactccgaaattgggacagacagctggtccgcaagactgagtagcatcaatgccgacacttcgagttctgtcgaagaggtccattcgtctctcgatgttgcaaaagctgatacctacgcgaaagcctcctgcgctccccaccaacaaacacgttcgtccgtcacagaagcttaccagcttcccccaccggttagcatcgttactctattcattaaggatccaagccaatacgtaccaccaacttctgggagcagatatggacaattcgtctcagatcggtgttctgtttgctcacgtttcgaccgcgaacctttctgcggagtaccaaaacactgcagctttgtgccgccagctgacgaggccaaggtagaacaggagtggaagctgcacaaacttgggtcgtatgtggactaccatttgcgccacctcgaggcctctgtctatgacgcccgtcttgctgctttttcgttgcggctagacgaccctcgagtgagcgagttaagcggaatgttgaccggtcttgaggaaatagtcgaaagttttgccaagttgcctcgtaactctctaacaacgacgcacgcagacgacctcagtttctatttgttcaccaaacgttgtcgtctgcaggattttgtctggaataacttttcaggtgatactccttggtcagaggcatgcggcagctggaacgcagataatcggagacggatcgccaaactcaaccgccaggacgaaatgatccgcacaaggtgccggaatgatgaaggcgaccttggtggtcgttgtgaaacctgtggtaatcttatgcaaccccgtccagcaccatcagagttgccagcgctaccaagcaatccgccgccgccatactgtgctactcctgaagaccagttgcttgagaatgaggacgaggcgcagagccttctaggctcggagcataaggccgcatttccggcaagagcgaagatgtcatag

SEQ ID NO: 28881 - protein, 382 aa, Muscodor strobelii
  misc_feature: SGI Peptide ID NO. 569913
MGTSHSKIKRDSSLDSTNDDAWLYAQDFHPDSKIGTNRSSTRPSNANIDISQVVREVYPYSEIGTDSWSARLSSINADTSSSVEEVHSSLDVAKADTYAKASCAPHQQTRSSVTEAYQLPPPVSIVTLFIKDPSQYVPPTSGSRYGQFVSDRCSVCSRFDREPFCGVPKHCSFVPPADEAKVEQEWKLHKLGSYVDYHLRHLEASVYDARLAAFSLRLDDPRVSELSGMLTGLEEIVESFAKLPRNSLTTTHADDLSFYLFTKRCRLQDFVWNNFSGDTPWSEACGSWNADNRRRIAKLNRQDEMIRTRCRNDEGDLGGRCETCGNLMQPRPAPSELPALPSNPPPPYCATPEDQLLENEDEAQSLLGSEHKAAFPARAKMS

SEQ ID NO: 28882 - DNA, 472 bp, Muscodor strobelii
  misc_feature: SGI EST ID NO. CUFF.68220.0
  misc_feature: Variant of the nucleotide sequence at SEQ ID NO 28880
gcggaatgttgaccggtcttgaggaaatagtcgaaagttttgccaagttgcctcgtaactctctaacaacgacgcacgcagacgacctcagtttctatttgttcaccaaacgttgtcgtctgcaggattttgtctggaataacttttcaggtgatactccttggtcagaggcatgcggcagctggaacgcagataatcggagacggatcgccaaactcaaccgccaggacgaaatgatccgcacaaggtgccggaatgatgaaggcgaccttggtggtcgttgtgaaacctgtggtaatcttatgcaaccccgtccagcaccatcagagttgccagcgctaccaagcaatccgccgccgccatactgtgctactcctgaagaccagttgcttgagaatgaggacgaggcgcagagccttctaggctcggagcataaggccgcatttccggcaagagcgaagatgtcataggc

SEQ ID NO: 28883 - DNA, 216 bp, Muscodor strobelii
  misc_feature: SGI cDNA ID NO. 569914
  misc_feature: Encodes the peptide sequence at SEQ ID NO 28884
atgcccgcggatcaccaccagcaaacctcaacagccgccaccgtaggcttggaagacgaggcagctcgaactgtatcagatggcaagaagactactattgccaacaagaaacctaagcgccagtctcgtagagcaatgaagaaccagcaggacgccgacttggctggtatcggatcacagttttggcccgctgaacagagaaatgccgctagatag

SEQ ID NO: 28884 - protein, 71 aa, Muscodor strobelii
  misc_feature: SGI Peptide ID NO. 569914
MPADHHQQTSTAATVGLEDEAARTVSDGKKTTIANKKPKRQSRRAMKNQQDADLAGIGSQFWPAEQRNAAR

SEQ ID NO: 28885 - DNA, 1353 bp, Muscodor strobelii
  misc_feature: SGI cDNA ID NO. 569915
  misc_feature: Encodes the peptide sequence at SEQ ID NO 28886
atgagcccctcaatcgccgaaggcctcaggacgaaactttcggccgcggccaaagtgcacagtcccggtgacgaggaatttgcgcctctcgtctcccgatggcgggagtatcacgggccctctgtcgccgccctcgtgcaagcaaagaccgagaaggacattcaagactgcgttcgctttgcaaatcaaaacgacatgccattttttgcaagatctggaggccacggcgcgactgaagccatgggcctggccgaaaacgctctccagattgacttgcgtgagataagttacgtcagagtggccgacgacggtaaatcggccacaatcggaggcggcgcgcacatcaagcaagttaccgacgccctcgaaagcgtagggaagcgcacagtcactggaatctgcgaacttgtcggagtctctgcgcctgtcctaggcggtggtcacgggtggctccaaggtgagtatggtctccccgctgatcaagtcatatcggcgcgggtcgtgctaccgagtggcgaggttgtcaccgcatcggaggactcgaatcccgaccttttctgggctctcagaggcgctggccacaactttggcatcgtggctgagtgggagtaccgtatttacgatgccaatcccaaggctccgaaatggtcttacgaaatcttcatcttcccagccgacaagcttgaggctctggttgagcagattgacccctaccatcccataatatggtacggcatcatctacgatggtcccgaggacgaagcgcgggaatacgccaagcccctgcataacattgggactccattcccagtccaggctggaacggccacgatgcacgagctggctgcactcacctatcaggacgtggacggccccgggtgcgcgtatggtctgacttctctacgttacccgatcgggctcaagtcattcgacgtcccggccgtccgtaaggtattcgacttcatcgacaaaagctttcaggaaacgcccgagattgccgggtccttcttcctactagagggctactcgatgcaggccgtgcaggccgtcgacgagaagagcacggcattcccccaccgcagcgacaacatcctagtcacgtcgtacgtgcagtacaagccggatcctcgtgtcgatccgctcgccgaaaagctcgggaggatcctgcgccagatcctgctcgacgcgagcgacgacccacagcacctccgcgcctatgtgaactatgcgcacggcgacgaggacctccgtgaagtatatggctgggaagactggcggcttgagaagctgagggagctcaaggccaagtgggatcctaagaacaagatgaagtactatgtacccattgtgtga

SEQ ID NO: 28886 - protein, 450 aa, Muscodor strobelii
  misc_feature: SGI Peptide ID NO. 569915
  misc_feature (405)..(450): Pfam Id: PF08031 Pfam Desc: Berberine and berberine like
  misc_feature (42)..(178): Pfam Id: PF01565 Pfam Desc: FAD binding domain
  misc_feature (405)..(441): Pfam Id: PF08031 Pfam Desc: Berberine and berberine like
  misc_feature (9)..(450): NCBI GI: 46115880 Blast Desc: FG03782.1 [Gibberella zeae PH-1]
  misc_feature (128)..(421): NCBI GI: 154292051 Blast Desc: BC1G_14400 [Botryotinia fuckeliana B05.10] gi|150846317|gb|EDN21510.1| BC1G_14400 [Botryotinia fuckeliana B05.10]
  misc_feature (9)..(449): NCBI GI: 119473675 Blast Desc: FAD binding domain protein [Neosartorya fischeri NRRL 181] gi|119406866|gb|EAW16816.1| FAD binding domain protein [Neosartorya fischeri NRRL 181]
  misc_feature (9)..(449): NCBI GI: 70985799 Blast Desc: FAD-dependent oxygenase [Aspergillus fumigatus Af293] gi|66846034|gb|EAL86367.1| FAD-dependent oxygenase, [Aspergillus fumigatus Af293] gi|159128459|gb|EDP53574.1| FAD-dependent A1163]
  misc_feature (9)..(449): NCBI GI: 256724320 Blast Desc: NECHADRAFT_53445 [Nectria haematococca mpVI 77-13-4]
  misc_feature (9)..(449): NCBI GI: 238491442 Blast Desc: FAD-dependent oxygenase, [Aspergillus flavus NRRL3357] gi|220697371|gb|EED53712.1| FAD-dependent oxygenase, [Aspergillus flavus NRRL3357]
  misc_feature (7)..(449): NCBI GI: 145234607 Blast Desc: An03g00460 [Aspergillus niger] gi|134057623|emb|CAK38023.1| protein product [Aspergillus niger]
  misc_feature (5)..(449): NCBI GI: 256724158 Blast Desc: NECHADRAFT_51569 [Nectria haematococca mpVI 77-13-4]
  misc_feature (9)..(449): NCBI GI: 169786187 Blast Desc: [Aspergillus oryzae RIB40] gi|83776302|dbj|BAE66421.1| protein product [Aspergillus oryzae]
  misc_feature (9)..(449): NCBI GI: 169773459 Blast Desc: [Aspergillus oryzae RIB40] gi|83769059|dbj|BAE59196.1| protein product [Aspergillus oryzae]
  misc_feature (5)..(246): SWISSPROT Homolog: EC 1.5.3.6 (R)-6-hydroxynicotine oxidase
MSPSIAEGLRTKLSAAAKVHSPGDEEFAPLVSRWREYHGPSVAALVQAKTEKDIQDCVRFANQNDMPFFARSGGHGATEAMGLAENALQIDLREISYVRVADDGKSATIGGGAHIKQVTDALESVGKRTVTGICELVGVSAPVLGGGHGWLQGEYGLPADQVISARVVLPSGEVVTASEDSNPDLFWALRGAGHNFGIVAEWEYRIYDANPKAPKWSYEIFIFPADKLEALVEQIDPYHPIIWYGIIYDGPEDEAREYAKPLHNIGTPFPVQAGTATMHELAALTYQDVDGPGCAYGLTSLRYPIGLKSFDVPAVRKVFDFIDKSFQETPEIAGSFFLLEGYSMQAVQAVDEKSTAFPHRSDNILVTSYVQYKPDPRVDPLAEKLGRILRQILLDASDDPQHLRAYVNYAHGDEDLREVYGWEDWRLEKLRELKAKWDPKNKMKYYVPIV

SEQ ID NO: 28887 - DNA, 1861 bp, Muscodor strobelii
  misc_feature: SGI EST ID NO. CUFF.68351.2
  misc_feature: Variant of the nucleotide sequence at SEQ ID NO 28885
cgcaaagtcgcaacctccaatcccacgccttaggctccgtagaggagtccgtaagcggatgcaccgcagattcccgtgccatatatccagacggagtttgtctactcgtcgaatcacgtggaactcgccattgcacgttgcacgcaagggggctttctttttgctctttggccgagcctcacgtgtgcaccgcattaccccatgggtgtcccagtgtaagtagctacgccagacgaacaaaaggccccgatcaatccgacagttcaggttttgttgtttgttagaacatctccagacacgctcatcttctaccgttcttaccgttcgtcagcgaacacctattatcgatttaccactagatcacgaaccacaccatgagcccctcaatcgccgaaggcctcaggacgaaactttcggccgcggccaaagtgcacagtcccggtgacgaggaatttgcgcctctcgtctcccgatggcgggagtatcacgggccctctgtcgccgccctcgtgcaagcaaagaccgagaaggacattcaagactgcgttcgctttgcaaatcaaaacgacatgccattttttgcaagatctggaggccacggcgcgactgaagccatgggcctggccgaaaacgctctccagattgacttgcgtgagataagttacgtcagagtggccgacgacggtaaatcggccacaatcggaggcggcgcgcacatcaagcaagttaccgacgccctcgaaagcgtagggaagcgcacagtcactggaatctgcgaacttgtcggagtctctgcgcctgtcctaggcggtggtcacgggtggctccaaggtgagtatggtctccccgctgatcaagtcatatcggcgcgggtcgtgctaccgagtggcgaggttgtcaccgcatcggaggactcgaatcccgaccttttctgggctctcagaggcgctggccacaactttggcatcgtggctgagtgggagtaccgtatttacgatgccaatcccaaggctccgaaatggtcttacgaaatcttcatcttcccagccgacaagcttgaggctctgtacacgctacataacgagatgcagaggaaccaacctgcacatgtaatccactagagctacattatcagggttgagcagattgacccctaccatcccataatatggtacggcatcatctacgatggtcccgaggacgaagcgcgggaatacgccaagcccctgcataacattgggactccattcccagtccaggctggaacggccacgatgcacgagctggctgcactcacctatcaggacgtggacggccccgggtgcgcgtatggtctgacttctctacgttacccgatcgggctcaagtcattcgacgtcccggccgtccgtaaggtattcgacttcatcgacaaaagctttcaggaaacgcccgagattgccgggtccttcttcctactagagggctactcgatgcaggccgtgcaggccgtcgacgagaagagcacggcattcccccaccgcagcgacaacatcctagtcacgtcgtacgtgcagtacaagccggatcctcgtgtcgatccgctcgccgaaaagctcgggaggatcctgcgccagatcctgctcgacgcgagcgacgacccacagcacctccgcgcctatgtgaactatgcgcacggcgacgaggacctccgtgaagtatatggctgggaagactggcggcttgagaagctgagggagctcaaggccaagtgggatcctaagaacaagatgaagtactatgtacccattgtgtgaaggacttatgtttatggcacgatagctagcgtttatcactctatgattatttgaagcctttgaac

SEQ ID NO: 28888 - DNA, 1479 bp, Muscodor strobelii
  misc_feature: SGI cDNA ID NO. 569916
  misc_feature: Elevated expression when VOC is produced
  misc_feature: Encodes the peptide sequence at SEQ ID NO 28889
atgacctctttcataaccggcttgagcccatcgcagttggtggctttaagtctggtgcttggcattggctttacagtagcgaaagtcttttacaatgtgtttttgcacccccttcgaaaatttccaggccctatatctcaccgaatgtctatctttcctcgggcgcttcatcacatgaatggtaccttatccttccgggtaacggaactacacaagaagtacggctcagtggtccgtgttgctcctaatgagcttgcttttagtagcccacaggcctggcgcgatatctacggtcataagaaaagggaatttccgaaattgccaggtcgttccctcaaggttatgcccacatccatccagaatgcagaggccgcggagcatcacatgatacgtcggcatgtccttcccggcttctcagagcgctcgatgcacgaacaagagcccatcatcggcgcttatgtcgatctactcgtctctcgcttaaaagaagctacaaaggtaaacactcggcagaacataaaagactggtacacatggaccacctttgacttgattggtgacttgagcttcggcgtggatggcggatttggctgtcttcaggggagcagttaccatccttgggtcaagttaatcaacgactcgttccgccagcagggtattgtccaaggtcttatatccttagggtttggaacacccctcactttattatataagaccgcgagcaacctcttcgccaccaacaagcatttgcttatcgtcaaagaaaagatcaaagagcggataaagggtagtgaacggcccgatttcctcgacggcttgatcagtaatagagagaagctagggcttgatgaagacaaattggcaaccaatgcctcggttttaataattgcgggatcggagacaacggcgacggtactcagtgctgtcacatactatttaagtacactcccagaggtcttgaagaaggtggagcaagaagtccgatccgcttttgcaagcgatagcgaaataacactgaccaccgtggggaacctgtcttttatgctagcttgtcttgatgaagcacttcgttgctatccacctttgatgaatggtggacctcgatatacgccggatggaggtatcatcgatggcactgtagtgcctaagaatactgttgtgaccttgtaccagtacgctatcaactatagcgagacatactggcgggatccacagaaatttgctcccgagcgctggatgaatgatcctctctatgaggatgataatcatgacgcaatgcaacccttcggaataggccctcgtaattgcgttggcagaaatctcgcctatgctgagatgcgcctcattctcgctaaagttctctacaactttgatatcagcatcgctgatgacagtcgaaactggctggaaggccagaaagcattttcagtttgggttaaacccgaccttaatattcacttgaagccagcttcgcgataa

SEQ ID NO: 28889 - protein, 492 aa, Muscodor strobelii
  misc_feature: SGI Peptide ID NO. 569916
  misc_feature (41)..(489): Pfam Id: PF00067 Pfam Desc: Cytochrome P450
  misc_feature (58)..(489): Pfam Id: PF00067 Pfam Desc: Cytochrome P450
  misc_feature (5)..(489): NCBI GI: 242826764 Blast Desc: cytochrome P450, [Talaromyces stipitatus ATCC 10500] gi|242826769|ref|XP_002488699.1| cytochrome P450, [Talaromyces stipitatus ATCC 10500] gi|218712090|gb|EED11517.1| cytochrome
  misc_feature (14)..(487): NCBI GI: 255933153 Blast Desc: Pc12g12330 [Penicillium chrysogenum Wisconsin 54-1255] gi|211582666|emb|CAP80860.1| Pc12g12330 [Penicillium chrysogenum Wisconsin 54-1255]
  misc_feature (14)..(492): NCBI GI: 224969386 Blast Desc: cytochrome P450 ClCP1 [Glomerella lindemuthiana]
  misc_feature (13)..(492): NCBI GI: 261202730 Blast Desc: cytochrome P450 monooxygenase [Ajellomyces dermatitidis SLH14081] gi|239590676|gb|EEQ73257.1| cytochrome P450 monooxygenase [Ajellomyces dermatitidis SLH14081]
  misc_feature (13)..(492): NCBI GI: 239612397 Blast Desc: cytochrome P450 monooxygenase [Ajellomyces dermatitidis ER-3]
  misc_feature (13)..(489): NCBI GI: 145608550 Blast Desc: MGG_06544 [Magnaporthe grisea 70-15] gi|145016015|gb|EDK00505.1| MGG_06544 [Magnaporthe grisea 70-15]
  misc_feature (16)..(489): NCBI GI: 242777790 Blast Desc: cytochrome P450 monooxygenase, [Talaromyces stipitatus ATCC 10500] gi|218722724|gb|EED22142.1| cytochrome P450 monooxygenase, [Talaromyces stipitatus ATCC 10500]
  misc_feature (13)..(489): NCBI GI: 212545779 Blast Desc: cytochrome P450 monooxygenase, [Penicillium marneffei ATCC 18224] gi|210064563|gb|EEA18658.1| cytochrome P450 monooxygenase, [Penicillium marneffei ATCC 18224]
  misc_feature (24)..(492): NCBI GI: 145241728 Blast Desc: An09g01950 [Aspergillus niger] gi|134078050|emb|CAK40133.1| protein product [Aspergillus niger]
  misc_feature (28)..(491): NCBI GI: 154285174 Blast Desc: [Ajellomyces capsulatus NAm1] gi|150407023|gb|EDN02564.1| [Ajellomyces capsulatus NAm1]
  misc_feature (42)..(466): SWISSPROT Homolog: EC 1.14.14.1 Unspecific monooxygenase
  misc_feature: Useful for introducing or modulating the production of volatile compounds
MTSFITGLSPSQLVALSLVLGIGFTVAKVFYNVFLHPLRKFPGPISHRMSIFPRALHHMNGTLSFRVTELHKKYGSVVRVAPNELAFSSPQAWRDIYGHKKREFPKLPGRSLKVMPTSIQNAEAAEHHMIRRHVLPGFSERSMHEQEPIIGAYVDLLVSRLKEATKVNTRQNIKDWYTWTTFDLIGDLSFGVDGGFGCLQGSSYHPWVKLINDSFRQQGIVQGLISLGFGTPLTLLYKTASNLFATNKHLLIVKEKIKERIKGSERPDFLDGLISNREKLGLDEDKLATNASVLIIAGSETTATVLSAVTYYLSTLPEVLKKVEQEVRSAFASDSEITLTTVGNLSFMLACLDEALRCYPPLMNGGPRYTPDGGIIDGTVVPKNTVVTLYQYAINYSETYWRDPQKFAPERWMNDPLYEDDNHDAMQPFGIGPRNCVGRNLAYAEMRLILAKVLYNFDISIADDSRNWLEGQKAFSVWVKPDLNIHLKPASR

SEQ ID NO: 28890 - DNA, 2234 bp, Muscodor strobelii
  misc_feature: SGI EST ID NO. CUFF.68236.0
  misc_feature: Variant of the nucleotide sequence at SEQ ID NO 28888
atgaaaacctcaaggtgatctgcttcaccattgccggaaaaagcgagagctccaattttgacaattactatctgcaggacagcacagcataacttatttcgtgtttcggttccgtaagatacgaactcattgattatgtagatatttaataacagctagccccgcgccagctgacatttacacccagcatattgatgcagcacacgatcttttcatcatgacctctttcataaccggcttgagcccatcgcagttggtggctttaagtctggtgcttggcattggctttacagtagcgaaagtcttttacaatgtgtttttgcacccccttcgaaaatttccaggccctatatctcaccgaatgtctatctttcctcgggcgcttcatcacatgaatggtaccttatccttccgggtaacggaactacacaagaagtacggctcagtggtccgtgttgctcctaatgagcttgcttttagtagcccacaggcctggcgcgatatctacggtcataagaaaagggaatttccgaaattgccaggtcgttccctcaaggttatgcccacatccatccagaatgcagaggccgcggagcatcacatgatacgtcggcatgtccttcccggcttctcagagcgctcgatgcacgaacaagagcccatcatcggcgcttatgtcgatctactcgtctctcgcttaaaagaagctacaaaggtaaacactcggcagaacataaaagactggtacacatggaccacctttgacttgattggtgacttgagcttcggcgtggatggcggatttggctgtcttcaggggagcagttaccatccttgggtcaagttaatcaacgactcgttccgccagcagggtattgtccaaggtcttatatccttagggtttggaacacccctcactttattatataagaccgcgagcaacctcttcgccaccaacaagcatttgcttatcgtcaaagaaaagatcaaagagcggataaagggtagtgaacggcccgatttcctcgacggcttgatcagtaatagagagaagctagggcttgatgaagacaaattggcaaccaatgcctcggttttaataattgcgggatcggagacaacggcgacggtactcagtgctgtcacatactatttaagtacactcccagaggtcttgaagaaggtggagcaagaagtccgatccgcttttgcaagcgatagcgaaataacactgaccaccgtggggaacctgtcttttatgctagcttgtcttgatgaagcacttcgttgctatccacctttgatgaatggtggacctcgatatacgccggatggaggtatcatcgatggcactgtagtgcctaagaatactgttgtgaccttgtaccagtacgctatcaactatagcgagacatactggcgggatccacagaaatttgctcccgagcgctggatgaatgatcctctctatgaggatgataatcatgacgcaatgcaacccttcggaataggccctcgtaattgcgttggcagaaatctcgcctatgctgagatgcgcctcattctcgctaaagttctctacaactttgatatcagcatcgctgatgacagtcgaaactggctggaaggccagaaagcattttcagtttgggttaaacccgaccttaatattcacttgaagccagcttcgcgataatccaatcatgcgaccaatttcagcttaatgttgacttaaggatcgatcaaagctctgtcttcagcatgcaaatggctttatggcaatgagctcttgcttctttcacgatggcgatatccacttgctccgcacaacgtcagagcaagacgaaagttaggccgcataattgtagtctcatgttctcacctaatacattagaaggcataaggcctgatcacggctcttgtaaaatggcaaggactgcttagacgaaggaatgtgtgacagcttacgacacatgcgacaggctcgcattcaacgccgcaagaaaggccgacataacggcgatattgcaagaaaaggatttctggaataacaatccgggttatgaaacgtaattcttgtatttgatacagaccagtcgaatcaattgattatgcagctcatctattgttatcgatatgcaatgcttgtgtggcccagggggtttcgtcacgtttcctctactccctagaggtcataaggaaacactcgtctctatacgttaggcacctgaaca

SEQ ID NO: 28891 - DNA, 2220 bp, Muscodor strobelii
  misc_feature: SGI cDNA ID NO. 569917
  misc_feature: Encodes the peptide sequence at SEQ ID NO 28892
atggtagttgccggtgccgcgttatccggacaaccctcgtcgccctgggcaacccgctttccagtaccagacttcagttacgaggaagctggaacggttcattccgggttagcgccagcaaatccacgtagagatgatccgaagcgctatgataacatcacataccctgctaaccctcttcacgggagtaatcaggagatagaccgagtcttttggcatgaggagacacaaaagcaagcattgtcgggtttggagacatgggaaactgcgattctaaatagatggctttattttaggcctgactcaatcgaagtaatcccttcaggacatctacgcacggacaatcaagaatcggataagtcaacattcgaatattacaatgccgaatcgctcaaggttgatgaaactaaatggctaccctttttacgtaaggaaaagtggcttgactggacagagacactccccctaggccgaagcaaatatcagggaagggtttggagtgtggatgatactaccatatggaacaccatcaaaaggtctgtcgagttggcaaaccgcatgttggaggctcttttagatgagagacatcaaggaggcaagtttcaaactgctgatcgtcttcgaacgattctttggggtcccatagagaattggaaccaagtggcacagcattacggccagcctcagatcgctggcgacgacccacgacgcgtactggtctcccctcactatgagcgaatcattgccaccgcgagagcaccgccgcaaaccaatgtcaacacactcgccgagcgcacaaccagtgtcgattggagaaataggcgagctttgttcgttacaagtactagtggctatttcggtgagacaccatctgccattgtacatgaaattatgcattgtattctttatgctcgagatagcgacgcagatagcaactatgcaggcaatcgctgggataggacgggagaacgcgatactgaggaaccgattgtgctggaggaaacgaagcgggctggtgatatggagcagtggttgtttggcggccgtctggtctgccatccggacaaaggcggaagcggaggtgaggatataaggacggtgcctccacctctagctctcgtcttgatagagcatcccatgccgggcaaatgggaacctggccctggactacccgacgcctatatgatgcctggagcattgactacggtctatcatccatcgtccatatgggcatcaagattgctgtctgaatggttctggacgggggtgggatcggaagccagaaagagcaataactttttctggaggcacccaaccctcctcggccagaccccgaacattggagccaacagacctccgccgcagtatacatctccaaggatacagactagtatccaatggtccacgtcagttgatgccctagcagggtctgagctggagttggagcgtggtatgtacaatactgcataccgggccgatccgtacaaggtcttaaaagcacagtggataaaaagcccgtggggtgcctggcagatgcgagaccagtgtcgctggtttccagacgcgttttccaaaagagacgaggtagcttgcgtagataccgcaatggatctggtctatgcatgcccatgggatgtcgatgaagccacatattacgacaggctcccgtcgccaacagaagttagacctgactgggcctggcattgcttagggttgctaatgctcgcatcactgccgattcgacgcacgaggttgccgcccattttgaacacgaccaccgaatcggttgagactttattgccaagtgtcgaagccgcggcggtgggtgcagcggcacctgtgcgggtttccatgcctatatcaaaacagagaaaggttccactgagcatgctgtggggcgacgttggaaataacaactggggtcgttttgatccgcttatactcaccaaacgcaaatacatagggcgcgttcgcacaatcttggcgtcattaatcaaggcgagcgggtgcatcgtgcacaaggcattctatatagccataacgaacacgtttttcgcagttcagaagtctatagaggacttagaaggccaatacgagaatgatgcagatgaatttaggtggacggcggattggaaattcgacatgccagagtatgatcctagcttggtgcgattcgacaacgcccggaacatgtttgtcccagcaaacatatctccttag

SEQ ID NO: 28892 - protein, 739 aa, Muscodor strobelii
  misc_feature: SGI Peptide ID NO. 569917
  misc_feature (31)..(192): NCBI GI: 85089861 Blast Desc: NCU09292 [Neurospora crassa OR74A] gi|28919473|gb|EAA28908.1| NCU09292 [Neurospora crassa OR74A]
MVVAGAALSGQPSSPWATRFPVPDFSYEEAGTVHSGLAPANPRRDDPKRYDNITYPANPLHGSNQEIDRVFWHEETQKQALSGLETWETAILNRWLYFRPDSIEVIPSGHLRTDNQESDKSTFEYYNAESLKVDETKWLPFLRKEKWLDWTETLPLGRSKYQGRVWSVDDTTIWNTIKRSVELANRMLEALLDERHQGGKFQTADRLRTILWGPIENWNQVAQHYGQPQIAGDDPRRVLVSPHYERIIATARAPPQTNVNTLAERTTSVDWRNRRALFVTSTSGYFGETPSAIVHEIMHCILYARDSDADSNYAGNRWDRTGERDTEEPIVLEETKRAGDMEQWLFGGRLVCHPDKGGSGGEDIRTVPPPLALVLIEHPMPGKWEPGPGLPDAYMMPGALTTVYHPSSIWASRLLSEWFWTGVGSEARKSNNFFWRHPTLLGQTPNIGANRPPPQYTSPRIQTSIQWSTSVDALAGSELELERGMYNTAYRADPYKVLKAQWIKSPWGAWQMRDQCRWFPDAFSKRDEVACVDTAMDLVYACPWDVDEATYYDRLPSPTEVRPDWAWHCLGLLMLASLPIRRTRLPPILNTTTESVETLLPSVEAAAVGAAAPVRVSMPISKQRKVPLSMLWGDVGNNNWGRFDPLILTKRKYIGRVRTILASLIKASGCIVHKAFYIAITNTFFAVQKSIEDLEGQYENDADEFRWTADWKFDMPEYDPSLVRFDNARNMFVPANISP

SEQ ID NO: 28893 - DNA, 978 bp, Muscodor strobelii
  misc_feature: SGI EST ID NO. CUFF.68265.0
  misc_feature: Variant of the nucleotide sequence at SEQ ID NO 28891
cggtaagacgatgagttatgattcgagatcgtggtactaactctaactgtcgtagtggggtgcctggcagatgcgagaccagtgtcgctggtttccagacgcgttttccaaaagagacgaggtagcttgcgtagataccgcaatggatctggtctatgcatgcccatgggatgtcgatgaagccacatattacgacaggctcccgtcgccaacagaagttagacctgactgggcctggcattgcttagggttgctaatgctcgcatcactgccgattcgacgcacgaggttgccgcccattttgaacacgaccaccgaatcggttgagactttattgccaagtgtcgaagccgcggcggtgggtgcagcggcacctgtgcgggtttccatgcctatatcaaaacagagaaaggttccactgagcatgctgtggggcgacgttggaaataacaactggggtcgttttgatccgcttatactcaccaaacgcaaatacatagggcgcgttcgcacaatcttggcgtcattaatcaaggcgagcgggtgcatcgtgcacaaggcattctatatagccataacgaacacgtttttcgcagttcagaagtctatagaggacttagaaggccaatacgagaatgatgcagatgaatttaggtggacggcggattggaaattcgacatgccagagtatgatcctagcttggtgcgattcgacaacgcccggaacatgtttgtcccagcaaacatatctccttagcccgagtggcgatgataatatctatatggaaagagggacgtcctagcaagacttgtgggatagctctgaagaaaacgttgttagcgaagactactattacttatttgtgtacattatttttttgtaagcaaatctttatgtcatggcagcgtttcctgctttcaatcataaataatttatccgacttagtattagttatcggaattgatttggagaggctg

SEQ ID NO: 28894 - DNA, 981 bp, Muscodor strobelii
  misc_feature: SGI cDNA ID NO. 569918
  misc_feature: Encodes the peptide sequence at SEQ ID NO 28895
atggcttctgagctgcctgtcgtagcacgatactgcgaatttgttgcgcccgcggatgagaaatgccaaacatggtacaagatcatcggttatttcgaatcgtctatatctccgccccttatcacgctccatggtggtcccggatctggtcacgactatctatcgccacttactgatttgtgtgagacatatggaatcccaattgtctactacgatcaagtcgggtgtggtttatcgactcatttccgtcataaagtaggcgatgagtcattctggacatttgagctttatatcaaggagcttcagagcctaattgaccatcttggactcacccaatatcacattttgggacaaagctggggtgggatgctgggagctgcattcgcagcacagcacccacatggattgcaaaggttgatccttgcaagtgggcctgcaagcgttcccaaatggatcgctggcgctgaaatgctcttgtctgagctaccgccggattttcgcaagactctagaagactgcgaccgtcgtggagactatgagagcccagagtacgagaaagcagccgctgtgtactacagcaggcacgtgtatcgcttggatccttggcctactgatgtacttgcttccttcaaaaagttgtcagatgacaaaacagcctatttgacaatgcagggcccctccgagtctgttatcaccggaagtcttaaggactgggagggctggaaattcgggcacaaaatacagaccgcgacatcattgcttaacggccagtacgatgagatggttgatgactgtgtgtgtggtggtcgcctgtatctgctcgatgaccttgatgactgtatacttccatggttccagaccataccaaaagtaaaatgggttaccttagagaacgcgagtcacatgggacagtgggaagatcgtgagcgattcgtaaatctgtgtggaacatttctatcttcgtctctgataactccttaa

SEQ ID NO: 28895 - protein, 326 aa, Muscodor strobelii
  misc_feature: SGI Peptide ID NO. 569918
  misc_feature (66)..(317): Pfam Id: PF00561 Pfam Desc: alpha/beta hydrolase fold
  misc_feature (66)..(195): Pfam Id: PF00561 Pfam Desc: alpha/beta hydrolase fold
  misc_feature (5)..(321): NCBI GI: 154314339 Blast Desc: BC1G_05263 [Botryotinia fuckeliana B05.10] gi|150848908|gb|EDN24101.1| BC1G_05263 [Botryotinia fuckeliana B05.10]
  misc_feature (20)..(322): NCBI GI: 145252800 Blast Desc: An16g06070 [Aspergillus niger] gi|134083468|emb|CAK46945.1| protein product [Aspergillus niger]
  misc_feature (12)..(319): NCBI GI: 156036178 Blast Desc: SS1G_12775 [Sclerotinia sclerotiorum 1980] gi|154698183|gb|EDN97921.1| SS1G_12775 [Sclerotinia sclerotiorum 1980]
  misc_feature (24)..(322): NCBI GI: 254406800 Blast Desc: proline imino-peptidase [Streptomyces sviceus ATCC 29083] gi|197716230|gb|EDY60264.1| proline imino-peptidase [Streptomyces sviceus ATCC 29083]
  misc_feature (15)..(319): NCBI GI: 145595300 Blast Desc: proline-specific peptidase [Salinispora tropica CNB-440] gi|145304637|gb|ABP55219.1| proline-specific peptidase [Salinispora tropica CNB-440]
  misc_feature (23)..(320): NCBI GI: 260457388 Blast Desc: proline-specific peptidase [Streptomyces flavogriseus ATCC 33331] gi|260086610|gb|EEW70620.1| proline-specific peptidase [Streptomyces flavogriseus ATCC 33331]
  misc_feature (23)..(319): NCBI GI: 222106651 Blast Desc: hydrolases or acyltransferases (alpha/beta hydrolase superfamily) [Agrobacterium vitis S4] gi|221737830|gb|ACM38726.1| hydrolases or acyltransferases (alpha/beta hydrolase superfamily)
  misc_feature (23)..(322): NCBI GI: 271963655 Blast Desc: Prolyl aminopeptidase [Streptosporangium roseum DSM 43021] gi|270506830|gb|ACZ85108.1| Prolyl aminopeptidase [Streptosporangium roseum DSM 43021]
  misc_feature (20)..(321): NCBI GI: 256781407 Blast Desc: proline-specific peptidase [Streptomyces hygroscopicus ATCC 53653]
  misc_feature (23)..(319): NCBI GI: 21232248 Blast Desc: proline imino-peptidase [Xanthomonas campestris pv. campestris str. ATCC 33913] gi|66767623|ref|YP_242385.1| proline imino-peptidase [Xanthomonas campestris pv. campestris str. 8004]
  misc_feature (22)..(319): SWISSPROT Homolog: EC 3.4.11.5 Prolyl aminopeptidase
MASELPVVARYCEFVAPADEKCQTWYKIIGYFESSISPPLITLHGGPGSGHDYLSPLTDLCETYGIPIVYYDQVGCGLSTHFRHKVGDESFWTFELYIKELQSLIDHLGLTQYHILGQSWGGMLGAAFAAQHPHGLQRLILASGPASVPKWIAGAEMLLSELPPDFRKTLEDCDRRGDYESPEYEKAAAVYYSRHVYRLDPWPTDVLASFKKLSDDKTAYLTMQGPSESVITGSLKDWEGWKFGHKIQTATSLLNGQYDEMVDDCVCGGRLYLLDDLDDCILPWFQTIPKVKWVTLENASHMGQWEDRERFVNLCGTFLSSSLITP

SEQ ID NO: 28896 - DNA, 1055 bp, Muscodor strobelii
  misc_feature: SGI EST ID NO. CUFF.68269.0
  misc_feature: Variant of the nucleotide sequence at SEQ ID NO 28894
tgttaggccagtgacacgcgctcctatgccgagcgaaccaatagggggcgtaattgtggctcgagacggcggtaccaaagaggacgtaatctttccaaccacactacatagtttccaacctggcacattccgttacttatttccatattctggattgtatgttctgctctcgcattgctgcacagtttgcgcgacgtacttcctacctctttcctctttacccagaacactcaagctcttctctacacaatggcttctgagctgcctgtcgtagcacgatactgcgaatttgttgcgcccgcggatgagaaatgccaaacatggtacaagatcatcggttatttcgaatcgtctatatctccgccccttatcacgctccatggtggtcccggatctggtcacgactatctatcgccacttactgatttgtgtgagacatatggaatcccaattgtctactacgatcaagtcgggtgtggtttatcgactcatttccgtcataaagtaggcgatgagtcattctggacatttgagctttatatcaaggagcttcagagcctaattgaccatcttggactcacccaatatcacattttgggacaaagctggggtgggatgctgggagctgcattcgcagcacagcacccacatggattgcaaaggttgatccttgcaagtgggcctgcaagcgttcccaaatggatcgctggcgctgaaatgctcttgtctgagctaccgccggattttcgcaagactctagaagactgcgaccgtcgtggagactatgagagcccagagtacgagaaagcagccgctgtgtactacagcaggcacgtgtatcgcttggatccttggcctactgatgtacttgcttccttcaaaaagttgtcagatgacaaaacagcctatttgacaatgcagggcccctccgagtctgttatcaccggaagtcttaaggactgggagggctggaaattcgggcacaaaatacagaccgcgacatcattgcttaacggccagtacgatgagatggttgatgactgtgtgtgtggtgg

SEQ ID NO: 28897 - DNA, 285 bp, Muscodor strobelii
  misc_feature: SGI cDNA ID NO. 569919
  misc_feature: Encodes the peptide sequence at SEQ ID NO 28898
atggatgtgcatgatcaccaaccgcagcgggccctccacggttacttgcgaggtgatggcctccacagctacgacattctccatcacgaccagcctggcacaccgacggcagacgaagtgtgcggattcagcactttccacgcagatgctgcacgctatgtgggacaccagctacagctagcagatactatcattcccttcaacgatcctctgaatgacccggtgctcccgatctacggcgagtcagatcaagaatacgacacgaacacatgggacgagatctaa

SEQ ID NO: 28898 - protein, 94 aa, Muscodor strobelii
  misc_feature: SGI Peptide ID NO. 569919
MDVHDHQPQRALHGYLRGDGLHSYDILHHDQPGTPTADEVCGFSTFHADAARYVGHQLQLADTIIPFNDPLNDPVLPIYGESDQEYDTNTWDEI

SEQ ID NO: 28899 - DNA, 186 bp, Muscodor strobelii
  misc_feature: SGI cDNA ID NO. 569920
  misc_feature: Encodes the peptide sequence at SEQ ID NO 28900
actgctgttgagactctacagcctaagggagttactggtatccacgctcacaacattcatgatgctgatcctgattttgccccaggaataaagcctgttggtcaagtcaccggtgccggcgccaataacggtgctagtagctcatatgcaggtggtcctagtatagaggctgggcgcaccgaatga

SEQ ID NO: 28900 - protein, 61 aa, Muscodor strobelii
  misc_feature: SGI Peptide ID NO. 569920
TAVETLQPKGVTGIHAHNIHDADPDFAPGIKPVGQVTGAGANNGASSSYAGGPSIEAGRTE

SEQ ID NO: 28901 - DNA, 1059 bp, Muscodor strobelii
  misc_feature: SGI cDNA ID NO. 569921
  misc_feature: Encodes the peptide sequence at SEQ ID NO 28902
atggacacaatagttaggaaacaaatcaatctccaatgtactgcctctggcacatacacggcgtcatggcatgtcgattggactgtgggagctgtgcttcatggtggctgcgtcgctgctgtcatccatcacgtcgcggaaacgcaccttgcttcggacccgaccttgaagaacaagaaccagcccgatgttgccaacctgcatttcgagttcctgcgaccctgtactcgcggagatagtgttatcactgttacaaccctgaggactggcgcagcggccagcacacttcacctcgagctctaccaagacggacaaaagaaagtccttgcactcgcaacggcaatgaattttgaaaaagtactgggaccctccgctcccgtacctgtcatccgagcagcccatcccccttgtcccttgccggcgcctgatttcgagaaggtgctagccagcgagccggacccgcattggattagcctcctcatatggtggtggtcgcctctatctacttttcttagcctcctcataactggcgagatcatccctttctcgaagtatatactgagtctgtatcctcgtgatgggcatcaacacgacggtatcgtcgactcatggaggtgtttgctaggaggcgatcgtcttgattccacgtacttggccatgatgactgacatgatcccctccatgtcggacacgctcctccgaaacggaggcctgtacgatgcgcacaagttgcaccgcaccgtcaaagagcaggcagataagtaccccggtattcatgccgaggtgaaaaataccgctgccgaggcaatgatgtcagccacgtttaacaacactcagacgttggacatcgagtttactaagaagctccccgccaagggactgcgcttcgtctttacgcggacggctgctaatatgctggttgatgggagactgagcgtcgacatcacgatctgcgacgagaatatggagcttattgccacttcccaccagctcattctcgtcctcgagaccggacggaagtttcgaactatttcgacggcggagaaatctgccttataa

SEQ ID NO: 28902 - protein, 352 aa, Muscodor strobelii
  misc_feature: SGI Peptide ID NO. 569921
  misc_feature (1)..(351): NCBI GI: 212528390 Blast Desc: conserved [Penicillium marneffei ATCC 18224] gi|210073750|gb|EEA27837.1| conserved [Penicillium marneffei ATCC 18224]
  misc_feature (1)..(352): NCBI GI: 170940147 Blast Desc: protein product [Podospora anserina]
  misc_feature (15)..(339): NCBI GI: 189205503 Blast Desc: conserved [Pyrenophora tritici-repentis Pt-1C-BFP] gi|187975179|gb|EDU41805.1| conserved [Pyrenophora tritici-repentis Pt-1C-BFP]
  misc_feature (15)..(341): NCBI GI: 225682173 Blast Desc: conserved [Paracoccidioides brasiliensis Pb03]
  misc_feature (15)..(341): NCBI GI: 226289362 Blast Desc: conserved [Paracoccidioides brasiliensis Pb18]
  misc_feature (2)..(340): NCBI GI: 156056687 Blast Desc: SS1G_04074 [Sclerotinia sclerotiorum 1980] gi|154701860|gb|EDO01599.1| SS1G_04074 [Sclerotinia sclerotiorum 1980]
  misc_feature (9)..(339): NCBI GI: 119177014 Blast Desc: CIMG_07506 [Coccidioides immitis RS]
  misc_feature (7)..(339): NCBI GI: 116200538 Blast Desc: CHGG_10814 [Chaetomium globosum CBS 148.51] gi|88175528|gb|EAQ82996.1| CHGG_10814 [Chaetomium globosum CBS 148.51]
  misc_feature (9)..(339): NCBI GI: 238844861 Blast Desc: conserved [Microsporum canis CBS 113480]
  misc_feature (19)..(339): NCBI GI: 121711239 Blast Desc: conserved [Aspergillus clavatus NRRL 1] gi|119401386|gb|EAW11809.1| conserved [Aspergillus clavatus NRRL 1]
MDTIVRKQINLQCTASGTYTASWHVDWTVGAVLHGGCVAAVIHHVAETHLASDPTLKNKNQPDVANLHFEFLRPCTRGDSVITVTTLRTGAAASTLHLELYQDGQKKVLALATAMNFEKVLGPSAPVPVIRAAHPPCPLPAPDFEKVLASEPDPHWISLLIWWWSPLSTFLSLLITGEIIPFSKYILSLYPRDGHQHDGIVDSWRCLLGGDRLDSTYLAMMTDMIPSMSDTLLRNGGLYDAHKLHRTVKEQADKYPGIHAEVKNTAAEAMMSATFNNTQTLDIEFTKKLPAKGLRFVFTRTAANMLVDGRLSVDITICDENMELIATSHQLILVLETGRKFRTISTAEKSAL

SEQ ID NO: 28903 - DNA, 562 bp, Muscodor strobelii
  misc_feature: SGI EST ID NO. CUFF.68281.0
  misc_feature: Variant of the nucleotide sequence at SEQ ID NO 28901
gaaataacaacaggaacttcctgtgattgctttcgttatggacacaatagttaggaaacaaatcaatctccaatgtactgcctctggcacatacacggcgtcatggcatgtcgattggactgtgggagctgtgcttcatggtggctgcgtcgctgctgtcatccatcacgtcgcggaaacgcaccttgcttcggacccgaccttgaagaacaagaaccagcccgatgttgccaacctgcatttcgagttcctgcgaccctgtactcgcggagatagtgttatcactgttacaaccctgaggactggcgcagcggccagcacacttcacctcgagctctaccaagacggacaaaagaaagtccttgcactcgcaacggcaatgaattttgaaaaagtactgggaccctccgctcccgtacctgtcatccgagcagcccatcccccttgtcccttgccggcgcctgatttcgagaaggtgctagccagcgagccggacccgcattggattagcctcctcatatggtggtggtcgcctctatctacgtacgtagatacaccgtca

SEQ ID NO: 28904 - DNA, 3963 bp, Muscodor strobelii
  misc_feature: SGI cDNA ID NO. 569922
  misc_feature: Encodes the peptide sequence at SEQ ID NO 28905
atgtcgtcggcgatcagcaacccgaacccgcagacgatcgggcagctgctgggcaagctgggcgacgcggacccggacttccggttcatgtcgctcaacgacctgcaccagatcctcagcaagcccaaggccgacttcctgcagcacgactacaacacgtcctcgcgcatcgtcgacgccgtcgtcaagaccctcgacgaccagaacggcgaggtccagaatctggccgtccgctgcatcggccccatcgtcgccaagatccccatcgccgtcctcacaccgctgctcgagaagctgaccgtgctcgagctcaagaacaccgtcgacaactccctgcccgccctcgccctgcgcaacgccatcgccgccctgcagcgccccgtccccggccaagccccctcccgcgacgtcatcgacacctacgccgtcgtcaaccgcgtcctcatcccccgcgtgcttggtgtctctggccaaggcggctcgacgtcccgcggcctcctcgaccaggccgacccttcccccgaggccgtcgacgtgctgatcgaggtcgtccgctgcttcggcccgctcctccagcccctcgaggtcgagaagctgcaggatgtcgtcgtccgcgtcctcgagaagcccaacacgccctcccccaccgccatgaagcagcgcggcatcagccccgtcatgctccgactctacatcaccgtcctgagctctcttgctcgcgccatcccccaccagttcggtgcccacctgtccgagattgcccccaccgtcttcgccgccttgagccaagaggagctccagaaatacaccgacgccgttaacgacggcgaggaccacgacccggagttcaacgaggttcgcgaggtggccttggcagctctcgacgccttcatctcctcctgcggtgcccagatgcgccccttcaccgacgagatcatctcttcctgtctgcgctatctgcggttcgatcccaactatgccaacgacgaggacatggacgaggacgaggaagcagaggatgatgaagacgacatggacgaagacgatgagtacgaggaggacaacgactttgacgacgacgacgactcgagttggaaagtccgacgctgtgccgccaaagccctctacactctcatctccacccgcagtatcgatctgctcaacaactgcaccctctaccgagatgtcgccatccctctgatccggagattcgacgaaagagaggagaccgttcgcctcgaagtcatctccaccttgacccttctcattcgcaagactggtgaaggcaccatccacaccgtcgccatggatgatgaagttctgtcctcgcttcccggtagcaggaaacggcgcagacaaagcagtggaggcttccctttcgcgaataaggcaccttacatgggcactcccggcgtcacctctcccacgcaagagtctgtaccccagaccggaccgcgagccgacctctccaagctgacgccacagctggtcaagtcgtcgacaaagctactgcgaggcaagcagatcgcgaccaagcaggccatcatcaatctgctcgacgacctcatctcggtgcagaacggaggcctgtcggaatatttcgaccaggttatgcagcccatcattgatatctccaagggcgtgactgcggctgccggctccaagtctaccgccctgtcaggtggagctgcatctgcgactcccacgaccttacgcatggccgtgttgcgctggactagcgacatcgccaagacgcactcatcaagtctgtttcagccctacctggccatgattgtcaccggagtcgtcgccgccatcaacgacaaattctacaaaatttcgggtgaagccatcaagacggccgaagagctggtcaaggccatcactccgccccgcgctaagctcaccactcagaagtataaatccgaattactcaagctttatgacactattattgatcgcgcttctgcgaccgacgtcgacactgaagtgcgacaaagggccattcaagctctcggcacgcttattgcgaggacgtcaacacaggaaggtcagggcctcctatcaacggagaagcggcagcaggctctcgagcttttgctcgatcgtctccgcaacgagaccacaaggttacaggcagtgcgcgcagtcaacagcattgctctgttttcatctgttcctggcagtctcgaggctgcatggactcaagctgtcacgcttgagctgtgcggccaactgaggaaagctaatcgctccctccgtggctccagcatccaggcgttacagcatatcattacttgccctgctaccaaaggtctgctctctgccgatactatcagtggcatcgtcgacgctatcattcccgtcattgagaaccacgatacccacctgttgagccccgcgttactcgtcatggcccagcttcaactcgagaaccctaccgtcacctcttcccccactttcatcactgcgctttgcaatcttcttaagaagaacatttcgggcgttgcattggaatccctagtcactctggtgatcaacattggccagacaggaacgggcgcccaactaatgggcggtgtactacaggttggcattgcgggcgacccggctgtggttggcaaggtagctggcgcactctttgtcgccagtggaggcaatgctggtgttactattgacagcttcatcagcgaacttcaagccgcaagccagaaggacccgcctgacagcgatcgacagagtctcgccttggccatcttgggtgagattggtctaagactgggccacaactcgtcgctgacccccaagatcttcttgagcctattcaaggacgagcccgataaggtctcagtggctgccgctgtcgctttgggaagagctgctgcaggcgatgtttccaattatcttcccatcattctccacgccaccaaagccaagggtggtcatcaatatctcttcctacaatccatccgagagattctgcaccaggccgttgctacttcagctgatatcggcgctcatgaacgagagatttgggaacttctttttgcttcctccttggtcgaagacaacaaggccatttgctccgaatgcattggccggttggctattctcaaacccaagagatatatacccaaactgcaggaactgctcacgagctcatccgagggttacagaggtgttgcggtccaggcactgcgatacaccctgccggatagtgacgaagcttttgatgcagaactcaagttggtgctgttcgacatgatagtcaccattctcaacgacgagaaattggacattcgacgtctgggcatgaccactctgaactctgcgacgcacaataagccggagttgatattaccacacctcggcgagctagtgccatttgtcatggcagagtcggtcatcaaccaagagctcatccgagaagtacaaatgggtccgttcaaacataccattgacgacggactcgaagctcgcaagagcgcatacgagacgttatatgcactgatggagaccgcgttctcgcgcatcagctcaccagagttctatgaccgtatcattgcaggtctcgacgatgacaacgatattagaggactatgcaatctcatgcttagcaagctgattgtcgtagatcccgaagagacaactcgccgtctagacgctattgcgcagtgctatcgaaagacgctctctaccaagctgaaagataatgccgtcaagcaggaacacgagaagcaggaggaagccaataagagcgtgttgcgcgtttctttgcggctggcagagaagaccaagaccacggtcatgtcgtctgggaactcggccggagcatcgggacaacagatccagtctctacaggcgtcgcagaacccagtatggcagcagtactgggagtggatcaacaaggacttcagtaatcagctcaagagcctaagagacgaggccaaggaaatatcatag

SEQ ID NO: 28905 - protein, 1320 aa, Muscodor strobelii
  misc_feature: SGI Peptide ID NO. 569922
  misc_feature (1117)..(1304): Pfam Id: PF08623 Pfam Desc: TATA-binding protein interacting (TIP20)
  misc_feature (1)..(1317): NCBI GI: 116199075 Blast Desc: CHGG_07693 [Chaetomium globosum CBS 148.51] gi|88178972|gb|EAQ86440.1| CHGG_07693 [Chaetomium globosum CBS 148.51]
  misc_feature (1)..(1320): NCBI GI: 171692933 Blast Desc: protein product [Podospora anserina] gi|170946415|emb|CAP73216.1| protein product [Podospora anserina]
  misc_feature (1)..(1319): NCBI GI: 46123013 Blast Desc: FG05884.1 [Gibberella zeae PH-1]
  misc_feature (7)..(1315): NCBI GI: 145602492 Blast Desc: MGG_04863 [Magnaporthe grisea 70-15] gi|145010911|gb|EDJ95567.1| MGG_04863 [Magnaporthe grisea 70-15]
  misc_feature (1)..(1319): NCBI GI: 256731529 Blast Desc: [Nectria haematococca mpVI 77-13-4]
  misc_feature (6)..(1315): NCBI GI: 164423251 Blast Desc: NCU08875 [Neurospora crassa OR74A] gi|38566784|emb|CAE76095.1| related to TBP (TATA-binding protein)-interacting protein TIP120 [Neurospora crassa] conserved
  misc_feature (2)..(1318): NCBI GI: 156064089 Blast Desc: SS1G_00052 [Sclerotinia sclerotiorum 1980] gi|154690914|gb|EDN90652.1| SS1G_00052 [Sclerotinia sclerotiorum 1980]
  misc_feature (2)..(1318): NCBI GI: 154298918 Blast Desc: BC1G_11706 [Botryotinia fuckeliana B05.10] gi|150857611|gb|EDN32803.1| BC1G_11706 [Botryotinia fuckeliana B05.10]
  misc_feature (7)..(1317): NCBI GI: 261357991 Blast Desc: cullin-associated NEDD8-dissociated protein [Verticillium albo-atrum VaMs.102]
  misc_feature (2)..(1318): NCBI GI: 169614267 Blast Desc: SNOG_10271 [Phaeosphaeria nodorum SN15] gi|111061486|gb|EAT82606.1| SNOG_10271 [Phaeosphaeria nodorum SN15]
MSSAISNPNPQTIGQLLGKLGDADPDFRFMSLNDLHQILSKPKADFLQHDYNTSSRIVDAVVKTLDDQNGEVQNLAVRCIGPIVAKIPIAVLTPLLEKLTVLELKNTVDNSLPALALRNAIAALQRPVPGQAPSRDVIDTYAVVNRVLIPRVLGVSGQGGSTSRGLLDQADPSPEAVDVLIEVVRCFGPLLQPLEVEKLQDVVVRVLEKPNTPSPTAMKQRGISPVMLRLYITVLSSLARAIPHQFGAHLSEIAPTVFAALSQEELQKYTDAVNDGEDHDPEFNEVREVALAALDAFISSCGAQMRPFTDEIISSCLRYLRFDPNYANDEDMDEDEEAEDDEDDMDEDDEYEEDNDFDDDDDSSWKVRRCAAKALYTLISTRSIDLLNNCTLYRDVAIPLIRRFDEREETVRLEVISTLTLLIRKTGEGTIHTVAMDDEVLSSLPGSRKRRRQSSGGFPFANKAPYMGTPGVTSPTQESVPQTGPRADLSKLTPQLVKSSTKLLRGKQIATKQAIINLLDDLISVQNGGLSEYFDQVMQPIIDISKGVTAAAGSKSTALSGGAASATPTTLRMAVLRWTSDIAKTHSSSLFQPYLAMIVTGVVAAINDKFYKISGEAIKTAEELVKAITPPRAKLTTQKYKSELLKLYDTIIDRASATDVDTEVRQRAIQALGTLIARTSTQEGQGLLSTEKRQQALELLLDRLRNETTRLQAVRAVNSIALFSSVPGSLEAAWTQAVTLELCGQLRKANRSLRGSSIQALQHIITCPATKGLLSADTISGIVDAIIPVIENHDTHLLSPALLVMAQLQLENPTVTSSPTFITALCNLLKKNISGVALESLVTLVINIGQTGTGAQLMGGVLQVGIAGDPAVVGKVAGALFVASGGNAGVTIDSFISELQAASQKDPPDSDRQSLALAILGEIGLRLGHNSSLTPKIFLSLFKDEPDKVSVAAAVALGRAAAGDVSNYLPIILHATKAKGGHQYLFLQSIREILHQAVATSADIGAHEREIWELLFASSLVEDNKAICSECIGRLAILKPKRYIPKLQELLTSSSEGYRGVAVQALRYTLPDSDEAFDAELKLVLFDMIVTILNDEKLDIRRLGMTTLNSATHNKPELILPHLGELVPFVMAESVINQELIREVQMGPFKHTIDDGLEARKSAYETLYALMETAFSRISSPEFYDRIIAGLDDDNDIRGLCNLMLSKLIVVDPEETTRRLDAIAQCYRKTLSTKLKDNAVKQEHEKQEEANKSVLRVSLRLAEKTKTTVMSSGNSAGASGQQIQSLQASQNPVWQQYWEWINKDFSNQLKSLRDEAKEIS

SEQ ID NO: 28906 - DNA, 5038 bp, Muscodor strobelii
  misc_feature: SGI EST ID NO. CUFF.68430.0
  misc_feature: Variant of the nucleotide sequence at SEQ ID NO 28904
cgtcaatggtgggggaagcagagtggaaggtgggaggaggggagggggagcttctggcgctgttgactgcacgactgcccgatttgcccgatttgatctgatttggcgctgcagcggactgcaacctcaacgaccaccaagactgcatcaccaccccaactgccgctgattaggtacttaggccactcttctcgacgctgcgagagagagcatgcttctgcccttcagtcacgtcttttctttagtcaggtcttagtggtcactcttcttcctcttcttactcttcttctcctttcatctcatcctgcactggtccggtctggctgtctgatttccctccctccacccacctcagcgggcctgcacccgacttttctcttctctctacccttctcgtctcccaactccatctcccatctacatcacctgccgttgccgttggaggtgacgagtgacgagtgacgagcacgacgttgatcatgtcgtcggcgatcagcaacccgaacccgcagacgatcgggcagctgctgggcaagctgggcgacgcggacccggacttccggttcatgtcgctcaacgacctgcaccagatcctcagcaagcccaaggccgacttcctgcagcacgactacaacacgtcctcgcgcatcgtcgacgccgtcgtcaagaccctcgacgaccagaacggcgaggtccagaatctggccgtccgctgcatcggccccatcgtcgccaagatccccatcgccgtcctcacaccgctgctcgagaagctgaccgtgctcgagctcaagaacaccgtcgacaactccctgcccgccctcgccctgcgcaacgccatcgccgccctgcagcgccccgtccccggccaagccccctcccgcgacgtcatcgacacctacgccgtcgtcaaccgcgtcctcatcccccgcgtgcttggtgtctctggccaaggcggctcgacgtcccgcggcctcctcgaccaggccgacccttcccccgaggccgtcgacgtgctgatcgaggtcgtccgctgcttcggcccgctcctccagcccctcgaggtcgagaagctgcaggatgtcgtcgtccgcgtcctcgagaagcccaacacgccctcccccgtcaagaagagagcccgtcgtcgcgctcggcgtgctcgccccatgtctgtccgacaccatcctcaacgccctcctgaccaagatccagaccgccatgaagcagcgcggcatcagccccgtcatgctccgactctacatcaccgtcctgagctctcttgctcgcgccatcccccaccagttcggtgcccacctgtccgagattgcccccaccgtcttcgccgccttgagccaagaggagctccagaaatacaccgacgccgttaacgacggcgaggaccacgacccggagttcaacgaggttcgcgaggtggccttggcagctctcgacgccttcatctcctcctgcggtgcccagatgcgccccttcaccgacgagatcatctcttcctgtctgcgctatctgcggttcgatcccaactatgccaacgacgaggacatggacgaggacgaggaagcagaggatgatgaagacgacatggacgaagacgatgagtacgaggaggacaacgactttgacgacgacgacgactcgagttggaaagtccgacgctgtgccgccaaagccctctacactctcatctccacccgcagtatcgatctgctcaacaactgcaccctctaccgagatgtcgccatccctctgatccggagattcgacgaaagagaggagaccgttcgcctcgaagtcatctccaccttgacccttctcattcgcaagactggtgaaggcaccatccacaccgtcgccatggatgatgaagttctgtcctcgcttcccggtagcaggaaacggcgcagacaaagcagtggaggcttccctttcgcgaataaggcaccttacatgggcactcccggcgtcacctctcccacgcaagagtctgtaccccagaccggaccgcgagccgacctctccaagctgacgccacagctggtcaagtcgtcgacaaagctactgcgaggcaagcagatcgcgaccaagcaggccatcatcaatctgctcgacgacctcatctcggtgcagaacggaggcctgtcggaatatttcgaccaggttatgcagcccatcattgatatctccaagggcgtgactgcggctgccggctccaagtctaccgccctgtcaggtggagctgcatctgcgactcccacgaccttacgcatggccgtgttgcgctggactagcgacatcgccaagacgcactcatcaagtctgtttcagccctacctggccatgattgtcaccggagtcgtcgccgccatcaacgacaaattctacaaaatttcgggtgaagccatcaagacggccgaagagctggtcaaggccatcactccgccccgcgctaagctcaccactcagaagtataaatccgaattactcaagctttatgacactattattgatcgcgcttctgcgaccgacgtcgacactgaagtgcgacaaagggccattcaagctctcggcacgcttattgcgaggacgtcaacacaggaaggtcagggcctcctatcaacggagaagcggcagcaggctctcgagcttttgctcgatcgtctccgcaacgagaccacaaggttacaggcagtgcgcgcagtcaacagcattgctctgttttcatctgttcctggcagtctcgaggctgcatggactcaagctgtcacgcttgagctgtgcggccaactgaggaaagctaatcgctccctccgtggctccagcatccaggcgttacagcatatcattacttgccctgctaccaaaggtctgctctctgccgatactatcagtggcatcgtcgacgctatcattcccgtcattgagaaccacgatacccacctgttgagccccgcgttactcgtcatggcccagcttcaactcgagaaccctaccgtcacctcttcccccactttcatcactgcgctttgcaatcttcttaagaagaacatttcgggcgttgcattggaatccctagtcactctggtgatcaacattggccagacaggaacgggcgcccaactaatgggcggtgtactacaggttggcattgcgggcgacccggctgtggttggcaaggtagctggcgcactctttgtcgccagtggaggcaatgctggtgttactattgacagcttcatcagcgaacttcaagccgcaagccagaaggacccgcctgacagcgatcgacagagtctcgccttggccatcttgggtgagattggtctaagactgggccacaactcgtcgctgacccccaagatcttcttgagcctattcaaggacgagcccgataaggtctcagtggctgccgctgtcgctttgggaagagctgctgcaggcgatgtttccaattatcttcccatcattctccacgccaccaaagccaagggtggtcatcaatatctcttcctacaatccatccgagagattctgcaccaggccgttgctacttcagctgatatcggcgctcatgaacgagagatttgggaacttctttttgcttcctccttggtcgaagacaacaaggccatttgctccgaatgcattggccggttggctattctcaaacccaagagatatatacccaaactgcaggaactgctcacgagctcatccgagggttacagaggtgttgcggtccaggcactgcgatacaccctgccggatagtgacgaagcttttgatgcagaactcaagttggtgctgttcgacatgatagtcaccattctcaacgacgagaaattggacattcgacgtctgggcatgaccactctgaactctgcgacgcacaataagccggagttgatattaccacacctcggcgagctagtgccatttgtcatggcagagtcggtcatcaaccaagagctcatccgagaagtacaaatgggtccgttcaaacataccattgacgacggactcgaagctcgcaagagcgcatacgagacgttatatgcactgatggagaccgcgttctcgcgcatcagctcaccagagttctatgaccgtatcattgcaggtctcgacgatgacaacgatattagaggactatgcaatctcatgcttagcaagctgattgtcgtagatcccgaagagacaactcgccgtctagacgctattgcgcagtgctatcgaaagacgctctctaccaagctgaaagataatgccgtcaagcaggaacacgagaagcaggaggaagccaataagagcgtgttgcgcgtttctttgcggctggcagagaagaccaagaccacggtcatgtcgtctgggaactcggccggagcatcgggacaacagatccagtctctacaggcgtcgcagaacccagtatggcagcagtactgggagtggatcaacaaggacttcagtaatcagctcaagagcctaagagacgaggccaaggaaatatcatagtatgatgtgcgggttgcccggttgcactcgtcgggtgtggtgacttcagtcgcgatggatgcgctgatgtatgatgtgggctcagctctgggactaccggcaacgattccgcccagcagagtctcaggcacggattctcgcgcgatgggaagcgaggctgagatgcgtagtggcgatgactcgagaccgaggaagaaggccaagtctagaaaacgtcactaggacgagacagaacagcgaggagtggtagacggacgggcgaaaactggcttctacctactgactactcactaagtgatcgctcagagctacggttttggcgcatctacggctgtgatcacgattagatacttgcttgagcctgagcttgatgctatgaatgatatcatgagttatggtatgaactacatggcttgttgattgacattatgatgattatgggtatgacatgtctcgactaccttacttctattaggcgctagtgtggggaagtaatgctgtgatcttg

SEQ ID NO: 28907 - DNA, 1020 bp, Muscodor strobelii
  misc_feature: SGI cDNA ID NO. 569923
  misc_feature: Encodes the peptide sequence at SEQ ID NO 28908
atggctcttacgttgggcgtgttcactattgttgacatcgtcctcgccattttggtcacgatcccagtcgtcggtcgattgacacataatcgtctccttggtcaagggcaacatctcgatgactattttgctgccgcggccctgttcttctacctcttgatctccattttcagctattttgagctgaaagccgtgactgtgtccgcagcgaatcatgcgcacatctcttacttctaccatgccgcacagtggttggacgcaggtcaatcaatcagcgtaatcacaacatggttttgcaaagctcccctgttactattttacatccgcgtgttcggcgtgaaagatattgtcagaatagtctgttacgctactatggtcatcactgccctagtctacgtcatcactacgacttatgccgccatcgagtgcaatccatatagtccgggcaactttaggcttggtagggacggctaccttgcgagatgcgtgccactgtacgctcgtgtcgccttcataccaacgtgcacgttctcgctgttccaggatgtcgtcaactttgggctgccaatccccctcgtctggcgtttgaacttgagcagaagcaaaaaagtcgggctatgttttgtgtttgcctggggctcgcttgctatcgtcgcgagtacattgtcgttgtatgctcatattcgtaacggattagctacgggcgcgcaggcatattacttggaacagctattaaccctcatcgactgcgccatttctctaattgtcagctgtgttccctcaatgcattcgatatgggttgtccacgttgcaaacaagaatttctacatcaaatttcgctcaatgcttccttttataccgttcttccattccgagtcagggtctccgctgcaacggccaacttcttatattcaggagaggagcaacaggcagcgacaaaagaccacagctcgtacgaaagctaagtctgttcaacgtcgcggaagcacatacatcgaactggatgaagacatcccctaa

SEQ ID NO: 28908 - protein, 339 aa, Muscodor strobelii
  misc_feature: SGI Peptide ID NO. 569923
  misc_feature (87)..(283): NCBI GI: 238840889 Blast Desc: conserved [Microsporum canis CBS 113480]
  misc_feature (69)..(265): NCBI GI: 156041152 Blast Desc: [Sclerotinia sclerotiorum 1980] gi|154695938|gb|EDN95676.1| [Sclerotinia sclerotiorum 1980]
  misc_feature (26)..(281): NCBI GI: 169612652 Blast Desc: SNOG_09450 [Phaeosphaeria nodorum SN15] gi|111061595|gb|EAT82715.1| SNOG_09450 [Phaeosphaeria nodorum SN15]
  misc_feature (97)..(333): NCBI GI: 169785237 Blast Desc: [Aspergillus oryzae RIB40] gi|83775827|dbj|BAE65946.1| protein product [Aspergillus oryzae]
  misc_feature (97)..(333): NCBI GI: 238506213 Blast Desc: conserved [Aspergillus flavus NRRL3357] gi|220689021|gb|EED45372.1| conserved [Aspergillus flavus NRRL3357]
  misc_feature (1)..(260): NCBI GI: 238840245 Blast Desc: integral membrane protein [Microsporum canis CBS 113480]
  misc_feature (17)..(325): NCBI GI: 238845707 Blast Desc: conserved [Microsporum canis CBS 113480]
  misc_feature (26)..(280): NCBI GI: 261354239 Blast Desc: conserved [Verticillium albo-atrum VaMs.102]
  misc_feature (95)..(229): NCBI GI: 242766624 Blast Desc: conserved [Talaromyces stipitatus ATCC 10500] gi|218724404|gb|EED23821.1| conserved [Talaromyces stipitatus ATCC 10500]
  misc_feature (100)..(262): NCBI GI: 46139733 Blast Desc: FG11381.1 [Gibberella zeae PH-1]
MALTLGVFTIVDIVLAILVTIPVVGRLTHNRLLGQGQHLDDYFAAAALFFYLLISIFSYFELKAVTVSAANHAHISYFYHAAQWLDAGQSISVITTWFCKAPLLLFYIRVFGVKDIVRIVCYATMVITALVYVITTTYAAIECNPYSPGNFRLGRDGYLARCVPLYARVAFIPTCTFSLFQDVVNFGLPIPLVWRLNLSRSKKVGLCFVFAWGSLAIVASTLSLYAHIRNGLATGAQAYYLEQLLTLIDCAISLIVSCVPSMHSIWVVHVANKNFYIKFRSMLPFIPFFHSESGSPLQRPTSYIQERSNRQRQKTTARTKAKSVQRRGSTYIELDEDIP

SEQ ID NO: 28909 - DNA, 1800 bp, Muscodor strobelii
  misc_feature: SGI EST ID NO. CUFF.68347.0
  misc_feature: Variant of the nucleotide sequence at SEQ ID NO 28907
ttgccagtccccgttcgctggtcgccattgttgaaaagccaagtcttgaagaccattgcgggacattcaacacttgagttgtgtctccctctcaagatctaatatgcctcacgcagtatactcggatgagtaatgtaaaaagaccacacaacatacctggagtccgtaggatcacgccattcagtccactgatgaaacgcactattcaagacttagcctcgagcaatggctcttacgttgggcgtgttcactattgttgacatcgtcctcgccattttggtcacgatcccagtcgtcggtcgattgacacataatcgtctccttggtcaagggcaacatctcgatgactattttgctgccgcggccctgttcttctacctcttgatctccattttcagctattttgagctgaaagccgtgactgtgtccgcagcgaatcatgcgcacatctcttacttctaccatgccgcacagtggttggacgcaggtcaatcaatcagcgtaatcacaacatggttttgcaaagctcccctgttactattttacatccgcgtgttcggcgtgaaagatattgtcagaatagtctgttacgctactatggtcatcactgccctagtctacgtcatcactacgacttatgccgccatcgagtgcaatccatatagtccgggcaactttaggcttggtagggacggctaccttgcgagatgcgtgccactgtacgctcgtgtcgccttcataccaacgtgcacgttctcgctgttccaggatgtcgtcaactttgggctgccaatccccctcgtctggcgtttgaacttgagcagaagcaaaaaagtcgggctatgttttgtgtttgcctggggctcgctgtaagttctgaacttgaccttgtacttattcgatgctgattcagtctttttttgatacgtactgacaatgatagtgctatcgtcgcgagtacattgtcgttgtatgctcatattcgtaacggattagctacgggcgcgcaggcatattacttggaacagctattaacgtgagtcctgccatcgccgcgaaaacagatgctaaatggatcaagtactgacgtgccccaagcctcatcgactgcgccatttctctaattgtcagctgtgttccctcaatgcattcgatatgggttgtccacgttgcaaacaagaatttctacatcaaatttcgctcaatgcttccttttataccgttcttccattccgagtcagggtctccgctgcaacggccaacttcttatattcaggagaggagcaacaggcagcgacaaaagaccacagctcgtacgaaagctaagtctgttcaacgtcgcggaagcacatacatcgaactggatgaagacatcccctaacctccccgaccgctcaccctgagtagcagggagcgtgttgtagcgctcattatttcatgattgcagagagcaatacaatgaggagcaatgtgatagtctctaatccccgatttgctccaagtccgaaagcgctgaaaaacttgcgcaggatggaaatttcggctctgcttcagtaaaagatattcttgcaatatcgcaagatgataattatggactagaaagttggctgaagctcctcgctaccttatgggttcggcaggtatggtggcgctatggcagcggctttgaacaccttcttgcttttgccgagcgtgaagcaattgcttaactacttgacgtttgcaattaagtcttcttcatcaaccaagtttccctggcaatcatgtctcataaatgccatgcagacaactcccagtgtg

SEQ ID NO: 28910 - DNA, 2958 bp, Muscodor strobelii
  misc_feature: SGI cDNA ID NO. 569924
  misc_feature: Encodes the peptide sequence at SEQ ID NO 28911
atgagtcgatttctaaatacttcttgggcaaaagctattgatacgtcgagagggtcagagcctactgaagtgtctgggagactgacctggggtcttcataccctggtggctcgagatgcggggtctcgtgaagcaatcgacattgttgctatccacggtctcaatgggcattggtacaatacctggaaagacgagttgaccggatctaactggctcgaggaatcacttcctaagcgatttgggctcgtgcgcgtcatgtcgttctcatataacgcatctgtccaatttagtaaatcagtactcggtgttgcagatttcgcaaaccaattgcttgaaggtctcatagagcgacgacgcagtggggaggagcgggaacgcccggtcttattcatatgccatagtctaggcggaattgttttcaagcaggcgtgcaaccaggcatacgaaagtgaccgttaccgatcccttttggattatattgcaggcgtcatatttttcggaacgcctcatcgaggatctgccctggcttcatgggcgcacatcattagccgcattctcaaagctgcctcccttggcgcgaacacaaacacacagctggtaaaggatctcgagatgggctctgcagtgcttgaccaatcagcgatgcttttcaaggaccgaaagtacggtttctccatatgtagcttctatgagaccgataaaacggacttcatgagatctgtagttgtagagcgtcattcagcaattttagaaatcgaaaacgaggtcaccgttgcaatgaacggaaaccatcgctccatatgccgtttcactaagcatgattcaaggttgccaatcgtggtaacccagctcgattcgatgctaaagcgctggaactttcgacgtcaaagtctgccgggagatatgcttttggatgtattgggaaagtcagatcacctgctacatagagatcgcaatccatctccaatcattggcacatgctcttgggttctgggacatccggagttcatccactggtacagaacggaagggccagcattgatgtggctttcagacaacccaggctgcggtaaatccgtgatgatgtccttcctcactgaccacattcgctcgagcattgcatttattgacattaatttgtgctactggttctttaaatcagacaaccaacaacagtggagccctcagcttgctgtacgcggaatgctacgtcagttactcagcgctcatcgtgttgctataccagcagtccaacaagccatgcaaggaaaagactttgacaatctagcagacatttggcgcgcctttatacaggccgtgcgggcgcaacgcccaggaaaaaccagcgatgccagtcatttaccagtaccctgtctaaccacaatctgtctgatcgatggtcttgacgaatgcgagccaacgtcgaagcgcgaatatctttcgctcctcgaaacctattttagggaacctgaggaacttaactcagagtcgcctgattcttgtggaggccaagggtttatgaaggttcttattgctagtcgaccagaaacctggatcaaagtatctatcgaccggatcaaacagacagtagacaatgcagtagaaaatgcagagaaagagttgtatacaaagcgagccattcagtgtggcgtttttcgcctcaaagcggaggacgagtcgggattcatgaaagctgatatttcaattgttgttcaagcggcaatagacgatttagtatctcagggattacccgagtccatactacgcgatattcagaagcagcttattgctcgtgctgatcggacttttatttggatcactctgattatcaatctgcttaaagataaagtcgaggccggagcgtctagacgtgaacttgacgcgatccttaggagccgaagtgttgatgaaatcttcacgcagatgctcacagacaggccagatgtacccaagacaaggaaactattcggaattctgctcgcggtcaaacgtcctctcaaagttgacgaactgtgcatcgctcttgcagtaacgccagaacacaacgcgttgatgaaatcaagcagaccctttagacctgggccgcaaaggctgaaacgcattgagtatgacattgtttatccacacgagaacaatatcagatctctcggggggcactttattcggataattcgcgacgaagtgtattttgtccacgagacggctcgtgagttcctgctagaggccaagagttctgggagtatccgacccttcccgagacaagaccaggacctgaagaattgggatcaaattactgtccaagaatctgacgcctgttcatggaagtggtctttcacgcatgagcagtgtcaagctcttcttcttgatatatgcgtcacatttttgtatctgattgggcagcaagaaagccgtaaaaggcggattcctgacgatatacagaaactgctggcttacgtatcccaggtgtggtttctgcatttcagagaaattagggagcatattgatcccgtcaatttgccctattatcacaacctatgccatcctaagtttcctgcatttcgaaagtggactgaagaatactgggagcagaaccaaaaagcgcaccttaacaaagatcccactgctggtctgattgatgatgacatacaagattattacatcaaccgattcgaacttgatcgatgcgaacgaaagatggctgaagatagccagagtgaggatgaaagtgacgaggcagaagtaatcaatacgtctgggtctgacgacgatgttgatattggagagaaccgctcaagacgagtactccaggagaaccgcctaagatccttccaagaacaagatattattagtggtgcggtttcgaatccaaccgcaaagagcaaccacggattcttgactaaagttgacaaattcggcttcgtttccctcgatcacgactacaagggttgctctcgttga

SEQ ID NO: 28911 - protein, 985 aa, Muscodor strobelii
  misc_feature: SGI Peptide ID NO. 569924
  misc_feature (10)..(976): NCBI GI: 261353938 Blast Desc: ankyrin repeat protein [Verticillium albo-atrum VaMs.102]
  misc_feature (86)..(681): NCBI GI: 116191309 Blast Desc: CHGG_05372 [Chaetomium globosum CBS 148.51] gi|88181285|gb|EAQ88753.1| CHGG_05372 [Chaetomium globosum CBS 148.51]
  misc_feature (46)..(752): NCBI GI: 46136249 Blast Desc: FG09640.1 [Gibberella zeae PH-1]
  misc_feature (272)..(864): NCBI GI: 255956295 Blast Desc: Pc21g19090 [Penicillium chrysogenum Wisconsin 54-1255] gi|211590611|emb|CAP96806.1| Pc21g19090 [Penicillium chrysogenum Wisconsin 54-1255]
  misc_feature (314)..(848): NCBI GI: 154310923 Blast Desc: BC1G_06440 [Botryotinia fuckeliana B05.10] gi|150851239|gb|EDN26432.1| BC1G_06440 [Botryotinia fuckeliana B05.10]
  misc_feature (45)..(741): NCBI GI: 261202748 Blast Desc: HNWD1 [Ajellomyces dermatitidis SLH14081] gi|239590685|gb|EEQ73266.1| HNWD1 [Ajellomyces dermatitidis SLH14081]
  misc_feature (303)..(863): NCBI GI: 115400003 Blast Desc: conserved [Aspergillus terreus NIH2624] gi|114191256|gb|EAU32956.1| conserved [Aspergillus terreus NIH2624]
  misc_feature (303)..(861): NCBI GI: 238500305 Blast Desc: ankyrin repeat-containing protein, [Aspergillus flavus NRRL3357] gi|220693140|gb|EED49486.1| ankyrin repeat-containing protein, [Aspergillus flavus NRRL3357]
  misc_feature (133)..(759): NCBI GI: 116179072 Blast Desc: CHGG_00164 [Chaetomium globosum CBS 148.51] gi|88184461|gb|EAQ91929.1| CHGG_00164 [Chaetomium globosum CBS 148.51]
  misc_feature (316)..(828): NCBI GI: 159123470 Blast Desc: Ankyrin repeat protein [Aspergillus fumigatus A1163]
MSRFLNTSWAKAIDTSRGSEPTEVSGRLTWGLHTLVARDAGSREAIDIVAIHGLNGHWYNTWKDELTGSNWLEESLPKRFGLVRVMSFSYNASVQFSKSVLGVADFANQLLEGLIERRRSGEERERPVLFICHSLGGIVFKQACNQAYESDRYRSLLDYIAGVIFFGTPHRGSALASWAHIISRILKAASLGANTNTQLVKDLEMGSAVLDQSAMLFKDRKYGFSICSFYETDKTDFMRSVVVERHSAILEIENEVTVAMNGNHRSICRFTKHDSRLPIVVTQLDSMLKRWNFRRQSLPGDMLLDVLGKSDHLLHRDRNPSPIIGTCSWVLGHPEFIHWYRTEGPALMWLSDNPGCGKSVMMSFLTDHIRSSIAFIDINLCYWFFKSDNQQQWSPQLAVRGMLRQLLSAHRVAIPAVQQAMQGKDFDNLADIWRAFIQAVRAQRPGKTSDASHLPVPCLTTICLIDGLDECEPTSKREYLSLLETYFREPEELNSESPDSCGGQGFMKVLIASRPETWIKVSIDRIKQTVDNAVENAEKELYTKRAIQCGVFRLKAEDESGFMKADISIVVQAAIDDLVSQGLPESILRDIQKQLIARADRTFIWITLIINLLKDKVEAGASRRELDAILRSRSVDEIFTQMLTDRPDVPKTRKLFGILLAVKRPLKVDELCIALAVTPEHNALMKSSRPFRPGPQRLKRIEYDIVYPHENNIRSLGGHFIRIIRDEVYFVHETAREFLLEAKSSGSIRPFPRQDQDLKNWDQITVQESDACSWKWSFTHEQCQALLLDICVTFLYLIGQQESRKRRIPDDIQKLLAYVSQVWFLHFREIREHIDPVNLPYYHNLCHPKFPAFRKWTEEYWEQNQKAHLNKDPTAGLIDDDIQDYYINRFELDRCERKMAEDSQSEDESDEAEVINTSGSDDDVDIGENRSRRVLQENRLRSFQEQDIISGAVSNPTAKSNHGFLTKVDKFGFVSLDHDYKGCSR

SEQ ID NO: 28912 - DNA, 1321 bp, Muscodor strobelii
  misc_feature: SGI EST ID NO. CUFF.68363.0
  misc_feature: Variant of the nucleotide sequence at SEQ ID NO 28910
tttttgctcatcaatcgatgcatatcagctaatcgtggtagtggagtagactaccattcgcatcatgagtcgatttctaaatacttcttgggcaaaagctattgatacgtcgagagggtcagagcctactgaagtgtctgggagactgacctggggtcttcataccctggtggctcgagatgcggggtctcgtgaagcaatcgacattgttgctatccacggtctcaatgggcattggtacaatacctggaaagacgagttgaccggatctaactggctcgaggaatcacttcctaagcgatttgggctcgtgcgcgtcatgtcgttctcatataacgcatctgtccaatttagtaaatcagtactcggtgttgcagatttcgcaaaccaattgcttgaaggtctcatagagcgacgacgcagtggggaggagcgggaacgcccggtcttattcatatgccatagtctaggcggaattgttttcaagcaggcgtgcaaccaggcatacgaaagtgaccgttaccgatcccttttggattatattgcaggcgtcatatttttcggaacgcctcatcgaggatctgccctggcttcatgggcgcacatcattagccgcattctcaaagctgcctcccttggcgcgaacacaaacacacagctggtaaaggatctcgagatgggctctgcagtgcttgaccaatcagcgatgcttttcaaggaccgaaagtacggtttctccatatgtagcttctatgagaccgataaaacggacttcatgagatctgtagttgtagagcgtcattcagcaattttagaaatcgaaaacgaggtcaccgttgcaatgaacggaaaccatcgctccatatgccgtttcactaagcatgattcaaggttgccaatcgtggtaacccagctcgattcgatgctaaagcgctggaactttcgacgtcaaagtctgccgggagatatgcttttggatgtattgggaaagtcagatcacctgctacatagagatcgcaatccatctccaatcattggcacatgctcttgggttctgggacatccggagttcatccactggtacagaacggaagggccagcattgatgtggctttcagacaacccaggctgcggtaaatccgtgatgatgtccttcctcactgaccacattcgctcgagcattgcatttattgacattaatttgtgctactggttctttaaatcagacaaccaacaacagtggagccctcagcttgctgtacgcggaatgctacgtcagttactcagcgctcatcgtgttgctataccagcagtccaacaa

SEQ ID NO: 28913 - DNA, 888 bp, Muscodor strobelii
  misc_feature: SGI cDNA ID NO. 569925
  misc_feature: Encodes the peptide sequence at SEQ ID NO 28914
atgcctggatggggcaaatctagctgccgcaaggtccttactgattatacccaagaggcactggtagagggtatgctggcccttctggccgcaaatgatcgtacagctgccgtttgggtggcccacgattggggtgcctgtgtagcctcatcactagcggctcaacacccaacagccgtccaggccttggtgctcctctgtatcccgtatagatcggccgagctgggccttgaccatctggtatctctcgtcgaccgtagtgtttatcccaaagaggaatacccattcgggcagtgggactacatggcctactatgaggagagctttgaacgtagcgtagcggattacgaggctaacatccgtggtctattcaaaatcttatatgcacgtccgggatcatataatgctgctgatgctttcaaaccggcattcacgtccaatatccggaagaacaatggattgtttggtgggaatcctgcccctccggccgagacgctcccagccccactgctggacggcgaggtctttgatgccctggtcaagaccaccgaagagaacggtctatggggtgcaactgcatactacatgaatcatcaaacgaatgccgtctataatacgcaggcgccaaatggtggacggctaggagacaaacccgtgctgtacatccataccaggtacgactacattggagccactctgacgtcccgcctcgcggatcccatgcgtgacgcatgtgagaatctgacagaggtcactatcgagacaggccataattcatacttcgaacagcccgaagcagtgaatgctgctatcgcgaggttccttttggtgaaagcgaagggctgttggccagacaatgctgaatggcttggcaaaagtaaactttaa

SEQ ID NO: 28914 - protein, 295 aa, Muscodor strobelii
  misc_feature: SGI Peptide ID NO. 569925
  misc_feature (1)..(273): Pfam Id: PF00561 Pfam Desc: alpha/beta hydrolase fold
  misc_feature (1)..(284): NCBI GI: 238484711 Blast Desc: epoxide hydrolase, [Aspergillus flavus NRRL3357] gi|220701644|gb|EED57982.1| epoxide hydrolase, [Aspergillus flavus NRRL3357]
  misc_feature (1)..(284): NCBI GI: 115374157 Blast Desc: epoxide hydrolase [Stigmatella aurantiaca DW4/3-1] gi|115368824|gb|EAU67772.1| epoxide hydrolase [Stigmatella aurantiaca DW4/3-1]
  misc_feature (1)..(275): NCBI GI: 189202956 Blast Desc: epoxide hydrolase 2 [Pyrenophora tritici-repentis Pt-1C-BFP] gi|187984913|gb|EDU50401.1| epoxide hydrolase 2 [Pyrenophora tritici-repentis Pt-1C-BFP]
  misc_feature (1)..(288): NCBI GI: 227978884 Blast Desc: hydrolase or acyltransferase of alpha/beta superfamily [Tsukamurella paurometabola DSM 20162] gi|227966242|gb|EEK01551.1| hydrolase or acyltransferase of DSM
  misc_feature (3)..(284): NCBI GI: 39976501 Blast Desc: MGG_05826 [Magnaporthe grisea 70-15] gi|145011932|gb|EDJ96588.1| MGG_05826 [Magnaporthe grisea 70-15]
  misc_feature (1)..(275): NCBI GI: 226974019 Blast Desc: epoxide hydrolase [uncultured organism]
  misc_feature (1)..(281): NCBI GI: 169623504 Blast Desc: SNOG_14994 [Phaeosphaeria nodorum SN15] gi|111056417|gb|EAT77537.1| SNOG_14994 [Phaeosphaeria nodorum SN15]
  misc_feature (3)..(257): NCBI GI: 170736402 Blast Desc: alpha/beta hydrolase fold [Burkholderia cenocepacia MC0-3] gi|169818590|gb|ACA93172.1| alpha/beta hydrolase fold [Burkholderia cenocepacia MC0-3]
  misc_feature (3)..(275): NCBI GI: 196012445 Blast Desc: expressed [Trichoplax adhaerens] gi|190581408|gb|EDV21485.1| expressed [Trichoplax adhaerens]
  misc_feature (1)..(275): NCBI GI: 111020592 Blast Desc: epoxide hydrolase [Rhodococcus jostii RHA1] gi|110820122|gb|ABG95406.1| epoxide hydrolase [Rhodococcus jostii RHA1]
  misc_feature (1)..(275): SWISSPROT Homolog: EC 3.3.2.10 Soluble epoxide hydrolase
MPGWGKSSCRKVLTDYTQEALVEGMLALLAANDRTAAVWVAHDWGACVASSLAAQHPTAVQALVLLCIPYRSAELGLDHLVSLVDRSVYPKEEYPFGQWDYMAYYEESFERSVADYEANIRGLFKILYARPGSYNAADAFKPAFTSNIRKNNGLFGGNPAPPAETLPAPLLDGEVFDALVKTTEENGLWGATAYYMNHQTNAVYNTQAPNGGRLGDKPVLYIHTRYDYIGATLTSRLADPMRDACENLTEVTIETGHNSYFEQPEAVNAAIARFLLVKAKGCWPDNAEWLGKSKL

SEQ ID NO: 28915 - DNA, 813 bp, Muscodor strobelii
  misc_feature: SGI EST ID NO. CUFF.68374.0
  misc_feature: Variant of the nucleotide sequence at SEQ ID NO 28913
tgtatcccgtatagatcggccgagctgggccttgaccatctggtatctctcgtcgaccgtagtgtttatcccaaagaggaatacccattcgggcagtgggactacatggcctactatgaggagagctttgaacgtagcgtagcggattacgaggctaacatccgtggtctattcaaaatcttatatgcacgtccgggatcatataatgctgctgatgctttcaaaccggcattcacgtccaatatccggaagaacaatggattgtttggtgggaatcctgcccctccggccgagacgctcccagccccactgctggacggcgaggtctttgatgccctggtcaagaccaccgaagagaacggtctatggggtgcaactgcatactacatgaatcatcaaacgaatgccgtctataatacgcaggcgccaaatggtggacggctaggagacaaacccgtgctgtacatccataccaggtacgactacattggagccactctgacgtcccgcctcgcggatcccatgcgtgacgcatgtgagaatctgacagaggtcactatcgagacaggccataattcatacttcgaacagcccgaagcagtgaatgctgctatcgcgaggttccttttggtgaaagcgaagggctgttggccagacaatgctgaatggcttggcaaaagtaaactttaacgtgtgggggaaaggttagggcttgtatcgcaatccaaatgtgcagtcgcggtctgcaaacccatttggatcattatactatagatcgtcatacatggcatggccgatatcaatgcgcgtaca

SEQ ID NO: 28916 - DNA, 1128 bp, Muscodor strobelii
  misc_feature: SGI cDNA ID NO. 569926
  misc_feature: Encodes the peptide sequence at SEQ ID NO 28917
atggctcctatccgtgttggtctcatcgggctgcccgctggtcttagcgagtactacaagccaggtgaatgggggcagcaacatctcaacgccatcaaaagttctccctatttcgagctcgttgctgtctgcaactcatccgttacctcggccgagaagtcgatcaaatccaatggcctcccttccaccgtcagggcgtatggttcaccggaagacatcgcccgcgacccgaacattgacgttatttctgtcgtcgtcaacatttatcgccattacgaactgaccaagcccgctctcgagcatgggaaggacataattgtcgaatttcccttctcgaccaagctcgagcacactgaggaactaatggcgttggcaaaatctaagggtgtgaaaaacgtcgttgcagcccaggctcgagctgatcctgccatgcgcaagctcaaggagattatcgacagcaaggcgataggcgatatagtctacacctccttctccggtgtcaacgcctggggtacaccgccgcaatggcctgatagcgcaaaaggcttcctcaagatagacgaccctattagtcgtgtcaacatcatactaggccatgcatttgatgccttcgtcagtattgtcgggagctttgcgactattcagtccgtcttcaagaaccaggtaaaaagcactcagaccgtggatagccaaggcaaagtcatcgatcccgacttcaaggtcactgccccggagcagatgcttgtccagggcattttgaagaatggtgccgcggcaaacttttctatcaggaccaccgccacggcagctgagacagcagcctaccgctggatcattaccggtaccgaaggagaagttgtatacacagcggacgctggcactttccagactcctccccctaatcaaaagatacagctcaagaagggcagtgcgacaatcgaagacatcgatttcagcagggaggagggcgactatatagaccaggaagctgtgctgggtgtcaatgtccagaggttgtacgacgcttatgccaagcgtgaagatgaagctttatccacgattgagcagacccttgagactgagaagcaaatgcttctactcaaaaacaatgccatctggaccccgtga

SEQ ID NO: 28917 - protein, 375 aa, Muscodor strobelii
  misc_feature: SGI Peptide ID NO. 569926
  misc_feature (4)..(137): Pfam Id: PF01408 Pfam Desc: Oxidoreductase family, NAD-binding Rossmann fold
  misc_feature (1)..(375): NCBI GI: 242800748 Blast Desc: oxidoreductase, [Talaromyces stipitatus ATCC 10500] gi|218716996|gb|EED16417.1| oxidoreductase, [Talaromyces stipitatus ATCC 10500]
  misc_feature (1)..(375): NCBI GI: 212540764 Blast Desc: oxidoreductase, [Penicillium marneffei ATCC 18224] gi|210067836|gb|EEA21928.1| oxidoreductase, [Penicillium marneffei ATCC 18224]
  misc_feature (1)..(371): NCBI GI: 242802212 Blast Desc: oxidoreductase, [Talaromyces stipitatus ATCC 10500] gi|218717273|gb|EED16694.1| oxidoreductase, [Talaromyces stipitatus ATCC 10500]
  misc_feature (1)..(361): NCBI GI: 212540350 Blast Desc: conserved [Penicillium marneffei ATCC 18224] gi|210067629|gb|EEA21721.1| conserved [Penicillium marneffei ATCC 18224]
  misc_feature (1)..(347): NCBI GI: 238494794 Blast Desc: oxidoreductase, [Aspergillus flavus NRRL3357] gi|220695283|gb|EED51626.1| oxidoreductase, [Aspergillus flavus NRRL3357]
  misc_feature (1)..(347): NCBI GI: 169777615 Blast Desc: [Aspergillus oryzae RIB40] gi|83772010|dbj|BAE62140.1| protein product [Aspergillus oryzae]
  misc_feature (1)..(347): NCBI GI: 121706350 Blast Desc: oxidoreductase [Aspergillus clavatus NRRL 1] gi|119399584|gb|EAW10012.1| oxidoreductase [Aspergillus clavatus NRRL 1]
  misc_feature (1)..(347): NCBI GI: 119489970 Blast Desc: oxidoreductase [Neosartorya fischeri NRRL 181] gi|119411101|gb|EAW21044.1| oxidoreductase [Neosartorya fischeri NRRL 181]
  misc_feature (1)..(359): NCBI GI: 119485256 Blast Desc: NAD-binding Rossmann fold oxidoreductase family protein [Neosartorya fischeri NRRL 181] gi|119410316|gb|EAW20263.1| NAD-binding Rossmann fold family NRRL
  misc_feature (1)..(347): NCBI GI: 154319943 Blast Desc: BC1G_01952 [Botryotinia fuckeliana B05.10] gi|150854691|gb|EDN29883.1| BC1G_01952 [Botryotinia fuckeliana B05.10]
MAPIRVGLIGLPAGLSEYYKPGEWGQQHLNAIKSSPYFELVAVCNSSVTSAEKSIKSNGLPSTVRAYGSPEDIARDPNIDVISVVVNIYRHYELTKPALEHGKDIIVEFPFSTKLEHTEELMALAKSKGVKNVVAAQARADPAMRKLKEIIDSKAIGDIVYTSFSGVNAWGTPPQWPDSAKGFLKIDDPISRVNIILGHAFDAFVSIVGSFATIQSVFKNQVKSTQTVDSQGKVIDPDFKVTAPEQMLVQGILKNGAAANFSIRTTATAAETAAYRWIITGTEGEVVYTADAGTFQTPPPNQKIQLKKGSATIEDIDFSREEGDYIDQEAVLGVNVQRLYDAYAKREDEALSTIEQTLETEKQMLLLKNNAIWTP

SEQ ID NO: 28918 - DNA, 1396 bp, Muscodor strobelii
  misc_feature: SGI EST ID NO. CUFF.68378.0
  misc_feature: Variant of the nucleotide sequence at SEQ ID NO 28916
ctcttgttcaaaccacattcctctagatttaatgcacacagttcttccttgaacactcgtataccactacaatggctcctatccgtgttggtctcatcgggctgcccgctggtcttagcgagtactacaagccaggtgaatgggggcagcaacatctcaacgccatcaaaagttctccctatttcgagctcgttgctgtctgcaactcatccgttacctcggccgagaagtcgatcaaatccaatggcctcccttccaccgtcagggcgtatggttcaccggaagacatcgcccgcgacccgaacattgacgttatttctgtcgtcgtcaacatttatcgccattacgaactgaccaagcccgctctcgagcatgggaaggacataattgtcgaatttcccttctcgaccaagctcgagcacactgaggaactaatggcgttggcaaaatctaagggtgtgaaaaacgtcgttgcagcccaggctcgagctgatcctgccatgcgcaagctcaaggagattatcgacagcaaggcgataggcgatatagtctacacctccttctccggtgtcaacgcctggggtacaccgccgcaatggcctgatagcgcaaaaggcttcctcaagatagacgaccctattagtcgtgtcaacatcatactaggccatggtaagttcactcctcattcaatctgccgccttggtgactgggactgacatgcttctcactatcaacagcatttgatgccttcgtcagtattgtcgggagctttgcgactattcagtccgtcttcaagaaccaggtaaaaagcactcagaccgtggatagccaaggcaaagtcatcgatcccgacttcaaggtcactgccccggagcagatgcttgtccagggcattttgaagaatggtgccgcggcaaacttttctatcaggaccaccgccacggcagctgagacagcagcctaccgctggatcattaccggtaccgaaggagaagttgtatacacagcggacgctggcactttccagactcctccccctaatcaaaagatacagctcaagaagggcagtgcgacaatcgaagacatcgatttcagcagggaggagggcgactatatagaccaggaagctgtgctgggtgtcaatgtccagaggttgtacgacgcttatgccaagcgtgaagatgaagctttatccacgattgagcagacccttgagactgagaagcaaatgcttctactcaaaaacaatgccatctggaccccgtgagtgcaaagagaatcagctcaaatgtattttagttgacttgggctctatttgacgcgctatgtcattcgcaaaaaggtttttagataggtgcaagagctcatacatccctcctcaaaaagccttcattcg

SEQ ID NO: 28919 - DNA, 1233 bp, Muscodor strobelii
  misc_feature: SGI cDNA ID NO. 569927
  misc_feature: Encodes the peptide sequence at SEQ ID NO 28920
atgtcaagttcacttgcgactatgaccgtcggcaacgtcgataatcctggccctcgtgacggtgctgtcggcccattgctagatttcagcgatgacatgccattcggatgggaagaccggaatggaacatcatacacgtcgctagagatgcccaagtctttgggggtcgaggttccacttgtgtttcctgacttggacccattcagtctcctcgaagcagatgtagaagggctggctcgccagaacaccatgaacattgatctcacatcgaactgctcgggcgcctccacctgctcatccaatgatatgcgcatcgtatcacttcaggagaaggcggatacaggaaatctccggcgtcgcgtccttcttcgagaatgtgtgctaacgtctgtagccctcggccagctcacggcctttcctaagatgatgttagagggcgacagtctcccacccttcatgcagccgccttgtcgtgcagatgacgaggtcgcggttgaatgcaggattgctggtcgccataaatgcttgccgaagattctggctatagcgtccagtctcgtggacatattctactcgcggacaccggcgaatgaagattttgtatggaagaccatttataccgaagccgcgagattacgtggacattttcacaacttcgaccgcgacatgcagcttgctgctacgcaagccatcaccatttacatgcttctgcaagccgatgacttgaagtcagtcgagaagaatgacgtcgctacactcttgatgaccggcatggagttcatcttgatcatgtcgaggaactacaaatgggatttgaacatatcgcaattacgaccgcctcgacaggaagttcttgctgttttttgcataattgacttgcttctagagggcatgaaggctccggatggatatcactgcgacagcaatggcaacgcattcagaatgaatgtacttccctgccaacgagacatatgggaggctcgcagtaccagaacttggatagtgcactacgatcgttatcttgccactctggagtcggatcagagattaaatggcggagacttactcgacagccagctatccaatacaacgactggagctacatacaaggccccgacgccagacttgatacggtggtgtgagggccttgacatgctagggacattggtgtggatgcttatccctctgcatcagtaccgtatagaacaaggcagaaggggaaccatctcatga

SEQ ID NO: 28920 - protein, 410 aa, Muscodor strobelii
  misc_feature: SGI Peptide ID NO. 569927
  misc_feature (115)..(404): NCBI GI: 212540766 Blast Desc: conserved [Penicillium marneffei ATCC 18224] gi|210067837|gb|EEA21929.1| conserved [Penicillium marneffei ATCC 18224]
  misc_feature (108)..(404): NCBI GI: 242800744 Blast Desc: TSTA_015050 [Talaromyces stipitatus ATCC 10500] gi|218716995|gb|EED16416.1| TSTA_015050 [Talaromyces stipitatus ATCC 10500]
  misc_feature (131)..(246): NCBI GI: 242802207 Blast Desc: TSTA_017670 [Talaromyces stipitatus ATCC 10500] gi|218717272|gb|EED16693.1| TSTA_017670 [Talaromyces stipitatus ATCC 10500]
  misc_feature (120)..(390): NCBI GI: 212541819 Blast Desc: conserved [Penicillium marneffei ATCC 18224] gi|210065971|gb|EEA20064.1| conserved [Penicillium marneffei ATCC 18224]
  misc_feature (128)..(396): NCBI GI: 242798338 Blast Desc: conserved [Talaromyces stipitatus ATCC 10500] gi|218716494|gb|EED15915.1| conserved [Talaromyces stipitatus ATCC 10500]
  misc_feature (133)..(390): NCBI GI: 156061109 Blast Desc: [Sclerotinia sclerotiorum 1980] gi|154700101|gb|EDN99839.1| [Sclerotinia sclerotiorum 1980]
  misc_feature (118)..(398): NCBI GI: 212527562 Blast Desc: C6 finger domain protein, [Penicillium marneffei ATCC 18224] gi|210073336|gb|EEA27423.1| C6 finger domain protein, [Penicillium marneffei ATCC 18224]
  misc_feature (100)..(333): NCBI GI: 46115252 Blast Desc: FG03468.1 [Gibberella zeae PH-1]
  misc_feature (128)..(378): NCBI GI: 212541550 Blast Desc: conserved [Penicillium marneffei ATCC 18224] gi|210068229|gb|EEA22321.1| conserved [Penicillium marneffei ATCC 18224]
  misc_feature (116)..(390): NCBI GI: 169598824 Blast Desc: SNOG_02218 [Phaeosphaeria nodorum SN15] gi|111069310|gb|EAT90430.1| SNOG_02218 [Phaeosphaeria nodorum SN15]
MSSSLATMTVGNVDNPGPRDGAVGPLLDFSDDMPFGWEDRNGTSYTSLEMPKSLGVEVPLVFPDLDPFSLLEADVEGLARQNTMNIDLTSNCSGASTCSSNDMRIVSLQEKADTGNLRRRVLLRECVLTSVALGQLTAFPKMMLEGDSLPPFMQPPCRADDEVAVECRIAGRHKCLPKILAIASSLVDIFYSRTPANEDFVWKTIYTEAARLRGHFHNFDRDMQLAATQAITIYMLLQADDLKSVEKNDVATLLMTGMEFILIMSRNYKWDLNISQLRPPRQEVLAVFCIIDLLLEGMKAPDGYHCDSNGNAFRMNVLPCQRDIWEARSTRTWIVHYDRYLATLESDQRLNGGDLLDSQLSNTTTGATYKAPTPDLIRWCEGLDMLGTLVWMLIPLHQYRIEQGRRGTIS

SEQ ID NO: 28921 - DNA, 975 bp, Muscodor strobelii
  misc_feature: SGI EST ID NO. CUFF.68392.0
  misc_feature: Variant of the nucleotide sequence at SEQ ID NO 28919
gtcggaccacaaagacatgaatgcagttctaatccaagacagctgtcatgccgctctcgaggaaaaagtcatgcgctcgttgcaggcggtccaaactgcggtgcaacctgggcacgccgtgctcacagtgcgccaagaagcgcgtcagctgtatctacgatggaagagacgtcgatcgagtggtgccgctcccggatcatagatcgtcctcggcatctacaaccctcatgtcaagttcacttgcgactatgaccgtcggcaacgtcgataatcctggccctcgtgacggtgctgtcggcccattgctagatttcagcgatgacatgccattcggatgggaagaccggaatggaacatcatacacgtcgctagagatgcccaagtctttgggggtcgaggttccacttgtgtttcctgacttggacccattcagtctcctcgaagcagatgtagaagggctggctcgccagaacaccatgaacattgatctcacatcgaactgctcgggcgcctccacctgctcatccaatgatatgcgcatcgtatcacttcaggagaaggcggatacaggaaatctccggcgtcgcgtccttcttcgagaatgtgtgctaacgtctgtagccctcggccagctcacggcctttcctaagatgatgttagagggcgacagtctcccacccttcatgcagccgccttgtcgtgcagatgacgaggtcgcggttgaatgcaggattgctggtcgccataaatgcttgccgaagattctggctatagcgtccagtctcgtggacatattctactcgcggacaccggcgaatgaagattttgtatggaagaccatttataccgaagccgcgagattacgtggacattttcacaacttcgaccgcgacatgcagcttgctgctacgcaagccatcaccatttacatgcttctgcaagccgatgacttgaagtcagtcgagaagaatgacg

SEQ ID NO: 28922 - DNA, 705 bp, Muscodor strobelii
  misc_feature: SGI cDNA ID NO. 569928
  misc_feature: Encodes the peptide sequence at SEQ ID NO 28923
atgcctgatttgcactcactgccggaggcatggctaccatcaagcgatatcgttcgaaataatggaccggataaccttgtacttgagagatataagttgagagaaatagctgaaggttggccatgctaccgcgattcttgcgaatgggaaaacttcgcgtcaatctttcatgaagacgcctttgtatacacgacgtggtctggtcgtgtgaagtggagtgacttcattgagggatctaagaagggcatggacgcaggagccttcatcatgcatcgcatacatggtactactacggacatcaattccgaagcgacgcgagctgtaacaaagatgaaagctacaatcacgcaacggttcgtcattgacggtgttgagtgcgatgcggaagccgattgccggttcatatttttcttcaagaagatcgatggacggtggggtgctagcttcgtgcgtcactggtatgagaaggataagttaatcccaacggcgccgggtgcacatatcaatatagattttgagaagctcaagtcatacccagatggctacaagtatttggcttattgccaggaactcactatgggtgtaaaagtgctgatggatctgccaggtcatcgacgctctgctggaacggtcaatggtgatacacatgaccagctataccgccaggcaaaggcatgggtcgagggagaagaagtcataatttga

SEQ ID NO: 28923 - protein, 234 aa, Muscodor strobelii
  misc_feature: SGI Peptide ID NO. 569928
  misc_feature (1)..(234): NCBI GI: 67904574 Blast Desc: AN9274.2 [Aspergillus nidulans FGSC A4] gi|40747185|gb|EAA66341.1| AN9274.2 [Aspergillus nidulans FGSC A4] gi|259488106|tpe|CBF87308.1| TPA: pathogenesis associated A4]
  misc_feature (1)..(234): NCBI GI: 70998845 Blast Desc: pathogenesis associated protein Pep2 [Aspergillus fumigatus Af293] gi|66851781|gb|EAL92106.1| pathogenesis associated protein Pep2, [Aspergillus fumigatus Af293] associated
  misc_feature (1)..(234): NCBI GI: 119490134 Blast Desc: NFIA_062450 [Neosartorya fischeri NRRL 181] gi|119411141|gb|EAW21084.1| conserved [Neosartorya fischeri NRRL 181]
  misc_feature (1)..(234): NCBI GI: 14290416 Blast Desc: AF315805_1 PEP2 [Nectria haematococca] gi|256725148|gb|EEU38514.1| [Nectria haematococca mpVI 77-13-4]
  misc_feature (1)..(234): NCBI GI: 12963203 Blast Desc: AF294788_2 PEP2 [Nectria haematococca mpVI]
  misc_feature (1)..(232): NCBI GI: 169785056 Blast Desc: [Aspergillus oryzae RIB40] gi|83775736|dbj|BAE65856.1| protein product [Aspergillus oryzae]
  misc_feature (1)..(217): NCBI GI: 115401412 Blast Desc: catabolic 3-dehydroquinase [Aspergillus terreus NIH2624] gi|114190235|gb|EAU31935.1| catabolic 3-dehydroquinase [Aspergillus terreus NIH2624]
  misc_feature (1)..(234): NCBI GI: 256722069 Blast Desc: [Nectria haematococca mpVI 77-13-4]
  misc_feature (1)..(214): NCBI GI: 145258762 Blast Desc: An04g08110 [Aspergillus niger] gi|134074782|emb|CAK44777.1| protein product [Aspergillus niger]
  misc_feature (21)..(232): NCBI GI: 145231978 Blast Desc: An02g03200 [Aspergillus niger] gi|134056366|emb|CAK47600.1| protein product [Aspergillus niger]
MPDLHSLPEAWLPSSDIVRNNGPDNLVLERYKLREIAEGWPCYRDSCEWENFASIFHEDAFVYTTWSGRVKWSDFIEGSKKGMDAGAFIMHRIHGTTTDINSEATRAVTKMKATITQRFVIDGVECDAEADCRFIFFFKKIDGRWGASFVRHWYEKDKLIPTAPGAHINIDFEKLKSYPDGYKYLAYCQELTMGVKVLMDLPGHRRSAGTVNGDTHDQLYRQAKAWVEGEEVII

SEQ ID NO: 28924 - DNA, 3122 bp, Muscodor strobelii
  misc_feature: SGI EST ID NO. CUFF.68411.1
  misc_feature: Variant of the nucleotide sequence at SEQ ID NO 28922
ctacaatctagttagtctctagcgatttctcatattatatttcacgtcaactttagtcgagtatcttgcatttcggactcgctcatcttgttcattgtgactgcaaagtactgacacattttgacgtgacttcaatgcctgatttgcactcactgccggaggcatggctaccatcaagcgatatcgttcgaaataatggaccggataaccttgtacttgagagatataagttgagagaaatagctgaaggttggccatgctaccgcgattcttgcgaatgggaaaacttcgcgtcaatctttcatgaagacgcctttgtatacacgacgtggtctggtcgtgtgaagtggagtgacttcattgagggatctaagaagggcatggacgcaggagccttcatcatgcatcgcatacatggtactactacggacatcaattccgaagcgacgcgagctgtaacaaagatgaaagctacaatcacgcaacggttcgtcattgacggtgttgagtgcgatgcggaagccgattgccggttcatatttttcttcaagaagatcgatggacggtggggtgctagcttcgtgcgtcactggtatgagaaggataagttaatcccaacggcgccgggtgcacatatcaatatagattttgagaagctcaagtcatacccagatggctacaagtatttggcttattgccaggaactcactatgggtgtaaaagtgctgatggatctgccaggtcatcgacgctctgctggaacggtcaatggtgatacacatgaccagctataccgccaggcaaaggcatgggtcgagggagaagaagtcataatttgatatatgatagcgtcgcaagagcatactggaatctgcgccgaatgcatcttaaaccaagggcgggggcttgtagatctctcatgaaatgaaaacgtccggacacgcagacacgaagacaacaacgattttccgttatttagtaaaactgccttagacggcttgtgttcgcgtcaattgagttatgcactctttctcgccactttacacaaaaattgtatttgactaagactctattaagtctggggcatgtaggatcgattgactgcactcgtctaggcagtatgaacgactctattctagtccacatcatcaattatatcagtcatgtggtggagtccaatgcaacttcattatctatctatcccgcagtgatggggatagggcagtagtgtactgctattggaagatatatcacctatctccttgctagtaaatggaagtcgtcaaaggctaagtttcttaactaatctctcctatgctctcgtacctctagcggagtggtctgtaggcactcagacatgttgctttgacatcgtcctcgagaacaaatccgtagagacgcaacccttatacgacaatggctcgagcgataggctctatcatcaaataagcaccgtgttctgtcttaaatgtaaaggtgcgtgcattgcgtgaccatgacattcgcgagggttgatcgtctacgtggcttgggtgacctggaacgagaggcgcagccagacgtagtgacatcgaagtctccagtaagctcatctgcaggcaagacacatgtggctaagagtctaacacttgcgccagtgattccgacggattggaagatcgtggctgaataataaatgagatcgttgatgcctgagagattctgtagagacatgaaagcgatgtctagcagaactcgatatcgtgccgacgaggaaaatagttctcgtagctgctttgcacagacagttccccttgttcttgtatacgctcgaattgttcattgatcgaagccacttcccatttgatgtatgggtcatccgcgggaaggattcttagggccgtaagtactttgatcgcttaatcgagttgacctgccctcaatagccaacgacatcgttcagcttgcagattctgcgatatatttccgtaaagtcaagtaagatgatgcaactcctgaacctgtgagtagtcgttacaatgaaaaggctgatatcaatgtatcagatgaaatgagttcacctgctaaggttctaccgccgtaagcaagttcgatattgcctgtagaagccgattgaagaatgataccgatattgaacagcataccaacgctaatcagtgagggctttcgcccgaagcgctcattcaaaacagataatatagtcgctccccaaaaccaccggcttggaacatgatgacaatattggctgtcaggttggctggcgcgtttccacgggcgcaatcgagattagaactcgctttgaaagaccagagcgagatggcaccgccaatgaaagtagagtgtacctgaagctacttgagcccatggcggacaaagcatgtgcatagacactggccgggggggaggggtaacagctgtttgcaccccaattcattcaatgcatttttggccgtggatatcatgccaatggttgtttcgaaagagaaaaatttaaggtaggctgtatcttctaagaggcgtatggcgtcgactgatcgccactccattggtatcagatagaatcggaactgagaggacagttgatggagatgaactcggtgaaggtttcgcaacgaaaggtagtgaatagctacacagccaaattactcacgggcatttcgacatcatgagatggttccccttctgccttgttctatacggtactgatgcagagggataagcatccacaccaatgtccctagcatgtcaaggccctcacacctacacatttggagttagtaatgactcctttcagccaattttttgctcgccgggagtgtctcgggagcttgcatgggtacaatcaccacccaaacaaggaagaacatgactcccaaagggtacttaccaccgtatcaagtctggcgtcggggccttgtatgtagctccagtcgttgtattggatagctggctgtcgagtaagtctccgccatttaatctctgatccgactccagagtggcaagataacgatcgtagtgcactatccaagttctggtactgcgagcctcccatatgtctcgttggcagggaagtacattcattctgaatgcgttgccattgctgtcgcagtgatatccatccg

SEQ ID NO: 28925 - DNA, 1080 bp, Muscodor strobelii
  misc_feature: SGI cDNA ID NO. 569929
  misc_feature: Encodes the peptide sequence at SEQ ID NO 28926
atgaaggactttctatacacgccaaatcccagccgcgtcatctttggcagcggcacgatcaagtcattgccagatgagctgaagcgactcaacttctcgaaaccgcttgttctctgcaccccacagcaagtatcccaagcaaaggagatagaagatgtcttgagtagtcatgtccaagtagccggtatatataccaatgcaaccatgcatacgcccgtggaagtaacggacgatgcattaacgttcacgaaatctaagggcgcagactgtgtcgtgtctgttggcggaggcagcacaataggcctaggcaaggccattagcatacgaacgggcctatatcacatcgctatttctaccacatatgcgggcagtgaaatgactccaatactaggcgagacagccgacggccgcaagtctacgaggtcagacccgaagattcatcctggcacggtagtttacgatatcgaccttactatgacactaccagcgtggctatcgggagtgagcggcgtgaacgcgatcgcgcacgccgtcgaggctctatatgcgcgcaacagtaaccctatcattgacctcatggctctcgacggcatccgcgctctggccaagtccttgcctgagatcgttgcagacccaggttcaaaagaggcgcgatctgatgcgctctatggcgcatggttatgtgggacgtgtctagggagtacgggaatgtctctgcatcacaagctgtgtcacgtcgttggcggtagcttcaatctgccacatgcacaaacacatacgatcattctccctcacgcccttgcgtataacgcccccaaaatttcagaggttatgaaaaagctttcgactgtcttacctgagagtaatggtaacgcgctgacgggtttgaacgtcttacttgacaaattgaaggtacagaagggattgaaagaacttggtatgaaagagtcggacatagacattgccgcagatcaggcagttcaaaattcgtattggaatccgcgagagattgagcgggggccgattagagagttaataaggcgggcatgggctggagagccagctagatcagatttctaa

SEQ ID NO: 28926 - protein, 359 aa, Muscodor strobelii
  misc_feature: SGI Peptide ID NO. 569929
  misc_feature (10)..(342): Pfam Id: PF00465 Pfam Desc: Iron-containing alcohol dehydrogenase
  misc_feature (84)..(326): Pfam Id: PF00465 Pfam Desc: Iron-containing alcohol dehydrogenase
  misc_feature (1)..(359): NCBI GI: 121710016 Blast Desc: maleylacetate reductase, [Aspergillus clavatus NRRL 1] gi|119400774|gb|EAW11198.1| maleylacetate reductase, [Aspergillus clavatus NRRL 1]
  misc_feature (1)..(359): NCBI GI: 115390791 Blast Desc: maleylacetate reductase [Aspergillus terreus NIH2624] gi|114193824|gb|EAU35524.1| maleylacetate reductase [Aspergillus terreus NIH2624]
  misc_feature (1)..(359): NCBI GI: 242801514 Blast Desc: maleylacetate reductase, [Talaromyces stipitatus ATCC 10500] gi|218717128|gb|EED16549.1| maleylacetate reductase, [Talaromyces stipitatus ATCC 10500]
  misc_feature (1)..(359): NCBI GI: 67538016 Blast Desc: AN5178.2 [Aspergillus nidulans FGSC A4] gi|40743169|gb|EAA62359.1| AN5178.2 [Aspergillus nidulans FGSC A4] gi|259484634|tpe|CBF81024.1| TPA: maleylacetate reductase,
  misc_feature (1)..(359): NCBI GI: 212540544 Blast Desc: maleylacetate reductase, [Penicillium marneffei ATCC 18224] gi|210067726|gb|EEA21818.1| maleylacetate reductase, [Penicillium marneffei ATCC 18224]
  misc_feature (1)..(359): NCBI GI: 70991507 Blast Desc: maleylacetate reductase [Aspergillus fumigatus Af293] gi|66848235|gb|EAL88564.1| maleylacetate reductase, [Aspergillus fumigatus Af293] gi|159124158|gb|EDP49276.1| maleylacetate A1163]
  misc_feature (1)..(359): NCBI GI: 169763958 Blast Desc: [Aspergillus oryzae RIB40] gi|238489935|ref|XP_002376205.1| maleylacetate reductase, [Aspergillus flavus NRRL3357] gi|83770907|dbj|BAE61040.1| protein
  misc_feature (1)..(359): NCBI GI: 119468038 Blast Desc: maleylacetate reductase, [Neosartorya fischeri NRRL 181] gi|119405977|gb|EAW15928.1| maleylacetate reductase, [Neosartorya fischeri NRRL 181]
  misc_feature (1)..(359): NCBI GI: 145238728 Blast Desc: An07g09360 [Aspergillus niger] gi|134076506|emb|CAK39702.1| protein product [Aspergillus niger]
  misc_feature (1)..(359): NCBI GI: 255943225 Blast Desc: Pc18g05540 [Penicillium chrysogenum Wisconsin 54-1255] gi|211587114|emb|CAP94778.1| Pc18g05540 [Penicillium chrysogenum Wisconsin 54-1255]
  misc_feature (1)..(352): SWISSPROT Homolog: EC 1.3.1.32 Maleylacetate reductase
MKDFLYTPNPSRVIFGSGTIKSLPDELKRLNFSKPLVLCTPQQVSQAKEIEDVLSSHVQVAGIYTNATMHTPVEVTDDALTFTKSKGADCVVSVGGGSTIGLGKAISIRTGLYHIAISTTYAGSEMTPILGETADGRKSTRSDPKIHPGTVVYDIDLTMTLPAWLSGVSGVNAIAHAVEALYARNSNPIIDLMALDGIRALAKSLPEIVADPGSKEARSDALYGAWLCGTCLGSTGMSLHHKLCHVVGGSFNLPHAQTHTIILPHALAYNAPKISEVMKKLSTVLPESNGNALTGLNVLLDKLKVQKGLKELGMKESDIDIAADQAVQNSYWNPREIERGPIRELIRRAWAGEPARSDF

SEQ ID NO: 28927 - DNA, 2618 bp, Muscodor strobelii
  misc_feature: SGI EST ID NO. CUFF.68384.0
  misc_feature: Variant of the nucleotide sequence at SEQ ID NO 28925
gttcaattcaaagtcacaactgccttctgctcaaaagttgctcaagatttccagcctcccatggcgcattcttcggcaaagctgtattttagggttccgtttgtgcttgcaactgcatgcggctcattaggcctctgctatgtgatctttgaccgtctctcgattattcgcgacgcgcaaagcaaagactgcgccatatctgggcatgctaactctagctgcatggccatattaaaccctcgccgctttactaccgcccaacaagacagctacagtctacgagtgccagcacgcgaattgaagcattttgggagcaatgaagaagttctcgcacgtttcgtgcacgggtgcttcgcaggatgggtatttacgccggagcgtttgttcttacagcttgggcatcgagtcggatggcctgtctcagtcacgaagatttcagcgccgaaagagggcaacttacatctgcagccgttgccaccgacgcggacagtctggagcttacccaaggcaaatggctcgagtctgcctccactaggcaccatgctatttggtctcttcatgctccttgacagcaatgcagctgatctgagccaggattctagagaactcgaagctgtctcgaaacccgcgggagaaggctcggcttttgccgagttcgtggcaggatcaaatctgtctacatttgcggtctcgcaaagattcgagatcacgagagagacacgcgtgaacgacgagacagaggaaatggtaacaatcacagcttcacacattctttgcaatcccctcaccggaaaggagatcttccccagatgggccaggtacttccattgttggtatgccaagatgctcttcgcggacggtatcaaagcagtcgggatacgaggaacttcttcaattgtggaatcagagtgatgttggtcacggttggagatttaccgatggactggcccggtcaacgcacgtcggacgctgccgcggtcatgagaaccctagtaatatttctacactcggggtcatgcggggtggaacagatccaagggggtccgggttcttcatctggtgtcgtaggccgttttcaagattgtcggattttatctttgccgggattggagccgttgctcgacatccccgccattgcttgattcatgatccacggatttgactattgccgatgcgcggcgtgacgagctgaggagctccattgcaatggtatccatttagcctatttgcgaggcattggcagtaactaaagtatacgcgaaatctcaatcgcttgcgactgaaggaagtctgattcaaagacgaaagatctgtcttcacgctcagatacgcaagatgaaggactttctatacacgccaaatcccagccgcgtcatctttggcagcggcacgatcaagtcattgccagatgagctgaagcgactcaacttctcgaaaccgcttgttctctgcaccccacagcaagtatcccaagcaaaggagatagaagatgtcttgagtagtcatgtccaagtagccggtatatataccaatgcaaccatgcatacgcccgtggaagtaacggacgatgcattaacgttcacgaaatctaagggcgcagactgtgtcgtgtctgttggcggaggcagcacaataggcctaggcaaggccattagcatacgaacgggcctatatcacatcgctatttctaccacatatgcgggcagtgaaatgactccaatactaggcgagacagccgacggccgcaagtctacgaggtcagacccgaagattcatcctggcacggtagtttacgatatcgaccttactatgacactaccagcgtggctatcgggagtgagcggcgtgaacgcgatcgcgcacgccgtcgaggctctatatgcgcgcaacagtaaccctatcattgacctcatggctctcgacggcatccgcgctctggccaagtccttgcctgagatcgttgcagacccaggttcaaaagaggcgcgatctgatgcgctctatggcgcatggttatgtgggacgtgtctagggagtacgggaatgtctctgcatcacaagctgtgtcacgtcgttggcggtagcttcaatctgccacatgcacaaacacatacgatcattctccctcacgcccttgcgtataacgcccccaaaatttcagaggttatgaaaaagctttcgactgtcttacctgagagtaatggtaacgcgctgacgggtttgaacgtcttacttgacaaattgaaggtacagaagggattgaaagaacttggtatgaaagagtcggacatagacattgccgcagatcaggcagttcaaaattcgtattggaatccgcgagagattgagcgggggccgattagagagttaataaggcgggcatgggctggagagccagctagatcagatttctaacgagcccgggagatctttgagcatcgaaacacaattgactgatctgtccaagaattagctacaaattcgctttttcctcgacgtctgacgagcgcagtaattgcgactgactgttgagcctgtagagtgatttccagcttgtagcgaggaaacgctcgctcccagaccgagtagagtactgtacaatacaacctatattcagg

SEQ ID NO: 28928 - DNA, 690 bp, Muscodor strobelii
  misc_feature: SGI cDNA ID NO. 569930
  misc_feature: Encodes the peptide sequence at SEQ ID NO 28929
atggccatattaaaccctcgccgctttactaccgcccaacaagacagctacagtctacgagtgccagcacgcgaattgaagcattttgggagcaatgaagaagttctcgcacgtttcgtgcacgggtgcttcgcaggatgggtatttacgccggagcgtttgttcttacagcttgggcatcgagtcggatggcctgtctcagtcacgaagatttcagcgccgaaagagggcaacttacatctgcagccgttgccaccgacgcggacagtctggagcttacccaaggcaaatggctcgagtctgcctccactaggcaccatgctatttggtctcttcatgctccttgacagcaatgcagctgatctgagccaggattctagagaactcgaagctgtctcgaaacccgcgggagaaggctcggcttttgccgagttcgtggcaggatcaaatctgtctacatttgcggtctcgcaaagattcgagatcacgagagagacacgcgtgaacgacgagacagaggaaatggtaacaatcacagcttcacacattctttgcaatcccctcaccggaaaggagatcttccccagatgggccaggtacttccattgttggtatgccaagatgctcttcgcggacggtatcaaagcagtcgggatacgaggaacttcttcaattgtggaatcagagtga

SEQ ID NO: 28929 - protein, 229 aa, Muscodor strobelii
  misc_feature: SGI Peptide ID NO. 569930
  misc_feature (1)..(217): NCBI GI: 67903482 Blast Desc: AN8728.2 [Aspergillus nidulans FGSC A4] gi|40741087|gb|EAA60277.1| [Aspergillus nidulans FGSC A4] gi|259483077|tpe|CBF78152.1| TPA: conserved [Aspergillus nidulans
  misc_feature (3)..(220): NCBI GI: 238489725 Blast Desc: conserved [Aspergillus flavus NRRL3357] gi|220698488|gb|EED54828.1| conserved [Aspergillus flavus NRRL3357]
  misc_feature (31)..(217): NCBI GI: 46111623 Blast Desc: FG02693.1 [Gibberella zeae PH-1]
  misc_feature (18)..(215): NCBI GI: 238845776 Blast Desc: conserved [Microsporum canis CBS 113480]
  misc_feature (3)..(220): NCBI GI: 212546549 Blast Desc: conserved [Penicillium marneffei ATCC 18224] gi|210064948|gb|EEA19043.1| conserved [Penicillium marneffei ATCC 18224]
  misc_feature (31)..(217): NCBI GI: 119195359 Blast Desc: [Coccidioides immitis RS]
  misc_feature (18)..(217): NCBI GI: 256726093 Blast Desc: NECHADRAFT_70193 [Nectria haematococca mpVI 77-13-4]
  misc_feature (4)..(220): NCBI GI: 242823013 Blast Desc: TSTA_004030 [Talaromyces stipitatus ATCC 10500] gi|218712926|gb|EED12351.1| TSTA_004030 [Talaromyces stipitatus ATCC 10500]
  misc_feature (31)..(217): NCBI GI: 240104955 Blast Desc: [Coccidioides posadasii C735 delta SOWgp]
  misc_feature (23)..(220): NCBI GI: 261354764 Blast Desc: conserved [Verticillium albo-atrum VaMs.102]
MAILNPRRFTTAQQDSYSLRVPARELKHFGSNEEVLARFVHGCFAGWVFTPERLFLQLGHRVGWPVSVTKISAPKEGNLHLQPLPPTRTVWSLPKANGSSLPPLGTMLFGLFMLLDSNAADLSQDSRELEAVSKPAGEGSAFAEFVAGSNLSTFAVSQRFEITRETRVNDETEEMVTITASHILCNPLTGKEIFPRWARYFHCWYAKMLFADGIKAVGIRGTSSIVESE

SEQ ID NO: 28930 - DNA, 2618 bp, Muscodor strobelii; identical to SEQ ID NO: 28927
  misc_feature: SGI EST ID NO. CUFF.68384.0
  misc_feature: Variant of the nucleotide sequence at SEQ ID NO 28928

SEQ ID NO: 28931 - DNA, 687 bp, Muscodor strobelii
  misc_feature: SGI cDNA ID NO. 569931
  misc_feature: Encodes the peptide sequence at SEQ ID NO 28932
atgtattccaactatttgctcgctctcttacccgtggcaacagccactgttgttccgcgtcaatacttctcattcgggaactacttctctactggcccgactgcgagcggcacttacatcatcgacgcgacgaccacgctcattcttccggctctcaatagtcctcataatggcaacctcggactctggccgggtatgggaatggacgatggcgacctcgttcaaggtcttgccatatccactgtaggcatcggctctccatgcaacctggcttcaggtgatgtcaagtggtgtgttactgccagcacactggaaaacaaccaggaggacggagctgtctacagagccaatcccggcgacagcgttacataccactacaaatacaacccgtcgaccggcaaaacagatcaaaccgtatctgtgaacggtgctgtggtgtcaaccctctcaacctcgagtggcaaaggcggcctgggatgggggacagcaatggagtgccagcaagccaactgtgggacagtcccggaacaccattacaaaaacaccaagattaccatgagtgcagcaaaccccaactacaagaatacactcgggctcaatggcgcctcgggcaacctcgtcaccgccgatggtggtctgacatggaccgtcgacgacattaaaattaaccagtatacctacacttga

SEQ ID NO: 28932 - protein, 228 aa, Muscodor strobelii
  misc_feature: SGI Peptide ID NO. 569931
  misc_feature (25)..(227): NCBI GI: 67904660 Blast Desc: AN9317.2 [Aspergillus nidulans FGSC A4] gi|40747228|gb|EAA66384.1| AN9317.2 [Aspergillus nidulans FGSC A4] gi|259488152|tpe|CBF87391.1| TPA: conserved [Aspergillus FGSC
  misc_feature (25)..(227): NCBI GI: 46115884 Blast Desc: FG03784.1 [Gibberella zeae PH-1]
  misc_feature (4)..(227): NCBI GI: 115384802 Blast Desc: [Aspergillus terreus NIH2624] gi|114196640|gb|EAU38340.1| [Aspergillus terreus NIH2624]
  misc_feature (24)..(227): NCBI GI: 119494313 Blast Desc: NFIA_008320 [Neosartorya fischeri NRRL 181] gi|119412214|gb|EAW22155.1| NFIA_008320 [Neosartorya fischeri NRRL 181]
  misc_feature (25)..(227): NCBI GI: 256723305 Blast Desc: NECHADRAFT_97189 [Nectria haematococca mpVI 77-13-4]
  misc_feature (3)..(227): NCBI GI: 256729252 Blast Desc: NECHADRAFT_84034 [Nectria haematococca mpVI 77-13-4]
  misc_feature (24)..(228): NCBI GI: 145256283 Blast Desc: An10g00970 [Aspergillus niger CBS 513.88] gi|134078660|emb|CAK40533.1| protein product [Aspergillus niger]
  misc_feature (24)..(227): NCBI GI: 70996636 Blast Desc: AFUA_1G17050 [Aspergillus fumigatus Af293] gi|66850708|gb|EAL91035.1| AFUA_1G17050 [Aspergillus fumigatus Af293] gi|159131809|gb|EDP56922.1| AFUB_016440 [Aspergillus
  misc_feature (1)..(228): NCBI GI: 238492125 Blast Desc: conserved [Aspergillus flavus NRRL3357] gi|220695793|gb|EED52135.1| conserved [Aspergillus flavus NRRL3357]
  misc_feature (1)..(228): NCBI GI: 169782510 Blast Desc: [Aspergillus oryzae RIB40] gi|83774461|dbj|BAE64584.1| protein product [Aspergillus oryzae]
MYSNYLLALLPVATATVVPRQYFSFGNYFSTGPTASGTYIIDATTTLILPALNSPHNGNLGLWPGMGMDDGDLVQGLAISTVGIGSPCNLASGDVKWCVTASTLENNQEDGAVYRANPGDSVTYHYKYNPSTGKTDQTVSVNGAVVSTLSTSSGKGGLGWGTAMECQQANCGTVPEHHYKNTKITMSAANPNYKNTLGLNGASGNLVTADGGLTWTVDDIKINQYTYT

SEQ ID NO: 28933 - DNA, 3458 bp, Muscodor strobelii
  misc_feature: SGI EST ID NO. CUFF.68424.1
  misc_feature: Variant of the nucleotide sequence at SEQ ID NO 28931
ctgcgatgttgcgggagatttggtagtttcaaatgaagaaagtgccattgtaaggcgtacagcggaccaacatgaaatttatggcgaagtaaacccctcgaaagcggccgaagcattttccgggagtgccactttttttccgcgtaccacggcttcccagtctagcaggcccggtgtgccttacggaggtattagatccgacatctgttttcagaatgtcacactcaacccgggtggtctccgacgatgctccaatctcaaatacttctcccatactagtgtatatcacgacgttttatgtgttttacgtaaagtcgcaacagcgggaaccttgtcgcacgacctgcccttacctatgcaacgctgtatgctggtatgccagctaacgaaaagactacaacagatgattgatggagcctgataagtagcttcgaatttaacgagtttccgagagacatacacttatttatgacgtagctcgacttaccagtcatccgactcggaaatccacattggccgacaggtggaagaaatcacatcgctaaaaaatgatcgcaatgttattcgcgcgcaaagaacctcatataggaacgtcacttgaatatatagtatataaagacttaatggcaatgagctcgtccgtgtgcttctacagccaagacatctgagactctgacatctcacaaattctgatatcgtcatctttcacgatgtattccaactatttgctcgctctcttacccgtggcaacagccactgttgttccgcgtcaatacttctcattcgggaactacttctctactggcccgactgcgagcggcacttacatcatcgacgcgacgaccacgctcattcttccggctctcaatagtcctcataatggcaacctcggactctggccgggtatgggaatggacgatggcgacctcgttcaaggtcttgccatatccactgtaggcatcggctctccatgcaacctggcttcaggtgatgtcaagtggtgtgttactgccagcacactggaaaacaaccaggaggacggagctgtctacagagccaatcccggcgacagcgttacataccactacaaatacaacccgtcgaccggcaaaacagatcaaaccgtatctgtgaacggtgctgtggtgtcaaccctctcaacctcgagtggcaaaggcggcctgggatgggggacagcaatggagtgccagcaagccaactgtgggacagtcccggaacaccattacaaaaacaccaagattaccatgagtgcagcaaaccccaactacaagaatacactcgggctcaatggcgcctcgggcaacctcgtcaccgccgatggtggtctgacatggaccgtcgacgacattaaaattaaccagtatacctacacttgatgcggaggaaatatatctgttacagactgtatcccatgtagtcacttagcaagactggactgactgcgaagcaaagcttatgtgcaattgaatcccctcgcagcgtatctcaccctttgcacctgtacaatgtgaactcatcagtacgatcatatgcaccctatcttttaatcattcagtcaagtaggcaggggtcataagcgtgcttacccacaactgacatacagtcaagacagctacagtccattgggagtttccggatgcgtatacaatatgataccttacatgactcccgttctgcactcaatacgagagtgctacacacgcagaggtctcatccaaggaggaacttaagcaacacttgtcagcgcagataacgcatcgaatcccaaggagttgcatcaaggaccttacctttccagtatatccaacaccaacatttacaccatcggcatccttggaggcatcaggatccactaagtccgacattgttcggttctaagcatgtcaaggcagtttcgactatctctacgaacttgttgcccatggaccgcagtaagcctttcagagcgagcgtcactagattgtctttgatgtcaattagtacagcaggagacattcccgtgtccggttgaagttgcaaaacggcgcctgggcgtgattttcgccgtcgccgtacacaatgaacgactcccacggtccaatctcaagtgagcatgtacccagtgcgtacataccgtgttgcatgctattatcacttgttgggtccattccttgccgtgtcggatgacggtagaggttgcgctgccacgcatcgtcgccacgcagtgctgtacgccgtactcggcgctcaagtttccgaagacgaccaaaaacgtcgacagtgctgccgcccgtttgttatccgtgcgacgctcgaaggaaaagatcgtctctttaacagcagacctaaacttgttctggatacgaggtgctcacgcagacttcgaggctttgtgtacccttttataccacggagatccagcataatcttgagttgcgatgtgcctatcgcggtattcgtggttcttttcattgctactacaaagcccctaggctacaggagctggatgtcccgggcgcgtcatgttgcagtcatccagcgagatcgcagatgttctagcagcagatctcccgtgccgtgatcgcgtcatcatgacataggatatcgtctaaaatatagaacagcctgtctcggtaggcaaatttcgcgtcgcagaatcgaggtagttgcattgacatttcgcgaaggtcttcggcgggtacctaaggagaggttctatgcgtgggtcttgtttccgtcgcgaagggccggccggatggacttggcgaactgaactgctcgagaggcctttttgaacgaggccctagtgcagtccttcatcaacctccttgtcggcaatgaagtcgttaagataccatgttgggtcgaaatcgtcatcccatctcctaagctcttcgaccaccttgccgagatttgctttgtgaaggtgtacttgacgttggcctgctttaccctcagtaccgatggtacattgtcatcaggccacaaatgagcctccagttcccgggtagctttgactacctagcttgcttgagaatatgcgaaggctttggtcgaggatcgtgcggcgtttgtcgcttgaagtggactcgattttttgtaggaatctgagctgcgtctgtactcgcactcggggggctcgctcgttcagctcatcttcgccgtgtctgtaggaggaccaaggtccaactatcctatcacaatatcttcatgatgccagtttggtcagcaattgacgatgggcataatttgaattgacgggtgcatagtgctttgatgcgattttgtttacacagctcgacaggttcgggatatttgagcatctaccgcgtaccgttgtattgcgacaggggtcgttagcgtccaggtgggctgtgccctggttcttagggtcgccaacgagaggatgctgttgggggtagcgctgtctgtaagcacatgacactgccggaatactt

SEQ ID NO: 28934 - DNA, 1110 bp, Muscodor strobelii
  misc_feature: SGI cDNA ID NO. 569932
  misc_feature: Elevated expression when VOC is produced
  misc_feature: Encodes the peptide sequence at SEQ ID NO 28935
atgggtctaccgtcatcatctattccccagagccgcagggccatcatctgtgaagatgtgggaaaactgaaaattcaaaatgatcgcccgatgcctgtgttggagcccgacacggcaattgtgaaagtccttgctgttggtcttaatccgcatgacatcaaagggctcgattacagcgcagccccaggagcagtgcacggaggcgatttctgcggcacaatcattgcattgggagataaggcaacagccgagggccgctttgcagtaggcgatcgtgtcgcaggacttgtacagggcgagaacaaactagcggtagagaagggtgcatttgcggattatatcgaagcaacacctcacacaatggtgaaggttcccgatagcatgagcgacgaagaggcggcaacactgggggttgggattgcaacttcgacctttggcctatacaaggagcttaagatacctggaggtatgaagcgacttaacgagacggctcatgaagcgggcgagagggaccgagacttcgttcttgtcgcaggtggcagcacggctacggggactagaactctgtcattgctgaaaattgctggattccgcccgatcgcaacaagctcccctgctaactttgacttatgtctccggtacggagctgaaaaggtctttgactatcgtagttcaacatgcgcagcagatatccgcgcgtacacaggcaatgagcttgagtatgctttcgattgtattgcggaagctgaaactacacagctatgctacagtgcaataggccgtgctggcgggcgttatgtcactctggagcctttccgtgactccgtagttaagggccgtaacttgacgatccaaccttcttggtttatggcaacccagattttcggcgaagacattgctatggacggtgtatatgcgcgcaccgctaattctgaagaccgcgcttttggtaccgaagctttccaagtatttcaaaatcttttggaccgaggccttgtcaagtcgcacccagtaaagtcaatgcctggcggctgggaaggcgttatgaagggtgttacaagcatgcgaagtgcgcctccttctggattcaagctagcttacaaagtatga

SEQ ID NO: 28935 - protein, 369 aa, Muscodor strobelii
  misc_feature: SGI Peptide ID NO. 569932
  misc_feature (36)..(124): Pfam Id: PF08240 Pfam Desc: Alcohol dehydrogenase GroES-like domain
  misc_feature (36)..(94): Pfam Id: PF08240 Pfam Desc: Alcohol dehydrogenase GroES-like domain
  misc_feature (171)..(263): Pfam Id: PF00107 Pfam Desc: Zinc-binding dehydrogenase
  misc_feature (3)..(369): NCBI GI: 145239689 Blast Desc: An08g03740 [Aspergillus niger] gi|134077002|emb|CAK45411.1| protein product [Aspergillus niger]
  misc_feature (7)..(369): NCBI GI: 171680482 Blast Desc: protein product [Podospora anserina] gi|170939868|emb|CAP65094.1| protein product [Podospora anserina]
  misc_feature (3)..(369): NCBI GI: 121704373 Blast Desc: conserved [Aspergillus clavatus NRRL 1] gi|119398595|gb|EAW09024.1| conserved [Aspergillus clavatus NRRL 1]
  misc_feature (6)..(369): NCBI GI: 121704222 Blast Desc: zinc-binding dehydrogenase family oxidoreductase, [Aspergillus clavatus NRRL 1] gi|119398519|gb|EAW08949.1| zinc-binding dehydrogenase family oxidoreductase, [Aspergillus 1]
  misc_feature (8)..(369): NCBI GI: 145248361 Blast Desc: An13g02940 [Aspergillus niger] gi|134081180|emb|CAK41690.1| protein product [Aspergillus niger]
  misc_feature (1)..(369): NCBI GI: 121704567 Blast Desc: zinc-binding dehydrogenase family oxidoreductase, [Aspergillus clavatus NRRL 1] gi|119398692|gb|EAW09121.1| zinc-binding dehydrogenase family oxidoreductase, [Aspergillus 1]
  misc_feature (8)..(369): NCBI GI: 119183378 Blast Desc: CIMG_06631 [Coccidioides immitis RS]
  misc_feature (8)..(369): NCBI GI: 240109585 Blast Desc: CPC735_030900 [Coccidioides posadasii C735 delta SOWgp]
  misc_feature (7)..(369): NCBI GI: 145244248 Blast Desc: An11g06440 [Aspergillus niger] gi|134079313|emb|CAK96942.1| protein product [Aspergillus niger]
  misc_feature (5)..(369): NCBI GI: 169595154 Blast Desc: SNOG_00311 [Phaeosphaeria nodorum SN15] gi|160701029|gb|EAT91806.2| SNOG_00311 [Phaeosphaeria nodorum SN15]
  misc_feature (23)..(334): SWISSPROT Homolog: EC 1.6.5.5 NADPH:quinone reductase
  misc_feature: Useful for introducing or modulating the production of volatile compounds
MGLPSSSIPQSRRAIICEDVGKLKIQNDRPMPVLEPDTAIVKVLAVGLNPHDIKGLDYSAAPGAVHGGDFCGTIIALGDKATAEGRFAVGDRVAGLVQGENKLAVEKGAFADYIEATPHTMVKVPDSMSDEEAATLGVGIATSTFGLYKELKIPGGMKRLNETAHEAGERDRDFVLVAGGSTATGTRTLSLLKIAGFRPIATSSPANFDLCLRYGAEKVFDYRSSTCAADIRAYTGNELEYAFDCIAEAETTQLCYSAIGRAGGRYVTLEPFRDSVVKGRNLTIQPSWFMATQIFGEDIAMDGVYARTANSEDRAFGTEAFQVFQNLLDRGLVKSHPVKSMPGGWEGVMKGVTSMRSAPPSGFKLAYKV

SEQ ID NO: 28936 - DNA, 1450 bp, Muscodor strobelii
  misc_feature: SGI EST ID NO. CUFF.68520.1
  misc_feature: Variant of the nucleotide sequence at SEQ ID NO 28934
tgagaactaagccaaccaagttcaccacgttctacatgacaaattaattgggccgtgaagcaccatggcgcagacccattttgtgacgatatttacagctcacagagttagactcatgtcgaaattgctacacactgtaactcagctatctgataaagtctcagaagaagatctttatatgactttagagtcctctccgcaagaattaccaccaatttcggagtgaggtgtcgtctcagattcactagttcactgcacttcactactatcaccgcctcagttaaacacttcgaaacggcgtcgggagctcgataacgactccatgggtctaccgtcatcatctattccccagagccgcagggccatcatctgtgaagatgtgggaaaactgaaaattcaaaatgatcgcccgatgcctgtgttggagcccgacacggcaattgtgaaagtccttgctgttggtcttaatccgcatgacatcaaagggctcgattacagcgcagccccaggagcagtgcacggaggcgatttctgcggcacaatcattgcattgggagataaggcaacagccgagggccgctttgcagtaggcgatcgtgtcgcaggacttgtacagggcgagaacaaactagcggtagagaagggtgcatttgcggattatatcgaagcaacacctcacacaatggtgaaggttcccgatagcatgagcgacgaagaggcggcaacactgggggttgggattgcaacttcgacctttggcctatacaaggagcttaagatacctggaggtatgaagcgacttaacgagacggctcatgaagcgggcgagagggaccgagacttcgttcttgtcgcaggtggcagcacggctacggggactagaactctgtcattgctgaaaattgctggattccgcccgatcgcaacaagctcccctgctaactttgacttatgtctccggtacggagctgaaaaggtctttgactatcgtagttcaacatgcgcagcagatatccgcgcgtacacaggcaatgagcttgagtatgctttcgattgtattgcggaagctgaaactacacagctatgctacagtgcaataggccgtgctggcgggcgttatgtcactctggagcctttccgtgactccgtagttaagggccgtaacttgacgatccaaccttcttggtttatggcaacccagattttcggcgaagacattgctatggacggtgtatatgcgcgcaccgctaattctgaagaccgcgcttttggtaccgaagctttccaagtatttcaaaatcttttggaccgaggccttgtcaagtcgcacccagtaaagtcaatgcctggcggctgggaaggcgttatgaagggtgttacaagcatgcgaagtgcgcctccttctggattcaagctagcttacaaagtatgagaagactatagacttgca

SEQ ID NO: 28937 - DNA, 879 bp, Muscodor strobelii
  misc_feature: SGI cDNA ID NO. 569933
  misc_feature: Elevated expression when VOC is produced
  misc_feature: Encodes the peptide sequence at SEQ ID NO 28938
atggctgccgtttctactcaagttgccccgggtcttccctccggctttggtggctcagtccattcccaatcaaaatctgtaaaacacgatgttgagtgcgatatcatgtactttgccctcgaaggcaccccagcaccttttcatatgggtaagcccggtacggtccttggacccatgaagaagcttcctcatactatccgggatatttctggcgaggaggacaaatatccgcttgatacctacggtttccaatacgtcaagcacgaaagcaaggagaaagatttcgatgaccccgaaagaattaaggcagtttactaccctgaaaccgaacagctcgtcaaagacgtgactggggcttcacgaacatttatcttcaaccacgtagtccgccgtcagcccaaggaggctgcggacggaacagtgccaggacgtggtccaacatacaatgctcacgtcgatcagacttacaaggacgcaccaaatcgagtcaaacggtactttcctgaagaagctgacgagcttatgaagaaacgctatcagatcatcaacgtatggcgccctatcaagactatcttgaaggaccctttcgccgtcgttgacgcacgctctgtgcccgactccgatattgttccggtgacaatggtctatcctggtgacatcatcgatgagaagggtgcctgcaagccaaatccagaccacatttggtactacaagtacgctcagcgtcctgacgagccactgctatttaagaacttcgactcaattgaggacggcaaagcaaggaggaaccctcattctgccttcgtcgatcccgctcatctcgatgactatatgcgggagagtatcgaagtccgagtgttgaccttcttcgatgactaa

SEQ ID NO: 28938 - protein, 292 aa, Muscodor strobelii
  misc_feature: SGI Peptide ID NO. 569933
  misc_feature (44)..(289): NCBI GI: 119489980 Blast Desc: NFIA_062100 [Neosartorya fischeri NRRL 181] gi|119411106|gb|EAW21049.1| conserved [Neosartorya fischeri NRRL 181]
  misc_feature (6)..(289): NCBI GI: 70998803 Blast Desc: conserved [Aspergillus fumigatus Af293] gi|66851760|gb|EAL92085.1| conserved [Aspergillus fumigatus Af293] gi|159127143|gb|EDP52258.1| conserved [Aspergillus A1163]
  misc_feature (1)..(292): NCBI GI: 115390440 Blast Desc: conserved [Aspergillus terreus NIH2624] gi|114195121|gb|EAU36821.1| conserved [Aspergillus terreus NIH2624]
  misc_feature (19)..(292): NCBI GI: 67524207 Blast Desc: AN2561.2 [Aspergillus nidulans FGSC A4] gi|40745510|gb|EAA64666.1| AN2561.2 [Aspergillus nidulans FGSC A4] gi|259487995|tpe|CBF87102.1| TPA: conserved [Aspergillus FGSC
  misc_feature (1)..(292): NCBI GI: 169777605 Blast Desc: [Aspergillus oryzae RIB40] gi|238494784|ref|XP_002378628.1| conserved [Aspergillus flavus NRRL3357] gi|83772005|dbj|BAE62135.1| protein product oryzae]
  misc_feature (25)..(291): NCBI GI: 171676302 Blast Desc: protein product [Podospora anserina] gi|170936217|emb|CAP60876.1| protein product [Podospora anserina]
  misc_feature (29)..(292): NCBI GI: 255935655 Blast Desc: Pc13g04180 [Penicillium chrysogenum Wisconsin 54-1255] gi|211583474|emb|CAP91487.1| Pc13g04180 [Penicillium chrysogenum Wisconsin 54-1255]
  misc_feature (9)..(289): NCBI GI: 119501511 Blast Desc: NFIA_044340 [Neosartorya fischeri NRRL 181] gi|119415678|gb|EAW25615.1| conserved [Neosartorya fischeri NRRL 181]
  misc_feature (29)..(290): NCBI GI: 156043835 Blast Desc: SS1G_10921 [Sclerotinia sclerotiorum 1980] gi|154695308|gb|EDN95046.1| SS1G_10921 [Sclerotinia sclerotiorum 1980]
  misc_feature (42)..(292): NCBI GI: 238491180 Blast Desc: conserved [Aspergillus flavus NRRL3357] gi|220697240|gb|EED53581.1| conserved [Aspergillus flavus NRRL3357]
  misc_feature: Useful for introducing or modulating the production of volatile compounds
MAAVSTQVAPGLPSGFGGSVHSQSKSVKHDVECDIMYFALEGTPAPFHMGKPGTVLGPMKKLPHTIRDISGEEDKYPLDTYGFQYVKHESKEKDFDDPERIKAVYYPETEQLVKDVTGASRTFIFNHVVRRQPKEAADGTVPGRGPTYNAHVDQTYKDAPNRVKRYFPEEADELMKKRYQIINVWRPIKTILKDPFAVVDARSVPDSDIVPVTMVYPGDIIDEKGACKPNPDHIWYYKYAQRPDEPLLFKNFDSIEDGKARRNPHSAFVDPAHLDDYMRESIEVRVLTFFDD

SEQ ID NO: 28939 - DNA, 1092 bp, Muscodor strobelii
  misc_feature: SGI EST ID NO. CUFF.68440.0
  misc_feature: Variant of the nucleotide sequence at SEQ ID NO 28937
caacgatatcgaagtatatgcttttccgagtgtctaaacacaatcatggctgccgtttctactcaagttgccccgggtcttccctccggctttggtggctcagtccattcccaatcaaaatctgtaaaacacgatgttgagtgcgatatcatgtactttgccctcgaaggcaccccagcaccttttcatatgggtaagcccggtacggtccttggacccatgaagaagcttcctcatactatccgggatatttctggcgaggaggacaaatatccgcttgatacctacggtttccaatacgtcaagcacgaaagcaaggagaaagatttcgatgaccccgaaagaattaaggcagtttactaccctgaaaccgaacagctcgtcaaagacgtgactggggcttcacgaacatttatcttcaaccacgtagtccgccgtcagcccaaggaggctgcggacggaacagtgccaggacgtggtccaacatacaatgctcacgtcgatcagacttacaaggacgcaccaaatcgagtcaaacggtactttcctgaagaagctgacgagcttatgaagaaacgctatcagatcatcaacgtatggcgccctatcaagactatcttgaaggaccctttcgccgtcgttgacgcacgctctgtgcccgactccgatattgttccggtgacaatggtctatcctggtgacatcatcgatgagaagggtgcctgcaagccaaatccagaccacatttggtactacaagtacgctcagcgtcctgacgagccactgctatttaagaacttcgactcaattgaggacggcaaagcaaggaggaaccctcattctgccttcgtcgatcccgctcatctcgatgactatatgcgggagagtatcgaagtccgagtgttgaccttcttcgatgactaatcgattcgaagcaagaacacgatgttatggcgcaagatgctctacagaaaattgacttaaatatttttttgctttggcatctcatgtactttgcatcctagatcattaaatacagtcttttcagatgaatgtagaattaggtcgcctcgagccacacgtgcacagtcc

SEQ ID NO: 28940 - DNA, 966 bp, Muscodor strobelii
  misc_feature: SGI cDNA ID NO. 569934
  misc_feature: Elevated expression when VOC is produced
  misc_feature: Encodes the peptide sequence at SEQ ID NO 28941
atggctgataaggctgccaactttccactgatcgatattagcggatatctcaatcccacttcacctgaaaacaaggccaaagtcatagcacaagttcgggatgccttcaagacagttggcttcttccagtgcaccgggcatggcatccctgtgagcctgcaacgttccatgttcaaggcctctgagcgattctatagccagccaaaggaaacgaagatggaaatatccgtattcaagagccgctgccgtcgtgggtatgaagcatctggtgctcatagccgagacggtaaagctatgccggacgctaaggagtcctactacttctgcgaagacgaccctgaggttgagatgggcgggatttacggacctaaccaatggccatctctccccgaggatgagttccgcaagccaattcaggagtactatgagaagacatctgccatggggaagttgctctgggaaatgttaattcaggggcttgatcgccctacaagcacaatggagcgtttctcgaaacggcccttgatcgggatgaacctccttcgttatcccgctccggaagacactgcagagggtcagttcggtcttggtgcgcacaatgactggggcggcatcacagtcttgctccaggaacccgggaaagaggctctcgagatatggcttgaggatgagaaggaatggataagtgtccctgcagtagaggacagatttgttatcaattgtggagatatgcttgccggatggtccggaaatgtatacaaatcggtgcatcatagggttgtcaacaaggccccagtggagaggtactcgaccgtcacagcatggcacggcgacatcttcgccacaaacccgttcgaagaacccgggaagagcaaggaaacggtgggtcatctgtttgtcaagagattccaaaagcaaatgaaacccagtccagcgctcttgagggctattggagtagaggcgtaa

SEQ ID NO: 28941 - protein, 321 aa, Muscodor strobelii
  misc_feature: SGI Peptide ID NO. 569934
  misc_feature (174)..(277): Pfam Id: PF03171 Pfam Desc: 2OG-Fe(II) oxygenase superfamily
  misc_feature (1)..(321): NCBI GI: 189196476 Blast Desc: 2OG-Fe(II) oxygenase [Pyrenophora tritici-repentis Pt-1C-BFP] gi|187980455|gb|EDU47081.1| 2OG-Fe(II) oxygenase [Pyrenophora tritici-repentis Pt-1C-BFP]
  misc_feature (8)..(307): NCBI GI: 171680484 Blast Desc: protein product [Podospora anserina] gi|170939869|emb|CAP65095.1| protein product [Podospora anserina]
  misc_feature (1)..(305): NCBI GI: 145239687 Blast Desc: An08g03730 [Aspergillus niger] gi|134077001|emb|CAK45410.1| protein product [Aspergillus niger]
  misc_feature (1)..(305): NCBI GI: 121704375 Blast Desc: 2OG-Fe(II) oxygenase family oxidoreductase, [Aspergillus clavatus NRRL 1] gi|119398596|gb|EAW09025.1| 2OG-Fe(II) oxygenase family oxidoreductase, [Aspergillus clavatus
  misc_feature (7)..(314): NCBI GI: 240109919 Blast Desc: isopenicillin N synthetase, [Coccidioides posadasii C735 delta SOWgp]
  misc_feature (7)..(279): NCBI GI: 119184616 Blast Desc: CIMG_07085 [Coccidioides immitis RS]
  misc_feature (8)..(315): NCBI GI: 242792659 Blast Desc: 1-aminocyclopropane-1-carboxylate oxidase, [Talaromyces stipitatus ATCC 10500] gi|218718587|gb|EED18007.1| 1-aminocyclopropane-1-carboxylate oxidase, [Talaromyces ATCC
  misc_feature (8)..(278): NCBI GI: 221068437 Blast Desc: 2OG-Fe(II) oxygenase [Comamonas testosteroni KF-1] gi|220713460|gb|EED68828.1| 2OG-Fe(II) oxygenase [Comamonas testosteroni KF-1]
  misc_feature (7)..(271): NCBI GI: 259480641 Blast Desc: TPA: conserved [Aspergillus nidulans FGSC A4]
  misc_feature (7)..(271): NCBI GI: 67901812 Blast Desc: AN7893.2 [Aspergillus nidulans FGSC A4] gi|40740357|gb|EAA59547.1| AN7893.2 [Aspergillus nidulans FGSC A4]
  misc_feature (7)..(277): SWISSPROT Homolog: EC 1.14.17.4 Aminocyclopropanecarboxylate oxidase
  misc_feature: Useful for introducing or modulating the production of volatile compounds
MADKAANFPLIDISGYLNPTSPENKAKVIAQVRDAFKTVGFFQCTGHGIPVSLQRSMFKASERFYSQPKETKMEISVFKSRCRRGYEASGAHSRDGKAMPDAKESYYFCEDDPEVEMGGIYGPNQWPSLPEDEFRKPIQEYYEKTSAMGKLLWEMLIQGLDRPTSTMERFSKRPLIGMNLLRYPAPEDTAEGQFGLGAHNDWGGITVLLQEPGKEALEIWLEDEKEWISVPAVEDRFVINCGDMLAGWSGNVYKSVHHRVVNKAPVERYSTVTAWHGDIFATNPFEEPGKSKETVGHLFVKRFQKQMKPSPALLRAIGVEA

SEQ ID NO: 28942 - DNA, 1350 bp, Muscodor strobelii
  misc_feature: SGI EST ID NO. CUFF.68434.0
  misc_feature: Variant of the nucleotide sequence at SEQ ID NO 28940
gccgaaagtccgtgtttattcaggttttaaaagtcccttatagtcatagtacagcgccgccaatagtgttcaatacgtggccaacctatacactttccttgcaacgaaaatcttgtctaaaacaactagcagtatggctgataaggctgccaactttccactgatcgatattagcggatatctcaatcccacttcacctgaaaacaaggccaaagtcatagcacaagttcgggatgccttcaagacagttggcttcttccagtgcaccgggcatggcatccctgtgagcctgcaacgttccatgttcaaggcctctgagcgattctatagccagccaaaggaaacgaagatggaaatatccgtattcaagagccgctgccgtcgtgggtatgaagcatctggtgctcatagccgagacggtaaagctatgccggacgctaaggagtcctactacttctgcgaagacgaccctgaggttgagatgggcgggatttacggacctaaccaatggccatctctccccgaggatgagttccgcaagccaattcaggagtactatgagaagacatctgccatggggaagttgctctgggaaatgttaattcaggggcttgatcgccctacaagcacaatggagcgtttctcgaaacggcccttgatcgggatgaacctccttcgttatcccgctccggaagacactgcagagggtcagttcggtcttggtgcgcacaatgactggggcggcatcacagtcttgctccaggaacccgggaaagaggctctcgagatatggcttgaggatgagaaggaatggataagtgtccctgcagtagaggacagatttgttatcaattgtggagatatgcttgccggatggtccggaaatgtatacaaatcggtgcatcatagggttgtcaacaaggccccagtggagaggtactcgaccgtcacagcatggcacggcgacatcttcgccacaaacccgttcgaagaacccgggaagagcaaggaaacggtgggtcatctgtttgtcaagagattccaaaagcaaatgaaacccagtccagcgctcttgagggctattggagtagaggcgtaagcgctagagagcagctttcttccgcttcggagcatgggctacagtgcgcgttcgtctcctgttttttctggcaggccgcgttacataaccaatatatccatcttctagtagcttattacgattatggttcgtctgtagaaactcatcccttctacaagcttctatattcacatagatgacaactaagcgacttcgctgaataaagcacatgcaggcctgatactgtagttacgcggaggctatgatccctt

SEQ ID NO: 28943 - DNA, 468 bp, Muscodor strobelii
  misc_feature: SGI cDNA ID NO. 569935
  misc_feature: Elevated expression when VOC is produced
  misc_feature: Encodes the peptide sequence at SEQ ID NO 28944
atggagcgtttctcgaaacggcccttgatcgggatgaacctccttcgttatcccgctccggaagacactgcagagggtcagttcggtcttggtgcgcacaatgactggggcggcatcacagtcttgctccaggaacccgggaaagaggctctcgagatatggcttgaggatgagaaggaatggataagtgtccctgcagtagaggacagatttgttatcaattgtggagatatgcttgccggatggtccggaaatgtatacaaatcggtgcatcatagggttgtcaacaaggccccagtggagaggtactcgaccgtcacagcatggcacggcgacatcttcgccacaaacccgttcgaagaacccgggaagagcaaggaaacggtgggtcatctgtttgtcaagagattccaaaagcaaatgaaacccagtccagcgctcttgagggctattggagtagaggcgtaa

SEQ ID NO: 28944 - protein, 155 aa, Muscodor strobelii
  misc_feature: SGI Peptide ID NO. 569935
  misc_feature (8)..(111): Pfam Id: PF03171 Pfam Desc: 2OG-Fe(II) oxygenase superfamily
  misc_feature (1)..(155): NCBI GI: 189196476 Blast Desc: 2OG-Fe(II) oxygenase [Pyrenophora tritici-repentis Pt-1C-BFP] gi|187980455|gb|EDU47081.1| 2OG-Fe(II) oxygenase [Pyrenophora tritici-repentis Pt-1C-BFP]
  misc_feature (1)..(141): NCBI GI: 171680484 Blast Desc: protein product [Podospora anserina] gi|170939869|emb|CAP65095.1| protein product [Podospora anserina]
  misc_feature (1)..(139): NCBI GI: 145239687 Blast Desc: An08g03730 [Aspergillus niger] gi|134077001|emb|CAK45410.1| protein product [Aspergillus niger]
  misc_feature (1)..(139): NCBI GI: 121704375 Blast Desc: 2OG-Fe(II) oxygenase family oxidoreductase, [Aspergillus clavatus NRRL 1] gi|119398596|gb|EAW09025.1| 2OG-Fe(II) oxygenase family oxidoreductase, [Aspergillus clavatus
  misc_feature (1)..(113): NCBI GI: 119184616 Blast Desc: CIMG_07085 [Coccidioides immitis RS]
  misc_feature (1)..(113): NCBI GI: 240109919 Blast Desc: isopenicillin N synthetase, [Coccidioides posadasii C735 delta SOWgp]
  misc_feature (8)..(149): NCBI GI: 242792659 Blast Desc: 1-aminocyclopropane-1-carboxylate oxidase, [Talaromyces stipitatus ATCC 10500] gi|218718587|gb|EED18007.1| 1-aminocyclopropane-1-carboxylate oxidase, [Talaromyces ATCC
  misc_feature (8)..(113): NCBI GI: 259480641 Blast Desc: TPA: conserved [Aspergillus nidulans FGSC A4]
  misc_feature (8)..(113): NCBI GI: 242821861 Blast Desc: leucoanthocyanidin dioxygenase, [Talaromyces stipitatus ATCC 10500] gi|218712688|gb|EED12113.1| leucoanthocyanidin dioxygenase, [Talaromyces stipitatus ATCC
  misc_feature (8)..(104): NCBI GI: 67901812 Blast Desc: AN7893.2 [Aspergillus nidulans FGSC A4] gi|40740357|gb|EAA59547.1| AN7893.2 [Aspergillus nidulans FGSC A4]
  misc_feature (5)..(128): SWISSPROT Homolog: EC 1.14.17.4 Aminocyclopropanecarboxylate oxidase
  misc_feature: Useful for introducing or modulating the production of volatile compounds
MERFSKRPLIGMNLLRYPAPEDTAEGQFGLGAHNDWGGITVLLQEPGKEALEIWLEDEKEWISVPAVEDRFVINCGDMLAGWSGNVYKSVHHRVVNKAPVERYSTVTAWHGDIFATNPFEEPGKSKETVGHLFVKRFQKQMKPSPALLRAIGVEA

SEQ ID NO: 28945 - DNA, 1350 bp, Muscodor strobelii; identical to SEQ ID NO: 28942
  misc_feature: SGI EST ID NO. CUFF.68434.0
  misc_feature: Variant of the nucleotide sequence at SEQ ID NO 28943

SEQ ID NO: 28946 - DNA, 12021 bp, Muscodor strobelii
  misc_feature: SGI cDNA ID NO. 569936
  misc_feature: Encodes the peptide sequence at SEQ ID NO 28947
atgccccaacaaagcgaaagggctgagcccattgcaattgtaggaagcgcttgtcgtttccctgggtctgcaagctcgccctcaaaactatggacacttctttcaaaccctcatgatcttggttatgagatcccttcatctagatttggaaaaggtttctatcatcccaatggtgcccatcatggaactaccaatgtgcaacatgcgtatttgttggacgaagacattcgcttatttgatgctacctttttcaatattcactctaaggaggcaaactcgatcgatccgcaacagcggcttctgctggaaacagtctacgaagccttggaaagtggcggccacaccatcgagggactaaggggctctgatactgctgtttacactggtacaatgagcgtcgactggatggaccaaagtgtcagagatttagacactattccccagtatctggccacagggtctaatcgtgccattatctctaaccgcgtctcttatgtctttgactggaggggacccagcatgactattgatacagcatgctcctctagtttgatcgccgtgcaccagggtgtgacagccctacgtgccggcgagtctcgtgttgccgttgcttgcggcacgcaggtcattctaaacccagagcagtttattgcggaaagcaagctgcaaatgttgtcgccgacaggacgatcacgcatgtgggacaaggatgccgacggttatgctcgtggtgagggtaccgccgcaatcatcatgaagaaactcagtgatgcaatcgccgatggtgatcacattgagagcgtcattcgcgagaccggtaccaaccaagatggccggacccctggcctcacgatgcctagctcgaaggcgcaatctgcattgatagacattacgtataagcgagctgggctggacccagtcaataatccccgtgatcgacctcaatactttgaagcacatggtacaggcactcaagctggggaccctagagaagctggcgctatttatgaggccttcgggcgtcacatctcttcatccgaaacacctttgtatgtgggctccatcaagaccgttatcggccatcttgaaggcaccgctggtcttgctggccttctcaaagcttccgccagtattcaaaatggatatattgcaccaaacctccttttcaagaatttaaaccccaagctcgaaccgttctacaagaacttgaaggtacccacagaattgacgccatggcctgaagtcctagaaggcgttccccgccgtgccagcgttaacagttttgggtttggcggcagcaatgcacatgcaatcttggagcagtactccggaccctctaacgctggaacctctacccctgcggatgtcacgaatttcacgccatttgtgttctccgctgtatctgagggttctctagttgcgcaattacgagcgtactccgagcatctcaaaaaacacagcgacattagcccctatgatctagcctggacgctgcaagcgcgaaggagtcactttccgattaagattgccttgtccgccctcacgattgaacagctcgtagcgaagatcaatgagaaactggagttgctcgagacaaaacctggcacaactctgggtttccgtacaaactccaagcaatcaactgcttcgcttcgcatactgggcgttttcacaggccagggcgcgcagtgggcatctatgggtgccgatctgattcgctcttctgacttcttcaagcagagaattacagacctcgagaagtctttagctgatttgcctgctgctgatagaccagagtggagtcttacagaagagctccttgctgggaaagacaattcacgcctttctgaggccaccttctcccagcccctttgtacagcaatccaagtcgctctggtggatcttctgcgtaccgctggcatcactttcaccacggttgtaggtcactcatctggtgagattgcggcagcctatgcagcagattttctgtcgggcgaagacgctatccgagttgcctactacaggggactctatacatccctggcagacggtggtagtggccagaagggtgcgatgcttgcggttggaacttcatgggaagatgcccatgatctcatcaacctgcgaaccttcaaagggcgccttgccgtcgccgctcacaattcccccgcaagtgtgacgctgtctggtgatgccgatgcgatagtgcacgcaaagaagattttcgacgaggagaagaagtttgctaggctcctccaagtcgaccaagcctaccactctcatcacatgctaccatgtggtgacacctatgtcggagctttgagggcctgtggtgttcgcgtcaagaagaaccgaaacaaatcctgcgtttggtactccagcgtgagtggcagtgacgtgccagttgctgccgtggaagaactccaagatgagtactggagggacaatatgaccaaatcagtcttgttcgcagaggctgtgaggaacgccctcgcttcagacgatcagctcaacctcggtcttgaagtcggtccacatcctgcactcaagggtccagtggcacagaacgttggtgacgatcgatctactcccttatcttacagtggtgtcttggcacgtggcaagaatgatgtcgaatcgttcgcagatggtcttggttatgtttggacacagctcggagctgctggtgtcgacttccagtcctacgcgaaggcagtggcggcaaagtccaagtcaatccaaccgcggttggtgacaggcttgcccctttaccaatggaatcatgacaaggcatattgggcagagtcgcgtcgatctagaaagatccgtgcccgctcagagccaaaccatgagatcctaggtgctctatcacctgactccaccccgcaagacatgcgttggtcgaacatacttaaagtatcggaaatgccgtggcttacaggacatcaaattcaaggccagatgatatttcctgctgctggatatgtcgctatggcacttgaatcgtctaaaatcctttcggccgagaggagtgtcaagacttatgaagtcttcgatttgtccatccctcgtgccactgtcattgaagacgcagacaatgctagcattgaaacacttgtcacattgacgagtatccaattccatcaagatgatactgcaacagccgacttccgttgctacgcactacctgtcactgtcactggatcgaagcaagaaatgatgaccaacgcctcaggcactgtgaaaatggtatttggagtgccagacgtcgacgcactttcttgtacaccagtggaagactttaatttgcgcgcaattgacagtgacgagttctatgaatacctagtcacgcttggatacggctacactggcccattccgaacattgtcatcgacacagcgtagacttggtcggtctagtggtttgatagacacttacgactatgcggaagctgaaccttcaagatatctcatccatcctagtactctcgatgttgctttccaagcatctattcttgcgtatacctcgccttcagatgagcgtctttgggctctacacgttccaactgtaatcggcacaattagagtcaatgccgcaacatgctcctcgccgcttcctgccggatcccaaatccctgtacattcaattctcgaggacactgaggctttttctggattcatcgaactgcagagcgtagatgggcaacacactatggtccaagttgaagatttggtgatcaagccgctggctccagccgcggaagcggacgaccgtgtcatgttcactcatacgaagtttgcttcagcggtcccagatggggctcttgcctctgatggtcgacgaccctcatcatacgaagttgatttgagcatggtctgcgaaaggctttgttattactatatctcgaggtgggcttccgagcttactgatgaagagtggaagagcgccccatcgtattttttgcatctgcggaattgggttaagcatgtgcgccagaatgttgccaaaggcaagaacccacacatcaaaagagattggtccaaagacacgcatgaatttatcgagaagcttatccagccttataaagaggatggaaacgtcaagattattgtcgctgtgggtgagaacttacccgcctctgtgcgaggcgagaccaccattttggagcatatgatcaaagacgatatgctcgagcggcactacaagaagagtttgggagcagaaattgccaatgagttcttggctgacatgatgaagcaaatcatccatcgttacccacatgctaagatcctcgagataggggccgggacagggggggcgaccaaggcagtcctcgataagatccaaggtgcattctcgtcttacacatacaccgatttgagtgttgggttctttggtcttgctgagaagctgttcgaggcccacgttgacaaaatggaattcaaaacattcgacgtggagaagccaccgaagagtcaaggatacgagcccaactcctacgacatcgtcatcgcttcgaattgtttgcatgcaaccgcatcacttgaaacgacattgtcacacacaagagatctcttgaagcctggtggttatcttttgattctggaactaaccatgcccctcgaagttattcgcacgaacaccatcttcggtgtacttcccggctggtggctgggtgttgatgatagccgcaagctgtcgccaaccatttctcgtggtgcttggcattcacagctgcgcaagacaggcttctcgggtatagatacaatcaacattgatgttagccccattacatggccagcatctgttattgtatcccaggctgtcgatgaccgagtacaatttttgcgaaagcccttatctacaccgtctacttcggttcctatctatattgagagccttgttgtccttggaaatggttcattagagctcgcgcgagtagccgagcaactacaagagcagctccaggctttctgcggagagctcattgttctcgaaagtttacctacggaggaagaggcggccgatttaatgcccatgagcacgttcatcaacttagtcgatcttgactcgcccgttttcgagaacatcacagaagaaagtatggaggctgtgaagaggatgaccgaactggccaaaaatatcctatgggtgaccaaaggagccttggtagatgagccataccacatggcgagtattgctttctgtcgtgcattacgtaccgaggcgccgcatgtcagcttgaataaccttgacatcccagacatcagccaagataacatctcgaagctgatcgcagaacacctgctgcagctctatgcacttgatgagtgggagcacgagccccaaccgcttctctggtccaaggagcgggaagctttcatcgaggatggaaagatcaaggttcctcggatgatgagcgataacaatcgtaatgcgagattgaactccggcaggcgaaaggtaacaaaagccgtgatcgaaccgagtgataaggtctcattctcagcaccaaacggcaattctcctgcctccttgatcaaccgacctgctcttgatgatcacccaagccctgtcaaggttgaagcttcgagcgcgatggcagttcagctggttccaggcacctacttattcgtcgctattggcacagatgatgatagcgaagaaacgcctactgtgttcctgtcagctaccaataataacaagcagtcgccggctgtaaagatgacgatccccagcgtaaccaacatgacgcacacatcagaggaactcgtgattcttgtgacgagcgagttactggcagccactctaattgagaaggcatccacgggtgatcatttgctgttacattgttcgaaggaagaccggcttcttgttgtcgccttgttccgtcgtatctcggatccaagcattcgtttgagtctcacatatgactccgaggaagtcgttgataacacacatggcctagaggtgctaaggattaaccgcaattcacctcggcactttttgcggaagacacttcgcgatgcaaagcccacgcactatctcgacttgacgaccaggccgtcttctgaccaatatggaggacatctcggtgtccggatttcacaagatctcccgattaagtgcaagcgaatcgatgcaaaagacttgttccaatcgcagtcttcgttgcctctctcgtacaatggagatgtcttggccgctcgccttgaggatgccgtcaggagagcagttacgactttaactgcttcggagcaatttcaagacctggctatcagccttagccaagtcgaggagcctttaactcagtaccacgcaacgagtgctattcgctggccctcggatgggcgggcgaagaccaatgtgcattctctcgacatctcgggcttcttttcaagatcgaagacctatgttttggttggtctgagcggctccattggacaatcgatcgccgagtggatggcatcgaacggagccggatgcgttgttctgactagtcggcgtcctaatcttaaccagaaatggattgactctttccagggctcaggcactactgttaaagtactctctatggatgttactgacatcgacagcgtggaaagttgtgtcaagataatccgagaatcttgtcccacaatcgccggtgttgcacacggcgccatggtcctacatgatgcgctctttgcttcgatgtcggtagagaaaatgcagcagatcattggacccaagatcgagggagccattaaccttgagaacgtgttcagtgaagatgagcttgagttcttcgtcatgttctcttccgtatcaatggtttgtggtaacgcgggccaatcgttgtatgctgctggctgcggttatttgaacggcttagctaggaacagacgcagacgtggccttgccggctccacttttgatatcggccgtgttgccggtcttggatacgtcgagtcggcagatcagatagttcgtgatcagttgatcggtcttggactcaagcccatcagtgaggctgatcttcgcaatgcgtttgcagagaccatcttagctggcttcccgctcccccaggatgatttcacgctgccggaagctgttgtcacgatgggcgtgcggcacttccgcgaagacgaggacgtcaaggggccttggttcactaatcccctcttctctcactgcatcatcgagaagccaaagaatcagtctagctctggagatcaacgaaaggagaattctcttccgttaaaccagcaactagcccaggtcacttccaagaaagaagccctagaagtcattaccgatgcatttgcggacaagttgggtattatgctacagcttggagaccagacaagcgaccgcgacgcgcctctaaacgaacttggaatcgactccctggttgctgtagaagtgcgagcttggttcttgaagaacctaaaagttgacattccagtgctcaagatcattggaggagcttcaataacagagctctgcgagaaagcactcgaactcctgccgccaacagccttagctggcattgatcaaccaaacgtgaaggtcacgcctccggcagcggctcccaaattggaggtgaaagtacctctcccgctactagatgtggatgcgcaatcaagcgaaaactcttcacaggcaatatcaattactggatctcctacttcgaaagaagcgtcgaccgtacagtcttccgtcggttctgaggtgggcgaagactcagctcccgccgcagaccattcgaagactaatatgaaagcaggagcactccccccagtccgacgaccgaaaaagattctaaagagcgtgcctatttccctagcacagtctcgatattggtttcttcaacaacttctcgaggaccaaaacacacacaatgtcgccacctactaccgcatcgaaggagatcttcgcataaatgacttaaaacgagctatacgtctcgtttgctctcgacatgagtcactgcgtacttgttttgtggcagacgaagctgagagagccaaccaggaagtcatgcccagttctccacttcaacttgagtgcaagactatccaatccgaggacgaggtccaggctgagtatgccaaaatcaaaacatatgagctcgacatggaaagcggagatctgctaaaactgactctattgactctgtcgacttctgttcactttatgctgatgaactatcatcacattattatggatggcatatcctggcaagtctttctctccgacttggagaaggcatacaatggccaacatttcggggcgcctccaagacaatatccagagttctccgtggcccagcgccaggccctggagagtggagcgatggacgaacaactcaaatattggcggcgggtctttcctgccaatgatcctccatctattttgccgcttctccccatgtctcgtgttagtgcaagagtgtccttgaaagtatacgatacccatcaagtagtcttccgactggagccagctttattgacccgagtcaaatcctttgcaaaagctagcggatcttcgccatttcatctttatctagctgcattcaaagcaatgctcttcagctttgtcgacacgccggatcttacaattggtgtcgctgatgcgggccgctctgagcctaatctccgaggcagtatcgggttctttctaaaccttcttccgttgagattccgtcgtcaagacaaccaaagcttcagtgacgctatactcgaggctcgaaacgtgcattatgcagcacttgagagttcccgggtgcctttcgatgtcctgttggccgagttgaacgtagctcgttcatcatcatacaatccgttctttcaggcattccttgattatcgccaaggtttcccaacaaaacatgcatttgggaacactgaattcgaaatcaagactgtcagtcacggccaaagtgcgtacgatatcacgttagatgtcacggatagcgccgcagacacgattgtcatgatgcgggcccagaagagtatctatgatatgacaggcacggtactcttgtctgagacctttacccatttccttgagactctgaccagcgctccatcaatcgcgttaaaggacactcctctctatggcgaaaatcagcgcatcaaggctatccctcttggccgcggccttcgcttgacctctgactggcctgcaacacttcctcatcgaatcgaccagattgccgtacagcatgcatccaaaatcgcccttacagatggctttggcaatgagtttagctacgaagacatgacaaaccgtatagaagcaatcgccgaatctttagaaaataagggcgttcgcagtggctctcgggtgcctgtcttccaacaagcagcttcagattgggtttgttccatgctcgcgatcatgcgactgggcgccatctatgtaccactggaccttcgaaatcctctgcctcgtctatcttcagtagtcaaggactgtgatccggcagcaattctcgtagacgctactacggtggacgatgtgtctcagcttgacatcgatggtgtcaacgtcattgacgtgactactgtcggttcaaaggctgctgttcacatcgcgaatcgggcagacggatcctccccagctgccattctctacaccagcggctccactggtacaccaaaaggtatcgtggttactcattccggcttacgcaacgagattgagggctacacgaaacggtggaaactgggcgccgagcgcaccctgcaacagagcgcattcaccttcaatcactcttcagatcagatatacaccggtcttaccaatggtggcagtgtctacatcgtaccttggagcgcacgtggtaaccctctcgagatcaccaaaatcatgcatgagcagtccatcacatatactaaagcgaccccatccgagtatatgctctggatgcagtatggtgtcaatgcactgcgtcttgcgtctaagtggcattacgccttcggcggcggcgagactttgactactaccgtcactcaagaattttctaagcttaacctgccgaatttgcgcttctacaactcatacggtcctacggaaatttcgatctcgtctcacaagatggagattgcgtaccgtgagaagcaggagttagatgctttgggtcgtatcccatgcggctattctctacctaactacgatacctacattgttgatgaagagctacgacctgtccccattggtagccccggcgaaatttgcataggcggtgccggtgtatcgctgggctattataaaaatctagagctgacagaaaagcatttcatctctaaccccttcgctaccccggaagacatcgccaatggatggacacgcatgtaccgaacgggtgatattgcacatctacgcgaggatggcgcgatgatattccacagccgaattgcgggcgactcccaagtcaagatcaggggtttgcgcattgagctgagcgatatcgagagcaatattgtgaaggcatcggatggagcccttaacgaagcggtcgtcaccttgcgcgaaggcgaacctgaatttctggtcgcgcatgtggtctttgccccgaaccacgatgtgaaagatacgacgacctttttggagcgactattaagcaacttagatgtgcctcagtacatggtgcccgttgcggcaatcccgctcgacaaatttcccctctccaatcactccaaggttgacaggaaggctatcaagtcgctgccattgccaaagagagcccgggtggcacaatcaggcgaagacttgacggagacaatgttgcagcttcgaagtgtctggcacgaagtcctaggccaagtcaacaaggatctggggctcgagattggtccctcatctgatttcttcctcgttggcggcaactcgctactcattatccggcttcagtctcagattcgcgcaacatttaacatcgcactacctttgtacgatcttctgaaggccgtcacgcttagcgaaatggcccacaagattgacgagtcggcgagcgtagctcctattgactggaatactgagaccgctccacctactatccccttgttcctcggtaaggtttcaaaggctcgaggtctgtctcaagcaaagaaatctggtaagactatcattgtcactggtgctacaggtttcttagcgaaatatgtcatcccagagctagtggcccgtcctgacgtcgagacaatccactgcattgctgttcgagatcctgctaaggtacaccatacatcagctaaggtcaaagttcatgttggggaccttgggacaccgcttttagggcttagtatggaggacttcgtcgatcttgcagttcgggcagatgttctactgcatatgggtgctgcacgttccttctgggacaactacaatgtgttacggcctagcaacgtgcatccgagcagagaattagtcaagatggctgccccgagaaaagtcccaatccacttcatttcgactgcagccgtcttcggtgactatgatagttacggcagcgcctcagcgattgaatgtccgccggctcttgacggtgttaatgggtacaacgcaaccaaatgggccagcgagataattctcgagcgctccagtgccatactccaagttccatccttcgtccacaggttcgtccctgcaacgaccaacacatctgcatctacggaaatcctggatttgttcgcacactacgtggacataactaaggcgatgcctgacgccaccggctggtccggaagcatggatatgattcttgctacacatgtcgctcattcactgtctgagtctgtgaatgctaatgtggcggataacatgactcatttcacacaatatccaggtcaagttcgtgtctctgttgatgaactgatgccacatctcgaaggagagatgaacggaagagatgatcttacacgtgttccattgttgaagtggacgggagttattaagagggctggatttccatattgcatgatgtctcatgttgccaccattgggaaggagactaaattgaaaatgcggaggtaa

SEQ ID NO: 28947 - protein, 4006 aa, Muscodor strobelii
  misc_feature: SGI Peptide ID NO. 569936
  misc_feature (556)..(899): Pfam Id: PF00698 Pfam Desc: Acyl transferase domain
  misc_feature (2136)..(2300): Pfam Id: PF00106 Pfam Desc: short chain dehydrogenase
  misc_feature (3085)..(3503): Pfam Id: PF00501 Pfam Desc: AMP-binding enzyme
  misc_feature (2601)..(2898): Pfam Id: PF00668 Pfam Desc: Condensation domain
  misc_feature (9)..(258): Pfam Id: PF00109 Pfam Desc: Beta-ketoacyl synthase, N-terminal domain
  misc_feature (266)..(390): Pfam Id: PF02801 Pfam Desc: Beta-ketoacyl synthase, C-terminal domain
  misc_feature (2137)..(2313): Pfam Id: PF08659 Pfam Desc: KR domain
  misc_feature (1431)..(1534): Pfam Id: PF08241 Pfam Desc: Methyltransferase domain
  misc_feature (1431)..(1532): Pfam Id: PF08242 Pfam Desc: Methyltransferase domain
  misc_feature (3707)..(3925): Pfam Id: PF07993 Pfam Desc: Male sterility protein
  misc_feature (3599)..(3662): Pfam Id: PF00550 Pfam Desc: Phosphopantetheine attachment site
  misc_feature (556)..(763): Pfam Id: PF00698 Pfam Desc: Acyl transferase domain
  misc_feature (318)..(390): Pfam Id: PF02801 Pfam Desc: Beta-ketoacyl synthase, C-terminal domain
  misc_feature (266)..(306): Pfam Id: PF02801 Pfam Desc: Beta-ketoacyl synthase, C-terminal domain
  misc_feature (3707)..(3862): Pfam Id: PF07993 Pfam Desc: Male sterility protein
  misc_feature (172)..(207): Pfam Id: PF00108 Pfam Desc: Thiolase, N-terminal domain
  misc_feature (9)..(4006): NCBI GI: 171680492 Blast Desc: protein product [Podospora anserina] gi|170939873|emb|CAP65099.1| protein product [Podospora anserina]
  misc_feature (9)..(4006): NCBI GI: 121704363 Blast Desc: hybrid NRPS/PKS enzyme, [Aspergillus clavatus NRRL 1] gi|119398590|gb|EAW09019.1| hybrid NRPS/PKS enzyme, [Aspergillus clavatus NRRL 1]
  misc_feature (9)..(3595): NCBI GI: 145239699 Blast Desc: An08g03790 [Aspergillus niger] gi|134077007|emb|CAK45416.1| protein product [Aspergillus niger]
  misc_feature (8)..(3976): NCBI GI: 121704559 Blast Desc: hybrid NRPS/PKS enzyme, [Aspergillus clavatus NRRL 1] gi|119398688|gb|EAW09117.1| hybrid NRPS/PKS enzyme, [Aspergillus clavatus NRRL 1]
  misc_feature (5)..(4004): NCBI GI: 240109583 Blast Desc: polyketide synthase, [Coccidioides posadasii C735 delta SOWgp]
  misc_feature (9)..(3989): NCBI GI: 159128289 Blast Desc: hybrid PKS/NRPS enzyme EqiS-like, [Aspergillus fumigatus A1163]
  misc_feature (1)..(3992): NCBI GI: 238837915 Blast Desc: polyketide synthase [Microsporum canis CBS 113480]
  misc_feature (2)..(3995): NCBI GI: 258570989 Blast Desc: UREG_03815 [Uncinocarpus reesii 1704] gi|237904568|gb|EEP78969.1| UREG_03815 [Uncinocarpus reesii 1704]
  misc_feature (9)..(4005): NCBI GI: 121701571 Blast Desc: equisetin synthetase, [Aspergillus clavatus NRRL 1] gi|119397193|gb|EAW07624.1| equisetin synthetase, [Aspergillus clavatus NRRL 1]
  misc_feature (8)..(3977): NCBI GI: 238840354 Blast Desc: polyketide synthase/peptide synthetase [Microsporum canis CBS 113480]
  misc_feature (1)..(3028): SWISSPROT Homolog: EC 2.3.1.161 Lovastatin nonaketide synthase
  misc_feature: Useful for fungicidal and/or biocontrol applications
MPQQSERAEPIAIVGSACRFPGSASSPSKLWTLLSNPHDLGYEIPSSRFGKGFYHPNGAHHGTTNVQHAYLLDEDIRLFDATFFNIHSKEANSIDPQQRLLLETVYEALESGGHTIEGLRGSDTAVYTGTMSVDWMDQSVRDLDTIPQYLATGSNRAIISNRVSYVFDWRGPSMTIDTACSSSLIAVHQGVTALRAGESRVAVACGTQVILNPEQFIAESKLQMLSPTGRSRMWDKDADGYARGEGTAAIIMKKLSDAIADGDHIESVIRETGTNQDGRTPGLTMPSSKAQSALIDITYKRAGLDPVNNPRDRPQYFEAHGTGTQAGDPREAGAIYEAFGRHISSSETPLYVGSIKTVIGHLEGTAGLAGLLKASASIQNGYIAPNLLFKNLNPKLEPFYKNLKVPTELTPWPEVLEGVPRRASVNSFGFGGSNAHAILEQYSGPSNAGTSTPADVTNFTPFVFSAVSEGSLVAQLRAYSEHLKKHSDISPYDLAWTLQARRSHFPIKIALSALTIEQLVAKINEKLELLETKPGTTLGFRTNSKQSTASLRILGVFTGQGAQWASMGADLIRSSDFFKQRITDLEKSLADLPAADRPEWSLTEELLAGKDNSRLSEATFSQPLCTAIQVALVDLLRTAGITFTTVVGHSSGEIAAAYAADFLSGEDAIRVAYYRGLYTSLADGGSGQKGAMLAVGTSWEDAHDLINLRTFKGRLAVAAHNSPASVTLSGDADAIVHAKKIFDEEKKFARLLQVDQAYHSHHMLPCGDTYVGALRACGVRVKKNRNKSCVWYSSVSGSDVPVAAVEELQDEYWRDNMTKSVLFAEAVRNALASDDQLNLGLEVGPHPALKGPVAQNVGDDRSTPLSYSGVLARGKNDVESFADGLGYVWTQLGAAGVDFQSYAKAVAAKSKSIQPRLVTGLPLYQWNHDKAYWAESRRSRKIRARSEPNHEILGALSPDSTPQDMRWSNILKVSEMPWLTGHQIQGQMIFPAAGYVAMALESSKILSAERSVKTYEVFDLSIPRATVIEDADNASIETLVTLTSIQFHQDDTATADFRCYALPVTVTGSKQEMMTNASGTVKMVFGVPDVDALSCTPVEDFNLRAIDSDEFYEYLVTLGYGYTGPFRTLSSTQRRLGRSSGLIDTYDYAEAEPSRYLIHPSTLDVAFQASILAYTSPSDERLWALHVPTVIGTIRVNAATCSSPLPAGSQIPVHSILEDTEAFSGFIELQSVDGQHTMVQVEDLVIKPLAPAAEADDRVMFTHTKFASAVPDGALASDGRRPSSYEVDLSMVCERLCYYYISRWASELTDEEWKSAPSYFLHLRNWVKHVRQNVAKGKNPHIKRDWSKDTHEFIEKLIQPYKEDGNVKIIVAVGENLPASVRGETTILEHMIKDDMLERHYKKSLGAEIANEFLADMMKQIIHRYPHAKILEIGAGTGGATKAVLDKIQGAFSSYTYTDLSVGFFGLAEKLFEAHVDKMEFKTFDVEKPPKSQGYEPNSYDIVIASNCLHATASLETTLSHTRDLLKPGGYLLILELTMPLEVIRTNTIFGVLPGWWLGVDDSRKLSPTISRGAWHSQLRKTGFSGIDTINIDVSPITWPASVIVSQAVDDRVQFLRKPLSTPSTSVPIYIESLVVLGNGSLELARVAEQLQEQLQAFCGELIVLESLPTEEEAADLMPMSTFINLVDLDSPVFENITEESMEAVKRMTELAKNILWVTKGALVDEPYHMASIAFCRALRTEAPHVSLNNLDIPDISQDNISKLIAEHLLQLYALDEWEHEPQPLLWSKEREAFIEDGKIKVPRMMSDNNRNARLNSGRRKVTKAVIEPSDKVSFSAPNGNSPASLINRPALDDHPSPVKVEASSAMAVQLVPGTYLFVAIGTDDDSEETPTVFLSATNNNKQSPAVKMTIPSVTNMTHTSEELVILVTSELLAATLIEKASTGDHLLLHCSKEDRLLVVALFRRISDPSIRLSLTYDSEEVVDNTHGLEVLRINRNSPRHFLRKTLRDAKPTHYLDLTTRPSSDQYGGHLGVRISQDLPIKCKRIDAKDLFQSQSSLPLSYNGDVLAARLEDAVRRAVTTLTASEQFQDLAISLSQVEEPLTQYHATSAIRWPSDGRAKTNVHSLDISGFFSRSKTYVLVGLSGSIGQSIAEWMASNGAGCVVLTSRRPNLNQKWIDSFQGSGTTVKVLSMDVTDIDSVESCVKIIRESCPTIAGVAHGAMVLHDALFASMSVEKMQQIIGPKIEGAINLENVFSEDELEFFVMFSSVSMVCGNAGQSLYAAGCGYLNGLARNRRRRGLAGSTFDIGRVAGLGYVESADQIVRDQLIGLGLKPISEADLRNAFAETILAGFPLPQDDFTLPEAVVTMGVRHFREDEDVKGPWFTNPLFSHCIIEKPKNQSSSGDQRKENSLPLNQQLAQVTSKKEALEVITDAFADKLGIMLQLGDQTSDRDAPLNELGIDSLVAVEVRAWFLKNLKVDIPVLKIIGGASITELCEKALELLPPTALAGIDQPNVKVTPPAAAPKLEVKVPLPLLDVDAQSSENSSQAISITGSPTSKEASTVQSSVGSEVGEDSAPAADHSKTNMKAGALPPVRRPKKILKSVPISLAQSRYWFLQQLLEDQNTHNVATYYRIEGDLRINDLKRAIRLVCSRHESLRTCFVADEAERANQEVMPSSPLQLECKTIQSEDEVQAEYAKIKTYELDMESGDLLKLTLLTLSTSVHFMLMNYHHIIMDGISWQVFLSDLEKAYNGQHFGAPPRQYPEFSVAQRQALESGAMDEQLKYWRRVFPANDPPSILPLLPMSRVSARVSLKVYDTHQVVFRLEPALLTRVKSFAKASGSSPFHLYLAAFKAMLFSFVDTPDLTIGVADAGRSEPNLRGSIGFFLNLLPLRFRRQDNQSFSDAILEARNVHYAALESSRVPFDVLLAELNVARSSSYNPFFQAFLDYRQGFPTKHAFGNTEFEIKTVSHGQSAYDITLDVTDSAADTIVMMRAQKSIYDMTGTVLLSETFTHFLETLTSAPSIALKDTPLYGENQRIKAIPLGRGLRLTSDWPATLPHRIDQIAVQHASKIALTDGFGNEFSYEDMTNRIEAIAESLENKGVRSGSRVPVFQQAASDWVCSMLAIMRLGAIYVPLDLRNPLPRLSSVVKDCDPAAILVDATTVDDVSQLDIDGVNVIDVTTVGSKAAVHIANRADGSSPAAILYTSGSTGTPKGIVVTHSGLRNEIEGYTKRWKLGAERTLQQSAFTFNHSSDQIYTGLTNGGSVYIVPWSARGNPLEITKIMHEQSITYTKATPSEYMLWMQYGVNALRLASKWHYAFGGGETLTTTVTQEFSKLNLPNLRFYNSYGPTEISISSHKMEIAYREKQELDALGRIPCGYSLPNYDTYIVDEELRPVPIGSPGEICIGGAGVSLGYYKNLELTEKHFISNPFATPEDIANGWTRMYRTGDIAHLREDGAMIFHSRIAGDSQVKIRGLRIELSDIESNIVKASDGALNEAVVTLREGEPEFLVAHVVFAPNHDVKDTTTFLERLLSNLDVPQYMVPVAAIPLDKFPLSNHSKVDRKAIKSLPLPKRARVAQSGEDLTETMLQLRSVWHEVLGQVNKDLGLEIGPSSDFFLVGGNSLLIIRLQSQIRATFNIALPLYDLLKAVTLSEMAHKIDESASVAPIDWNTETAPPTIPLFLGKVSKARGLSQAKKSGKTIIVTGATGFLAKYVIPELVARPDVETIHCIAVRDPAKVHHTSAKVKVHVGDLGTPLLGLSMEDFVDLAVRADVLLHMGAARSFWDNYNVLRPSNVHPSRELVKMAAPRKVPIHFISTAAVFGDYDSYGSASAIECPPALDGVNGYNATKWASEIILERSSAILQVPSFVHRFVPATTNTSASTEILDLFAHYVDITKAMPDATGWSGSMDMILATHVAHSLSESVNANVADNMTHFTQYPGQVRVSVDELMPHLEGEMNGRDDLTRVPLLKWTGVIKRAGFPYCMMSHVATIGKETKLKMRR

SEQ ID NO: 28948 - DNA, 716 bp, Muscodor strobelii
  misc_feature: SGI EST ID NO. CUFF.68466.0
  misc_feature: Variant of the nucleotide sequence at SEQ ID NO 28946
gcagcggctcccaaattggaggtgaaagtacctctcccgctactagatgtggatgcgcaatcaagcgaaaactcttcacaggcaatatcaattactggatctcctacttcgaaagaagcgtcgaccgtacagtcttccgtcggttctgaggtgggcgaagactcagctcccgccgcagaccattcgaagactaatatgaaagcaggagcactccccccagtccgacgaccgaaaaagattctaaagagcgtgcctatttccctagcacagtctcgatattggtttcttcaacaacttctcgaggaccaaaacacacacaatgtcgccacctactaccgcatcgaaggagatcttcgcataaatgacttaaaacgagctatacgtctcgtttgctctcgacatgagtcactgcgtacttgttttgtggcagacgaagctgagagagccaaccaggaagtcatgcccagttctccacttcaacttgagtgcaagactatccaatccgaggacgaggtccaggctgagtatgccaaaatcaaaacatatgagctcgacatggaaagcggagatctgctaaaactgactctattgactctgtcgacttctgttcactttatgctgatgaactatcatcacattattatggatggcatatcctggcaagtctttctctccgacttggagaaggcatacaatggccaacatttcggggcgcc

SEQ ID NO: 28949 - DNA, 1008 bp, Muscodor strobelii
  misc_feature: SGI cDNA ID NO. 569937
  misc_feature: Encodes the peptide sequence at SEQ ID NO 28950
atgcctcccaaaatcttcctcacaggcgcaaccggctacatcggtggcgaagccctatactccatctctcaagctcacccggaagctgagttcactttgttggttcgcaatgaggaaaaagccaaacagatcgccgacaagtacccaaaggcgaagtttgcatacggagatttggactcctctgatgtcatcgccaaagcatccgccgaggctgacatcgtagtccacaccgcagactcctcggacaatctaccggcagcgaaagcaattgccaagggtctttcagaaggacacacagctgacaagcctggatattggattcatgtctgtggtactagcttgctgcaatggtacgactgggacaacaatagatacggccaagatccacttccagagcagaaatacaatgacatcgatgacatcgaacgtattatcacactgccagacagcgctcatcacagagacattgacaaaatcgtccttgcaaccaacgaagcagccggtgtgaaaacactcattgtctgccctccctgcatctatggccccggacgaggccccgtcaatcagcgcagtatccaggtctacagaatggctgaattcacgattaagaacggatttgcgcctgttcatgctggacctggctcaccagagtgggacaatgtccacgtccaggacctcggacacttcttcgttcttgctgtagacgcggcacttgatcaagagaagaagaaaaatgctgagatcttcggaccacatggatattacttcctcaataacggcgttcactcatggcgtgacgtcgccacttgggttgctgaggaggcagctaagcaaggctatatctccgaggccaagacgcaggaaggtgactataagaacttcggcgctaattcgaaaagtgtggcagttcgtgcgaaaaaatatcttggatgggagcccaagggtggaagtttgaaggatgagatccccaccatcgtcgctggtgaggctaaaagactgggaaaataa

SEQ ID NO: 28950 - protein, 335 aa, Muscodor strobelii
  misc_feature: SGI Peptide ID NO. 569937
  misc_feature (5)..(250): Pfam Id: PF01370 Pfam Desc: NAD dependent epimerase/dehydratase family
  misc_feature (5)..(92): Pfam Id: PF03435 Pfam Desc: Saccharopine dehydrogenase
  misc_feature (1)..(334): NCBI GI: 256734703 Blast Desc: NECHADRAFT_98919 [Nectria haematococca mpVI 77-13-4]
  misc_feature (5)..(335): NCBI GI: 46102862 Blast Desc: FG00066.1 [Gibberella zeae PH-1]
  misc_feature (1)..(334): NCBI GI: 46108076 Blast Desc: FG00920.1 [Gibberella zeae PH-1]
  misc_feature (1)..(334): NCBI GI: 145615275 Blast Desc: MGG_05486 [Magnaporthe grisea 70-15] gi|145022144|gb|EDK06164.1| MGG_05486 [Magnaporthe grisea 70-15]
  misc_feature (8)..(334): NCBI GI: 156049359 Blast Desc: SS1G_08386 [Sclerotinia sclerotiorum 1980] gi|154692785|gb|EDN92523.1| SS1G_08386 [Sclerotinia sclerotiorum 1980]
  misc_feature (1)..(335): NCBI GI: 169786355 Blast Desc: [Aspergillus oryzae RIB40] gi|238507361|ref|XP_002384882.1| conserved [Aspergillus flavus NRRL3357] gi|83776386|dbj|BAE66505.1| protein product oryzae]
  misc_feature (1)..(334): NCBI GI: 154303671 Blast Desc: BC1G_08720 [Botryotinia fuckeliana B05.10] gi|150854514|gb|EDN29706.1| BC1G_08720 [Botryotinia fuckeliana B05.10]
  misc_feature (4)..(335): NCBI GI: 242783706 Blast Desc: nucleoside-diphosphate-sugar epimerase, [Talaromyces stipitatus ATCC 10500] gi|218720387|gb|EED19806.1| nucleoside-diphosphate-sugar epimerase, [Talaromyces stipitatus
  misc_feature (3)..(333): NCBI GI: 67904002 Blast Desc: AN8988.2 [Aspergillus nidulans FGSC A4] gi|40745164|gb|EAA64320.1| AN8988.2 [Aspergillus nidulans FGSC A4] gi|259486562|tpe|CBF84510.1| TPA: conserved [Aspergillus FGSC
  misc_feature (3)..(333): NCBI GI: 145250967 Blast Desc: An15g04620 [Aspergillus niger] gi|134082524|emb|CAK42440.1| protein product [Aspergillus niger]
MPPKIFLTGATGYIGGEALYSISQAHPEAEFTLLVRNEEKAKQIADKYPKAKFAYGDLDSSDVIAKASAEADIVVHTADSSDNLPAAKAIAKGLSEGHTADKPGYWIHVCGTSLLQWYDWDNNRYGQDPLPEQKYNDIDDIERIITLPDSAHHRDIDKIVLATNEAAGVKTLIVCPPCIYGPGRGPVNQRSIQVYRMAEFTIKNGFAPVHAGPGSPEWDNVHVQDLGHFFVLAVDAALDQEKKKNAEIFGPHGYYFLNNGVHSWRDVATWVAEEAAKQGYISEAKTQEGDYKNFGANSKSVAVRAKKYLGWEPKGGSLKDEIPTIVAGEAKRLGK

SEQ ID NO: 28951 - DNA, 1922 bp, Muscodor strobelii
  misc_feature: SGI EST ID NO. CUFF.68649.1
  misc_feature: Variant of the nucleotide sequence at SEQ ID NO 28949
cgcccggcactttgtatgcaagagattattaatgaggtgaataagcggggaaatggcacaacccacttacaacaccttttacacaacagcatgatatcatcccttgtgacatcgtatatatacatgaatttttcccggtgagaatatagtctagcgacgaagacatccagtatcttagcaaacatagcctgcaacctcgcatcatttccgaacgctcaccatgcctcccaaaatcttcctgtgagttcgctataccatccattcatcaccagtgtccttctaacaccatattagcacaggcgcaaccggctacatcggtggcgaagccctatactccatctctcaagctcacccggaagctgagttcactttgttggttcgcaatgaggaaaaagccaaacagatcgccgacaagtacccaaaggcgaagtttgcatacggagatttggactcctctgatgtcatcgccaaagcatccgccgaggctgacatcgtagtccacaccgcagactcctcggacaatctaccggcagcgaaagcaattgccaagggtctttcagaaggacacacagctgacaagcctggatattggattcatgtctgtggtactagcttgctgcaatggtacgactgggacaacaatagatacggccaagatccacttccagagcagaaatacaatgacatcgatgacatcgaacgtattatcacactgccagacagcgctcatcacagagacattgacaaaatcgtccttgcaaccaacgaagcagccggtgtgaaaacactcattgtctgccctccctgcatctatggccccggacgaggccccgtcaatcagcgcagtatccaggtctacagaatggctgaattcacgattaagaacggatttgcgcctgttcatgctggacctggctcaccagagtgggacaatgtccacgtccaggacctcggacacttcttcgttcttgctgtagacgcggcacttgatcaagagaagaagaaaaatgctgagatcttcggaccacatggatattacttcctcaataacggcgttcactcatggcgtgacgtcgccacttgggttgctgaggaggcagctaagcaaggctatatctccgaggccaagacgcaggaaggtgactataagaacttcggcgctaattcgaaaagtgtggcagttcgtgcgaaaaaatatcttggatgggagcccaagggtggaagtttgaaggatgagatccccaccatcgtcgctggtgaggctaaaagactgggaaaataagcgtgatcaatagggaccgagcttggaggaagtcaagaaataaaatgaggcaagggcggaatgaccattgcgtcgaatcttgtcctttatcgaatctgttactctgaacgtgaatcgcgacaaaagttcgcctttgtacccaagtgccccctattcccttcaccctaagggagacaacggaaagcaatgcagtgcactggccacgatcatctctttttttagattcagtactaatcccacaggatagagactgatcgtacaaccccctacatggaattccacgcccttccctactctacttctctaacaacctaggaacagcatacttaaacacattctcagggtcatacttgttcttcaacgccaaaagcccttcataatgccgtccataaacggtcctcaaatccgtgtcatccttatcgatgagcgagatgtaccaagactcaatcatattttccggatcactcgccaatagctccttcaccgctgctcgagcccactcatctgctttctcccaaatcgactcctcaggcgtcgaggaaataagttctagcaaatgatgatcggttctgttcccgaacacagattcctcgttaggctttggtgatcgcaaagcatgaatcgagattcctgtgccgcc

SEQ ID NO: 28952 - DNA, 1020 bp, Muscodor strobelii
  misc_feature: SGI cDNA ID NO. 569938
  misc_feature: Reduced expression when VOC is produced
  misc_feature: Encodes the peptide sequence at SEQ ID NO 28953
atgcctcccaaaatcttcctcacaggcgcaaccggtactctcataggctacatcggtggcgaagccctatactccatctctcaagctcacccggaagctgagttcactttgttggttcgcaatgaggaaaaagccaaacagatcgccgacaagtacccaaaggcgaagtttgcatacggagatttggactcctctgatgtcatcgccaaagcatccgccgaggctgacatcgtagtccacaccgcagactcctcggacaatctaccggcagcgaaagcaattgccaagggtctttcagaaggacacacagctgacaagcctggatattggattcatgtctgtggtactagcttgctgcaatggtacgactgggacaacaatagatacggccaagatccacttccagagcagaaatacaatgacatcgatgacatcgaacgtattatcacactgccagacagcgctcatcacagagacattgacaaaatcgtccttgcaaccaacgaagcagccggtgtgaaaacactcattgtctgccctccctgcatctatggccccggacgaggccccgtcaatcagcgcagtatccaggtctacagaatggctgaattcacgattaagaacggatttgcgcctgttcatgctggacctggctcaccagagtgggacaatgtccacgtccaggacctcggacacttcttcgttcttgctgtagacgcggcacttgatcaagagaagaagaaaaatgctgagatcttcggaccacatggatattacttcctcaataacggcgttcactcatggcgtgacgtcgccacttgggttgctgaggaggcagctaagcaaggctatatctccgaggccaagacgcaggaaggtgactataagaacttcggcgctaattcgaaaagtgtggcagttcgtgcgaaaaaatatcttggatgggagcccaagggtggaagtttgaaggatgagatccccaccatcgtcgctggtgaggctaaaagactgggaaaataa

SEQ ID NO: 28953 - protein, 339 aa, Muscodor strobelii
  misc_feature: SGI Peptide ID NO. 569938
  misc_feature (1)..(338): NCBI GI: 256734703 Blast Desc: NECHADRAFT_98919 [Nectria haematococca mpVI 77-13-4]
  misc_feature (5)..(339): NCBI GI: 46102862 Blast Desc: FG00066.1 [Gibberella zeae PH-1]
  misc_feature (1)..(338): NCBI GI: 46108076 Blast Desc: FG00920.1 [Gibberella zeae PH-1]
  misc_feature (1)..(338): NCBI GI: 145615275 Blast Desc: MGG_05486 [Magnaporthe grisea 70-15] gi|145022144|gb|EDK06164.1| MGG_05486 [Magnaporthe grisea 70-15]
  misc_feature (6)..(338): NCBI GI: 156049359 Blast Desc: SS1G_08386 [Sclerotinia sclerotiorum 1980] gi|154692785|gb|EDN92523.1| SS1G_08386 [Sclerotinia sclerotiorum 1980]
  misc_feature (1)..(339): NCBI GI: 169786355 Blast Desc: [Aspergillus oryzae RIB40] gi|238507361|ref|XP_002384882.1| conserved [Aspergillus flavus NRRL3357] gi|83776386|dbj|BAE66505.1| protein product oryzae]
  misc_feature (1)..(338): NCBI GI: 154303671 Blast Desc: BC1G_08720 [Botryotinia fuckeliana B05.10] gi|150854514|gb|EDN29706.1| BC1G_08720 [Botryotinia fuckeliana B05.10]
  misc_feature (4)..(339): NCBI GI: 242783706 Blast Desc: nucleoside-diphosphate-sugar epimerase, [Talaromyces stipitatus ATCC 10500] gi|218720387|gb|EED19806.1| nucleoside-diphosphate-sugar epimerase, [Talaromyces stipitatus
  misc_feature (3)..(337): NCBI GI: 67904002 Blast Desc: AN8988.2 [Aspergillus nidulans FGSC A4] gi|40745164|gb|EAA64320.1| AN8988.2 [Aspergillus nidulans FGSC A4] gi|259486562|tpe|CBF84510.1| TPA: conserved [Aspergillus FGSC
  misc_feature (3)..(337): NCBI GI: 145250967 Blast Desc: An15g04620 [Aspergillus niger] gi|134082524|emb|CAK42440.1| protein product [Aspergillus niger]
  misc_feature: Useful for introducing or modulating the production of volatile compounds
MPPKIFLTGATGTLIGYIGGEALYSISQAHPEAEFTLLVRNEEKAKQIADKYPKAKFAYGDLDSSDVIAKASAEADIVVHTADSSDNLPAAKAIAKGLSEGHTADKPGYWIHVCGTSLLQWYDWDNNRYGQDPLPEQKYNDIDDIERIITLPDSAHHRDIDKIVLATNEAAGVKTLIVCPPCIYGPGRGPVNQRSIQVYRMAEFTIKNGFAPVHAGPGSPEWDNVHVQDLGHFFVLAVDAALDQEKKKNAEIFGPHGYYFLNNGVHSWRDVATWVAEEAAKQGYISEAKTQEGDYKNFGANSKSVAVRAKKYLGWEPKGGSLKDEIPTIVAGEAKRLGK

SEQ ID NO: 28954 - DNA, 1922 bp, Muscodor strobelii; identical to SEQ ID NO: 28951
  misc_feature: SGI EST ID NO. CUFF.68649.1
  misc_feature: Variant of the nucleotide sequence at SEQ ID NO 28952

SEQ ID NO: 28955 - DNA, 1368 bp, Muscodor strobelii
  misc_feature: SGI cDNA ID NO. 569939
  misc_feature: Encodes the peptide sequence at SEQ ID NO 28956
atgacatcagaatcctccctccagacttacctcacatcccaaaactccagcacaaaactctacagcagaacccacgcagacttcgaatccataaacgcaccattcttcaagaagccaggcgtaatcccacgtctcatcgctcgcccccagaccgcggaagacgtacaagccttgatcaaatacgctcggcaacacaatgtcgattttgtcgtaagaacaggcggtcatgatggagcggggagaagtcaggttcatgatgcgctgtcgattgatatgcgtgatatccaatatgtaaatgttgcaaaggacaggaagacggcgagtgtgggcggtgggatactgctcaggggtgttgcgaagaaacttggtgaacagggactggttacgccggtcggctcgattgcgacggtgggatatgtcggctgggcgacattgggtggttatggaccgttttctgcgaggtatgggcttggtgttgatcagatcgttggtgctaagattgttaatcctgagggtgaattggtggaagcgaatgatgtgatgctgaagggtatcagaggcgcaggtggaattttcggtgtcattgttgagctgactgttaaggtttttccgttgaaggagattcttcattcgactatcgtttttgaatccagcgatatggatacgacgtggtcgacgtacacgcaaggatatcaaaagctagcagatgagcacagccttccggatgccctcgctttgcataagttcgcgcttgagttaccaggtgttgggaaggctttgataattggggccacgtgggttgatgaagaccaagaagaaggctataaatggatcgacaagatcgcctcgctggggaactgcataatgaagatgaccaaacctatggctcttctagatttactcgaggaaaacgagaaactattggtcttcgggcagtacgggcgtgtccacacccttagcttcaaaaagttctcgccaaagaccacagctatattagccagatatgcgagctccatccccggcggcggcacaggaatctcgattcatgctttgcgatcaccaaagcctaacgaggaatctgtgttcgggaacagaaccgatcatcatttgctagaacttatttcctcgacgcctgaggagtcgatttgggagaaagcagatgagtgggctcgagcagcggtgaaggagctattggcgagtgatccggaaaatatgattgagtcttggtacatctcgctcatcgataaggatgacacggatttgaggaccgtttatggacggcattatgaagggcttttggcgttgaagaacaagtatgaccctgagaatgtgtttaagtatgctgttcctaggttgttagagaagtag

SEQ ID NO: 28956 - protein, 455 aa, Muscodor strobelii
  misc_feature: SGI Peptide ID NO. 569939
  misc_feature (43)..(178): Pfam Id: PF01565 Pfam Desc: FAD binding domain
  misc_feature (5)..(453): NCBI GI: 46126499 Blast Desc: FG07627.1 [Gibberella zeae PH-1]
  misc_feature (5)..(452): NCBI GI: 145231200 Blast Desc: An01g14760 [Aspergillus niger] gi|134055994|emb|CAK44173.1| protein product [Aspergillus niger]
  misc_feature (6)..(452): NCBI GI: 238495160 Blast Desc: D-lactate dehydrogenase, [Aspergillus flavus NRRL3357] gi|220695466|gb|EED51809.1| D-lactate dehydrogenase, [Aspergillus flavus NRRL3357]
  misc_feature (43)..(445): NCBI GI: 212527650 Blast Desc: conserved [Penicillium marneffei ATCC 18224] gi|210073380|gb|EEA27467.1| conserved [Penicillium marneffei ATCC 18224]
  misc_feature (11)..(452): NCBI GI: 242784277 Blast Desc: 6-hydroxy-D-nicotine oxidase, [Talaromyces stipitatus ATCC 10500] gi|218720502|gb|EED19921.1| 6-hydroxy-D-nicotine oxidase, [Talaromyces stipitatus ATCC 10500]
  misc_feature (59)..(452): NCBI GI: 145245198 Blast Desc: An11g09080 [Aspergillus niger] gi|134079563|emb|CAK97039.1| protein product [Aspergillus niger]
  misc_feature (34)..(452): NCBI GI: 67538760 Blast Desc: AN5550.2 [Aspergillus nidulans FGSC A4] gi|40743065|gb|EAA62255.1| AN5550.2 [Aspergillus nidulans FGSC A4] gi|259484994|tpe|CBF81689.1| TPA: conserved [Aspergillus FGSC
  misc_feature (3)..(452): NCBI GI: 238846062 Blast Desc: FAD binding domain-containing protein [Microsporum canis CBS 113480]
  misc_feature (43)..(453): NCBI GI: 256730459 Blast Desc: NECHADRAFT_29810 [Nectria haematococca mpVI 77-13-4]
  misc_feature (3)..(454): NCBI GI: 212536442 Blast Desc: mitomycin Radical oxidase, [Penicillium marneffei ATCC 18224] gi|210070776|gb|EEA24866.1| mitomycin Radical oxidase, [Penicillium marneffei ATCC 18224]
MTSESSLQTYLTSQNSSTKLYSRTHADFESINAPFFKKPGVIPRLIARPQTAEDVQALIKYARQHNVDFVVRTGGHDGAGRSQVHDALSIDMRDIQYVNVAKDRKTASVGGGILLRGVAKKLGEQGLVTPVGSIATVGYVGWATLGGYGPFSARYGLGVDQIVGAKIVNPEGELVEANDVMLKGIRGAGGIFGVIVELTVKVFPLKEILHSTIVFESSDMDTTWSTYTQGYQKLADEHSLPDALALHKFALELPGVGKALIIGATWVDEDQEEGYKWIDKIASLGNCIMKMTKPMALLDLLEENEKLLVFGQYGRVHTLSFKKFSPKTTAILARYASSIPGGGTGISIHALRSPKPNEESVFGNRTDHHLLELISSTPEESIWEKADEWARAAVKELLASDPENMIESWYISLIDKDDTDLRTVYGRHYEGLLALKNKYDPENVFKYAVPRLLEK

SEQ ID NO: 28957 - DNA, 3239 bp, Muscodor strobelii
  misc_feature: SGI EST ID NO. CUFF.68650.3
  misc_feature: Variant of the nucleotide sequence at SEQ ID NO 28955
ggggtatattcggacaagcccccaaagccacgacaagcaagggcttagatgaccaaggttagctgtcagatggaatgatctacttctatggacggacttgagaacaggttctccagacgtggtgtctacgactagagtccttgtgcttggccgctaagggtcctgcctatgtcgtcattcccgcaagatagctcttgatttgctcccgcgtatctcttcgcggacactatataaaccattattaaacgcttgctatccttaatttatctctttgtgcaattccgtagccatcccccccagaaacaaccaaacccatcatcaccacctcgcaaaatgacatcagaatcctccctccagacttacctcacatcccaaaactccagcacaaaactctacagcagaacccacgcagacttcgaatccataaacgcaccattcttcaagaagccaggcgtaatcccacgtctcatcgctcgcccccagaccgcggaagacgtacaagccttgatcaaatacgctcggcaacacaatgtcgattttgtcgtaagaacaggcggtcatgatggagcggggagaagtcaggttcatgatgcgctgtcgattgatatgcgtgatatccaatatgtaaatgttgcaaaggacaggaagacggcgagtgtgggcggtgggatactgctcaggggtgttgcgaagaaacttggtgaacagggactggttacgccggtcggctcgattgcgacggtgggatatgtcggctgggcgacattgggtggttatggaccgttttctgcgaggtatgggcttggtgttgatcagatcgttggtgctaagattgttaatcctgagggtgaattggtggaagcgaatgatgtgatgctgaagggtatcagaggcgcaggtggaattttcggtgtcattgttgagctgactgttaaggtttttccgttgaaggaggtatgtttctgtgcttcccggaatgaactcgattactgactttggtaatgtagattcttcattcgactatcgtttttgaatccagcgatatggatacgacgtggtcgacgtacacgcaaggatatcaaaagctagcagatgagcacagccttccggatgccctcgctttgcataagttcgcgcttgagttaccaggtgttgggaaggctttgataattggggccacgtgggttgatgaagaccaagaagaaggctataaatggatcgacaagatcgcctcgctggggaactgcataatgaagatgaccaaacctatggctcttctagatttactcgaggaaaacgagaaactattggtcttcgggcagtacgggcgtgtccacacccttagcttcaaaaagttctcgccaaagaccacagctatattagccagatatgcgagctccatccccggcggcggcacaggaatctcgattcatgctttgcgatcaccaaagcctaacgaggaatctgtgttcgggaacagaaccgatcatcatttgctagaacttatttcctcgacgcctgaggagtcgatttgggagaaagcagatgagtgggctcgagcagcggtgaaggagctattggcgagtgatccggaaaatatgattgagtcttggtacatctcgctcatcgataaggatgacacggatttgaggaccgtttatggacggcattatgaagggcttttggcgttgaagaacaagtatgaccctgagaatgtgtttaagtatgctgttcctaggttgttagagaagtagagtagggaagggcgtggaattccatgtagggggttgtacgatcagtctctatcctgtgggattagtactgaatctaaaaaaagagatgatcgtggccagtgcactgcattgctttccgttgtctcccttagggtgaagggaatagggggcacttgggtacaaaggcgaacttttgtcgcgattcacgttcagagtaacagattcgataaaggacaagattcgacgcaatggtcattccgcccttgcctcattttatttcttgacttcctccaagctcggtccctattgatcacgcttattttcccagtcttttagcctcaccagcgacgatggtggggatctcatccttcaaacttccacccttgggctcccatccaagatattttttcgcacgaactgccacacttttcgaattagcgccgaagttcttatagtcaccttcctgcgtcttggcctcggagatatagccttgcttagctgcctcctcagcaacccaagtggcgacgtcacgccatgagtgaacgccgttattgaggaagtaatatccatgtggtccgaagatctcagcatttttcttcttctcttgatcaagtgccgcgtctacagcaagaacgaagaagtgtccgaggtcctggacgtggacattgtcccactctggtgagccaggtccagcatgaacaggcgcaaatccgttcttaatcgtgaattcagccattctgtagacctggatactgcgctgattgacggggcctcgtccggggccatagatgcagggagggcagacaatgagtgttttcacaccggctgcttcgttggttgcaaggacgattttgtcaatgtctctgtgatgagcgctgtctggcagtgtgataatacgttcgatgtcatcgatgtcattgctatctcaaagttagtactttcttcgcgccatataggggtaaatagacttctcttactatttctgctctggaagtggatcttggccgtatctattgttgtcccagtcgtaccattgcagcaagctagtaccacagacatgaatccaatatccaggcttgtcagctgtgtgtccttctgaaagacccttggcaattgctttcgctgccggtagattgtccgaggagtctgcggtgtctgtggataatgatcagtgatcttgtttgttaagtacgaagctaaagtagaaattgacgtacggactacgatgtcagcctcggcggatgctttggcgatgacatcagaggagtccaaatctccgtatgcaaacttcgcctttgggtacttgtcggcgatctgtttggctttttcctcattgcgaaccaacaaagtgaactcagcttccgggtgagcttgagagatggagtatagggcttcgccaccgatgtagcctatgagacttgactgtcagctatcatcgtctagaacccgcattcccttcttctccagtatgatttgagctctggtgacgtaccggttgcgcctgtg

SEQ ID NO: 28958 - DNA, 891 bp, Muscodor strobelii
  misc_feature: SGI cDNA ID NO. 569940
  misc_feature: Encodes the peptide sequence at SEQ ID NO 28959
atggtagcagcagacgcagatggcaacaagccgtcgcccctcgtcgcgctgctcgcaggcggtatagcgggcggtgttgaggcagcatgtacatatcctttcgagttcgcaaaaactcgagtccaattatacggtcatgagggtgttcggaacccgtttgccgttgttgcaaaggttgctcgtcaggaaggtgttaagtcgctttataaaggatgttctacgatgatagtgggctcaataggtaaagacgcagtccgcttcgtaacatttgacagcatacgcactatgttcgaagacccggaaactcaccgtctcggcacggcacaatcgattgcttccggtatggtcgccggtgtcgtctcatcaactctcatcgtcaccccctccgagcgcataaaaacagcacttatcgacgatgccagaacatcccaacgcttcaaaagtccctggcattgcatagcgctcttgtacaaagagcagggcttcagaggagcgctctactccggatacgtcacaacgacgttgaagcagattggtactacgggctttagacttggtagttattcggcgattaaggattgggaacgggcaaaggggtggagtgttgatgggccggttgcgagctttgcgaatggggcggtggcaggaacgattacgacgcttgctacgcagccgtttgatacggtcaagacgaaggcgcagcaggcgaggaagacggggactatggactcggtgagggccattatgagggaggatggagtgagggggttttggaggggcaccgttatgaggttggggaggacggtgatggcgggtggtattttgttcacggctaatgaacaggctacgaggatattgaaggcgatattaggggagagggccttggcgtag

SEQ ID NO: 28959 - protein, 296 aa, Muscodor strobelii
  misc_feature: SGI Peptide ID NO. 569940
  misc_feature (204)..(290): Pfam Id: PF00153 Pfam Desc: Mitochondrial carrier protein
  misc_feature (12)..(101): Pfam Id: PF00153 Pfam Desc: Mitochondrial carrier protein
  misc_feature (106)..(199): Pfam Id: PF00153 Pfam Desc: Mitochondrial carrier protein
  misc_feature (8)..(293): NCBI GI: 156064497 Blast Desc: SS1G_00256 [Sclerotinia sclerotiorum 1980] gi|154691118|gb|EDN90856.1| SS1G_00256 [Sclerotinia sclerotiorum 1980]
  misc_feature (1)..(286): NCBI GI: 189204007 Blast Desc: tricarboxylate transport protein, mitochondrial precursor [Pyrenophora tritici-repentis Pt-1C-BFP] gi|187985438|gb|EDU50926.1| tricarboxylate transport protein,
  misc_feature (13)..(295): NCBI GI: 154323123 Blast Desc: BC1G_00904 [Botryotinia fuckeliana B05.10] gi|150848238|gb|EDN23431.1| BC1G_00904 [Botryotinia fuckeliana B05.10]
  misc_feature (5)..(288): NCBI GI: 145606751 Blast Desc: MGG_09441 [Magnaporthe grisea 70-15] gi|145014413|gb|EDJ98981.1| MGG_09441 [Magnaporthe grisea 70-15]
  misc_feature (11)..(286): NCBI GI: 189194898 Blast Desc: tricarboxylate transport protein, mitochondrial precursor [Pyrenophora tritici-repentis Pt-1C-BFP] gi|187979666|gb|EDU46292.1| tricarboxylate transport protein,
  misc_feature (12)..(286): NCBI GI: 242764321 Blast Desc: tricarboxylate transport protein, [Talaromyces stipitatus ATCC 10500] gi|218723943|gb|EED23360.1| tricarboxylate transport protein, [Talaromyces stipitatus ATCC 10500]
  misc_feature (11)..(286): NCBI GI: 169612920 Blast Desc: SNOG_09588 [Phaeosphaeria nodorum SN15] gi|111061733|gb|EAT82853.1| SNOG_09588 [Phaeosphaeria nodorum SN15]
  misc_feature (13)..(286): NCBI GI: 255949204 Blast Desc: Pc22g14450 [Penicillium chrysogenum Wisconsin 54-1255] gi|211592386|emb|CAP98733.1| Pc22g14450 [Penicillium chrysogenum Wisconsin 54-1255]
  misc_feature (13)..(286): NCBI GI: 115399968 Blast Desc: conserved [Aspergillus terreus NIH2624] gi|114191239|gb|EAU32939.1| conserved [Aspergillus terreus NIH2624]
  misc_feature (12)..(286): NCBI GI: 212529158 Blast Desc: tricarboxylate transport protein, [Penicillium marneffei ATCC 18224] gi|210074134|gb|EEA28221.1| tricarboxylate transport protein, [Penicillium marneffei ATCC 18224]
MVAADADGNKPSPLVALLAGGIAGGVEAACTYPFEFAKTRVQLYGHEGVRNPFAVVAKVARQEGVKSLYKGCSTMIVGSIGKDAVRFVTFDSIRTMFEDPETHRLGTAQSIASGMVAGVVSSTLIVTPSERIKTALIDDARTSQRFKSPWHCIALLYKEQGFRGALYSGYVTTTLKQIGTTGFRLGSYSAIKDWERAKGWSVDGPVASFANGAVAGTITTLATQPFDTVKTKAQQARKTGTMDSVRAIMREDGVRGFWRGTVMRLGRTVMAGGILFTANEQATRILKAILGERALA

SEQ ID NO: 28960 - DNA, 1390 bp, Muscodor strobelii
  misc_feature: SGI EST ID NO. CUFF.68488.0
  misc_feature: Variant of the nucleotide sequence at SEQ ID NO 28958
tctagacccgtttgaaaattgttcaattagaggcagcgatctatttcgtacgattcttactttctaatctttttgattgcactagactcggatccggtacgcttgaattaaagtagactaaaccagagagcgagcgagcgagcgatgcaccgatttctacggtcgtttaacttggcagcgctcaactcacgaatttacaacgatttatataaattcgacgaataattcatgaaaagaatatcacaaaaaggccaacaattccaccacattttcatcgtcatcgctgtcgcagaaaattcacacccgtcatcctcattgagtaggaccagaagagagtgaccgagaatggtagcagcagacgcagatggcaacaagccgtcgcccctcgtcgcgctgctcgcaggcggtatagcgggcggtgttgaggcagcatgtacatatcctttcgagttcgcaaaaactcgagtccaattatacggtcatgagggtgttcggaacccgtttgccgttgttgcaaaggttgctcgtcaggaaggtgttaagtcgctttataaaggatgttctacgatgatagtgggctcaataggtaaagacgcagtccgcttcgtaacatttgacagcatacgcactatgttcgaagacccggaaactcaccgtctcggcacggcacaatcgattgcttccggtatggtcgccggtgtcgtctcatcaactctcatcgtcaccccctccgagcgcataaaaacagcacttatcgacgatgccagaacatcccaacgcttcaaaagtccctggcattgcatagcgctcttgtacaaagagcagggcttcagaggagcgctctactccggatacgtcacaacgacgttgaagcagattggtactacgggctttagacttggtagttattcggcgattaaggattgggaacgggcaaaggggtggagtgttgatgggccggttgcgagctttgcgaatggggcggtggcaggaacgattacgacgcttgctacgcagccgtttgatacggtcaagacgaaggcgcagcaggcgaggaagacggggactatggactcggtgagggccattatgagggaggatggagtgagggggttttggaggggcaccgttatgaggttggggaggacggtgatggcgggtggtattttgttcacggctaatgaacaggctacgaggatattgaaggcgatattaggggagagggccttggcgtagaggatttagatacaattgtaaaacactttaaagatctagatgttcttgcgatgtgcgttctgaggagctggccttgaagtcaccacattgggtcacgccgtgtagcacaataccagtgttatcacactctggtaccattcagcgtgcccttttg

SEQ ID NO: 28961 - DNA, 1167 bp, Muscodor strobelii
  misc_feature: SGI cDNA ID NO. 569941
  misc_feature: Encodes the peptide sequence at SEQ ID NO 28962
atggataacggacaatctcacaattttggtcattttgggtactcccaagtcccttataatgcccaaacctcttctgcgcctttcaatctcatgccacagcagcaattctattccactctccctcaccatcacatcccaccccaccattccaaccaaaaccaacagcctgctcccaccaatgtttctcaactctacaactcacagagtcatggcacatattcgcagtcatcagctcgtcccgcggctggaattgaacccaagccgcactactccaaggaccgccgtgagaggggcagagacgccatagtccctccatccaaagcatccggtggtgtgcccgacccgacacccgaatacctcgcactctccagccatccgcctctgattctgcccgaaccccgcaacatcctcgtcgtcttcgatctcaacggcaccctcctgcagagacccaatcgaaagcgacctaccgagttctgcttgcgcccctttgcccacgagttcctcgagtactgcatcgagcacttcaccgttgccatctggtcctccgcccgccccgagaacgtcaaccagatggccaataccttcctgacgccagaggaacgcagcaaggtcatcgctgtatggggcagagaccgcttcggtctgacgcgcagtgactacgaggcccgagtccagtgctacaaacggctcaccttgctctggaatgaccccatcgtcgccgcgagccatcccgatgcggccaacgggggcaagtggagccaatccaatacagtcctggtcgatgactccgtggagaagagtcgcgccgagcccttcaatatgataaccatcccggagtacgacgctagtaatgacgagccatcaagtgtccctggtgccgtgttgccccaagtccatgattatttgaacgagttaagtcgacaagtcaacatcagcgcctacatccgccagaagcctttcaaggtcgataccgagtttagcctacctgaagataatgacctgagtgccacaccttcgggtaatcagatgtcaaagtccgcgagaaagagagacaggaagaagaagaaactggccagtcaggccagtcaggccatccagggaggcaatggtattaccaaaggtgagatccacgatcttcttcgggatgcgcagaatgcggggatgtaa

SEQ ID NO: 28962 - protein, 388 aa, Muscodor strobelii
  misc_feature: SGI Peptide ID NO. 569941
  misc_feature (74)..(330): NCBI GI: 46126045 Blast Desc: FG07400.1 [Gibberella zeae PH-1]
  misc_feature (99)..(320): NCBI GI: 154323189 Blast Desc: BC1G_00938 [Botryotinia fuckeliana B05.10] gi|150848271|gb|EDN23464.1| BC1G_00938 [Botryotinia fuckeliana B05.10]
  misc_feature (94)..(328): NCBI GI: 256731294 Blast Desc: NECHADRAFT_49361 [Nectria haematococca mpVI 77-13-4]
  misc_feature (98)..(342): NCBI GI: 85101770 Blast Desc: NCU03825 [Neurospora crassa OR74A] gi|28922755|gb|EAA31978.1| [Neurospora crassa OR74A] gi|38566794|emb|CAE76103.1| conserved [Neurospora crassa]
  misc_feature (99)..(337): NCBI GI: 156064427 Blast Desc: SS1G_00221 [Sclerotinia sclerotiorum 1980] gi|154691083|gb|EDN90821.1| SS1G_00221 [Sclerotinia sclerotiorum 1980]
  misc_feature (103)..(320): NCBI GI: 145605687 Blast Desc: MGG_06937 [Magnaporthe grisea 70-15] gi|145013489|gb|EDJ98130.1| MGG_06937 [Magnaporthe grisea 70-15]
  misc_feature (99)..(323): NCBI GI: 116198269 Blast Desc: CHGG_07290 [Chaetomium globosum CBS 148.51] gi|88178569|gb|EAQ86037.1| CHGG_07290 [Chaetomium globosum CBS 148.51]
  misc_feature (105)..(322): NCBI GI: 171694221 Blast Desc: protein product [Podospora anserina] gi|170947059|emb|CAP73864.1| protein product [Podospora anserina]
  misc_feature (54)..(356): NCBI GI: 189195558 Blast Desc: phosphoprotein phosphatase [Pyrenophora tritici-repentis Pt-1C-BFP] gi|187979996|gb|EDU46622.1| phosphoprotein phosphatase [Pyrenophora tritici-repentis
  misc_feature (112)..(356): NCBI GI: 169597481 Blast Desc: SNOG_01526 [Phaeosphaeria nodorum SN15] gi|111070055|gb|EAT91175.1| SNOG_01526 [Phaeosphaeria nodorum SN15]
MDNGQSHNFGHFGYSQVPYNAQTSSAPFNLMPQQQFYSTLPHHHIPPHHSNQNQQPAPTNVSQLYNSQSHGTYSQSSARPAAGIEPKPHYSKDRRERGRDAIVPPSKASGGVPDPTPEYLALSSHPPLILPEPRNILVVFDLNGTLLQRPNRKRPTEFCLRPFAHEFLEYCIEHFTVAIWSSARPENVNQMANTFLTPEERSKVIAVWGRDRFGLTRSDYEARVQCYKRLTLLWNDPIVAASHPDAANGGKWSQSNTVLVDDSVEKSRAEPFNMITIPEYDASNDEPSSVPGAVLPQVHDYLNELSRQVNISAYIRQKPFKVDTEFSLPEDNDLSATPSGNQMSKSARKRDRKKKKLASQASQAIQGGNGITKGEIHDLLRDAQNAGM

SEQ ID NO: 28963 - DNA, 960 bp, Muscodor strobelii
  misc_feature: SGI cDNA ID NO. 569942
  misc_feature: Encodes the peptide sequence at SEQ ID NO 28964
atgcctccggtcatgactagcaagcgtaaaatgccctttgatagcctgcaaaggcgagtccgccccagaaaggaagagccagagccagagctcgatgagtacagcgacgacttagacgaagaacaggatagcgaagacgatgaatctagtagcgagggtgaagaggagatagatgagtctggatcagcatccgaagaagacgacgaagaggaagaaggacaagaagatgctacatcagctctcgcgcaagtctctttcggtgcactcgcaaaagcacaagcctctttacccaacacacggaagaagaaaggccgccgtccaacagacgatgatagcgatcaagaagaagcctccgaacaagacaccaagcatccccgcaagcctgagtcgcagtctacgaagcgagaaaagcccacgcgcacatccaagcatgcccccacagaaatgtcatccaaacgccccgtcacccgaaaacgtgacgttgtcactgtccgtaaaccaccaccgcgtgatccccgtttctccgccgcttcagggcccgtagacgagagtcgtgctcggaaagcatatgcttttctagacgagtacagggattccgagatggctactctcaaagccgctatgcgcaagacgaagaacgccgaagccaaggaggaactgggccagaagttaaagtcgatgcagtcccgtaaagaagcacaggctaggaaagacaaagaagaggagttgctagcgaaacataggaagtccgagaaggagctggtagcgcagggaaagaaaccattctatctgaagaagagtgagcagaaggaactgctcctcaaggagcgcttcgcgggcatgaagaagaaacaagttgacaagactatcgagagaaagaggaagaagcttgctagcagagagaagaggaatttgcctatggagcgccggggtgcctctgatagggcgacttctatttga

SEQ ID NO: 28964 - protein, 319 aa, Muscodor strobelii
  misc_feature: SGI Peptide ID NO. 569942
  misc_feature (139)..(303): Pfam Id: PF06102 Pfam Desc: Domain of function (DUF947)
  misc_feature (67)..(311): NCBI GI: 46126043 Blast Desc: FG07399.1 [Gibberella zeae PH-1]
  misc_feature (12)..(315): NCBI GI: 171693691 Blast Desc: protein product [Podospora anserina] gi|170946794|emb|CAP73598.1| protein product [Podospora anserina]
  misc_feature (6)..(315): NCBI GI: 116198247 Blast Desc: CHGG_07279 [Chaetomium globosum CBS 148.51] gi|88178558|gb|EAQ86026.1| CHGG_07279 [Chaetomium globosum CBS 148.51]
  misc_feature (8)..(305): NCBI GI: 261351532 Blast Desc: rRNA processing protein [Verticillium albo-atrum VaMs.102]
  misc_feature (16)..(315): NCBI GI: 164426937 Blast Desc: NCU03824 [Neurospora crassa OR74A] gi|11595644|emb|CAC18264.1| conserved [Neurospora crassa] gi|157071538|gb|EAA31977.2| [Neurospora crassa OR74A]
  misc_feature (81)..(305): NCBI GI: 256730914 Blast Desc: NECHADRAFT_84625 [Nectria haematococca mpVI 77-13-4]
  misc_feature (79)..(310): NCBI GI: 154323187 Blast Desc: BC1G_00937 [Botryotinia fuckeliana B05.10] gi|150848270|gb|EDN23463.1| BC1G_00937 [Botryotinia fuckeliana B05.10]
  misc_feature (39)..(312): NCBI GI: 169597479 Blast Desc: SNOG_01525 [Phaeosphaeria nodorum SN15] gi|160707531|gb|EAT91174.2| SNOG_01525 [Phaeosphaeria nodorum SN15]
  misc_feature (80)..(310): NCBI GI: 156064429 Blast Desc: SS1G_00222 [Sclerotinia sclerotiorum 1980] gi|154691084|gb|EDN90822.1| SS1G_00222 [Sclerotinia sclerotiorum 1980]
  misc_feature (13)..(311): NCBI GI: 240110810 Blast Desc: CPC735_036720 [Coccidioides posadasii C735 delta SOWgp]
MPPVMTSKRKMPFDSLQRRVRPRKEEPEPELDEYSDDLDEEQDSEDDESSSEGEEEIDESGSASEEDDEEEEGQEDATSALAQVSFGALAKAQASLPNTRKKKGRRPTDDDSDQEEASEQDTKHPRKPESQSTKREKPTRTSKHAPTEMSSKRPVTRKRDVVTVRKPPPRDPRFSAASGPVDESRARKAYAFLDEYRDSEMATLKAAMRKTKNAEAKEELGQKLKSMQSRKEAQARKDKEEELLAKHRKSEKELVAQGKKPFYLKKSEQKELLLKERFAGMKKKQVDKTIERKRKKLASREKRNLPMERRGASDRATSI

SEQ ID NO: 28965 - DNA, 3199 bp, Muscodor strobelii
  misc_feature: SGI EST ID NO. CUFF.68511.0
  misc_feature: Variant of the nucleotide sequence at SEQ ID NO 28963
cttgtaccttattgcctatgagtgacgaagatgttatcttaaaagcgaggattataaggtacagtcctggtttaacatgcaattagaggtggcacgtattcacgatggaagaatgaaatgcaaggcatcagcaatcgttgtatcgtcaactgttctttcgtacactttctagtctagcaaaaacaccagcctgcattccagctcaaaattcgaagcaaagggtatcatccgttctctaaccgtcgctagtcgtacacacgatcatcttacatccccgcattctgcgcatcccgaagaagatcgtggatctcacctttggtaataccattgcctccctggatggcctgactggcctgactggccagtttcttcttcttcctgtctctctttctcgcggactttgacatctgattacccgaaggtgtggcactcaggtcattatcttcaggtaggctaaactcggtatcgaccttgaaaggcttctggcggatgtaggcgctgatgttgacttgtcgacttaactcgttcaaataatcatggacttggggcaacacggcaccagggacacttgatggctcgtcattactagcgtcgtactccgggatggttatcatattgaagggctcggcgcgactcttctccacggagtcatcgaccaggactgtattggattggctccacttgcccccgttggccgcatcgggatggctcgcggcgacgatggggtcattccagagcaaggtgagccgtttgtagcactggactcgggcctcgtagtcactgcgcgtcagaccgaagcggtctctgccccatacagcgatgaccttgctgcgttcctctggcgtcaggaaggtattggccatctggttgacgttctcggggcgggcggaggaccagatggcaacggtgaagtgctcgatgcagtactcgaggaactcgtgggcaaaggggcgcaagcagaactcggtaggtcgctttcgattgggtctctgcaggagggtgccgttgagatcgaagacgacgaggatgttgcggggttcgggcagaatcagaggcggatggctggagagtgcgaggtattcgggtgtcgggtcgggcacaccaccggatgctttggatggagggactatggcgtctctgcccctctcacggcggtccttggagtagtgcggcttgggttcaattccagccgcgggacgagctgatgactgcgaatatgtgccatgactctgtgagttgtagagttgagaaacattggtgggagcaggctgttggttttggttggaatggtggggtgggatgtgatggtgagggagagtggaatagaattgctgctgtggcatgagattgaaaggcgcagaagaggtttgggcattataagggacttgggagtacccaaaatgaccaaaattgtgagattgtccgttatccatcatgcagacagtcggcgaggcgcgcaggcgccttgaatgcgatctgttagtcgacgacgatgtacgtgtgaatgcggcatcagcaattggggctggttgtgtgggcgcaagtggacggcgatcacacgggagatgtcttctttgtctggcgaggttaagtgtctgtctacataagggcgaaagacggcgcaacatcaagaattgtctggaagtcatacgcgacacgccttccttgctctcagggcacagcacagcacagcacagcacagcacaaaaacaaatgaaactttgcgatgggaaatatagagaatgcaggcgaggcaggcgcatgtagatctggatctgatctgaatcgcatttggaaacaacggcgaacaaaggaagcaccgatggaaggtacgaggtacaatacagttgacggtaacttatcgataataagacccatagaaataattgacatgcagcttccagccttggatctacctactagacgtagacatcaatttggagctgggcaaccccaccattcgaacttctcccacacgtgccgaatctcacacgggcacttcgtattattcaggtctactgcatggctagatcctgagacgctatgcctccggtcatgactagcaagcgtaaaatgccctttgatagcctgcaaaggcgagtccgccccagaaaggaagagccagagccagagctcgatgagtacagcgacgacttagacgaagaacaggatagcgaagacgatgaatctagtagcgagggtgaagaggagatagatgagtctggatcagcatccgaagaagacgacgaagaggaagaaggacaagaagatgctacatcagctctcgcgcaagtctctttcggtgcactcgcaaaagcacaagcctctttacccaacacacggaagaagaaaggccgccgtccaacagacgatgatagcgatcaagaagaagcctccgaacaagacaccaagcatccccgcaagcctgagtcgcagtctacgaagcgagaaaagcccacgcgcacatccaagcatgcccccacagaaatgtcatccaaacgccccgtcacccgaaaacgtgacgttgtcactgtccgtaaaccaccaccgcgtgatccccgtttctccgccgcttcagggcccgtagacgagagtcgtgctcggaaagcatatgcttttctagacgagtacagggattccgagatggctactctcaaagccgctatgcgcaagacgaagaacgccgaagccaaggaggaactgggccagaagttaaagtcgatgcagtcccgtaaagaagcacaggctaggaaagacaaagaagaggagttgctagcgaaacataggaagtccgagaaggagctggtagcgcagggaaagaaaccattctatctgaagaagagtgagcagaaggaactgctcctcaaggagcgcttcgcgggcatgaagaagaaacaagttgacaagactatcgagagaaagaggaagaagcttgctagcagagagaagaggaatttgcctatggagcgccggggtgcctctgatagggcgacttctatttgaaagagctaatgtacggtgtcatactatgagcctacgatgttgaagatacccacatgtttatagttgttccgtgctcgttcaatgttattgcaacagaggttgtgtacaaaatacaccacctgaccactccatctcgataagaacatgaatcgtttcgcctgatgggcaaccgtatattctacatattatgccatag

SEQ ID NO: 28966 - DNA, 537 bp, Muscodor strobelii
  misc_feature: SGI cDNA ID NO. 569943
  misc_feature: Encodes the peptide sequence at SEQ ID NO 28967
atgaatcactcaaacgaagtagaaaagctttggctacgaatggatctggtaggcataacgatctataacttgggcgcctttacatccgggatatacatgatattttggtgtgagcctgtgccgcgcgctatctactggtcaatgattgcggccctcggatcgatgaacatcttaataatgacaaattccaagttccagactcgaaagcatcgcgtttttcgaactctggtgttcgcagcgactgctatatctggttttgcgccggtgattcacggctgcgttatatttggcgttccgcaaatgttaaaacaatctggattacccgggtatctggcacaatttttttttcttttcctcggggctgtagtttatggattcaagattcccgagagtcgatacccaggcaaattcgacatatggggctcctctcaccaaatcttccacttcctagttacactcgccgccgtgtcccatttgacaggaatattactagccttcgactatagtcacaacaaccggaattgtgcatcttattga

SEQ ID NO: 28967 - protein, 178 aa, Muscodor strobelii
  misc_feature: SGI Peptide ID NO. 569943
  misc_feature (1)..(159): Pfam Id: PF03006 Pfam Desc: Haemolysin-III related
  misc_feature (1)..(175): NCBI GI: 145228359 Blast Desc: An01g00400 [Aspergillus niger] gi|134054575|emb|CAK43430.1| protein product [Aspergillus niger]
  misc_feature (1)..(177): NCBI GI: 238841163 Blast Desc: hemolysin-III family protein [Microsporum canis CBS 113480]
  misc_feature (1)..(176): NCBI GI: 261352298 Blast Desc: adiponectin receptor protein [Verticillium albo-atrum VaMs.102]
  misc_feature (1)..(176): NCBI GI: 225681099 Blast Desc: adiponectin receptor protein [Paracoccidioides brasiliensis Pb03]
  misc_feature (1)..(175): NCBI GI: 255945465 Blast Desc: Pc20g10060 [Penicillium chrysogenum Wisconsin 54-1255] gi|211588235|emb|CAP86335.1| Pc20g10060 [Penicillium chrysogenum Wisconsin 54-1255]
  misc_feature (1)..(175): NCBI GI: 225561859 Blast Desc: hemolysin-III family protein [Ajellomyces capsulatus G186AR]
  misc_feature (1)..(172): NCBI GI: 240107174 Blast Desc: Hemolysin-III related family protein [Coccidioides posadasii C735 delta SOWgp]
  misc_feature (1)..(172): NCBI GI: 119190241 Blast Desc: CIMG_05168 [Coccidioides immitis RS]
  misc_feature (2)..(172): NCBI GI: 67537524 Blast Desc: AN4932.2 [Aspergillus nidulans FGSC A4] gi|40741820|gb|EAA61010.1| AN4932.2 [Aspergillus nidulans FGSC A4] gi|259482197|tpe|CBF76449.1| TPA: haemolysin-III channel FGSC
  misc_feature (2)..(172): NCBI GI: 238486970 Blast Desc: hemolysin-III channel protein Izh2, [Aspergillus flavus NRRL3357] gi|220699602|gb|EED55941.1| hemolysin-III channel protein Izh2, [Aspergillus flavus NRRL3357]
MNHSNEVEKLWLRMDLVGITIYNLGAFTSGIYMIFWCEPVPRAIYWSMIAALGSMNILIMTNSKFQTRKHRVFRTLVFAATAISGFAPVIHGCVIFGVPQMLKQSGLPGYLAQFFFLFLGAVVYGFKIPESRYPGKFDIWGSSHQIFHFLVTLAAVSHLTGILLAFDYSHNNRNCASY

SEQ ID NO: 28968 - DNA, 666 bp, Muscodor strobelii
  misc_feature: SGI cDNA ID NO. 569944
  misc_feature: Encodes the peptide sequence at SEQ ID NO 28969
atgtcgactactctcttatctggtgtgaaaatactgagcatatccatcgccctcgtcgcagctggtggcaacgcagcactgaatgtcttcgtggtcccacagctacagtcacagcctgcctctcgttcgctaccaagcattcgctgggccttcagtcgaggctcgcatatctttccagcagcggcttttatctcaagcgcagggtttacatgtcttgcttacagcgctctttcgcgttgtacgcgaggagtgcttcaactcatccgttttaatcagaacggaatgcgtgtgaacggatacttagcggctgcggcgctcaccctcggaattgcgcctttcacacgcatcatgcttccgacgaactttgcgttgatcaggaaaaacgagctattgggtggcgctcgcagcgcggatgcggctcagaaactccagaaaaatggcccatggcccggacaacgtagcacctcggacgctgtcagtggaaagggcgaaggagctgagcttaccgacctgagcggtccgcaagagcgtacagttctggattcaagcattcaagatgatgaagacgtgaggcgcttgctgtcggattttgcaaaactgaacgttgctaggattttgggcttgggggctggaggtatggttgcgctatgggcggcgctaatatga

SEQ ID NO: 28969 - protein, 221 aa, Muscodor strobelii
  misc_feature: SGI Peptide ID NO. 569944
  misc_feature (6)..(206): NCBI GI: 46116206 Blast Desc: FG03945.1 [Gibberella zeae PH-1]
  misc_feature (9)..(204): NCBI GI: 169626422 Blast Desc: SNOG_16498 [Phaeosphaeria nodorum SN15] gi|160705831|gb|EAT76103.2| SNOG_16498 [Phaeosphaeria nodorum SN15]
  misc_feature (9)..(221): NCBI GI: 189206297 Blast Desc: [Pyrenophora tritici-repentis Pt-1C-BFP] gi|187975576|gb|EDU42202.1| [Pyrenophora tritici-repentis Pt-1C-BFP]
  misc_feature (2)..(130): NCBI GI: 39974407 Blast Desc: [Magnaporthe grisea 70-15] gi|145018435|gb|EDK02714.1| [Magnaporthe grisea 70-15]
  misc_feature (26)..(220): NCBI GI: 154319530 Blast Desc: [Botryotinia fuckeliana B05.10] gi|150855904|gb|EDN31096.1| [Botryotinia fuckeliana B05.10]
MSTTLLSGVKILSISIALVAAGGNAALNVFVVPQLQSQPASRSLPSIRWAFSRGSHIFPAAAFISSAGFTCLAYSALSRCTRGVLQLIRFNQNGMRVNGYLAAAALTLGIAPFTRIMLPTNFALIRKNELLGGARSADAAQKLQKNGPWPGQRSTSDAVSGKGEGAELTDLSGPQERTVLDSSIQDDEDVRRLLSDFAKLNVARILGLGAGGMVALWAALI

SEQ ID NO: 28970 - DNA, 1555 bp, Muscodor strobelii
  misc_feature: SGI EST ID NO. CUFF.68502.0
  misc_feature: Variant of the nucleotide sequence at SEQ ID NO 28968
ctggatgttgcacgtgatagatatagacgttgactactgtgatttaatagttcaagattcccgagagtcgatacccaggcaaattcgacatatggggctcctctcaccaaatcttccacttcctagttacactcgccgccgtgtcccatttgacaggaatattactagccttcgactatagtcacaacaaccggaattgtgcatcttattgaaatatgtacattaatgtcatacgatgggtcattaccgtacgtttgtgccactatgcagttgaacttggtcccccttaccgattgcatattcgtggtcgcgtttggttgcctttcgaaaatgtgttgtttataaaattgagaacatggatctggaaacttggctcatgctttactctctcaatgatagactctctttcgggtgttgccacaggccggaaaactcggtatggatcctacaccgaggccgggctacctatgacttcatgacttctcgactaaacaggaatacgacgtgaagctaaacgggaaatcagtgaatcataaacagcattagacatgaggtacaatatatataggctcatgtaaggcctccaatccgccctgagatggggagactaaactgattccaattatcctgactacatagttagcaaagcttgtgggtgactgggacgcaaattgttcgcctaattaggtttagcccactgcatatttcctacttatactgagagtcgacattgctgctaattggtcaaacttgctgccagtattcaatatgtcgactactctcttatctggtgtgaaaatactgagcatatccatcgccctcgtcgcagctggtggcaacgcagcactgaatgtcttcgtggtcccacagctacagtcacagcctgcctctcgttcgctaccaagcattcgctgggccttcagtcgaggctcgcatatctttccagcagcggcttttatctcaagcgcagggtttacatgtcttgcttacagcgctctttcgcgttgtacgcgaggagtgcttcaactcatccgttttaatcagaacggaatgcgtgtgaacggatacttagcggctgcggcgctcaccctcggaattgcgcctttcacacgcatcatgcttccgacgaactttgcgttgatcaggaaaaacgagctattgggtggcgctcgcagcgcggatgcggctcagaaactccagaaaaatggcccatggcccggacaacgtagcacctcggacgctgtcagtggaaagggcgaaggagctgagcttaccgacctgagcggtccgcaagagcgtacagttctggattcaagcattcaagatgatgaagacgtgaggcgcttgctgtcggattttgcaaaactgaacgttgctaggattttgggcttgggggctggaggtatggttgcgctatgggcggcgctaatatgagcatacgataacaaagccgaatgtctatattattctagcgcccttagataattccgattaatccagtgatgcggcccatcacagtaatgtactgtcgatacattgaacattcaattccaac

SEQ ID NO: 28971 - DNA, 747 bp, Muscodor strobelii
  misc_feature: SGI cDNA ID NO. 569945
  misc_feature: Elevated expression when VOC is produced
  misc_feature: Encodes the peptide sequence at SEQ ID NO 28972
atgttgttgctgcagatcgggtcgttgatacatacagtcgtttatatcaccattcaggaaatcgtgtcttcgcgccgcaaacacgatacatcagcctcttcaaacaccaaggacatgaacacagaattctctgcagcgcctggtgtcagctatctattcacgatctattttacgaagctttcgatcctattactgtaccttcgactctttggcatccatcgtttcatgacgcgacttgtctacgcgagcatttgcggcataacaatcttctacgtgtcaattatcggggtcgaaattgggttcttggttgagtgcgataccttgcaacatacattggaacatcctctctgccacagtttcggttcggtgattcttctgactgcagtagcaaacactgtgactgatttttgggtactggtattaccattccgcccagttttgaatctacaacaacgcttccgccagaaacttgcactctttgccgtgtttgcaggcggcctgggggcctgtgcggcaagccttgctcggctggtagagatcgccatcggcgtcaataaccccaacagagttcgggaccaagataccaatgcaatttatagcgttgtcgaagttaatgtcggtattattgtcgccagcgcttcctcctttccagtcttctttaagcatgtacttaatcggttaagaaccaaaaagacgatgcccaagaaccgctcttacactcatctagagccaataagcagtacctaa

SEQ ID NO: 28972 - protein, 248 aa, Muscodor strobelii
  misc_feature: SGI Peptide ID NO. 569945
  misc_feature (2)..(223): NCBI GI: 67902906 Blast Desc: AN8440.2 [Aspergillus nidulans FGSC A4] gi|40747906|gb|EAA67062.1| AN8440.2 [Aspergillus nidulans FGSC A4]
  misc_feature (28)..(229): NCBI GI: 238489453 Blast Desc: conserved [Aspergillus flavus NRRL3357] gi|220698352|gb|EED54692.1| conserved [Aspergillus flavus NRRL3357]
  misc_feature (90)..(223): NCBI GI: 259484383 Blast Desc: TPA: conserved [Aspergillus nidulans FGSC A4]
  misc_feature (51)..(248): NCBI GI: 119483064 Blast Desc: plasma membrane protein Pth11, [Neosartorya fischeri NRRL 181] gi|119409715|gb|EAW19663.1| plasma membrane protein Pth11, [Neosartorya fischeri NRRL 181]
  misc_feature (6)..(243): NCBI GI: 115384840 Blast Desc: [Aspergillus terreus NIH2624] gi|114196659|gb|EAU38359.1| [Aspergillus terreus NIH2624]
  misc_feature (51)..(238): NCBI GI: 146324862 Blast Desc: plasma membrane protein Pth11-like [Aspergillus fumigatus Af293] gi|129556622|gb|EAL86859.2| plasma membrane protein Pth11-like, [Aspergillus fumigatus Af293] plasma membrane
  misc_feature (6)..(211): NCBI GI: 238841340 Blast Desc: integral membrane protein [Microsporum canis CBS 113480]
  misc_feature (16)..(241): NCBI GI: 67528508 Blast Desc: AN4452.2 [Aspergillus nidulans FGSC A4] gi|40741027|gb|EAA60217.1| AN4452.2 [Aspergillus nidulans FGSC A4] gi|259482731|tpe|CBF77490.1| TPA: 60S ribosomal protein L36
  misc_feature (51)..(248): NCBI GI: 121714873 Blast Desc: integral membrane protein [Aspergillus clavatus NRRL 1] gi|119403202|gb|EAW13620.1| integral membrane protein [Aspergillus clavatus NRRL 1]
  misc_feature (49)..(211): NCBI GI: 119193702 Blast Desc: CIMG_01228 [Coccidioides immitis RS]
  misc_feature: Useful for introducing or modulating the production of volatile compounds
MLLLQIGSLIHTVVYITIQEIVSSRRKHDTSASSNTKDMNTEFSAAPGVSYLFTIYFTKLSILLLYLRLFGIHRFMTRLVYASICGITIFYVSIIGVEIGFLVECDTLQHTLEHPLCHSFGSVILLTAVANTVTDFWVLVLPFRPVLNLQQRFRQKLALFAVFAGGLGACAASLARLVEIAIGVNNPNRVRDQDTNAIYSVVEVNVGIIVASASSFPVFFKHVLNRLRTKKTMPKNRSYTHLEPISST

SEQ ID NO: 28973 - DNA, 2338 bp, Muscodor strobelii
  misc_feature: SGI EST ID NO. CUFF.68536.0
  misc_feature: Variant of the nucleotide sequence at SEQ ID NO 28971
aaacaagtcgcttgaaaatacatcaatattgtcaattgaaattgatccacgacatttgtcttagtactattgcgcgctatccaaactattcaaattcgggcggatgtctacaggggatgatccacgtacttcagcacccgcaggggtaccacctccgggtgtcgctcccgacttcgccgattctcaatcaagtcatgtagtctacatcgtccttggcgtcttctttccgctcatgattattgctgtttcaatccgactatatgctcgcgttcggctcgtcaaaaactggtggtgggatgactatgcctgcatcattgctgctatcgggtcgttgatacatacagtcgtttatatcaccattcaggaaatcgtgtcttcgcgccgcaaacacgatacatcagcctcttcaaacaccaaggacatgaacacagaattctctgcagcgcctggtgtcagctatctattcacgatctattttacgaagctttcgatcctattactgtaccttcgactctttggcatccatcgtttcatgacgcgacttgtctacgcgagcatttgcggcataacaatcttctacgtgtcaattatcggggtcgaaattgggttcttggttgagtgcgataccttgcaacatacattggaacatcctctctgccacagtttcggttcggtgattcttctgactgcagtagcaaacactgtgactgatttttgggtactggtattaccattccgcccagttttgaatctacaacaacgcttccgccagaaacttgcactctttgccgtgtttgcaggcggcctgggggcctgtgcggcaagccttgctcggctggtagagatcgccatcggcgtcaataaccccaacagagttcgggaccaagataccaatgcaatttatagcgttgtcgaagttaatgtcggtattattgtcgccagcgcttcctcctttccagtcttctttaagcatgtacttaatcggttaagaaccaaaaagacgatgcccaagaaccgctcttacactcatctagagccaataagcagtacctaagtgcataacgtcactatttacgtttggcctcgtatgcagatataatgtcactgacggtataaatcgtacacgagtacgtgatatttccacgtgacttacactgattcgtctttatactgctcgatattaatccgagttctaatttacacaccgattgcgagtcatcatcaccaccatcgctccaaagctgagcgcaactaacacggcggcgctgatagcaattcgcgcaagagtaatcgtctctggcaccttggatattaggatggcaacaacactatgtatgatcagtattgggaatttggcctttattaagttttaatcacatgtccaagaccgttctgcacgacgtcggaggctaatgtgcgacactcccttcatcttgccgaaaagagtcttactactggctcattgaccagctgaaggtgacttgacaccgtctgtttcaatgccagggatctcttcacttccgcctcggtcacctgcaagggattcgtcgccatcgtcgcgaccactctccgggccgccttcatcctctgtgttatgttcttcattcggaaacccgaaatcttagccagcttcatcggcgttctcgttcccttttccactatgttttgttgcgtggggggttttgtgactgcaacgagcctgccaacctgtctgttgatatggacagggggattctagttgacgggaatttggtcaatatcaccgactaattgtgctcagctgtcttcttctcgatcgcggtattgttctgatgagtattgccgtcggccaaacttgggacacggcggaacccgtcctccgaagtgagaggcgaccgataaagctcgcacttgtcaggaagctgaaccggaccaatgtgaccagatgtggaagaaaaaagcggccttattaatcccttagctgcttgtagctggaggctctccagatgagcttgattatgcgctgaaccgatatccatatcgtcaacaccctccgttgtccgttgcttccttgagtagacatgcaagatcatgcatgaaagggaaatgcgtatataaatctagaccccataaatacccgtctgcaagtcatgaagctaagtactctggccgagcctaccaaagacgcttaggggggcccaagaacaaacttattagttggttgtaagaacggtaccgtgtaggatgtttaatcggctgagcaaatagaaacagaacagaatacctaatacataatgcgcattattgccagggtctcatggcacaggtaacatcagaatggctgttctggtagctcact

SEQ ID NO: 28974 - DNA, 861 bp, Muscodor strobelii
  misc_feature: SGI cDNA ID NO. 569946
  misc_feature: Encodes the peptide sequence at SEQ ID NO 28975
atgaagttatctctgcttgctgccgctttgttcttgtctccttttcatattgttcatgctgcttgcacaaccaaaactcaacgcaaagtctgggaggacttgacgaatgtagagaaagctgcctatattgatgccgagctgtgcttaatggcaactcctgcaagcccagatgtcaacgtccccggggcgcagaatgtctgggatgatgcggctatagtggcccaattccatatgtatgtgttggcgatctggaatgaacctgccgacgctggtgctctctctcagtctgcgctctttgatcctaccatagggtttggaggagacggatcaggggaaaatcgctgcattagagacggtccatttgccaatacggtgctccatattacagagccagatctggcagccggtgacatttgcttgtcgcgcgggttcaatcagacgatcttcgcgtttgccgcacagcacttcgttgacgactgccttcagttggatgtcttcaccgatttctccacttgtatgggagtctatcctctgggagccggccatggcggtgttggcgctataatggcggatcaaaggctgagtaccggtgatcctctcttttggcttcatcatggctggcttgacaagctttggtgggactggcaatcaagagacctcaacgaacgcttgttcgcaataggcggaaacaataccaatgcaggagttcctgttgacccgaacatcgttgagtactttggagatggcggaagcatcaccacacttgaacacacgttatggtcccatggcttagtccacaatgtcacaattcgagatgtcatggatattgggggtgaatttgtctgtgctgaattttcctag

SEQ ID NO: 28975 - protein, 286 aa, Muscodor strobelii
  misc_feature: SGI Peptide ID NO. 569946
  misc_feature (22)..(279): NCBI GI: 67540544 Blast Desc: AN6442.2 [Aspergillus nidulans FGSC A4] gi|40739274|gb|EAA58464.1| AN6442.2 [Aspergillus nidulans FGSC A4] gi|259479330|tpe|CBF69463.1| TPA: amino acid transporter FGSC
  misc_feature (5)..(285): NCBI GI: 240277823 Blast Desc: conserved [Ajellomyces capsulatus H143]
  misc_feature (23)..(285): NCBI GI: 145604204 Blast Desc: MGG_13937 [Magnaporthe grisea 70-15] gi|145012249|gb|EDJ96905.1| MGG_13937 [Magnaporthe grisea 70-15]
  misc_feature (3)..(285): NCBI GI: 170940291 Blast Desc: protein product [Podospora anserina]
  misc_feature (19)..(285): NCBI GI: 261356949 Blast Desc: conserved [Verticillium albo-atrum VaMs.102]
  misc_feature (20)..(285): NCBI GI: 116205217 Blast Desc: CHGG_10492 [Chaetomium globosum CBS 148.51] gi|88176620|gb|EAQ84088.1| CHGG_10492 [Chaetomium globosum CBS 148.51]
  misc_feature (17)..(231): NCBI GI: 225554517 Blast Desc: conserved [Ajellomyces capsulatus G186AR]
  misc_feature (16)..(285): NCBI GI: 116205692 Blast Desc: CHGG_02139 [Chaetomium globosum CBS 148.51] gi|88182736|gb|EAQ90204.1| CHGG_02139 [Chaetomium globosum CBS 148.51]
  misc_feature (13)..(285): NCBI GI: 154321706 Blast Desc: BC1G_01000 [Botryotinia fuckeliana B05.10] gi|150850247|gb|EDN25440.1| BC1G_01000 [Botryotinia fuckeliana B05.10]
  misc_feature (14)..(282): NCBI GI: 261202110 Blast Desc: conserved [Ajellomyces dermatitidis SLH14081] gi|239590366|gb|EEQ72947.1| conserved [Ajellomyces dermatitidis SLH14081] gi|239612075|gb|EEQ89062.1| conserved [Ajellomyces
  misc_feature (80)..(244): SWISSPROT Homolog: EC 1.14.18.1 Monophenol monooxygenase
MKLSLLAAALFLSPFHIVHAACTTKTQRKVWEDLTNVEKAAYIDAELCLMATPASPDVNVPGAQNVWDDAAIVAQFHMYVLAIWNEPADAGALSQSALFDPTIGFGGDGSGENRCIRDGPFANTVLHITEPDLAAGDICLSRGFNQTIFAFAAQHFVDDCLQLDVFTDFSTCMGVYPLGAGHGGVGAIMADQRLSTGDPLFWLHHGWLDKLWWDWQSRDLNERLFAIGGNNTNAGVPVDPNIVEYFGDGGSITTLEHTLWSHGLVHNVTIRDVMDIGGEFVCAEFS

SEQ ID NO: 28976 - DNA, 2185 bp, Muscodor strobelii
  misc_feature: SGI cDNA ID NO. 569947
  misc_feature: Encodes the peptide sequence at SEQ ID NO 28977
atgcgcctcctccagcggcaagatgacggaagcttgacgcttaccacattttccgacgacgacatcccgccctacgctatcctttcgcatacgtggggagaagaagacgaagaggttacctttcgggaggtcacagaaggcattacgctccagaaatacgactataaacagaagacaggctaccgaaaaatcgatttctgcgcgaatgcggccgccaatgacaaactacaatacttttgggtcgattcttgctgcatcgacaagtcgagcagtgccgagctccaagaggccatcacttccatgttccgatggtaccaaagtgcagcgaaatgctacgtatacttgtcggatgtgccccgcgataatgaacaacagcagcgagctttgtcacgaccagcctgggaattcgcctttcgtcaaagcagatggttcactagaggatggacgctgcaagagctcctcgccccacaatatgtcgagttcttttcaaaggaccgccaaaggctaggtatcaagacagagcttggtcagcttctacaagaagtgaccgggatcgctaccgatgctctccaaggaaagccactgtctaaattcagtcgtagcgaacaaatgtcttgggcccgaggcagggacacgaagcgtaaagaggacaaggcatactcgcttttaggcattttcgacgtttctatccctgtcatgtatggcgaaggcgaagaaaaggcaatggatcgactccatgcagagattgaccggcgctggggctctctacgcacccaggtatctcatttcatggtcccttttgggcgcaacgagaacttcgtcggacgggacgccatcctagagcggatactcgagaagattccgccaagttcgaacaaagatgactgccaatgcaccgccctcgaaggcctcggcggaatcggcaagactcagatcgccctcgaggccgcctaccaagtccgtgacagacattcggaatgttccgtcttttgggtcccagctgtcgacttgaccagctttgagaatgcgtatcgcaagatcggtcagctgcttcaactccccggcattaacgatgacaaagcagatgtgaagtcactggtcaaaacaggcctagagcagcaaaataccggcagctggctcttgatcgtcgataatgccgacgacgtgaagcttctcagcgcaatcctagccgactaccttccaaatagccaagaaggatcaattctcttcacgacgcgggaccacaagacaacagcgacgctcgatcttccaatcggcaatatatttgctgtccctgaaatgaatgatgatgaagctactgaattattacgaagaggcttgcgaaaggatcaaatagataatagagaaagcatacagcggctgctcagtttcttaacccatctacccctggccatcaaacaggcttcagcgttcatagcttcgaacacgaatattaccgtatcgaaatatctagagtcttgcgaattaagtgataccgacctgatcgaaatgctaagtgaagagttcgaagaccgccatcgatataaaggttgcgccaagaatcaaaatcccattgccacgacatggcttatctcatttgagaacatctctcgacacgaccctcaagcggctgattttcttaagtttatgtgctttctagccgaaaaagacattcccgtatccctccttcccgtcacatctaaaatcaaaatgaagaaagcaatcggtacgctcaaggcatacgcatttattacagagcgtggtacgccagaagcatttgatatacaccggctcgtccgactttccatgcggaactggctgcaaaagaaaagagagtgggagacacgatacactaatgtggtccagcgacttacagaggaatatccgtaccccgaacaagaaaataggcagacgtggatcaaatacttaccacatggacaagcagtgattaatactaatagaaccactactggagaaaataacactaatctactttttaacattgctgaaagctatttgttgcttggaaaatataatgaggcaggttatttataccggcagacattagagctgagggaagaggcgctaggccgcgagcatgcgaacacacttgccggtatgaacaagctcgccgtcgtcctcgataaccaagggaagcacgaggaggcggaggcgatgcaccggc

SEQ ID NO: 28977 - protein, 728 aa, Muscodor strobelii
  misc_feature: SGI Peptide ID NO. 569947
  misc_feature (25)..(152): Pfam Id: PF06985 Pfam Desc: Heterokaryon incompatibility protein (HET)
  misc_feature (1)..(726): NCBI GI: 156034877 Blast Desc: SS1G_13374 [Sclerotinia sclerotiorum 1980] gi|154698777|gb|EDN98515.1| SS1G_13374 [Sclerotinia sclerotiorum 1980]
  misc_feature (1)..(728): NCBI GI: 189197887 Blast Desc: kinesin light chain 1 [Pyrenophora tritici-repentis Pt-1C-BFP] gi|187981229|gb|EDU47855.1| kinesin light chain 1 [Pyrenophora tritici-repentis Pt-1C-BFP]
  misc_feature (1)..(645): NCBI GI: 156053556 Blast Desc: SS1G_05625 [Sclerotinia sclerotiorum 1980] gi|154703406|gb|EDO03145.1| SS1G_05625 [Sclerotinia sclerotiorum 1980]
  misc_feature (1)..(645): NCBI GI: 156041064 Blast Desc: SS1G_11511 [Sclerotinia sclerotiorum 1980] gi|154695894|gb|EDN95632.1| SS1G_11511 [Sclerotinia sclerotiorum 1980]
  misc_feature (1)..(664): NCBI GI: 154310212 Blast Desc: BC1G_07026 [Botryotinia fuckeliana B05.10] gi|150851587|gb|EDN26780.1| BC1G_07026 [Botryotinia fuckeliana B05.10]
  misc_feature (1)..(726): NCBI GI: 39971019 Blast Desc: MGG_02976 [Magnaporthe grisea 70-15] gi|149210559|ref|XP_001522654.1| MGCH7_ch7g754 [Magnaporthe grisea 70-15] gi|86196709|gb|EAQ71347.1| MGCH7_ch7g754 grisea
  misc_feature (262)..(728): NCBI GI: 171693841 Blast Desc: protein product [Podospora anserina] gi|170946869|emb|CAP73673.1| protein product [Podospora anserina]
  misc_feature (56)..(664): NCBI GI: 156050931 Blast Desc: SS1G_08054 [Sclerotinia sclerotiorum 1980] gi|154692453|gb|EDN92191.1| SS1G_08054 [Sclerotinia sclerotiorum 1980]
  misc_feature (1)..(726): NCBI GI: 189204674 Blast Desc: kinesin light chain [Pyrenophora tritici-repentis Pt-1C-BFP] gi|187985771|gb|EDU51259.1| kinesin light chain [Pyrenophora tritici-repentis Pt-1C-BFP]
  misc_feature (284)..(728): NCBI GI: 171691590 Blast Desc: protein product [Podospora anserina] gi|170945743|emb|CAP71856.1| protein product [Podospora anserina]
MRLLQRQDDGSLTLTTFSDDDIPPYAILSHTWGEEDEEVTFREVTEGITLQKYDYKQKTGYRKIDFCANAAANDKLQYFWVDSCCIDKSSSAELQEAITSMFRWYQSAAKCYVYLSDVPRDNEQQQRALSRPAWEFAFRQSRWFTRGWTLQELLAPQYVEFFSKDRQRLGIKTELGQLLQEVTGIATDALQGKPLSKFSRSEQMSWARGRDTKRKEDKAYSLLGIFDVSIPVMYGEGEEKAMDRLHAEIDRRWGSLRTQVSHFMVPFGRNENFVGRDAILERILEKIPPSSNKDDCQCTALEGLGGIGKTQIALEAAYQVRDRHSECSVFWVPAVDLTSFENAYRKIGQLLQLPGINDDKADVKSLVKTGLEQQNTGSWLLIVDNADDVKLLSAILADYLPNSQEGSILFTTRDHKTTATLDLPIGNIFAVPEMNDDEATELLRRGLRKDQIDNRESIQRLLSFLTHLPLAIKQASAFIASNTNITVSKYLESCELSDTDLIEMLSEEFEDRHRYKGCAKNQNPIATTWLISFENISRHDPQAADFLKFMCFLAEKDIPVSLLPVTSKIKMKKAIGTLKAYAFITERGTPEAFDIHRLVRLSMRNWLQKKREWETRYTNVVQRLTEEYPYPEQENRQTWIKYLPHGQAVINTNRTTTGENNTNLLFNIAESYLLLGKYNEAGYLYRQTLELREEALGREHANTLAGMNKLAVVLDNQGKHEEAEAMHR

SEQ ID NO: 28978 - DNA, 2747 bp, Muscodor strobelii
  misc_feature: SGI EST ID NO. CUFF.68576.1
  misc_feature: Variant of the nucleotide sequence at SEQ ID NO 28976
gtgatgatctagctctacgactaaatagaggaggcagaccgtaactccggctctcgcttgtacaagatgtacactgtatatgaagacggtagataaatactcgtgtgattccacgatctacttgggctacttgactacaacggtagatctttacatgttctgccctaggcgtacaacacgaacacggtacgttcaggcgcgtctgctggtcgcgtacagcatacgcgcttgggtcccatacgctgaaacggcaaagtggggaacatgagatcatcaaccctgggcttgacctacggacagccctacaaatctgcgaaccagcatgaaatacccaaaaacatgtcgcgctgtaaagaaagccatgcaatcggtcgaatggttcgaaatagtatgtatgcatctgcgtccagaggcaggctgaccacagctggtcacgtggctatgcaccctcaactcagcccccaaacgacatgccccgacccctcattctatgtagcctcgtctctttctacgatggcgaccctttacaccgcagacatctggtctcggcctcacaggcaaatcacctactatgcgcctcctccagcggcaagatgacggaagcttgacgcttaccacattttccgacgacgacatcccgccctacgctatcctttcgcatacgtggggagaagaagacgaagaggttacctttcgggaggtcacagaaggcattacgctccagaaatacgactataaacagaagacaggctaccgaaaaatcgatttctgcgcgaatgcggccgccaatgacaaactacaatacttttgggtcgattcttgctgcatcgacaagtcgagcagtgccgagctccaagaggccatcacttccatgttccgatggtaccaaagtgcagcgaaatgctacgtatacttgtcggatgtgccccgcgataatgaacaacagcagcgagctttgtcacgaccagcctgggaattcgcctttcgtcaaagcagatggttcactagaggatggacgctgcaagagctcctcgccccacaatatgtcgagttcttttcaaaggaccgccaaaggctaggtatcaagacagagcttggtcagcttctacaagaagtgaccgggatcgctaccgatgctctccaaggaaagccactgtctaaattcagtcgtagcgaacaaatgtcttgggcccgaggcagggacacgaagcgtaaagaggacaaggcatactcgcttttaggcattttcgacgtttctatccctgtcatgtatggcgaaggcgaagaaaaggcaatggatcgactccatgcagagattgaccggcgctggggctctctacgcacccaggtatctcatttcatggtcccttttgggcgcaacgagaacttcgtcggacgggacgccatcctagagcggatactcgagaagattccgccaagttcgaacaaagatgactgccaatgcaccgccctcgaaggcctcggcggaatcggcaagactcagatcgccctcgaggccgcctaccaagtccgtgacagacattcggaatgttccgtcttttgggtcccagctgtcgacttgaccagctttgagaatgcgtatcgcaagatcggtcagctgcttcaactccccggcattaacgatgacaaagcagatgtgaagtcactggtcaaaacaggcctagagcagcaaaataccggcagctggctcttgatcgtcgataatgccgacgacgtgaagcttctcagcgcaatcctagccgactaccttccaaatagccaagaaggatcaattctcttcacgacgcgggaccacaagacaacagcgacgctcgatcttccaatcggcaatatatttgctgtccctgaaatgaatgatgatgaagctactgaattattacgaagaggcttgcgaaaggatcaaatagataatagagaaagcatacagcggctgctcagtttcttaacccatctacccctggccatcaaacaggcttcagcgttcatagcttcgaacacgaatattaccgtatcgaaatatctagagtcttgcgaattaagtgataccgacctgatcgaaatgctaagtgaagagttcgaagaccgccatcgatataaaggttgcgccaagaatcaaaatcccattgccacgacatggcttatctcatttgagaacatctctcgacacgaccctcaagcggctgattttcttaagtttatgtgctttctagccgaaaaagacattcccgtatccctccttcccgtcacatctaaaatcaaaatgaagaaagcaatcggtacgctcaaggcatacgcatttattacagagcgtggtacgccagaagcatttgatatacaccggctcgtccgactttccatgcggaactggctgcaaaagaaaagagagtgggagacacgatacactaatgtggtccagcgacttacagaggaatatccgtaccccgaacaagaaaataggcagacgtggatcaaatacttaccacatggacaagcagtgattaatactaatagaaccactactggagaaaataacactaatctactttttaacattgctgaaagctatttgttgcttggaaaatataatgaggcaggttatttataccggcagacattagagctgagggaagaggcgctaggccgcgagcatgcgaacacacttgccggtatgaacaagctcgccgtcgtcctcgataaccaagggaagcacgaggaggcggaggcga

SEQ ID NO: 28979 - DNA, 1335 bp, Muscodor strobelii
  misc_feature: SGI cDNA ID NO. 569948
  misc_feature: Reduced expression when VOC is produced
  misc_feature: Encodes the peptide sequence at SEQ ID NO 28980
atggcactcacacgccaagaggcagagttggtcaacgagaccattcccgcgctgcgacgacatggcgagcacatttccacagtcttctacaagactatgctacgcgatcaccccgagctcaatcattacttcaacagtgtgaacatgcatactggtagacaaccccgcgcgctgacagctctcatactcgccttcgcgtccaacattaccaatattagcgaattgactctgaaactcgaacgtgttgcgcagaaacatgcttccctcatcgtacgccctgaacactatgagattgtggcaaaatacttgatccgagcattctctgccgttctcggcccggcgatgaccccggaggtgaatgctgcctggactaaagcgtattggctaatggcaaagatgctcagcggtcgtgagtccggtctgtaccacggattcggacactggaaagaatggagaacattcaagatcgtcaagaagaactcagagactagcgacggtgatattgtgtcgttctcactttcgccaatcgataccgtggctctccctactttcatgcctgggcaatatgttacgatccgtttgaaagtgaaggggttgaagtactttcagctacgccagtactcacttagcgatgcaccgcgtcccgattgttatcgcatcacggttaagagagatctaggtgcagtttcagcccccgcattagatccgaaacagtttgcctcttccgataacgaaccgccaatttcatctgctgcaagcagcgcttctgatgatagcctcggaagcatcagacctcaccggccaggcttggtgtcgaatgttctgatcgatgagtttcacgagggggatacaatcgaattgacacacccagccggagagttctatctcgacatgaaggatccgagtgttaccccagtggtcctcatttccgccggcgctggtgcagctcccttgttttcgatcttgaagactatctccgagcagaagaacgaccggcccgtttcttggattcaggtgtcgcgaacggatgcaccattccaaacacaggtggaggatattgtggggcagaattcaaacgttcaagcgaggttattccgctcgccaatggtggaggaagattccgtttcattgacgactcattttcaaaaggactgcgggacctcgaatccggaatacctctgggtccatgataacttaacacaatattttgtctgtggccctgagaaattcatggcagagatcaagaaatacttgcacgagagggtgtctgatccctcgaaagtgcgattcgagctatacagcgtgggcagtttcgaaatgaaaccagggaaatga

SEQ ID NO: 28980 - protein, 444 aa, Muscodor strobelii
  misc_feature: SGI Peptide ID NO. 569948
  misc_feature (7)..(104): Pfam Id: PF00042 Pfam Desc: Globin
  misc_feature (307)..(416): Pfam Id: PF00175 Pfam Desc: Oxidoreductase NAD-binding domain
  misc_feature (1)..(441): NCBI GI: 46107764 Blast Desc: FG00765.1 [Gibberella zeae PH-1]
  misc_feature (1)..(441): NCBI GI: 171695238 Blast Desc: protein product [Podospora anserina] gi|170947861|emb|CAP60025.1| protein product [Podospora anserina]
  misc_feature (1)..(443): NCBI GI: 164429692 Blast Desc: NCU02096 [Neurospora crassa OR74A] gi|157073581|gb|EAA34752.2| conserved [Neurospora crassa OR74A]
  misc_feature (1)..(441): NCBI GI: 116182228 Blast Desc: CHGG_01742 [Chaetomium globosum CBS 148.51] gi|88186039|gb|EAQ93507.1| CHGG_01742 [Chaetomium globosum CBS 148.51]
  misc_feature (1)..(436): NCBI GI: 166408944 Blast Desc: flavohemoglobin [Botryotinia fuckeliana]
  misc_feature (1)..(437): NCBI GI: 145249066 Blast Desc: An14g02460 [Aspergillus niger] gi|134081547|emb|CAK41983.1| protein product [Aspergillus niger]
  misc_feature (1)..(437): NCBI GI: 169782824 Blast Desc: [Aspergillus oryzae RIB40] gi|83774618|dbj|BAE64741.1| protein product [Aspergillus oryzae]
  misc_feature (1)..(437): NCBI GI: 238492475 Blast Desc: flavohemoprotein [Aspergillus flavus NRRL3357] gi|220695968|gb|EED52310.1| flavohemoprotein [Aspergillus flavus NRRL3357]
  misc_feature (1)..(437): NCBI GI: 115387639 Blast Desc: bacterial hemoglobin [Aspergillus terreus NIH2624] gi|114195409|gb|EAU37109.1| bacterial hemoglobin [Aspergillus terreus NIH2624]
  misc_feature (1)..(437): NCBI GI: 119487359 Blast Desc: flavohemoprotein [Neosartorya fischeri NRRL 181] gi|119410629|gb|EAW20575.1| flavohemoprotein [Neosartorya fischeri NRRL 181]
  misc_feature (3)..(430): SWISSPROT Homolog: EC 1.14.12.17 Nitric oxide dioxygenase
  misc_feature: Useful for introducing or modulating the production of volatile compounds
MALTRQEAELVNETIPALRRHGEHISTVFYKTMLRDHPELNHYFNSVNMHTGRQPRALTALILAFASNITNISELTLKLERVAQKHASLIVRPEHYEIVAKYLIRAFSAVLGPAMTPEVNAAWTKAYWLMAKMLSGRESGLYHGFGHWKEWRTFKIVKKNSETSDGDIVSFSLSPIDTVALPTFMPGQYVTIRLKVKGLKYFQLRQYSLSDAPRPDCYRITVKRDLGAVSAPALDPKQFASSDNEPPISSAASSASDDSLGSIRPHRPGLVSNVLIDEFHEGDTIELTHPAGEFYLDMKDPSVTPVVLISAGAGAAPLFSILKTISEQKNDRPVSWIQVSRTDAPFQTQVEDIVGQNSNVQARLFRSPMVEEDSVSLTTHFQKDCGTSNPEYLWVHDNLTQYFVCGPEKFMAEIKKYLHERVSDPSKVRFELYSVGSFEMKPGK

SEQ ID NO: 28981 - DNA, 492 bp, Muscodor strobelii
  misc_feature: SGI cDNA ID NO. 569949
  misc_feature: Encodes the peptide sequence at SEQ ID NO 28982
atgctttcccatacgcttggagctttcgttgttcttggtcttggagtaacggcgctcccacagccgtccaagacaacccgcgataaagcgactgcgacattacaggctctgtcttattctgcgacttttggaacgtatgattggcagagcccttactctgaagggcccaatggctacatcagatgggacgcagtttgggatgtatttgcaaatgacaattatattgagggcctacctggcttcgccgtcacgtgttcggggtcttttagcgacaagaaacccttggaaggtgcctggacgttatgcaaaggcttccctggggtcgcgaccgttgagggtcaaatgatttcaccgaatggtgacttccagaccaacattcggcataatgtcacgcagaatggcgccacaaccgttgttactgcatcagcagacccgtacgggagtgaagatgcgttcattttcaccgtcagtagtgtcgagaccgcctcatga

SEQ ID NO: 28982 - protein, 163 aa, Muscodor strobelii
  misc_feature: SGI Peptide ID NO. 569949
MLSHTLGAFVVLGLGVTALPQPSKTTRDKATATLQALSYSATFGTYDWQSPYSEGPNGYIRWDAVWDVFANDNYIEGLPGFAVTCSGSFSDKKPLEGAWTLCKGFPGVATVEGQMISPNGDFQTNIRHNVTQNGATTVVTASADPYGSEDAFIFTVSSVETAS

SEQ ID NO: 28983 - DNA, 1869 bp, Muscodor strobelii
  misc_feature: SGI cDNA ID NO. 569950
  misc_feature: Encodes the peptide sequence at SEQ ID NO 28984
atgctaggatccattgcgatatcgtccaacgaccgcgtctaccgcgaggacggagtgggctacaaaggattaagagcagctccaacccaatcgaatcatacgcttgccaccaatgttgatgtttcgatagctgcaccgacggtgcaagttgcaatcgatgaagcttctagttcagagagcgggttcattgcacctgaattctgggctacactcacacgggaagttgctggtatccgccagactctagaagattgcgaaggagaggagtctgaatacaatatagatgagacctccgctaacaagtatgaagaccgtcatcatgtgcggagtgcccagatactgctatttggacatcatccgcacaatgatctcatattgcctctgccccctccagcgatgcgagacctgctgcttgatatatacaaagagcgcgtggacagtgtctacaagttgttgcactggccaacggtgttgtcgagtatcatgtcgctgaatcagtctcatcgagatacgacgcggtgttcggctacatatgcgcttcaattttcgatatatttcatggcagtctgtacgctgagcgacgatgaagccgagcgaattctttcccgcagcaggcaagagttgattgctctctaccgcatagctgctggagcgtgccttggcgaggccaatctcctcggatgtcccgactttgccgttttacaggcatttgtcatttatattatgggactcagaacctcacagacgtgtgctacatcatggacattactcgctgttgcagttagaatagcaaaagcgctgcggctgggatcagaagatccgaagcgcttctctgttcttgatcttgaagtccgccgacgactttggttcggtctcggcgtgctcgatatgttcgccaccttcgatagaggcacagcaccgcttctcttgttggcagatttccgttctccaccgcgggacatggacgacgatgatttcagcggctttgattcagggcttggattacacgctccgcgctccggaatgcgagacatgaccttcttttcacatttgatctcagtaatgctatgctacaagacagtatcggagattccatcttacgctgaagatggctggaaagggtggtcgcagaagctagagttaatttcccagcttactcaccgggcagaagaaatgttgtccaagctacctgaaactatgtcgcctctacagaaacttctaagtcttaccacaaaggaaatcatcgccgctgccgccttgatgctacgaagacctcctttcaagagccagcggaatgatattccaccttgggacaactttgacgtcttggaagctgccgctgagactcttgaagggcagtccagaaagctctctgccgatcttgcaccatgggcctggaaggcctggagcccatggtatgcattggctgttgcacttgctgagctatgcaactcggaatggacgcctctttgtcgccgggcatatctgatttctcgggagacatatgacagggatattcatcgtgtagcagatggagctgcgggtatgctttggaagccaattgcgagactcatgcgccacgtggaggctatacatggaaaatacatcaatggttctcttagaccaagccccttgacttcatactcgccgaattcacttgatcaccaatcgagatatcaaattaatccgacttcgaccgagtatacacaacccgaacgtctctgcacacctggagataccacggatgagcattccgtgacaaatgataccacagatatgtccgcagtggatttcaatgaaaaggacttattcgattgggatcgatttctgaacgatgtagctgaactttctagcaaagaattttcttga

SEQ ID NO: 28984 - protein, 622 aa, Muscodor strobelii
  misc_feature: SGI Peptide ID NO. 569950
  misc_feature (230)..(324): Pfam Id: PF04082 Pfam Desc: Fungal specific transcription factor domain
  misc_feature (60)..(615): NCBI GI: 212532641 Blast Desc: conserved [Penicillium marneffei ATCC 18224] gi|210071841|gb|EEA25930.1| conserved [Penicillium marneffei ATCC 18224]
  misc_feature (60)..(531): NCBI GI: 242776089 Blast Desc: histone deacetylase, [Talaromyces stipitatus ATCC 10500] gi|218722393|gb|EED21811.1| histone deacetylase, [Talaromyces stipitatus ATCC 10500]
  misc_feature (62)..(525): NCBI GI: 145243482 Blast Desc: An11g02660 [Aspergillus niger] gi|134078942|emb|CAK40608.1| protein product [Aspergillus niger]
  misc_feature (62)..(532): NCBI GI: 212529926 Blast Desc: UV radiation resistance protein (UVRAG), [Penicillium marneffei ATCC 18224] gi|210074518|gb|EEA28605.1| UV radiation resistance protein (UVRAG), [Penicillium marneffei ATCC 18224]
  misc_feature (62)..(606): NCBI GI: 256730578 Blast Desc: NECHADRAFT_89749 [Nectria haematococca mpVI 77-13-4]
  misc_feature (62)..(611): NCBI GI: 46109266 Blast Desc: FG01515.1 [Gibberella zeae PH-1]
  misc_feature (49)..(538): NCBI GI: 121703011 Blast Desc: C6 transcription factor, [Aspergillus clavatus NRRL 1] gi|119397913|gb|EAW08344.1| C6 transcription factor, [Aspergillus clavatus NRRL 1]
  misc_feature (137)..(615): NCBI GI: 169769823 Blast Desc: [Aspergillus oryzae RIB40] gi|83767240|dbj|BAE57379.1| protein product [Aspergillus oryzae]
  misc_feature (67)..(525): NCBI GI: 156053876 Blast Desc: SS1G_05786 [Sclerotinia sclerotiorum 1980] gi|154703566|gb|EDO03305.1| SS1G_05786 [Sclerotinia sclerotiorum 1980]
  misc_feature (62)..(529): NCBI GI: 255932451 Blast Desc: Pc12g09550 [Penicillium chrysogenum Wisconsin 54-1255] gi|211582401|emb|CAP80582.1| Pc12g09550 [Penicillium chrysogenum Wisconsin 54-1255]
MLGSIAISSNDRVYREDGVGYKGLRAAPTQSNHTLATNVDVSIAAPTVQVAIDEASSSESGFIAPEFWATLTREVAGIRQTLEDCEGEESEYNIDETSANKYEDRHHVRSAQILLFGHHPHNDLILPLPPPAMRDLLLDIYKERVDSVYKLLHWPTVLSSIMSLNQSHRDTTRCSATYALQFSIYFMAVCTLSDDEAERILSRSRQELIALYRIAAGACLGEANLLGCPDFAVLQAFVIYIMGLRTSQTCATSWTLLAVAVRIAKALRLGSEDPKRFSVLDLEVRRRLWFGLGVLDMFATFDRGTAPLLLLADFRSPPRDMDDDDFSGFDSGLGLHAPRSGMRDMTFFSHLISVMLCYKTVSEIPSYAEDGWKGWSQKLELISQLTHRAEEMLSKLPETMSPLQKLLSLTTKEIIAAAALMLRRPPFKSQRNDIPPWDNFDVLEAAAETLEGQSRKLSADLAPWAWKAWSPWYALAVALAELCNSEWTPLCRRAYLISRETYDRDIHRVADGAAGMLWKPIARLMRHVEAIHGKYINGSLRPSPLTSYSPNSLDHQSRYQINPTSTEYTQPERLCTPGDTTDEHSVTNDTTDMSAVDFNEKDLFDWDRFLNDVAELSSKEFS

SEQ ID NO: 28985 - DNA, 3374 bp, Muscodor strobelii
  misc_feature: SGI EST ID NO. CUFF.68551.1
  misc_feature: Variant of the nucleotide sequence at SEQ ID NO 28983
catcaaccgtatcgaaattcttcttaaaaatgctccaacccaatcgaatcatacgcttgccaccaatgttgatgtttcgatagctgcaccgacggtgcaagttgcaatcgatgaagcttctagttcagagagcgggttcattgcacctgaattctgggctacactcacacgggaagttgctggtatccgccagactctagaagattgcgaaggagaggagtctgaatacaatatagatgagacctccgctaacaagtatgaagaccgtcatcatgtgcggagtgcccagatactgctatttggacatcatccgcacaatgatctcatattgcctctgccccctccagcgatgcgagacctgctgcttgatatatacaaagagcgcgtggacagtgtctacaagttgttgcactggccaacggtgttgtcgagtatcatgtcgctgaatcagtctcatcgagatacgacgcggtgttcggctacatatgcgcttcaattttcgatatatttcatggcagtctgtacgctgagcgacgatgaagccgagcgaattctttcccgcagcaggcaagagttgattgctctctaccgcatagctgctggagcgtgccttggcgaggccaatctcctcggatgtcccgactttgccgttttacaggcatttgtcatttatattatgggactcagaacctcacagacgtgtgctacatcatggacattactcgctgttgcagttagaatagcaaaagcgctgcggctgggatcagaagatccgaagcgcttctctgttcttgatcttgaagtccgccgacgactttggttcggtctcggcgtgctcgatatgttcgccaccttcgatagaggcacagcaccgcttctcttgttggcagatttccgttctccaccgcgggacatggacgacgatgatttcagcggctttgattcagggcttggattacacgctccgcgctccggaatgcgagacatgaccttcttttcacatttgatctcagtaatgctatgctacaagacagtatcggagattccatcttacgctgaagatggctggaaagggtggtcgcagaagctagagttaatttcccagcttactcaccgggcagaagaaatgttgtccaagctacctgaaactatgtcgcctctacagaaacttctaagtcttaccacaaaggaaatcatcgccgctgccgccttgatgctacgaagacctcctttcaagagccagcggaatgatattccaccttgggacaactttgacgtcttggaagctgccgctgagactcttgaagggcagtccagaaagctctctgccgatcttgcaccatgggcctggaaggcctggagcccatggtatgcattggctgttgcacttgctgagctatgcaactcggaatggacgcctctttgtcgccgggcatatctgatttctcgggagacatatgacagggatattcatcgtgtagcagatggagctgcgggtatgctttggaagccaattgcgagactcatgcgccacgtggaggctatacatggaaaatacatcaatggttctcttagaccaagccccttgacttcatactcgccgaattcacttgatcaccaatcgagatatcaaattaatccgacttcgaccgagtatacacaacccgaacgtctctgcacacctggagataccacggatgagcattccgtgacaaatgataccacagatatgtccgcagtggatttcaatgaaaaggacttattcgattgggatcgatttctgaacgatgtagctgaactttctagcaaagaattttcttgatccaatccactagcctattctaccgcacagctggcatcgtcatagtgcacatgcgcattaaggtactcatgggtaatgattgggctctcatgctccagcttcaacatagtgcttcgcccgcgacttttcaatctgtgtatccgcctgccactccacgatgacagcttactgctcactctttacgggcaaaatcttcccttcgtcatcgtaaaacaattccttcaccttaacattcctcaagtgactcacccctttactcatctcacagtcatgatggaaaagccaccatctcccttggaactcaacaatagaatgatgcgtcgtccatcccaaaacaggctccaagatcctaccagcatatgtaaacggtcctaacggcgaattaccaatagcgtacactaggtaatgcgtatcgcctgtcgagtagctgaaatagtacttgttctcacgcttatgcatccatgccgcctcgaagaaacgtctgtcgtgatccgacgctacgatcggcttgcccgtctccggagcgaggataattaggtccgtagccggcgatgcgaaagttcgcatatcagaagacaaaggtgcaacttttgggaaaagtgcgggtttgtcgtcgcctgaaggctcctgggggcctaaccacgacgaatcaaaaggtgggatgccatgaacatcagctttgctttccgatatgttctgatagcattgtaactgcccgccccagagccctccaaaatacaaatacgcatctccagtgtcgggatcaataaaggatgcagggtcaatactaaaactgcctggaattggctcaggatcagccttgaaaggacccgcgggcgaatccccgactgcgacaccaatgcgaaagatggagtctttatctcgcgcagggaaataaagatagtacttcccatcccggaaagcagcatcaggagcccaaagctgtttcgatacccacggtacgtcagccgtgcggagtactgctccgtgatccgttacgttatacggtggctctagagacgaagtgctgaagacgtggtaatcggccatgtcatattggtctccattatcattaaactgaatgtctgtctcacggtcatgcgatgggtagatgtaaaccttcccttcgaatacatgcgcggacgggtcagctgtgtagaggtgtgttatgagcggaggcgtcatgctgtagaacacaatatgttattttccacgattggaccagtttcggcaatgatatcaacatcaaagatacgctttgaggtatgctatgagaaatgattgatgaaggattttcgctcttagatttgtgaccaccgctctcttggataatatgatcgtgaagtggggttcttggtgttgaggggcagtaactgatcaatccgtacgagaaattttgatcctgacaagcaacgtgtttaaaatgaaacttcttccaatgacagtctgttgttatataactcgtacaccatcttcgacgcccccagctcactagttagagatgcaatgttcaattcggcggaacggacgccggggttcatcaatctatccg

SEQ ID NO: 28986 - DNA, 1833 bp, Muscodor strobelii
  misc_feature: SGI cDNA ID NO. 569951
  misc_feature: Encodes the peptide sequence at SEQ ID NO 28987
atgtgcggtcgcatcattcccgtatcatcctctctttgcgacgctccaacccaatcgaatcatacgcttgccaccaatgttgatgtttcgatagctgcaccgacggtgcaagttgcaatcgatgaagcttctagttcagagagcgggttcattgcacctgaattctgggctacactcacacgggaagttgctggtatccgccagactctagaagattgcgaaggagaggagtctgaatacaatatagatgagacctccgctaacaagtatgaagaccgtcatcatgtgcggagtgcccagatactgctatttggacatcatccgcacaatgatctcatattgcctctgccccctccagcgatgcgagacctgctgcttgatatatacaaagagcgcgtggacagtgtctacaagttgttgcactggccaacggtgttgtcgagtatcatgtcgctgaatcagtctcatcgagatacgacgcggtgttcggctacatatgcgcttcaattttcgatatatttcatggcagtctgtacgctgagcgacgatgaagccgagcgaattctttcccgcagcaggcaagagttgattgctctctaccgcatagctgctggagcgtgccttggcgaggccaatctcctcggatgtcccgactttgccgttttacaggcatttgtcatttatattatgggactcagaacctcacagacgtgtgctacatcatggacattactcgctgttgcagttagaatagcaaaagcgctgcggctgggatcagaagatccgaagcgcttctctgttcttgatcttgaagtccgccgacgactttggttcggtctcggcgtgctcgatatgttcgccaccttcgatagaggcacagcaccgcttctcttgttggcagatttccgttctccaccgcgggacatggacgacgatgatttcagcggctttgattcagggcttggattacacgctccgcgctccggaatgcgagacatgaccttcttttcacatttgatctcagtaatgctatgctacaagacagtatcggagattccatcttacgctgaagatggctggaaagggtggtcgcagaagctagagttaatttcccagcttactcaccgggcagaagaaatgttgtccaagctacctgaaactatgtcgcctctacagaaacttctaagtcttaccacaaaggaaatcatcgccgctgccgccttgatgctacgaagacctcctttcaagagccagcggaatgatattccaccttgggacaactttgacgtcttggaagctgccgctgagactcttgaagggcagtccagaaagctctctgccgatcttgcaccatgggcctggaaggcctggagcccatggtatgcattggctgttgcacttgctgagctatgcaactcggaatggacgcctctttgtcgccgggcatatctgatttctcgggagacatatgacagggatattcatcgtgtagcagatggagctgcgggtatgctttggaagccaattgcgagactcatgcgccacgtggaggctatacatggaaaatacatcaatggttctcttagaccaagccccttgacttcatactcgccgaattcacttgatcaccaatcgagatatcaaattaatccgacttcgaccgagtatacacaacccgaacgtctctgcacacctggagataccacggatgagcattccgtgacaaatgataccacagatatgtccgcagtggatttcaatgaaaaggacttattcgattgggatcgatttctgaacgatgtagctgaactttctagcaaagaattttcttga

SEQ ID NO: 28987 - protein, 610 aa, Muscodor strobelii
  misc_feature: SGI Peptide ID NO. 569951
  misc_feature (218)..(312): Pfam Id: PF04082 Pfam Desc: Fungal specific transcription factor domain
  misc_feature (48)..(603): NCBI GI: 212532641 Blast Desc: conserved [Penicillium marneffei ATCC 18224] gi|210071841|gb|EEA25930.1| conserved [Penicillium marneffei ATCC 18224]
  misc_feature (48)..(519): NCBI GI: 242776089 Blast Desc: histone deacetylase, [Talaromyces stipitatus ATCC 10500] gi|218722393|gb|EED21811.1| histone deacetylase, [Talaromyces stipitatus ATCC 10500]
  misc_feature (50)..(513): NCBI GI: 145243482 Blast Desc: An11g02660 [Aspergillus niger] gi|134078942|emb|CAK40608.1| protein product [Aspergillus niger]
  misc_feature (50)..(520): NCBI GI: 212529926 Blast Desc: UV radiation resistance protein (UVRAG), [Penicillium marneffei ATCC 18224] gi|210074518|gb|EEA28605.1| UV radiation resistance protein (UVRAG), [Penicillium marneffei ATCC 18224]
  misc_feature (50)..(594): NCBI GI: 256730578 Blast Desc: NECHADRAFT_89749 [Nectria haematococca mpVI 77-13-4]
  misc_feature (50)..(599): NCBI GI: 46109266 Blast Desc: FG01515.1 [Gibberella zeae PH-1]
  misc_feature (37)..(526): NCBI GI: 121703011 Blast Desc: C6 transcription factor, [Aspergillus clavatus NRRL 1] gi|119397913|gb|EAW08344.1| C6 transcription factor, [Aspergillus clavatus NRRL 1]
  misc_feature (125)..(603): NCBI GI: 169769823 Blast Desc: [Aspergillus oryzae RIB40] gi|83767240|dbj|BAE57379.1| protein product [Aspergillus oryzae]
  misc_feature (55)..(513): NCBI GI: 156053876 Blast Desc: SS1G_05786 [Sclerotinia sclerotiorum 1980] gi|154703566|gb|EDO03305.1| SS1G_05786 [Sclerotinia sclerotiorum 1980]
  misc_feature (50)..(517): NCBI GI: 255932451 Blast Desc: Pc12g09550 [Penicillium chrysogenum Wisconsin 54-1255] gi|211582401|emb|CAP80582.1| Pc12g09550 [Penicillium chrysogenum Wisconsin 54-1255]
MCGRIIPVSSSLCDAPTQSNHTLATNVDVSIAAPTVQVAIDEASSSESGFIAPEFWATLTREVAGIRQTLEDCEGEESEYNIDETSANKYEDRHHVRSAQILLFGHHPHNDLILPLPPPAMRDLLLDIYKERVDSVYKLLHWPTVLSSIMSLNQSHRDTTRCSATYALQFSIYFMAVCTLSDDEAERILSRSRQELIALYRIAAGACLGEANLLGCPDFAVLQAFVIYIMGLRTSQTCATSWTLLAVAVRIAKALRLGSEDPKRFSVLDLEVRRRLWFGLGVLDMFATFDRGTAPLLLLADFRSPPRDMDDDDFSGFDSGLGLHAPRSGMRDMTFFSHLISVMLCYKTVSEIPSYAEDGWKGWSQKLELISQLTHRAEEMLSKLPETMSPLQKLLSLTTKEIIAAAALMLRRPPFKSQRNDIPPWDNFDVLEAAAETLEGQSRKLSADLAPWAWKAWSPWYALAVALAELCNSEWTPLCRRAYLISRETYDRDIHRVADGAAGMLWKPIARLMRHVEAIHGKYINGSLRPSPLTSYSPNSLDHQSRYQINPTSTEYTQPERLCTPGDTTDEHSVTNDTTDMSAVDFNEKDLFDWDRFLNDVAELSSKEFS

SEQ ID NO: 28988 - DNA, 3374 bp, Muscodor strobelii; identical to SEQ ID NO: 28985
  misc_feature: SGI EST ID NO. CUFF.68551.1
  misc_feature: Variant of the nucleotide sequence at SEQ ID NO 28986

SEQ ID NO: 28989 - DNA, 1020 bp, Muscodor strobelii
  misc_feature: SGI cDNA ID NO. 569952
  misc_feature: Encodes the peptide sequence at SEQ ID NO 28990
atgacgcctccgctcataacacacctctacacagctgacccgtccgcgcatgtattcgaagggaaggtttacatctacccatcgcatgaccgtgagacagacattcagtttaatgataatggagaccaatatgacatggccgattaccacgtcttcagcacttcgtctctagagccaccgtataacgtaacggatcacggagcagtactccgcacggctgacgtaccgtgggtatcgaaacagctttgggctcctgatgctgctttccgggatgggaagtactatctttatttccctgcgcgagataaagactccatctttcgcattggtgtcgcagtcggggattcgcccgcgggtcctttcaaggctgatcctgagccaattccaggcagttttagtattgaccctgcatcctttattgatcccgacactggagatgcgtatttgtattttggagggctctggggcgggcagttacaatgctatcagaacatatcggaaagcaaagctgatgttcatggcatcccaccttttgattcgtcgtggttaggcccccaggagccttcaggcgacgacaaacccgcacttttcccaaaagttgcacctttgtcttctgatatgcgaactttcgcatcgccggctacggacctaattatcctcgctccggagacgggcaagccgatcgtagcgtcggatcacgacagacgtttcttcgaggcggcatggatgcataagcgtgagaacaagtactatttcagctactcgacaggcgatacgcattacctagtgtacgctattggtaattcgccgttaggaccgtttacatatgctggtaggatcttggagcctgttttgggatggacgacgcatcattctattgttgagttccaagggagatggtggcttttccatcatgactgtgagatgagtaaaggggtgagtcacttgaggaatgttaaggtgaaggaattgttttacgatgacgaagggaagattttgcccgtaaagagtgagcagtaa

SEQ ID NO: 28990 - protein, 339 aa, Muscodor strobelii
  misc_feature: SGI Peptide ID NO. 569952
  misc_feature (1)..(332): Pfam Id: PF04616 Pfam Desc: Glycosyl hydrolases family 43
  misc_feature (64)..(157): Pfam Id: PF04616 Pfam Desc: Glycosyl hydrolases family 43
  misc_feature (4)..(338): NCBI GI: 116193851 Blast Desc: conserved [Chaetomium globosum CBS 148.51] gi|88182556|gb|EAQ90024.1| conserved [Chaetomium globosum CBS 148.51]
  misc_feature (4)..(338): NCBI GI: 46130684 Blast Desc: FG08946.1 [Gibberella zeae PH-1] gi|50844274|gb|AAT84259.1| xylanase 32 [Gibberella zeae]
  misc_feature (4)..(339): NCBI GI: 261353408 Blast Desc: xylosidase/arabinosidase [Verticillium albo-atrum VaMs.102]
  misc_feature (4)..(338): NCBI GI: 256734278 Blast Desc: glycoside hydrolase family 43 [Nectria haematococca mpVI 77-13-4]
  misc_feature (4)..(336): NCBI GI: 39970889 Blast Desc: conserved [Magnaporthe grisea 70-15] gi|149210393|ref|XP_001522571.1| MGCH7_ch7g674 [Magnaporthe grisea 70-15] gi|86196629|gb|EAQ71267.1| MGCH7_ch7g674 grisea
  misc_feature (9)..(337): NCBI GI: 164429534 Blast Desc: xylosidase/arabinosidase [Neurospora crassa OR74A] gi|157073517|gb|EAA36295.2| xylosidase/arabinosidase [Neurospora crassa OR74A]
  misc_feature (2)..(332): NCBI GI: 115491103 Blast Desc: beta-xylosidase [Aspergillus terreus NIH2624] gi|114197039|gb|EAU38739.1| beta-xylosidase [Aspergillus terreus NIH2624]
  misc_feature (4)..(332): NCBI GI: 29837135 Blast Desc: xylosidase [Penicillium herquei]
  misc_feature (2)..(335): NCBI GI: 169766526 Blast Desc: [Aspergillus oryzae RIB40] gi|238483257|ref|XP_002372867.1| xylosidase, [Aspergillus flavus NRRL3357] gi|83765589|dbj|BAE55732.1| protein product oryzae]
  misc_feature (2)..(332): NCBI GI: 121719761 Blast Desc: xylosidase, [Aspergillus clavatus NRRL 1] gi|119404791|gb|EAW15153.1| xylosidase, [Aspergillus clavatus NRRL 1]
  misc_feature (5)..(338): SWISSPROT Homolog: EC 3.2.1.55 Alpha-N-arabinofuranosidase
  misc_feature (5)..(338): SWISSPROT Homolog: EC 3.2.1.37 Xylan 1,4-beta-xylosidase
MTPPLITHLYTADPSAHVFEGKVYIYPSHDRETDIQFNDNGDQYDMADYHVFSTSSLEPPYNVTDHGAVLRTADVPWVSKQLWAPDAAFRDGKYYLYFPARDKDSIFRIGVAVGDSPAGPFKADPEPIPGSFSIDPASFIDPDTGDAYLYFGGLWGGQLQCYQNISESKADVHGIPPFDSSWLGPQEPSGDDKPALFPKVAPLSSDMRTFASPATDLIILAPETGKPIVASDHDRRFFEAAWMHKRENKYYFSYSTGDTHYLVYAIGNSPLGPFTYAGRILEPVLGWTTHHSIVEFQGRWWLFHHDCEMSKGVSHLRNVKVKELFYDDEGKILPVKSEQ

SEQ ID NO: 28991 - DNA, 1909 bp, Muscodor strobelii
  misc_feature: SGI EST ID NO. CUFF.68551.2
  misc_feature: Variant of the nucleotide sequence at SEQ ID NO 28989
cggatagattgatgaaccccggcgtccgttccgccgaattgaacattgcatctctaactagtgagctgggggcgtcgaagatggtgtacgagttatataacaacagactgtcattggaagaagtttcattttaaacacgttgcttgtcaggatcaaaatttctcgtacggattgatcagttactgcccctcaacaccaagaaccccacttcacgatcatattatccaagagagcggtggtcacaaatctaagagcgaaaatccttcatcaatcatttctcatagcatacctcaaagcgtatctttgatgttgatatcattgccgaaactggtccaatcgtggaaaataacatattgtgttctacagcatgacgcctccgctcataacacacctctacacagctgacccgtccgcgcatgtattcgaagggaaggtttacatctacccatcgcatgaccgtgagacagacattcagtttaatgataatggagaccaatatgacatggccgattaccacgtcttcagcacttcgtctctagagccaccgtataacgtaacggatcacggagcagtactccgcacggctgacgtaccgtgggtatcgaaacagctttgggctcctgatgctgctttccgggatgggaagtactatctttatttccctgcgcgagataaagactccatctttcgcattggtgtcgcagtcggggattcgcccgcgggtcctttcaaggctgatcctgagccaattccaggcagttttagtattgaccctgcatcctttattgatcccgacactggagatgcgtatttgtattttggagggctctggggcgggcagttacaatgctatcagaacatatcggaaagcaaagctgatgttcatggcatcccaccttttgattcgtcgtggttaggcccccaggagccttcaggcgacgacaaacccgcacttttcccaaaagttgcacctttgtcttctgatatgcgaactttcgcatcgccggctacggacctaattatcctcgctccggagacgggcaagccgatcgtagcgtcggatcacgacagacgtttcttcgaggcggcatggatgcataagcgtgagaacaagtactatttcagctactcgacaggcgatacgcattacctagtgtacgctattggtaattcgccgttaggaccgtttacatatgctggtaggatcttggagcctgttttgggatggacgacgcatcattctattgttgagttccaagggagatggtggcttttccatcatgactgtgagatgagtaaaggggtgagtcacttgaggaatgttaaggtgaaggaattgttttacgatgacgaagggaagattttgcccgtaaagagtgagcagtaagctgtcatcgtggagtggcaggcggatacacagattgaaaagtcgcgggcgaagcactatgttgaagctggagcatgagagcccaatcattacccatgagtaccttaatgcgcatgtgcactatgacgatgccagctgtgcggtagaataggctagtggattggatcaagaaaattctttgctagaaagttcagctacatcgttcagaaatcgatcccaatcgaataagtccttttcattgaaatccactgcggacatatctgtggtatcatttgtcacggaatgctcatccgtggtatctccaggtgtgcagagacgttcgggttgtgtatactcggtcgaagtcggattaatttgatatctcgattggtgatcaagtgaattcggcgagtatgaagtcaaggggcttggtctaagagaaccattgatgtattttccatgtatagcctccacgtggcgcatgagtctcgcaactgaaaacgatccttttgttagtgaccggttatctgaattgcacttgaa

SEQ ID NO: 28992 - DNA, 3474 bp, Muscodor strobelii
  misc_feature: SGI cDNA ID NO. 569953
  misc_feature: Encodes the peptide sequence at SEQ ID NO 28993
atgatcgaccgggatcccgcagaagatgctctcgaccacgatgctgcagccctcgtgcaattcaatcacagcgatgcccgacatctcactccgcctgtcccgagtggaactctcttgccgggtccgattgccagcgccgtgagcctcgctacaagatccacgtccttcgcccttcgtatcggtaccgtcatcagcggctacggcctcggcgctgccaaggttacaactctttctagcttggaaatcggccgtggtatactcgaggggattcttagtagagcaggtcgtgatgtcttcgccggatcgtgctcggatatggctcgcgccgacgctgagtccatcttagaacgaagtttggaaagtttgcatcggaccatgtcgcagattgtcttttggacagctactggatttcacatgacgggaaccactgtgtctgccgcatcccagatatcccagctgtttctatctgtgctagatcagttcttcggctcaaccgactcttctcgcgccattgcgagcattatcaccctgatccgtcgggaattccagaatcctgccacgggtgttcaaggcgagaaagtcggcgtaacggatctacttctgggcctatgtggtctcgcgtatctccagaactggtgttggaggctgattcaggaggaatctcgacaactagggttcgaagagatcatttgggacgtcgtggtcttgaatgatggtgaacgaatcgataccgctcaaggtgatctctcagtcgcaaatcgtatctcctccggcgagccatcaggcacagaggacctactcgaggcaatcaaacgacacggggcacgacggaatagcacagatgacgaagatgacctccctgaaatgcaactaaaacgacagataacaaagtctcttcccagcgatgcagaggtgtctatatcgacatcgaccacaacgactaaaataattactgtcgatatcaaaggggccccggggatgtcgattccttcactcccaggtctaaatcctgtagagagtgaggtcagtccactggaagatgactcgcccaatgaagccaaccaaaattcaaattacagggtggtatacaaggtaagccgaaacagtattcggagaacctcgaatgatagtcaaaacgatgatgacgatggccgatcgtttgtcaaagaggtggatgacgaggtcgagcctacacagcccccagcgacaccagtcatggaaaagccaccgccagttccacccaaagcagctcgtccaacctttgcatcatcagctcgggatcgaggcagctctcctcctgagaactccacaagagtccgctcgcctgggtcgaggagtccacctacgttgggtgatgttttgtccaaggacctgcttgtcagtccgaatgagcacagcgcaaatcaaaagcgagcccggaaaccggttgacgactcgaataagaagcccaaagatttgacccttcaaattcccccaattggcagcaaactgcctgttcggaaacctgatcgaccaccggaacctacgtcaggaagaagcagcgaaaagaagaccgggcttcgatccgtactcaagaaaggatccgtcccaacaatttctaacattttgagtcgcgattccagttccgataacttggacggctcaaaagcaagaacaggtcctagagctccgtggtcaggtcacaagaatcaacctagtaaaccggcaatctcacaacagcggcgtgcaggtccggaccgaagtgttaccttaataccaaaccgagatcctcctcgaccacctcaaagaggtaatccaaatttcttttcgtcaagggacctgggttaccaggatgcgcgcggtactaactcctatcctaaatcaccttatccgccaccacaagatcaccgacgaagttcgattatatctcttactgataccttttcggtccattcctacgagagccgtccttcgaccccaacgcgtcattctgatgacaccagagcgagtaacgcaacgccaacgcctaaaataacatttaatgctggatcgaatactccgtcttctcagcgacaccaacatcgaccgagttccgcgactagcctttatactcccagcatatacacactaaagacgagagactcgcaagcatcacttgtggtatcgtcattccacccaaagagtgcctacagcgactccgacgctctagaccttttgagacgatccggtggcgtgagtggaatgtttcccgattctcactttttgcgtaacgtaactcgctacagccgcttcgcttcggcggtctatggttccaactttctcaagctcatgggtatttccaaagagcaacccgcattgaacataacagacgagacgcattacgacgtccgttcctttgctcaccatgccaaattgccacccgacagcattctcttgtcgtccttcgtcgatccccaaggtggatctgattctaccggatcgacggacacaggcattcctcttgtacatactgtggccctcgacgaggaagccaaagctgtcgtcctgacctgccgaggcactctcggattcgaagatgtgcttgcagacatgatgtgcgaatatgatgatctatccttgaggggtacaacgtatcaagttcataagggaatacatgcatctgctcgacgtcttctttacgggggtgatggacgggtactgtacacaatcaaggaggctctggaagaatttccagactacggtttggttctctgtggccactctcttggcggctctgttacttcgctgctcggagccatgttggcagagcccgcttgcaatggcatcggatttgtaacttcggccgagcagcaccaaaggcgtctaacacctggaaatcaacaacagagttctgctcatgtgtgtttgccctctggtcgacccattcacgtgtatgcatacgggccgcctgcaaccatgtcaccatctcttcaaaaagccacgagaggactcattacgagtatcatccatggccatgaccttgtcccttatttgtctcttggtgtattgcacgatttccaggcccttgctcttgctttcaagactgacaacaatgaagccaaagcggaactaagacggcgaatttgggagggtctccgctccggtctcgctgacaagtggtacaacaataatatcaagcaatctgacgaagaggatgataagtgggcatatgtggctttgaaaaccttgcgtgccagcatgatgagcccaaaattgttgccccccggtgaagttttcacagtcgagagtacgccagtcatgagaagagaagctttcacgcaggaaacaataggccagcatctcgggcggcctgcgagcagaattgtgctcaaatacatccgcgatgtggaaacgaggttccgagaggtccgcttcggagcaagcatgttactggaccatagcccaggacgatacgaagatgcccttaggcgtttaactttgggagttgtcacttag

SEQ ID NO: 28993 - protein, 1157 aa, Muscodor strobelii
  misc_feature: SGI Peptide ID NO. 569953
  misc_feature (841)..(1009): Pfam Id: PF01764 Pfam Desc: Lipase (class 3)
  misc_feature (8)..(1156): NCBI GI: 85118886 Blast Desc: NCU01901 [Neurospora crassa OR74A] gi|28927342|gb|EAA36296.1| NCU01901 [Neurospora crassa OR74A]
  misc_feature (27)..(1156): NCBI GI: 171676211 Blast Desc: protein product [Podospora anserina] gi|170936171|emb|CAP60831.1| protein product [Podospora anserina]
  misc_feature (34)..(1156): NCBI GI: 261353407 Blast Desc: conserved [Verticillium albo-atrum VaMs.102]
  misc_feature (24)..(1155): NCBI GI: 256733771 Blast Desc: NECHADRAFT_67740 [Nectria haematococca mpVI 77-13-4]
  misc_feature (31)..(1156): NCBI GI: 46130682 Blast Desc: FG08945.1 [Gibberella zeae PH-1]
  misc_feature (37)..(1156): NCBI GI: 39970893 Blast Desc: MGG_02913 [Magnaporthe grisea 70-15] gi|145017262|gb|EDK01625.1| MGG_02913 [Magnaporthe grisea 70-15]
  misc_feature (71)..(1156): NCBI GI: 156031034 Blast Desc: SS1G_14125 [Sclerotinia sclerotiorum 1980] gi|154700516|gb|EDO00255.1| SS1G_14125 [Sclerotinia sclerotiorum 1980]
  misc_feature (37)..(1156): NCBI GI: 149210397 Blast Desc: MGCH7_ch7g676 [Magnaporthe grisea 70-15] gi|86196631|gb|EAQ71269.1| MGCH7_ch7g676 [Magnaporthe grisea 70-15]
  misc_feature (20)..(1156): NCBI GI: 121703994 Blast Desc: lipase, [Aspergillus clavatus NRRL 1] gi|119398405|gb|EAW08835.1| lipase, [Aspergillus clavatus NRRL 1]
  misc_feature (8)..(1156): NCBI GI: 119467312 Blast Desc: lipase, [Neosartorya fischeri NRRL 181] gi|119405614|gb|EAW15565.1| lipase, [Neosartorya fischeri NRRL 181]
MIDRDPAEDALDHDAAALVQFNHSDARHLTPPVPSGTLLPGPIASAVSLATRSTSFALRIGTVISGYGLGAAKVTTLSSLEIGRGILEGILSRAGRDVFAGSCSDMARADAESILERSLESLHRTMSQIVFWTATGFHMTGTTVSAASQISQLFLSVLDQFFGSTDSSRAIASIITLIRREFQNPATGVQGEKVGVTDLLLGLCGLAYLQNWCWRLIQEESRQLGFEEIIWDVVVLNDGERIDTAQGDLSVANRISSGEPSGTEDLLEAIKRHGARRNSTDDEDDLPEMQLKRQITKSLPSDAEVSISTSTTTTKIITVDIKGAPGMSIPSLPGLNPVESEVSPLEDDSPNEANQNSNYRVVYKVSRNSIRRTSNDSQNDDDDGRSFVKEVDDEVEPTQPPATPVMEKPPPVPPKAARPTFASSARDRGSSPPENSTRVRSPGSRSPPTLGDVLSKDLLVSPNEHSANQKRARKPVDDSNKKPKDLTLQIPPIGSKLPVRKPDRPPEPTSGRSSEKKTGLRSVLKKGSVPTISNILSRDSSSDNLDGSKARTGPRAPWSGHKNQPSKPAISQQRRAGPDRSVTLIPNRDPPRPPQRGNPNFFSSRDLGYQDARGTNSYPKSPYPPPQDHRRSSIISLTDTFSVHSYESRPSTPTRHSDDTRASNATPTPKITFNAGSNTPSSQRHQHRPSSATSLYTPSIYTLKTRDSQASLVVSSFHPKSAYSDSDALDLLRRSGGVSGMFPDSHFLRNVTRYSRFASAVYGSNFLKLMGISKEQPALNITDETHYDVRSFAHHAKLPPDSILLSSFVDPQGGSDSTGSTDTGIPLVHTVALDEEAKAVVLTCRGTLGFEDVLADMMCEYDDLSLRGTTYQVHKGIHASARRLLYGGDGRVLYTIKEALEEFPDYGLVLCGHSLGGSVTSLLGAMLAEPACNGIGFVTSAEQHQRRLTPGNQQQSSAHVCLPSGRPIHVYAYGPPATMSPSLQKATRGLITSIIHGHDLVPYLSLGVLHDFQALALAFKTDNNEAKAELRRRIWEGLRSGLADKWYNNNIKQSDEEDDKWAYVALKTLRASMMSPKLLPPGEVFTVESTPVMRREAFTQETIGQHLGRPASRIVLKYIRDVETRFREVRFGASMLLDHSPGRYEDALRRLTLGVVT

SEQ ID NO: 28994 - DNA, 4229 bp, Muscodor strobelii
  misc_feature: SGI EST ID NO. CUFF.68539.0
  misc_feature: Variant of the nucleotide sequence at SEQ ID NO 28992
tggcgatttagaacttgaaaatcgcaagactgaaagccttaaccaggtcaactggacaagcccaaggcttctctactgctacagctggctctccatgctttgttggcgcccacgagaccttagcgttcgcatcacaggtgcttgacctttaaggtttcccacttcccaacataactggtttcagaccaacaaaacggtcacgtccactactccacgtttgccactacgtccacctgagatgcaaacactctcaatctgcggtgctgttcttccgtagatggttgtcgcttccgagcatgtacatcccgcggctaggacagtgagcaacaccactgtcatccctaccgtgcatacctcggcccatattgcattgcattccatagacgcgcttctcttatggctctttacattgctacctagaatactccgtgattgttatatttcgtacgcatcagagcattcatagacgtgacaaatgacggccggtacgcgcctctctttgacgactcaagtcctattgctaccattccaccatgatcgaccgggatcccgcagaagatgctctcgaccacgatgctgcagccctcgtgcaattcaatcacagcgatgcccgacatctcactccgcctgtcccgagtggaactctcttgccgggtccgattgccagcgccgtgagcctcgctacaagatccacgtccttcgcccttcgtatcggtaccgtcatcagcggctacggcctcggcgctgccaaggttacaactctttctagcttggaaatcggccgtggtatactcgaggggattcttagtagagcaggtcgtgatgtcttcgccggatcgtgctcggatatggctcgcgccgacgctgagtccatcttagaacgaagtttggaaagtttgcatcggaccatgtcgcagattgtcttttggacagctactggatttcacatgacgggaaccactgtgtctgccgcatcccagatatcccagctgtttctatctgtgctagatcagttcttcggctcaaccgactcttctcgcgccattgcgagcattatcaccctgatccgtcgggaattccagaatcctgccacgggtgttcaaggcgagaaagtcggcgtaacggatctacttctgggcctatgtggtctcgcgtatctccagaactggtgttggaggctgattcaggaggaatctcgacaactagggttcgaagagatcatttgggacgtcgtggtcttgaatgatggtgaacgaatcgataccgctcaaggtgatctctcagtcgcaaatcgtatctcctccggcgagccatcaggcacagaggacctactcgaggcaatcaaacgacacggggcacgacggaatagcacagatgacgaagatgacctccctgaaatgcaactaaaacgacagataacaaagtctcttcccagcgatgcagaggtgtctatatcgacatcgaccacaacgactaaaataattactgtcgatatcaaaggggccccggggatgtcgattccttcactcccaggtctaaatcctgtagagagtgaggtcagtccactggaagatgactcgcccaatgaagccaaccaaaattcaaattacagggtggtatacaaggtaagccgaaacagtattcggagaacctcgaatgatagtcaaaacgatgatgacgatggccgatcgtttgtcaaagaggtggatgacgaggtcgagcctacacagcccccagcgacaccagtcatggaaaagccaccgccagttccacccaaagcagctcgtccaacctttgcatcatcagctcgggatcgaggcagctctcctcctgagaactccacaagagtccgctcgcctgggtcgaggagtccacctacgttgggtgatgttttgtccaaggacctgcttgtcagtccgaatgagcacagcgcaaatcaaaagcgagcccggaaaccggttgacgactcgaataagaagcccaaagatttgacccttcaaattcccccaattggcagcaaactgcctgttcggaaacctgatcgaccaccggaacctacgtcaggaagaagcagcgaaaagaagaccgggcttcgatccgtactcaagaaaggatccgtcccaacaatttctaacattttgagtcgcgattccagttccgataacttggacggctcaaaagcaagaacaggtcctagagctccgtggtcaggtcacaagaatcaacctagtaaaccggcaatctcacaacagcggcgtgcaggtccggaccgaagtgttaccttaataccaaaccgagatcctcctcgaccacctcaaagaggtaatccaaatttcttttcgtcaagggacctgggttaccaggatgcgcgcggtactaactcctatcctaaatcaccttatccgccaccacaagatcaccgacgaagttcgattatatctcttactgataccttttcggtccattcctacgagagccgtccttcgaccccaacgcgtcattctgatgacaccagagcgagtaacgcaacgccaacgcctaaaataacatttaatgctggatcgaatactccgtcttctcagcgacaccaacatcgaccgagttccgcgactagcctttatactcccagcatatacacactaaagacgagagactcgcaagcatcacttgtggtatcgtcattccacccaaagagtgcctacagcgactccgacgctctagaccttttgagacgatccggtggcgtgagtggaatgtttcccgattctcactttttgcgtaacgtaactcgctacagccgcttcgcttcggcggtctatggttccaactttctcaagctcatgggtatttccaaagagcaacccgcattgaacataacagacgagacgcattacgacgtccgttcctttgctcaccatgccaaattgccacccgacagcattctcttgtcgtccttcgtcgatccccaaggtggatctgattctaccggatcgacggacacaggcattcctcttgtacatactgtggccctcgacgaggaagccaaagctgtcgtcctgacctgccgaggcactctcggattcgaagatgtgcttgcagacatgatgtgcgaatatgatgatctatccttgaggggtacaacgtatcaagttcataagggaatacatgcatctgctcgacgtcttctttacgggggtgatggacgggtactgtacacaatcaaggaggctctggaagaatttccagactacggtttggttctctgtggccactctcttggcggctctgttacttcgctgctcggagccatgttggcagagcccgcttgcaatggcatcggatttgtaacttcggccgagcagcaccaaaggcgtctaacacctggaaatcaacaacagagttctgctcatgtgtgtttgccctctggtcgacccattcacgtgtatgcatacgggccgcctgcaaccatgtcaccatctcttcaaaaagccacgagaggactcattacgagtatcatccatggccatgaccttgtcccttatttgtctcttggtgtattgcacgatttccaggcccttgctcttgctttcaagactgacaacaatgaagccaaagcggaactaagacggcgaatttgggagggtctccgctccggtctcgctgacaagtggtacaacaataatatcaagcaatctgacgaagaggatgataagtgggcatatgtggctttgaaaaccttgcgtgccagcatgatgagcccaaaattgttgccccccggtgaagttttcacagtcgagagtacgccagtcatgagaagagaagctttcacgcaggaaacaataggccagcatctcgggcggcctgcgagcagaattgtgctcaaatacatccgcgatgtggaaacgaggttccgagaggtccgcttcggagcaagcatgttactggaccatagcccaggacgatacgaagatgcccttaggcgtttaactttgggagttgtcacttagtaggcttgtgagaaggaggtccacgacgctatgccacgtcggtgtgagtaaagatcttggaaggggaagccctcgcattggatcaacggtgagagcacgatgaaggatacgatcaatgccataaatttagaagtagagaggactgcaattgggttttgagtgtacgcaacatacccatcagtattgaatctatctagtagtacaataattccccgattcgca

SEQ ID NO: 28995 - DNA, 1254 bp, Muscodor strobelii
  misc_feature: SGI cDNA ID NO. 569954
  misc_feature: Encodes the peptide sequence at SEQ ID NO 28996
atgtttcccgattctcactttttgcgtaacgtaactcgctacagccgcttcgcttcggcggtctatggttccaactttctcaagctcatgggtatttccaaagagcaacccgcattgaacataacagacgagacgcattacgacgtccgttcctttgctcaccatgccaaattgccacccgacagcattctcttgtcgtccttcgtcgatccccaaggtggatctgattctaccggatcgacggacacaggcattcctcttgtacatactgtggccctcgacgaggaagccaaagctgtcgtcctgacctgccgaggcactctcggattcgaagatgtgcttgcagacatgatgtgcgaatatgatgatctatccttgaggggtacaacgtatcaagttcataagggaatacatgcatctgctcgacgtcttctttacgggggtgatggacgggtactgtacacaatcaaggaggctctggaagaatttccagactacggtttggttctctgtggccactctcttggcggctctgttacttcgctgctcggagccatgttggcagagcccgcttgcaatggcatcggatttgtaacttcggccgagcagcaccaaaggcgtctaacacctggaaatcaacaacagagttctgctcatgtgtgtttgccctctggtcgacccattcacgtgtatgcatacgggccgcctgcaaccatgtcaccatctcttcaaaaagccacgagaggactcattacgagtatcatccatggccatgaccttgtcccttatttgtctcttggtgtattgcacgatttccaggcccttgctcttgctttcaagactgacaacaatgaagccaaagcggaactaagacggcgaatttgggagggtctccgctccggtctcgctgacaagtggtacaacaataatatcaagcaatctgacgaagaggatgataagtgggcatatgtggctttgaaaaccttgcgtgccagcatgatgagcccaaaattgttgccccccggtgaagttttcacagtcgagagtacgccagtcatgagaagagaagctttcacgcaggaaacaataggccagcatctcgggcggcctgcgagcagaattgtgctcaaatacatccgcgatgtggaaacgaggttccgagaggtccgcttcggagcaagcatgttactggaccatagcccaggacgatacgaagatgcccttaggcgtttaactttgggagttgtcacttag

SEQ ID NO: 28996 - protein, 417 aa, Muscodor strobelii
  misc_feature: SGI Peptide ID NO. 569954
  misc_feature (101)..(269): Pfam Id: PF01764 Pfam Desc: Lipase (class 3)
  misc_feature (1)..(416): NCBI GI: 171676211 Blast Desc: protein product [Podospora anserina] gi|170936171|emb|CAP60831.1| protein product [Podospora anserina]
  misc_feature (1)..(416): NCBI GI: 85118886 Blast Desc: NCU01901 [Neurospora crassa OR74A] gi|28927342|gb|EAA36296.1| NCU01901 [Neurospora crassa OR74A]
  misc_feature (1)..(416): NCBI GI: 46130682 Blast Desc: FG08945.1 [Gibberella zeae PH-1]
  misc_feature (2)..(416): NCBI GI: 256733771 Blast Desc: NECHADRAFT_67740 [Nectria haematococca mpVI 77-13-4]
  misc_feature (2)..(416): NCBI GI: 156031034 Blast Desc: SS1G_14125 [Sclerotinia sclerotiorum 1980] gi|154700516|gb|EDO00255.1| SS1G_14125 [Sclerotinia sclerotiorum 1980]
  misc_feature (1)..(416): NCBI GI: 261353407 Blast Desc: conserved [Verticillium albo-atrum VaMs.102]
  misc_feature (1)..(416): NCBI GI: 149210397 Blast Desc: MGCH7_ch7g676 [Magnaporthe grisea 70-15] gi|86196631|gb|EAQ71269.1| MGCH7_ch7g676 [Magnaporthe grisea 70-15]
  misc_feature (1)..(416): NCBI GI: 39970893 Blast Desc: MGG_02913 [Magnaporthe grisea 70-15] gi|145017262|gb|EDK01625.1| MGG_02913 [Magnaporthe grisea 70-15]
  misc_feature (1)..(416): NCBI GI: 261189149 Blast Desc: lipase [Ajellomyces dermatitidis SLH14081] gi|239591771|gb|EEQ74352.1| lipase [Ajellomyces dermatitidis SLH14081]
  misc_feature (1)..(416): NCBI GI: 239614687 Blast Desc: lipase [Ajellomyces dermatitidis ER-3]
MFPDSHFLRNVTRYSRFASAVYGSNFLKLMGISKEQPALNITDETHYDVRSFAHHAKLPPDSILLSSFVDPQGGSDSTGSTDTGIPLVHTVALDEEAKAVVLTCRGTLGFEDVLADMMCEYDDLSLRGTTYQVHKGIHASARRLLYGGDGRVLYTIKEALEEFPDYGLVLCGHSLGGSVTSLLGAMLAEPACNGIGFVTSAEQHQRRLTPGNQQQSSAHVCLPSGRPIHVYAYGPPATMSPSLQKATRGLITSIIHGHDLVPYLSLGVLHDFQALALAFKTDNNEAKAELRRRIWEGLRSGLADKWYNNNIKQSDEEDDKWAYVALKTLRASMMSPKLLPPGEVFTVESTPVMRREAFTQETIGQHLGRPASRIVLKYIRDVETRFREVRFGASMLLDHSPGRYEDALRRLTLGVVT

SEQ ID NO: 28997 - DNA, 4229 bp, Muscodor strobelii; identical to SEQ ID NO: 28994
  misc_feature: SGI EST ID NO. CUFF.68539.0
  misc_feature: Variant of the nucleotide sequence at SEQ ID NO 28995

SEQ ID NO: 28998 - DNA, 903 bp, Muscodor strobelii
  misc_feature: SGI cDNA ID NO. 569955
  misc_feature: Encodes the peptide sequence at SEQ ID NO 28999
atgtgcgaatatgatgatctatccttgaggggtacaacgtatcaagttcataagggaatacatgcatctgctcgacgtcttctttacgggggtgatggacgggtactgtacacaatcaaggaggctctggaagaatttccagactacggtttggttctctgtggccactctcttggcggctctgttacttcgctgctcggagccatgttggcagagcccgcttgcaatggcatcggatttgtaacttcggccgagcagcaccaaaggcgtctaacacctggaaatcaacaacagagttctgctcatgtgtgtttgccctctggtcgacccattcacgtgtatgcatacgggccgcctgcaaccatgtcaccatctcttcaaaaagccacgagaggactcattacgagtatcatccatggccatgaccttgtcccttatttgtctcttggtgtattgcacgatttccaggcccttgctcttgctttcaagactgacaacaatgaagccaaagcggaactaagacggcgaatttgggagggtctccgctccggtctcgctgacaagtggtacaacaataatatcaagcaatctgacgaagaggatgataagtgggcatatgtggctttgaaaaccttgcgtgccagcatgatgagcccaaaattgttgccccccggtgaagttttcacagtcgagagtacgccagtcatgagaagagaagctttcacgcaggaaacaataggccagcatctcgggcggcctgcgagcagaattgtgctcaaatacatccgcgatgtggaaacgaggttccgagaggtccgcttcggagcaagcatgttactggaccatagcccaggacgatacgaagatgcccttaggcgtttaactttgggagttgtcacttag

SEQ ID NO: 28999 - protein, 300 aa, Muscodor strobelii
  misc_feature: SGI Peptide ID NO. 569955
  misc_feature (6)..(152): Pfam Id: PF01764 Pfam Desc: Lipase (class 3)
  misc_feature (38)..(152): Pfam Id: PF01764 Pfam Desc: Lipase (class 3)
  misc_feature (2)..(299): NCBI GI: 171676211 Blast Desc: protein product [Podospora anserina] gi|170936171|emb|CAP60831.1| protein product [Podospora anserina]
  misc_feature (2)..(299): NCBI GI: 85118886 Blast Desc: NCU01901 [Neurospora crassa OR74A] gi|28927342|gb|EAA36296.1| NCU01901 [Neurospora crassa OR74A]
  misc_feature (2)..(299): NCBI GI: 156031034 Blast Desc: SS1G_14125 [Sclerotinia sclerotiorum 1980] gi|154700516|gb|EDO00255.1| SS1G_14125 [Sclerotinia sclerotiorum 1980]
  misc_feature (2)..(299): NCBI GI: 46130682 Blast Desc: FG08945.1 [Gibberella zeae PH-1]
  misc_feature (2)..(298): NCBI GI: 256733771 Blast Desc: NECHADRAFT_67740 [Nectria haematococca mpVI 77-13-4]
  misc_feature (2)..(299): NCBI GI: 154305601 Blast Desc: BC1G_07615 [Botryotinia fuckeliana B05.10] gi|150853134|gb|EDN28326.1| BC1G_07615 [Botryotinia fuckeliana B05.10]
  misc_feature (2)..(299): NCBI GI: 261353407 Blast Desc: conserved [Verticillium albo-atrum VaMs.102]
  misc_feature (2)..(299): NCBI GI: 39970893 Blast Desc: MGG_02913 [Magnaporthe grisea 70-15] gi|145017262|gb|EDK01625.1| MGG_02913 [Magnaporthe grisea 70-15]
  misc_feature (2)..(299): NCBI GI: 149210397 Blast Desc: MGCH7_ch7g676 [Magnaporthe grisea 70-15] gi|86196631|gb|EAQ71269.1| MGCH7_ch7g676 [Magnaporthe grisea 70-15]
  misc_feature (2)..(299): NCBI GI: 239614687 Blast Desc: lipase [Ajellomyces dermatitidis ER-3]
MCEYDDLSLRGTTYQVHKGIHASARRLLYGGDGRVLYTIKEALEEFPDYGLVLCGHSLGGSVTSLLGAMLAEPACNGIGFVTSAEQHQRRLTPGNQQQSSAHVCLPSGRPIHVYAYGPPATMSPSLQKATRGLITSIIHGHDLVPYLSLGVLHDFQALALAFKTDNNEAKAELRRRIWEGLRSGLADKWYNNNIKQSDEEDDKWAYVALKTLRASMMSPKLLPPGEVFTVESTPVMRREAFTQETIGQHLGRPASRIVLKYIRDVETRFREVRFGASMLLDHSPGRYEDALRRLTLGVVT

SEQ ID NO: 29000 - DNA, 4229 bp, Muscodor strobelii; identical to SEQ ID NO: 28994
  misc_feature: SGI EST ID NO. CUFF.68539.0
  misc_feature: Variant of the nucleotide sequence at SEQ ID NO 28998

SEQ ID NO: 29001 - DNA, 513 bp, Muscodor strobelii
  misc_feature: SGI cDNA ID NO. 569956
  misc_feature: Reduced expression when VOC is produced
  misc_feature: Encodes the peptide sequence at SEQ ID NO 29002
atgtcagaacagggccttttctcgacggaccttgtgtccccgtccgtcgcctcggcgcttcccgaaggctacatcgctcgctccctccgcctctccgactacgatgccggcttcctcgattgcctcagggtcttgacaactgtcggcgagatttccaaagaggcgtttgaggagaggtacaactggatattatcacaagacacctactacattctagtcgtagaagacacgagcaccggcaaggttgtgggcacgggcaatttgttggtcgagaggaagttcattcacagcctgggcctggttggccacatcgaggatattgccgtcgccaaagaccagcaaggcaagaagctcgggcttcgacttatccaagcgctcgacttcatcgccgaaaaagtgggctgctacaagaccatccttgattgcagcgaagccaacgagggcttctacgttaaatgcggcttccgacgcgctggcctcgagatggcccactactacgagagcaagaaatga

SEQ ID NO: 29002 - protein, 170 aa, Muscodor strobelii
  misc_feature: SGI Peptide ID NO. 569956
  misc_feature (74)..(156): Pfam Id: PF00583 Pfam Desc: Acetyltransferase (GNAT) family
  misc_feature (1)..(170): NCBI GI: 261353406 Blast Desc: glucosamine 6-phosphate N-acetyltransferase [Verticillium albo-atrum VaMs.102]
  misc_feature (1)..(170): NCBI GI: 116193849 Blast Desc: CHGG_06642 [Chaetomium globosum CBS 148.51] gi|88182555|gb|EAQ90023.1| CHGG_06642 [Chaetomium globosum CBS 148.51]
  misc_feature (6)..(170): NCBI GI: 85118890 Blast Desc: glucosamine 6-phosphate N-acetyltransferase [Neurospora crassa OR74A] gi|28927343|gb|EAA36297.1| glucosamine 6-phosphate N-acetyltransferase [Neurospora crassa OR74A]
  misc_feature (1)..(166): NCBI GI: 171676213 Blast Desc: protein product [Podospora anserina] gi|170936172|emb|CAP60832.1| protein product [Podospora anserina]
  misc_feature (1)..(170): NCBI GI: 256734276 Blast Desc: [Nectria haematococca mpVI 77-13-4]
  misc_feature (2)..(169): NCBI GI: 145609972 Blast Desc: MGG_02834 [Magnaporthe grisea 70-15] gi|145017351|gb|EDK01714.1| MGG_02834 [Magnaporthe grisea 70-15]
  misc_feature (1)..(170): NCBI GI: 46130680 Blast Desc: FG08944.1 [Gibberella zeae PH-1]
  misc_feature (4)..(167): NCBI GI: 156031028 Blast Desc: SS1G_14122 [Sclerotinia sclerotiorum 1980] gi|154700513|gb|EDO00252.1| SS1G_14122 [Sclerotinia sclerotiorum 1980]
  misc_feature (6)..(166): NCBI GI: 189198708 Blast Desc: glucosamine 6-phosphate N-acetyltransferase [Pyrenophora tritici-repentis Pt-1C-BFP] gi|187982790|gb|EDU48278.1| glucosamine 6-phosphate [Pyrenophora
  misc_feature (3)..(167): NCBI GI: 258572400 Blast Desc: fumarate hydratase [Uncinocarpus reesii 1704] gi|237905232|gb|EEP79633.1| fumarate hydratase [Uncinocarpus reesii 1704]
  misc_feature (20)..(163): SWISSPROT Homolog: EC 2.3.1.4 Glucosamine-phosphate N-acetyltransferase
  misc_feature: Useful for introducing or modulating the production of volatile compounds
MSEQGLFSTDLVSPSVASALPEGYIARSLRLSDYDAGFLDCLRVLTTVGEISKEAFEERYNWILSQDTYYILVVEDTSTGKVVGTGNLLVERKFIHSLGLVGHIEDIAVAKDQQGKKLGLRLIQALDFIAEKVGCYKTILDCSEANEGFYVKCGFRRAGLEMAHYYESKK

SEQ ID NO: 29003 - DNA, 1348 bp, Muscodor strobelii
  misc_feature: SGI EST ID NO. CUFF.68627.1
  misc_feature: Variant of the nucleotide sequence at SEQ ID NO 29001
cagtggtcgaaaaggtatcccctgcggtgctgtcgtcaatgtttgtcgggtttgttccaagaaagagagatatgaacctcatgttcctcgcttgttcttgtctggccttgattctttgttttccatctggtctgtctactactcaccgttcactgttgctcactattcctcctctgccatcactcctgccactcaattgacgattaccatttcccattggcgatttccatttccactgtgtttacgactttcacatcaacatcccgcccgcttgcgtggactatacgactgcacaatctctacaacaacatactagacattccctcgaaccagtcgaagcagtcaacccagtttccccaaccacgccgaaagaatgtcagaacagggccttttctcgacggaccttgtgtccccgtccgtcgcctcggcgcttcccgaaggctacatcgctcgctccctccgcctctccgactacgatgccggcttcctcgattgcctcagggtcttgacaactgtcggcgagatttccaaagaggcgtttgaggagaggtacaactggatattatcacaagacacctactacattctagtcgtagaagacacgagcaccggcaaggttgtgggcacgggcaatttgttggtcgagaggaagttcattcacagcctgggcctggttggccacatcgaggatattgccgtcgccaaagaccagcaaggcaagaagctcgggcttcgacttatccaagcgctcgacttcatcgccgaaaaagtgggctgctacaagaccatccttgattgcagcgaagccaacgagggcttctacgttaaatgcggcttccgacgcgctggcctcgagatggcccactactacgagagcaagaaatgaaacgttcgaactcgatcctgcgtactttgaacatagcagggcactggaggcgttgtatacggagagaatatatgaagtctgttggtgccgttaatacagcggtaatacagcgagagggcacaagcgaagcattataggaataatacgatggtccaccggggctcatgtactatctacgaaaatcaagatgttctatacggcgtctaccgcgaatagattttcttcgaggtggaccacacacatggcacagaagatagactcgaggaggcatagacaaaaaacatgtgacggacggcttataagtaaggtgttcagaataaatggcatgctatcataacggcaatgcataatacaatgggattaggaaaaccgaggacaccaagttttcgataaacgctcacagagctaactgtagattgctagatggctttctttcaaactattgccaatctacctacccac

SEQ ID NO: 29004 - DNA, 1275 bp, Muscodor strobelii
  misc_feature: SGI cDNA ID NO. 569957
  misc_feature: Encodes the peptide sequence at SEQ ID NO 29005
atgccgcacgcagaaaagatagggagcgcatccgtcatgcgccctgcgccagaacaatggctcatgggtaccaaggcttacgaggcccgtatgccgcaccatgacaatattcgtgcactctgggagaccaaatggaaattcccctgctctaaagctgtgtatccattccacgatggagcatactcagacttcgaacctatcttcaactcactcatcgcctcatcagtaacttccggttccagcgctgagtatacgcaagccttcttccccactgccaaatctctcgaggaacaaggcgatatcctggcacagaaaggcgacaagaaagctgcgactgatatgtatctcagggcttgtgccgtgctgaggatcgcaagattcacgtacattacatccttccccgaggtgaatgaccttgcaaaatggacagcttgggaaatgcagaaaaaagtctatatgaaagctgcttcgtcctgggacgcgcccgtaaaggaggtatttatccagcataagcatcgctcaggccgcgatcgcgagactattcctgcgtacgtcagactccccaccggtgtccaagtgggaactcagcagaaatgtcccgttgttctactgctcacgggccttgatggatatcgcccagataataccgttcgcagcgaggaatttatttcacgtggttgggcagcggtcatcgtcgagattcctggaaccgctgactgtccggctgatccggcagatccgaccgcaccggagcgtctatgggactcggtctttgcatggatggatgccgatggacggtttgacgtcaatcgtgttctgtgttggggcctaagctctggtgggtattacgccgtgagagcggcacatacccattcacatcggcttcaaggagtcattgcgcaaggagcaggtactcattatttctttgatcctgtttggcttgagcgggccggagatcatgagtatccatttgatttactccccgcattagctgcgaagcatggatttggccaagatgtcgagggctataagagggatgctctgaagaagttcagcttgcttgaaaacggtatcctgaaccagccttcatgcagattgctgttaattaacggcatgcttgatggactgatgccgatcgaggactcgatgttgttgtttgagtatggaacaccgaaggaagcgagatttttccccggtgctcttcacatgggctacccgatggctaattcatctgtttatccttggatggaagaggttatgaacgcagcgaaataa

SEQ ID NO: 29005 - protein, 424 aa, Muscodor strobelii
  misc_feature: SGI Peptide ID NO. 569957
  misc_feature (1)..(424): NCBI GI: 171676217 Blast Desc: protein product [Podospora anserina] gi|170936174|emb|CAP60834.1| protein product [Podospora anserina]
  misc_feature (2)..(424): NCBI GI: 116193847 Blast Desc: CHGG_06641 [Chaetomium globosum CBS 148.51] gi|88182554|gb|EAQ90022.1| CHGG_06641 [Chaetomium globosum CBS 148.51]
  misc_feature (8)..(420): NCBI GI: 261353405 Blast Desc: pigment biosynthesis protein Ayg1 [Verticillium albo-atrum VaMs.102]
  misc_feature (19)..(424): NCBI GI: 149210395 Blast Desc: MGCH7_ch7g675 [Magnaporthe grisea 70-15] gi|86196630|gb|EAQ71268.1| MGCH7_ch7g675 [Magnaporthe grisea 70-15]
  misc_feature (19)..(424): NCBI GI: 145609878 Blast Desc: MGG_12564 [Magnaporthe grisea 70-15] gi|145017264|gb|EDK01627.1| MGG_12564 [Magnaporthe grisea 70-15]
  misc_feature (20)..(420): NCBI GI: 156062532 Blast Desc: SS1G_01382 [Sclerotinia sclerotiorum 1980] gi|154696718|gb|EDN96456.1| SS1G_01382 [Sclerotinia sclerotiorum 1980]
  misc_feature (20)..(421): NCBI GI: 154304982 Blast Desc: BC1G_08581 [Botryotinia fuckeliana B05.10] gi|150853744|gb|EDN28936.1| BC1G_08581 [Botryotinia fuckeliana B05.10]
  misc_feature (22)..(424): NCBI GI: 164429537 Blast Desc: NCU01903 [Neurospora crassa OR74A] gi|157073518|gb|EAA36298.2| NCU01903 [Neurospora crassa OR74A]
  misc_feature (19)..(420): NCBI GI: 119482407 Blast Desc: pigment biosynthesis protein Ayg1 [Neosartorya fischeri NRRL 181] gi|119409386|gb|EAW19335.1| pigment biosynthesis protein Ayg1 [Neosartorya fischeri NRRL 181]
  misc_feature (19)..(420): NCBI GI: 6090823 Blast Desc: AF116902_1 yellowish-green 1 [Aspergillus fumigatus]
MPHAEKIGSASVMRPAPEQWLMGTKAYEARMPHHDNIRALWETKWKFPCSKAVYPFHDGAYSDFEPIFNSLIASSVTSGSSAEYTQAFFPTAKSLEEQGDILAQKGDKKAATDMYLRACAVLRIARFTYITSFPEVNDLAKWTAWEMQKKVYMKAASSWDAPVKEVFIQHKHRSGRDRETIPAYVRLPTGVQVGTQQKCPVVLLLTGLDGYRPDNTVRSEEFISRGWAAVIVEIPGTADCPADPADPTAPERLWDSVFAWMDADGRFDVNRVLCWGLSSGGYYAVRAAHTHSHRLQGVIAQGAGTHYFFDPVWLERAGDHEYPFDLLPALAAKHGFGQDVEGYKRDALKKFSLLENGILNQPSCRLLLINGMLDGLMPIEDSMLLFEYGTPKEARFFPGALHMGYPMANSSVYPWMEEVMNAAK

SEQ ID NO: 29006 - DNA, 1205 bp, Muscodor strobelii
  misc_feature: SGI EST ID NO. CUFF.68585.0
  misc_feature: Variant of the nucleotide sequence at SEQ ID NO 29004
gcttgggaaatgcagaaaaaagtctatatgaaagctgcttcgtcctgggacgcgcccgtaaaggaggtatttatccagcataagcatcgctcaggccgcgatcgcgagactattcctgcgtacgtcagactccccaccggtgtccaagtgggaactcagcagaaatgtcccgttgttctactgctcacgggccttgatggatatcgcccagataataccgttcgcagcgaggaatttatttcacgtggttgggcagcggtcatcgtcgagattcctggaaccgctgactgtccggctgatccggcagatccgaccgcaccggagcgtctatgggactcggtctttgcatggatggatgccgatggacggtttgacgtcaatcgtgttctgtgttggggcctaagctctggtgggtattacgccgtgagagcggcacatacccattcacatcggcttcaaggagtcattgcgcaaggagcaggtactcattatttctttgatcctgtttggcttgagcgggccggagatcatgagtatccatttgatttactccccgcattagctgcgaagcatggatttggccaagatgtcgagggctataagagggatgctctgaagaagttcagcttgcttgaaaacggtatcctgaaccagccttcatgcagattgctgttaattaacggcatgcttgatggactgatgccgatcgaggactcgatgttgttgtttgagtatggaacaccgaaggaagcgagatttttccccggtgctcttcacatgggctacccgatggctaattcatctgtttatccttggatggaagaggttatgaacgcagcgaaataaggcattcgttgtaagaaaagtgtgtgacaattctttggctaggtcgtagagactatgtctcggtcagtgttcgaccattacatcgcaatcattccatatgtatgttggaaccttggacggattgaccatatatttgctaaaatggaatcatacatgtactttatctataaacgtccttgctcttgaaaacgcttggcagtgtgtggaagcgtggtccagcagagaggtagtaacgaaatagtgattctttccgatcgattgaggactaagttgttcaacaagagatgatgttacacattcgcttcatcagttacctaattcaaattgctgtgagtattgaaaagcttagctgctttttg

SEQ ID NO: 29007 - DNA, 780 bp, Muscodor strobelii
  misc_feature: SGI cDNA ID NO. 569958
  misc_feature: Reduced expression when VOC is produced
  misc_feature: Encodes the peptide sequence at SEQ ID NO 29008
atggagtctctattctcgctgaaaggcgagacagcactcgtcactggcggaacgaggggcattggtcaatcagttgctatcgcactcgcagaagctggcgcagatgtactgcttgttcagcgaaacactacctcaacagaaactcaagaagctatcgaggctttgggccgaaaagcacagatctacaccgcagatctctcatcacaggccgacgttgccggcctcatcccccgtatcctcgccgacgggcaccaaatccgaatcttgatcaattgcgccggaattcagatccgccaccgatgcgaggatttccctgatgatgactttgcagccgtcatgcaagtaaatctgaactcggtattcacattatcgcgcgacgccggaaaacacatgctttccctaccaccatcacccgtaacgggacgcaagggaagtgtgattaactttgcgtcccttcttacattccaaggcggattgaacgtccctgcgtatgcagcgagcaagggtgcagttggtcaattaactaagagtttggcgaacggatggggtgataaaggcattacggtaaatgctatcgcgccgggatatatcgcgacagagatgaacaccgcgctcttaaacgacccggacaggcttgcgagtattagttcgaggatacctgccggacgatgggggacgggtgatgatttcaagggtagcgtggtttatcttgcaagcaaagcatctgcttacgtgacgggtcatacgctagttattgatggagggtggatgggcaggtag

SEQ ID NO: 29008 - protein, 259 aa, Muscodor strobelii
  misc_feature: SGI Peptide ID NO. 569958
  misc_feature (10)..(183): Pfam Id: PF00106 Pfam Desc: short chain dehydrogenase
  misc_feature (12)..(253): Pfam Id: PF01370 Pfam Desc: NAD dependent epimerase/dehydratase family
  misc_feature (11)..(200): Pfam Id: PF08659 Pfam Desc: KR domain
  misc_feature (11)..(95): Pfam Id: PF08659 Pfam Desc: KR domain
  misc_feature (4)..(259): NCBI GI: 116193845 Blast Desc: conserved [Chaetomium globosum CBS 148.51] gi|88182553|gb|EAQ90021.1| conserved [Chaetomium globosum CBS 148.51]
  misc_feature (3)..(259): NCBI GI: 256733770 Blast Desc: [Nectria haematococca mpVI 77-13-4]
  misc_feature (1)..(259): NCBI GI: 164429539 Blast Desc: 2-deoxy-D-gluconate 3-dehydrogenase [Neurospora crassa OR74A] gi|157073519|gb|EAA36299.2| 2-deoxy-D-gluconate 3-dehydrogenase [Neurospora crassa OR74A]
  misc_feature (3)..(259): NCBI GI: 39970895 Blast Desc: conserved [Magnaporthe grisea 70-15] gi|149210399|ref|XP_001522574.1| MGCH7_ch7g677 [Magnaporthe grisea 70-15] gi|86196632|gb|EAQ71270.1| MGCH7_ch7g677 grisea
  misc_feature (4)..(259): NCBI GI: 261353404 Blast Desc: 2-deoxy-D-gluconate 3-dehydrogenase [Verticillium albo-atrum VaMs.102]
  misc_feature (3)..(244): NCBI GI: 46130678 Blast Desc: FG08943.1 [Gibberella zeae PH-1]
  misc_feature (3)..(243): NCBI GI: 156035986 Blast Desc: SS1G_12679 [Sclerotinia sclerotiorum 1980] gi|154698087|gb|EDN97825.1| SS1G_12679 [Sclerotinia sclerotiorum 1980]
  misc_feature (1)..(259): NCBI GI: 189200192 Blast Desc: 2-deoxy-D-gluconate 3-dehydrogenase [Pyrenophora tritici-repentis Pt-1C-BFP] gi|187983532|gb|EDU49020.1| 2-deoxy-D-gluconate 3-dehydrogenase [Pyrenophora tritici-repentis
  misc_feature (4)..(259): NCBI GI: 169608778 Blast Desc: SNOG_07473 [Phaeosphaeria nodorum SN15] gi|160701712|gb|EAT84939.2| SNOG_07473 [Phaeosphaeria nodorum SN15]
  misc_feature (1)..(259): NCBI GI: 212545857 Blast Desc: gluconate 5-dehydrogenase, [Penicillium marneffei ATCC 18224] gi|210064602|gb|EEA18697.1| gluconate 5-dehydrogenase, [Penicillium marneffei ATCC 18224]
  misc_feature (1)..(259): SWISSPROT Homolog: EC 1.1.1.127 2-dehydro-3-deoxy-D-gluconate 5-dehydrogenase
  misc_feature: Useful for introducing or modulating the production of volatile compounds
MESLFSLKGETALVTGGTRGIGQSVAIALAEAGADVLLVQRNTTSTETQEAIEALGRKAQIYTADLSSQADVAGLIPRILADGHQIRILINCAGIQIRHRCEDFPDDDFAAVMQVNLNSVFTLSRDAGKHMLSLPPSPVTGRKGSVINFASLLTFQGGLNVPAYAASKGAVGQLTKSLANGWGDKGITVNAIAPGYIATEMNTALLNDPDRLASISSRIPAGRWGTGDDFKGSVVYLASKASAYVTGHTLVIDGGWMGR

SEQ ID NO: 29009 - DNA, 2420 bp, Muscodor strobelii
  misc_feature: SGI EST ID NO. CUFF.68586.1
  misc_feature: Variant of the nucleotide sequence at SEQ ID NO 29007
cggcgaaattcccaccacgagtctgttagagtgcaggttcggggtcgcatcgcttatgcatgaggaattgccggtttaaataaggccggaacatgcgtcagtaaatgtgtttccttatgtgacgacatttgaaaccattggaatgtctaaaggcacacaatgagttgaaattttcgctgggcatatgtaaaaattctcccgtgatagtgaagcaaccacacagggaagtcagaagatggagtctctattctcgctgaaaggcgagacagcactcgtcactggcggaacgaggggcattggtcaatcagttgctatcgcactcgcagaagctggcgcagatgtactgcttgttcagcgaaacactacctcaacagaaactcaagaagctatcgaggctttgggccgaaaagcacagatctacaccgcagatctctcatcacaggccgacgttgccggcctcatcccccgtatcctcgccgacgggcaccaaatccgaatcttgatcaattgcgccggaattcagatccgccaccgatgcgaggatttccctgatgatgactttgcagccgtcatgcaagtaaatctgaactcggtattcacattatcgcgcgacgccggaaaacacatgctttccctaccaccatcacccgtaacgggacgcaagggaagtgtgattaactttgcgtcccttcttacattccaaggcggattgaacgtccctgcgtatgcagcgagcaagggtgcagttggtcaattaactaagagtttggcgaacggatggggtgataaaggcattacggtaaatgctatcgcgccgggatatatcgcgacagagatgaacaccgcgctcttaaacgacccggacaggcttgcgagtattagttcgaggatacctgccggacgatgggggacgggtgatgatttcaagggtagcgtggtttatcttgcaagcaaagcatctgcttacgtgacgggtcatacgctagttattgatggagggtggatgggcaggtagagttcgactgaagcgaaatttgaagcctttgaagggtcattctaccaaaaataaaattgacgaagtggcgttattgttttcattgacgggtatcgctcaagaggcacctttggattatgagtagaaaacaaaaagcagctaagcttttcaatactcacagcaatttgaattaggtaactgatgaagcgaatgtgtaacatcatctcttgttgaacaacttagtcctcaatcgatcggaaagaatcactatttcgttactacctctctgctggaccacgcttccacacactgccaagcgttttcaagagcaaggacgtttatagataaagtacatgtatgattccattttagcaaatatatggtcaatccgtccaaggttccaacatacatatggaatgattgcgatgtaatggtcgaacactgaccgagacatagtctctacgacctagccaaagaattgtcacacacttttcttacaacgaatgccttatttcgctgcgttcataacctcttccatccaaggataaacagatgaattagccatcgggtagcccatgtgaagagcaccggggaaaaatctcgcttccttcggtgttccatactcaaacaacaacatcgagtcctcgatcggcatcagtccatcaagcatgccctatcatcatcacataattagctcttttaattcaattgagtctcctggaagtgatgaaataataatactcacgttaattaacagcaatctgcatgaaggctggttcaggataccgttttcaagcaagctgaacttcttcagagcatccctcttatagccctcgacatcttggccaaatccatgcttcgcagctaatgcggggagtaaatcaaatggatactcatgatctccggcccgctcaagccaaacaggatcaaagaaataatgagtacctgctccttgcgcaatgactccttgaagccgatgtgaatgggtatgtgccgctctcacggcgtaatacccaccagagcttaggccccaacacagaacacgattgacgtcaaaccgtccatcggcatccatccatgcaaagaccgagtcccatagacgctccggtgcggtcggatctgccggatcagccggacagtcagcggttccaggaatctcgacgatgaccgctgcccaaccacgtgaaataaattcctcgctgcgaacggtattatctgggcgatatccatcaaggcccgtgagcagtagaacaacgggacatttctgctgagttcccacttggacaccggtggggagtctgacgtacgcaggaatagtctcgcgatcgcggcctgagcgatgcttatgctggataaatacctcctttacgggcgcgtcccaggacgaagcagctttcatatagacttttttctgcatttcccaagc

SEQ ID NO: 29010 - DNA, 1176 bp, Muscodor strobelii
  misc_feature: SGI cDNA ID NO. 569959
  misc_feature: Encodes the peptide sequence at SEQ ID NO 29011
atgagcagtgatacacacgtcaacgcctctgtgctacatggggcaaaggatttgcgcgttgagcaacgcgttctcccagcaccctcggccaccgaggttcagatagctgtctctgcaacagggctctgtggctcagatctacattatttcagtcatttccgaaatggaaacattcaagtatgtgagccactgacactcggacacgagtcagccggcgtcgtgacggcgacgggcacatccgtcaccaatctccgtgtcggtgatcgcgtagcactcgaagtcggcctaccatgcgagaactgcgaattttgtaaccaaggccgatataacatctgcaaaggcatgagcttccggagttctgcaaaaagtgtgcctcatgcgcagggtacattacagacgcatataaatcacccagcgcgctggtgtcacaaactacctgagtcgctatctcttgagcagggcgctttgatggaaccgctctctgtcgctatgcatgcgcggtcgcgatctgggttgaaagagggtagcactgttttaatactcggggcaggtgccgtcggtttgctttgcgctgctgctgtgaaggttgcaggcgcaaaaacggtgcttattgcggatattttgcccgagagagtaaattttgcgatacagaatgggtttgcagatgctgctttcgctgttcccatggctagaccacaaagcattgaggataagcttgcgtacgcgcaagatattgctgaaaagatcaaggcaatatcatttggtggcgatgcgacattgggtgaggcggatgtcacatttgaatgcacgggagttgagtcgtgcatgcacacagcgatatactctacgaaacctggcggcaaagtcatgatcattggcatgggcacccctatccaaacgcttcccattgccgctgcgtcgctcaaggaagtcgatctcgtaggcgtatttcgatacgcaaatacataccccgctatcatcgatctcttggcttccaaaaacaagcgcatgccagacatcactaaacttgtaactcaacgatatagagggctgtcaaacattacggcagcgtttgagatggcaggaaaagttaaggatgaacagggaaacctggtgctgaaagtgatggtggatacaagcgaagacagtgaaggagaattaaggtcgagtatgtga

SEQ ID NO: 29011 - protein, 391 aa, Muscodor strobelii
  misc_feature: SGI Peptide ID NO. 569959
  misc_feature (30)..(145): Pfam Id: PF08240 Pfam Desc: Alcohol dehydrogenase GroES-like domain
  misc_feature (174)..(332): Pfam Id: PF00107 Pfam Desc: Zinc-binding dehydrogenase
  misc_feature (3)..(378): NCBI GI: 261353403 Blast Desc: sorbitol dehydrogenase [Verticillium albo-atrum VaMs.102]
  misc_feature (6)..(380): NCBI GI: 154296220 Blast Desc: BC1G_12937 [Botryotinia fuckeliana B05.10] gi|150843501|gb|EDN18694.1| BC1G_12937 [Botryotinia fuckeliana B05.10]
  misc_feature (5)..(378): NCBI GI: 116193843 Blast Desc: CHGG_06639 [Chaetomium globosum CBS 148.51] gi|88182552|gb|EAQ90020.1| CHGG_06639 [Chaetomium globosum CBS 148.51]
  misc_feature (5)..(369): NCBI GI: 156035984 Blast Desc: SS1G_12678 [Sclerotinia sclerotiorum 1980] gi|154698086|gb|EDN97824.1| SS1G_12678 [Sclerotinia sclerotiorum 1980]
  misc_feature (6)..(384): NCBI GI: 256734277 Blast Desc: [Nectria haematococca mpVI 77-13-4]
  misc_feature (1)..(381): NCBI GI: 46130676 Blast Desc: FG08942.1 [Gibberella zeae PH-1]
  misc_feature (5)..(378): NCBI GI: 171676221 Blast Desc: protein product [Podospora anserina] gi|170936176|emb|CAP60836.1| protein product [Podospora anserina]
  misc_feature (7)..(379): NCBI GI: 145604833 Blast Desc: MGG_13917 [Magnaporthe grisea 70-15] gi|145012754|gb|EDJ97408.1| MGG_13917 [Magnaporthe grisea 70-15]
  misc_feature (7)..(378): NCBI GI: 169621153 Blast Desc: SNOG_13783 [Phaeosphaeria nodorum SN15] gi|111057687|gb|EAT78807.1| SNOG_13783 [Phaeosphaeria nodorum SN15]
  misc_feature (2)..(378): NCBI GI: 189206750 Blast Desc: sorbitol dehydrogenase [Pyrenophora tritici-repentis Pt-1C-BFP] gi|187975802|gb|EDU42428.1| sorbitol dehydrogenase [Pyrenophora tritici-repentis Pt-1C-BFP]
  misc_feature (11)..(384): SWISSPROT Homolog: EC 1.1.1.14 L-iditol 2-dehydrogenase
MSSDTHVNASVLHGAKDLRVEQRVLPAPSATEVQIAVSATGLCGSDLHYFSHFRNGNIQVCEPLTLGHESAGVVTATGTSVTNLRVGDRVALEVGLPCENCEFCNQGRYNICKGMSFRSSAKSVPHAQGTLQTHINHPARWCHKLPESLSLEQGALMEPLSVAMHARSRSGLKEGSTVLILGAGAVGLLCAAAVKVAGAKTVLIADILPERVNFAIQNGFADAAFAVPMARPQSIEDKLAYAQDIAEKIKAISFGGDATLGEADVTFECTGVESCMHTAIYSTKPGGKVMIIGMGTPIQTLPIAAASLKEVDLVGVFRYANTYPAIIDLLASKNKRMPDITKLVTQRYRGLSNITAAFEMAGKVKDEQGNLVLKVMVDTSEDSEGELRSSM

SEQ ID NO: 29012 - DNA, 1103 bp, Muscodor strobelii
  misc_feature: SGI EST ID NO. CUFF.68572.0
  misc_feature: Variant of the nucleotide sequence at SEQ ID NO 29010
gccgatataacatctgcaaaggcatgagcttccggagttctgcaaaaagtgtgcctcatgcgcagggtacattacagacgcatataaatcacccagcgcgctggtgtcacaaactacctgagtcgctatctcttgagcagggcgctttgatggaaccgctctctgtcgctatgcatgcgcggtcgcgatctgggttgaaagagggtagcactgttttaatactcggggcaggtgccgtcggtttgctttgcgctgctgctgtgaaggttgcaggcgcaaaaacggtgcttattgcggatattttgcccgagagagtaaattttgcgatacagaatgggtttgcagatgctgctttcgctgttcccatggctagaccacaaagcattgaggataagcttgcgtacgcgcaagatattgctgaaaagatcaaggcaatatcatttggtggcgatgcgacattgggtgaggcggatgtcacatttgaatgcacgggagttgagtcgtgcatgcacacagcgatatactctacgaaacctggcggcaaagtcatgatcattggcatgggcacccctatccaaacgcttcccattgccgctgcgtcgctcaaggaagtcgatctcgtaggcgtatttcgatacgcaaatacataccccgctatcatcgatctcttggcttccaaaaacaagcgcatgccagacatcactaaacttgtaactcaacgatatagagggctgtcaaacattacggcagcgtttgagatggcaggaaaagttaaggatgaacagggaaacctggtgctgaaagtgatggtggatacaagcgaagacagtgaaggagaattaaggtcgagtatgtgaaatttcctgtccggggaaaaattgcgagtgtctcaaaagtggcttgatcaagggttgtgatcctcaaatcgaaggaccttggcatcaaaatagaactgttgacagtccctgttaagcgatacacatgctacaggacgacttttcaggttaggggttggtgagaataccacaaataccaaatgatacacagcatcgttatccgcccaacattagaacttcaatagactcttatggcttgtccgctct

SEQ ID NO: 29013 - DNA, 3207 bp, Muscodor strobelii
  misc_feature: SGI cDNA ID NO. 569960
  misc_feature: Elevated expression when VOC is produced
  misc_feature: Encodes the peptide sequence at SEQ ID NO 29014
atggctgacgctgtcggtctggccattagtcttgctggagcgacgcttaagcttgtcgtattcacgattgatttcgttgacgatgcaagacaagtgcatcgccaaggtgcgactgaccgtacgcttgatctctcaagagtactggaaagcgtagaagatgcgacagcgagcctggaacaccagattgaggagaatcattcggtcgaagattctgggtcagatcctaatgaacagttattgagacaactatcatcgcgggccgcggaaattggtcgggagctcacgctaaaactcagcaacattaccaacaaggaagggtcaaaatggaagagcttcagaacggttgttttagggatgtggaacgagacagagctgcgaaagacacaacaaagtctaagcgacatcaaagaccagatgcaattctcaatcttaattggtttacgagataaagtcaacggatcacacaacgagctaaactctaacatactctcaattgtggaagccgctgcaaatcatcgagccgaatccagggaggacagcattgcaattactgaacttctcaatcaagcaggaaacagggcggaatggcgccatcaggagctcgtcaaacagaacaatcaactattagaagctgtcaatgccatatcgatctcgcgagcacctagtccggcatttccgtttccttcagcgactatgagccacgaaaagcgtaagcaagctgaggatatgattttgaacacgctgtggtatgcgaccattcatgatcgagaagagacaatctccgaagctcataaaaagacattcctgtgggtttttgagaaccctcaggacactgggaaacgttggagcagcttggcagattttctctctggagaaacaacaagctattggattacaggaaaaccaggatccgggaaaagcacactcatgaaattcataagcgagcatgatcgaacgcaaacactccttaaacaatgggctggtgataagacattggttaaggcgtcctactactttttttataacggcactgaacatcagaagtcggagtatggcctagtccgatctctactgaactcgattctaagccagaggcgagatctcattcccacggcttttagagatcgcttccaagccgccctcgagggtcgaacatacgaagaccctacactcgccgaagccaggcgagcacttagaaatctattcgagtacagctatggtgatcgattctttgtctcgatagatggtctcgatgagtttgacccaaagatatccctcaccagtgtctcaagcctcatagagctcacgcatttgctttccggcttgcaaaacgtgaagttgctcatttcgtctcgccctttacccgaatttgaacatggatatgaacggcagccctgcctcaagattcatgatctgactcacgatgatatacatcgttatacagaaggaaggctcatgagtcatcgggcgatgcagcgatttgctaagagggaatcagcaagcacacaggatctccttcaagcgattgtccaagcatcactgggtgtcttcctttgggtcagacttgtgtgcgactctcttatgtccggtcttacaaatgcagagaccatagttgatctacaaaaaagactcgagagtattccatcagatcttcaggatttatatgaaacaatgcttgtgcgagttgggtcacagtacaaaccggagactgctcggctactcagcttaatgcataaaagcagacaaggttatcctaataattccgagtttatgcttcttggtttttggtttgcaatggaggccgatgatgaaatggtctaccaaaccccggtaaaatctatcgaagccgaggtgattcaagagcgcgtggaagatttagaaacgcgccttaaaagccgatgcatgggccttattgaagtggccccatctaaggcatgtataaaaacatcccgtgcgagttgttttctgaccgtgcttctaaaacatcttgctaactttttctacatggcagccagccgtgctagaagctgcgaccgcataacgaggcaatcgaattttgaactgctgaaagagtttgactcgacgatggaagaaatcgtgaacactttcaatgcattcaaaggggttcctgatgtagaccacaagaatcaggccaattgtactgctgtaacagctctgcactggttccgctgggtacagtacttccaggcgtatgacactactacccctagtcggatgcaagccattgtcgaggctgcagatacagattgtggatcgctcataacactcgcagtccagttcgatctccaatcatacatccggcaacaaatagaagagcatggcaccacaattctcaagaaagaaggtcttccccttcttgcatacggcatactcccgttgggactaggaaccaacttctggttgggagactataggatggcaacactgcttctcgatcaaggcctggatccaaacgaaatgtatggagacaaatcagtatgggaatggttcctaggctcaataaatcctcgcctgaggcgattagggtattacacaagcatctggtatccagaatggcttgatgtgggagctgtcgaaattatgcacaccatgttgcttcatggtgcagatatcaacaagtccatgttatactgtgcagataaagagaaccgccgagaacgatggacgaaatgcacgattctactgagtgtgaggcgaggctacgatgattgtgtctgttttccaaacatgttgaaaaatggagaatttgagtccagatcacaatcgatcgcagctatgaaagaagtcatcaaatatctcgaaggtaaaggcgcagaagaaaaggaatggaaagatggggaattgatctatgcaaaggcgaatgatctagtcgaacccgctggcacatctcgggccatcgaagagaaagaagtttcggggtgtttcgagacaaaaggttgtgtaagtggcaatgttcaggctatcactacctccgccacggattcgtctcattctgagttaaaagacattgatcatatccaactcgggaaccaagataggaagaaagagacagaagaagaagaagcagaccgtgagccggtagggagcgatgtaaggcgagctgaggtcattgctcccgagacgatgacgacgaagaagagcaacaaatggtataaaaagctgttcaataggaacaaaagagcctga

SEQ ID NO: 29014 - protein, 1068 aa, Muscodor strobelii
  misc_feature: SGI Peptide ID NO. 569960
  misc_feature (8)..(640): NCBI GI: 256726514 Blast Desc: NECHADRAFT_79534 [Nectria haematococca mpVI 77-13-4]
  misc_feature (8)..(877): NCBI GI: 225684243 Blast Desc: conserved [Paracoccidioides brasiliensis Pb03]
  misc_feature (8)..(877): NCBI GI: 226293863 Blast Desc: conserved [Paracoccidioides brasiliensis Pb18]
  misc_feature (222)..(640): NCBI GI: 256734179 Blast Desc: NECHADRAFT_35981 [Nectria haematococca mpVI 77-13-4]
  misc_feature (3)..(841): NCBI GI: 261190024 Blast Desc: conserved [Ajellomyces dermatitidis SLH14081] gi|239591250|gb|EEQ73831.1| conserved [Ajellomyces dermatitidis SLH14081]
  misc_feature (238)..(639): NCBI GI: 256722211 Blast Desc: NECHADRAFT_86865 [Nectria haematococca mpVI 77-13-4]
  misc_feature (238)..(640): NCBI GI: 46133835 Blast Desc: FG09057.1 [Gibberella zeae PH-1]
  misc_feature (8)..(653): NCBI GI: 46116306 Blast Desc: FG03995.1 [Gibberella zeae PH-1]
  misc_feature (8)..(643): NCBI GI: 169768460 Blast Desc: [Aspergillus oryzae RIB40] gi|238497764|ref|XP_002380117.1| conserved [Aspergillus flavus NRRL3357] gi|83766558|dbj|BAE56698.1| protein product oryzae]
  misc_feature (199)..(590): NCBI GI: 116198607 Blast Desc: CHGG_07459 [Chaetomium globosum CBS 148.51] gi|88178738|gb|EAQ86206.1| CHGG_07459 [Chaetomium globosum CBS 148.51]
  misc_feature: Useful for introducing or modulating the production of volatile compounds
MADAVGLAISLAGATLKLVVFTIDFVDDARQVHRQGATDRTLDLSRVLESVEDATASLEHQIEENHSVEDSGSDPNEQLLRQLSSRAAEIGRELTLKLSNITNKEGSKWKSFRTVVLGMWNETELRKTQQSLSDIKDQMQFSILIGLRDKVNGSHNELNSNILSIVEAAANHRAESREDSIAITELLNQAGNRAEWRHQELVKQNNQLLEAVNAISISRAPSPAFPFPSATMSHEKRKQAEDMILNTLWYATIHDREETISEAHKKTFLWVFENPQDTGKRWSSLADFLSGETTSYWITGKPGSGKSTLMKFISEHDRTQTLLKQWAGDKTLVKASYYFFYNGTEHQKSEYGLVRSLLNSILSQRRDLIPTAFRDRFQAALEGRTYEDPTLAEARRALRNLFEYSYGDRFFVSIDGLDEFDPKISLTSVSSLIELTHLLSGLQNVKLLISSRPLPEFEHGYERQPCLKIHDLTHDDIHRYTEGRLMSHRAMQRFAKRESASTQDLLQAIVQASLGVFLWVRLVCDSLMSGLTNAETIVDLQKRLESIPSDLQDLYETMLVRVGSQYKPETARLLSLMHKSRQGYPNNSEFMLLGFWFAMEADDEMVYQTPVKSIEAEVIQERVEDLETRLKSRCMGLIEVAPSKACIKTSRASCFLTVLLKHLANFFYMAASRARSCDRITRQSNFELLKEFDSTMEEIVNTFNAFKGVPDVDHKNQANCTAVTALHWFRWVQYFQAYDTTTPSRMQAIVEAADTDCGSLITLAVQFDLQSYIRQQIEEHGTTILKKEGLPLLAYGILPLGLGTNFWLGDYRMATLLLDQGLDPNEMYGDKSVWEWFLGSINPRLRRLGYYTSIWYPEWLDVGAVEIMHTMLLHGADINKSMLYCADKENRRERWTKCTILLSVRRGYDDCVCFPNMLKNGEFESRSQSIAAMKEVIKYLEGKGAEEKEWKDGELIYAKANDLVEPAGTSRAIEEKEVSGCFETKGCVSGNVQAITTSATDSSHSELKDIDHIQLGNQDRKKETEEEEADREPVGSDVRRAEVIAPETMTTKKSNKWYKKLFNRNKRA

SEQ ID NO: 29015 - DNA, 3407 bp, Muscodor strobelii
  misc_feature: SGI EST ID NO. CUFF.68654.1
  misc_feature: Variant of the nucleotide sequence at SEQ ID NO 29013
catttaaataccatcaattgcaagatcgtatgtagtgtgaatccaagtggctaacactgctttttgaacaacaggcacctggcaagccgcacctggagaagtcgctgcagcagtgacatgtgcgctgcagtctggctataaattgatcgacgcagcttactgctacggaaacgaagatgaagtcggacagggcatcaaggccgcgatcgatgccggatacgtgacacgatcagagatatttgtcgttacgaagctttggaacacctactcgagccgtgctgagttgggattgaccaagtctctcaaggcgctcggcctagactacgtagatctcttcctcgtacattgggctatcggcatgaaccctgacggcaacgacgaccgatttccaaaactaccggatggctcgagagatattgtgtggtcccatgaccatgtagagacatggaaggacatggagggtcttctcaagacgggcaaagcaaaggccatcggcgtgtgcaactacagcgcaccatatttgacgaagttgctggagaaggcaacggtggttccggccgtcaaccagattgagaatcatcctaaattgccacagcaagaagtcgttgacttgtgcaagagtaaaggcatccacatcatggcttacagcccacttggctctaccggcggaccgctcatgaagagcgagccaattgtcaaggttgcagaacgtaagggcgttagtcccggcaccattttgttgagttatcacgtcgcacgcggcagcactgttcttgccaagtcagtcacggagtcgcgcattaagtcaaatctagagatcgtcgaccttgacaatgaggatatggaaatattaaacgcgtttgcgaagactggtgatattgagagatacgtgtacccgccattcggtgctgcttttggctttccggataagcctggtggaaagagcctgcccaatggtgtctagacgttgtgtagcattttagacgggattagcaagtgtaatttcgaaagctcaagaatagttacatagaccatcatacgcctcttgtaaatacttcaattgcaggtaccattccacataatctgacgcacaatgaaagtccaatgtcgaaacgtcacgctatgaatatgattgtaagtaagttgtttgccgcagtactgagctgcattcattggcgctttgttgactagctctcatgcgaggcaagcattgttggttgacgttatgcatgatcctgccttctgatatgccttgccaccccacttgctcgtcagactcgtaatcctggtatgccataggcagcatgttatttcacacgcctcgctagatcgaattgcggtcggaggtcaagggcggggctgtgttgccttgcctttacctgagtgctgactatgttgagacgggcttaagaacgacctgccgatggcatgacatcgtagacccatcgcatgcgatggcaatttggtctgtgtgatacatcgatgtaagcatcgagtggtacatcgacatggctgacgctgtcggtctggccattagtcttgctggagcgacgcttaagcttgtcgtattcacgattgatttcgttgacgatgcaagacaagtgcatcgccaaggtgcgactgaccgtacgcttgatctctcaagagtactggaaagcgtagaagatgcgacagcgagcctggaacaccagattgaggagaatcattcggtcgaagattctgggtcagatcctaatgaacagttattgagacaactatcatcgcgggccgcggaaattggtcgggagctcacgctaaaactcagcaacattaccaacaaggaagggtcaaaatggaagagcttcagaacggttgttttagggatgtggaacgagacagagctgcgaaagacacaacaaagtctaagcgacatcaaagaccagatgcaattctcaatcttaattggtttacgagataaagtcaacggatcacacaacgagctaaactctaacatactctcaattgtggaagccgctgcaaatcatcgagccgaatccagggaggacagcattgcaattactgaacttctcaatcaagcaggaaacagggcggaatggcgccatcaggagctcgtcaaacagaacaatcaactattagaagctgtcaatgccatatcgatctcgcgagcacctagtccggcatttccgtttccttcagcgactatgagccacgaaaagcgtaagcaagctgaggatatgattttgaacacgctgtggtatgcgaccattcatgatcgagaagagacaatctccgaagctcataaaaagacattcctgtgggtttttgagaaccctcaggacactgggaaacgttggagcagcttggcagattttctctctggagaaacaacaagctattggattacaggaaaaccaggatccgggaaaagcacactcatgaaattcataagcgagcatgatcgaacgcaaacactccttaaacaatgggctggtgataagacattggttaaggcgtcctactactttttttataacggcactgaacatcagaagtcggagtatggcctagtccgatctctactgaactcgattctaagccagaggcgagatctcattcccacggcttttagagatcgcttccaagccgccctcgagggtcgaacatacgaagaccctacactcgccgaagccaggcgagcacttagaaatctattcgagtacagctatggtgatcgattctttgtctcgatagatggtctcgatgagtttgacccaaagatatccctcaccagtgtctcaagcctcatagagctcacgcatttgctttccggcttgcaaaacgtgaagttgctcatttcgtctcgccctttacccgaatttgaacatggatatgaacggcagccctgcctcaagattcatgatctgactcacgatgatatacatcgttatacagaaggaaggctcatgagtcatcgggcgatgcagcgatttgctaagagggaatcagcaagcacacaggatctccttcaagcgattgtccaagcatcactgggtgtcttcctttgggtcagacttgtgtgcgactctcttatgtccggtcttacaaatgcagagaccatagttgatctacaaaaaagactcgagagtattccatcagatcttcaggatttatatgaaacaatgcttgtgcgagttgggtcacagtacaaaccggagactgctcggctactcagcttaatgcataaaagcagacaaggttatcctaataattccgagtttatgcttcttggtttttggtttgcaatggaggccgatgatgaaatggtctaccaaaccccggtaaaatctatcgaagccgaggtgattcaagagcgcgtggaagatttagaaacgcgccttaaaagccga

SEQ ID NO: 29016 - DNA, 948 bp, Muscodor strobelii
  misc_feature: SGI cDNA ID NO. 569961
  misc_feature: Encodes the peptide sequence at SEQ ID NO 29017
atggccccttcaacttttaagctcaatacggggcaggagatgcctgctgtcggtttcggcacctggcaagccgcacctggagaagtcgctgcagcagtgacatgtgcgctgcagtctggctataaattgatcgacgcagcttactgctacggaaacgaagatgaagtcggacagggcatcaaggccgcgatcgatgccggatacgtgacacgatcagagatatttgtcgttacgaagctttggaacacctactcgagccgtgctgagttgggattgaccaagtctctcaaggcgctcggcctagactacgtagatctcttcctcgtacattgggctatcggcatgaaccctgacggcaacgacgaccgatttccaaaactaccggatggctcgagagatattgtgtggtcccatgaccatgtagagacatggaaggacatggagggtcttctcaagacgggcaaagcaaaggccatcggcgtgtgcaactacagcgcaccatatttgacgaagttgctggagaaggcaacggtggttccggccgtcaaccagattgagaatcatcctaaattgccacagcaagaagtcgttgacttgtgcaagagtaaaggcatccacatcatggcttacagcccacttggctctaccggcggaccgctcatgaagagcgagccaattgtcaaggttgcagaacgtaagggcgttagtcccggcaccattttgttgagttatcacgtcgcacgcggcagcactgttcttgccaagtcagtcacggagtcgcgcattaagtcaaatctagagatcgtcgaccttgacaatgaggatatggaaatattaaacgcgtttgcgaagactggtgatattgagagatacgtgtacccgccattcggtgctgcttttggctttccggataagcctggtggaaagagcctgcccaatggtgtctag

SEQ ID NO: 29017 - protein, 315 aa, Muscodor strobelii
  misc_feature: SGI Peptide ID NO. 569961
  misc_feature (8)..(284): Pfam Id: PF00248 Pfam Desc: Aldo/keto reductase family
  misc_feature (1)..(305): NCBI GI: 61741465 Blast Desc: D-galacturonic acid reductase [Hypocrea jecorina]
  misc_feature (1)..(305): NCBI GI: 46130674 Blast Desc: FG08941.1 [Gibberella zeae PH-1]
  misc_feature (1)..(305): NCBI GI: 171676223 Blast Desc: protein product [Podospora anserina] gi|170936177|emb|CAP60837.1| protein product [Podospora anserina]
  misc_feature (1)..(305): NCBI GI: 164429543 Blast Desc: GCY protein [Neurospora crassa OR74A] gi|157073521|gb|EAA36301.2| GCY protein [Neurospora crassa OR74A]
  misc_feature (1)..(305): NCBI GI: 116193841 Blast Desc: CHGG_06638 [Chaetomium globosum CBS 148.51] gi|88182551|gb|EAQ90019.1| CHGG_06638 [Chaetomium globosum CBS 148.51]
  misc_feature (4)..(305): NCBI GI: 115395988 Blast Desc: ATEG_04455 [Aspergillus terreus NIH2624] gi|114193202|gb|EAU34902.1| ATEG_04455 [Aspergillus terreus NIH2624]
  misc_feature (1)..(305): NCBI GI: 256733769 Blast Desc: [Nectria haematococca mpVI 77-13-4]
  misc_feature (4)..(305): NCBI GI: 71001348 Blast Desc: glycerol dehydrogenase [Aspergillus fumigatus Af293] gi|66852993|gb|EAL93317.1| glycerol dehydrogenase, [Aspergillus fumigatus Af293] gi|159129430|gb|EDP54544.1| glycerol fumigatus
  misc_feature (1)..(307): NCBI GI: 39970909 Blast Desc: MGG_02921 [Magnaporthe grisea 70-15] gi|149210419|ref|XP_001522584.1| MGCH7_ch7g684 [Magnaporthe grisea 70-15] gi|31321885|gb|AAK55762.1| aldose reductase grisea]
  misc_feature (4)..(305): NCBI GI: 119480951 Blast Desc: glycerol dehydrogenase, [Neosartorya fischeri NRRL 181] gi|119408658|gb|EAW18607.1| glycerol dehydrogenase, [Neosartorya fischeri NRRL 181]
  misc_feature (5)..(294): SWISSPROT Homolog: EC 1.1.1.2 Alcohol dehydrogenase (NADP(+))
MAPSTFKLNTGQEMPAVGFGTWQAAPGEVAAAVTCALQSGYKLIDAAYCYGNEDEVGQGIKAAIDAGYVTRSEIFVVTKLWNTYSSRAELGLTKSLKALGLDYVDLFLVHWAIGMNPDGNDDRFPKLPDGSRDIVWSHDHVETWKDMEGLLKTGKAKAIGVCNYSAPYLTKLLEKATVVPAVNQIENHPKLPQQEVVDLCKSKGIHIMAYSPLGSTGGPLMKSEPIVKVAERKGVSPGTILLSYHVARGSTVLAKSVTESRIKSNLEIVDLDNEDMEILNAFAKTGDIERYVYPPFGAAFGFPDKPGGKSLPNGV

SEQ ID NO: 29018 - DNA, 3666 bp, Muscodor strobelii
  misc_feature: SGI EST ID NO. CUFF.68654.0
  misc_feature: Variant of the nucleotide sequence at SEQ ID NO 29016
tatgggacctcgacgtcacgccggatcgcgacatgacgggacagtcacagcaggaatgcgggaagttatctataagaaggcatggctgaaagattagcctgtaaagtgcgattttcaaatgctgctttattctcaccgtcacccacttcatctcgatttccttcatcatcatacaacttatccctctacatttcacgatttttgcgacaggcagaggggcatcgtgattgaggattaaaagcagtatcgcaagagcgttggaagacatatcagccatggccccttcaacttttaagctcaatacggggcaggagatgcctgctgtcggtttcggcacctggcaagccgcacctggagaagtcgctgcagcagtgacatgtgcgctgcagtctggctataaattgatcgacgcagcttactgctacggaaacgaagatgaagtcggacagggcatcaaggccgcgatcgatgccggatacgtgacacgatcagagatatttgtcgttacgaagctttggaacacctactcgagccgtgctgagttgggattgaccaagtctctcaaggcgctcggcctagactacgtagatctcttcctcgtacattgggctatcggcatgaaccctgacggcaacgacgaccgatttccaaaactaccggatggctcgagagatattgtgtggtcccatgaccatgtagagacatggaaggacatggagggtcttctcaagacgggcaaagcaaaggccatcggcgtgtgcaactacagcgcaccatatttgacgaagttgctggagaaggcaacggtggttccggccgtcaaccagattgagaatcatcctaaattgccacagcaagaagtcgttgacttgtgcaagagtaaaggcatccacatcatggcttacagcccacttggctctaccggcggaccgctcatgaagagcgagccaattgtcaaggttgcagaacgtaagggcgttagtcccggcaccattttgttgagttatcacgtcgcacgcggcagcactgttcttgccaagtcagtcacggagtcgcgcattaagtcaaatctagagatcgtcgaccttgacaatgaggatatggaaatattaaacgcgtttgcgaagactggtgatattgagagatacgtgtacccgccattcggtgctgcttttggctttccggataagcctggtggaaagagcctgcccaatggtgtctagacgttgtgtagcattttagacgggattagcaagtgtaatttcgaaagctcaagaatagttacatagaccatcatacgcctcttgtaaatacttcaattgcaggtaccattccacataatctgacgcacaatgaaagtccaatgtcgaaacgtcacgctatgaatatgattgtaagtaagttgtttgccgcagtactgagctgcattcattggcgctttgttgactagctctcatgcgaggcaagcattgttggttgacgttatgcatgatcctgccttctgatatgccttgccaccccacttgctcgtcagactcgtaatcctggtatgccataggcagcatgttatttcacacgcctcgctagatcgaattgcggtcggaggtcaagggcggggctgtgttgccttgcctttacctgagtgctgactatgttgagacgggcttaagaacgacctgccgatggcatgacatcgtagacccatcgcatgcgatggcaatttggtctgtgtgatacatcgatgtaagcatcgagtggtacatcgacatggctgacgctgtcggtctggccattagtcttgctggagcgacgcttaagcttgtcgtattcacgattgatttcgttgacgatgcaagacaagtgcatcgccaaggtgcgactgaccgtacgcttgatctctcaagagtactggaaagcgtagaagatgcgacagcgagcctggaacaccagattgaggagaatcattcggtcgaagattctgggtcagatcctaatgaacagttattgagacaactatcatcgcgggccgcggaaattggtcgggagctcacgctaaaactcagcaacattaccaacaaggaagggtcaaaatggaagagcttcagaacggttgttttagggatgtggaacgagacagagctgcgaaagacacaacaaagtctaagcgacatcaaagaccagatgcaattctcaatcttaattggtttacgagataaagtcaacggatcacacaacgagctaaactctaacatactctcaattgtggaagccgctgcaaatcatcgagccgaatccagggaggacagcattgcaattactgaacttctcaatcaagcaggaaacagggcggaatggcgccatcaggagctcgtcaaacagaacaatcaactattagaagctgtcaatgccatatcgatctcgcgagcacctagtccggcatttccgtttccttcagcgactatgagccacgaaaagcgtaagcaagctgaggatatgattttgaacacgctgtggtatgcgaccattcatgatcgagaagagacaatctccgaagctcataaaaagacattcctgtgggtttttgagaaccctcaggacactgggaaacgttggagcagcttggcagattttctctctggagaaacaacaagctattggattacaggaaaaccaggatccgggaaaagcacactcatgaaattcataagcgagcatgatcgaacgcaaacactccttaaacaatgggctggtgataagacattggttaaggcgtcctactactttttttataacggcactgaacatcagaagtcggagtatggcctagtccgatctctactgaactcgattctaagccagaggcgagatctcattcccacggcttttagagatcgcttccaagccgccctcgagggtcgaacatacgaagaccctacactcgccgaagccaggcgagcacttagaaatctattcgagtacagctatggtgatcgattctttgtctcgatagatggtctcgatgagtttgacccaaagatatccctcaccagtgtctcaagcctcatagagctcacgcatttgctttccggcttgcaaaacgtgaagttgctcatttcgtctcgccctttacccgaatttgaacatggatatgaacggcagccctgcctcaagattcatgatctgactcacgatgatatacatcgttatacagaaggaaggctcatgagtcatcgggcgatgcagcgatttgctaagagggaatcagcaagcacacaggatctccttcaagcgattgtccaagcatcactgggtgtcttcctttgggtcagacttgtgtgcgactctcttatgtccggtcttacaaatgcagagaccatagttgatctacaaaaaagactcgagagtattccatcagatcttcaggatttatatgaaacaatgcttgtgcgagttgggtcacagtacaaaccggagactgctcggctactcagcttaatgcataaaagcagacaaggttatcctaataattccgagtttatgcttcttggtttttggtttgcaatggaggccgatgatgaaatggtctaccaaaccccggtaaaatctatcgaagccgaggtgattcaagagcgcgtggaagatttagaaacgcgccttaaaagccga

SEQ ID NO: 29019 - DNA, 960 bp, Muscodor strobelii
  misc_feature: SGI cDNA ID NO. 569962
  misc_feature: Reduced expression when VOC is produced
  misc_feature: Encodes the peptide sequence at SEQ ID NO 29020
atggccgcatctatacaagaccgcactgccgagttcaagtctgttctgacgcaagcccaacgacgacaagccacgtcgaaagtcagcgcacagcggcagtcgcttctctccaacgcccagaaacaacaggcgcacgacaatgcgccggcacgcaagtctgacttcgcccggcgcgccgccgagattggccgcagcatcggcgccacgatgggcaagctcgagaagctggcgctgctggccaagcgcaagacgctcttcgacgaccggcccgtcgagatcaacgagctcaccttcgtcatcaagcaggatctttccaccctgaaccagcaaatcgccggcctacaaacgctcacccgccagcagcacccaggtgcccgcgaccaagagggcgagcacaacaagaacgttgttctcatgctgcagggcaagctgtccgacgtcggtgccaacttcaaggatgttctcgaagtccgcacaaagaacatgcaagcctcccgttcccgcaccgagaacttcatttctcaggtctcccagcacgtccagccccagatccaacagtctgcttcgccactgtacggcaccccgcagcgtggcacaccctcgcccggcgccgatctgctgtctttgaaccccgtgggagatcaacagctgctgatgatggaagaggcccagccccagaacacctatatacaacaacgaggagaagccattgagaccattgaaaacaccatcaatgagctcggttcgatatttggtcagctggctgagatggtttcggagcaagcgcagatgattgagcgcatagacgccaacaccgaagatgtcgtcgacaatgtccagggagcacagagggaactactcaaatacttcacaagagtctccagcaatcggtggttaatcgccaagatgttcggcgtgctaatgatattctttttgctctgggtactcgttgccggctag

SEQ ID NO: 29020 - protein, 319 aa, Muscodor strobelii
  misc_feature: SGI Peptide ID NO. 569962
  misc_feature (51)..(155): Pfam Id: PF00804 Pfam Desc: Syntaxin
  misc_feature (232)..(294): Pfam Id: PF05739 Pfam Desc: SNARE domain
  misc_feature (3)..(319): NCBI GI: 46130672 Blast Desc: FG08940.1 [Gibberella zeae PH-1]
  misc_feature (3)..(312): NCBI GI: 256733768 Blast Desc: [Nectria haematococca mpVI 77-13-4]
  misc_feature (3)..(319): NCBI GI: 154319824 Blast Desc: BC1G_02393 [Botryotinia fuckeliana B05.10] gi|150856051|gb|EDN31243.1| BC1G_02393 [Botryotinia fuckeliana B05.10]
  misc_feature (3)..(319): NCBI GI: 156046119 Blast Desc: syntaxin 5 [Sclerotinia sclerotiorum 1980] gi|154693730|gb|EDN93468.1| syntaxin 5 [Sclerotinia sclerotiorum 1980]
  misc_feature (3)..(319): NCBI GI: 39970907 Blast Desc: MGG_02920 [Magnaporthe grisea 70-15] gi|149210417|ref|XP_001522583.1| MGCH7_ch7g683 [Magnaporthe grisea 70-15] gi|86196638|gb|EAQ71276.1| MGCH7_ch7g683 grisea
  misc_feature (3)..(312): NCBI GI: 261353401 Blast Desc: syntaxin-5 [Verticillium albo-atrum VaMs.102]
  misc_feature (3)..(319): NCBI GI: 212536416 Blast Desc: ER-Golgi SNARE complex subunit (Sed5), [Penicillium marneffei ATCC 18224] gi|210070763|gb|EEA24853.1| ER-Golgi SNARE complex subunit (Sed5), [Penicillium marneffei ATCC 18224]
  misc_feature (3)..(319): NCBI GI: 242795543 Blast Desc: ER-Golgi SNARE complex subunit (Sed5), [Talaromyces stipitatus ATCC 10500] gi|218719202|gb|EED18622.1| ER-Golgi SNARE complex subunit (Sed5), [Talaromyces stipitatus ATCC 10500]
  misc_feature (1)..(319): NCBI GI: 171676225 Blast Desc: protein product [Podospora anserina] gi|170936178|emb|CAP60838.1| protein product [Podospora anserina]
  misc_feature (4)..(319): NCBI GI: 75859136 Blast Desc: AN9526.2 [Aspergillus nidulans FGSC A4] gi|40747582|gb|EAA66738.1| AN9526.2 [Aspergillus nidulans FGSC A4] gi|259482284|tpe|CBF76619.1| TPA: ER-Golgi SNARE complex Sed5
  misc_feature: Useful for introducing or modulating the production of volatile compounds
MAASIQDRTAEFKSVLTQAQRRQATSKVSAQRQSLLSNAQKQQAHDNAPARKSDFARRAAEIGRSIGATMGKLEKLALLAKRKTLFDDRPVEINELTFVIKQDLSTLNQQIAGLQTLTRQQHPGARDQEGEHNKNVVLMLQGKLSDVGANFKDVLEVRTKNMQASRSRTENFISQVSQHVQPQIQQSASPLYGTPQRGTPSPGADLLSLNPVGDQQLLMMEEAQPQNTYIQQRGEAIETIENTINELGSIFGQLAEMVSEQAQMIERIDANTEDVVDNVQGAQRELLKYFTRVSSNRWLIAKMFGVLMIFFLLWVLVAG

SEQ ID NO: 29021 - DNA, 2337 bp, Muscodor strobelii
  misc_feature: SGI EST ID NO. CUFF.68769.0
  misc_feature: Variant of the nucleotide sequence at SEQ ID NO 29019
gcaggcaccgccacaggtggaaagcaagggtgccacatgcagacaggatctaaattcaaaggccaggctggtatttccagcaggtattccctgtctcgcatgttgcagacgctggatgtaggtgcagacaggacctgaatgacctgtgtagtactgtacctaggtacctagcgtactctgtactattcgtgtcctcccctgccttactattctctcgaccttgcaacgacacctcacatcatcacggcgcgacatctatctctctctcaacacacacaaggccctcccatccctccttcgacagcccgtgcacgccacagcagcaaacaccgacgtcgacctccaaccctgatccgtccacctgtcccgtccctccgccgaccaactccgaccggcgacacatcaagaacgaaaacagccggcgacaccgtccttgacatacatcgcagtcaaataacgacatatcgactcctcctcttttgtctttcgtccccgcctccggtgccgagtctacctcgacttctgtcccatcccaacatccgctgcgtggcattgcgctggtcgccgtctgcgctcccctattcgtgaattcatcggctcggtccgaagcgccggccgacgcggtcacttgtcattcacaatggccgcatctatacaagaccgcactgccgagttcaagtctgttctgacgcaagcccaacgacgacaagccacgtcgaaagtcagcgcacagcggcagtcgcttctctccaacgcccagaaacaacaggcgcacgacaatgcgccggcacgcaagtctgacttcgcccggcgcgccgccgagattggccgcagcatcggcgccacgatgggcaagctcgagaagctggcgctgctggccaagcgcaagacgctcttcgacgaccggcccgtcgagatcaacgagctcaccttcgtcatcaagcaggatctttccaccctgaaccagcaaatcgccggcctacaaacgctcacccgccagcagcacccaggtgcccgcgaccaagagggcgagcacaacaagaacgttgttctcatgctgcagggcaagctgtccgacgtcggtgccaacttcaaggatgttctcgaagtccgcacaaagaacatgcaagcctcccgttcccgcaccgagaacttcatttctcaggtctcccagcacgtccagccccagatccaacagtctgcttcgccactgtacggcaccccgcagcgtggcacaccctcgcccggcgccgatctgctgtctttgaaccccgtgggagatcaacagctgctgatgatggaagaggcccagccccagaacacctatatacaacaacgaggagaagccattgagaccattgaaaacaccatcaatgagctcggttcgatatttggtcagctggctgagatggtttcggagcaagcgcagatgattgagcgcatagacgccaacaccgaagatgtcgtcgacaatgtccagggagcacagagggaactactcaaatacttcacaagagtctccagcaatcggtggttaatcgccaagatgttcggcgtgctaatgatattctttttgctctgggtactcgttgccggctagacggagagaaactttcggaccacaaagatgaagacgaggcggaattcgcgccattatcttgtatttactactgactcgagcctgttcttgtgatgctatgatagaaagatgagaaaagagcacggtgggaactacgagcattagatattctttttgtaataccactgcatgcatggccaggcctggctgagggtttctttcttttccgctttggtgcgacctacgcaatacttctgtgtatacaatgcttattcgcctatctatgcggcagtaacctgttagaaagccatcccgtcgttaccctttcgacatgagcgtctagagcacttcgttaagcttatacgatcgccagtctcgcagccgcgagacattctttacatttttacttttcctcttttcatatcacaatggcgggattttacgcttttgaacgactctggtcgcttgagagatttgataagttaagcagttttggtttggaacgatgatgactgcgaggcttgcctatgcaggcaaagtacttggagttgcattaagatgtgtcctatatatgatcccgtacgctgttgtagaatacagtgtatgttatcggcgcgatttgtgtatgggctcgctcaaatgggggacggacaacttcggtcaagcagggaacgagtgctcttttctctgtttgccctccttttccttcatgcattataaaattaagatgatagatattcgattcaattacaagtcat

SEQ ID NO: 29022 - DNA, 3279 bp, Muscodor strobelii
  misc_feature: SGI cDNA ID NO. 569963
  misc_feature: Reduced expression when VOC is produced
  misc_feature: Encodes the peptide sequence at SEQ ID NO 29023
atggattcgggctcgtatcagaacattcggcgcggcgccaatacgccttcgtccatgtcgccatcgacgccgtcggcatacaagaccaacgttaaccgcaccaagacgaagaaatgggtgacagcgaggcaggtcaactatgatggcgacgactggggcaacgattacgacgacgagtacgaggaccaagacgaccagcgagacgaacccgagccgccgccgccgcagacaggtttgcgacagccgggccaaggcggacaccagctcccctcatcacgaatcttctctcagcctgccgcgacggcgccagggccttcgaactatgcgacgggcccctctgccatgcgcagccccagtggcccgcccgccctccagcttcagacgcagcccggtccgcagatggcgacttcgtcaccgctggccacacagtctgcacacatcacctcccataacaactatccatcacccgcagcaccagtagttcagagcgcaggcactgcaccaagccaaacgcgattcccgccccggaaaagcagcatgggccagcaagaccgcccggagagtattgatcggatggcacccagatcagatgcgattcccgactctggttctagcaacaagcccgaacgcacgacgagtccggcggccaaggcactgcccttcgtgcggccgtctgacatatacaagcgcatggaggaggagaaagagaaggaaagattgtcgatggagtccggacggccaagcatggacagtctgatggggcgacgggagggcagctcgtctcccacccaggttcgatcgtctggagaacagcggcggcggacgagcttcgaaagtcacgacggctccgagtcggcgcgtggtctgaagccgactctggcgcccgtcgccgagcgaaagagcgaatacggtatggagggtcttctcgacaaacaccaggctgaacagcccgtcttggcgcatgaatcccacgagtcggtagcgccacagcagcagacggcgacgggtgagccgacagacgaggcccaagccgacgcggtcaagagccgccgcttctcgacaagcccccaattgcccacgttggcgcgcatgtctgggttcgggtttggcgacgatttcttttcttcctctggtggcttcgacgcctccgccagccccagacttccaaccactaccgaagagcctgtcgacgcatcgggccaaatcgacacatcccaatcaccagacggcgacggcgaaacccagaagatgcagccaccaagtctgttggaaggtcctaagctcgagcggaaacaaacacctgcagccgaacatagcgaagccgtgcgcgaggaggtgcagcctcctcccgcccgaccccaacttccaggccaatgggtgtccgagacgacgactatcgcatccgaacagcccacgcccatggaaagaccgagcgcacgtggcccgtcggccttggcccatgttgagaacgctagtgaaccttctcatgcagctacctacgatgaggaacccagcgatgttgagccgacgacagaagtgaagcagctgccgcagcccgaatccttggagggggtgtcgggaaacaaccgcgacatggtaactgagaaattcggcagtcaggttgggaaacatgatgatgcagtggcttccgacgttgtggctgccaatgctgtcggtgctgccggtgctgctggtgctgtccacgaacacgccacccctcagtcccttcctccactgcagacaaacagccaaagcgcagcgcaggccagctcacgaccagcgtccaccattgtcccctctgcccagtccactgcacagctggcctcggcttcacccacaacgcaatcggccaccgccacgagcgcttctgagttttcaccgactgcccctctcaacccgtaccgatcggatgcgagtcgaccagacaccgttcccccgcctacccaccaacggaaatccacattgagcaccatcgacaccgcggtgtctcctgaaaaagacagcgacaaactacatgaagaaatcatcaagtcgctgagccccccgccgctgtctcccggtggtgttgatggccggccagactacagtcgtaccagcaccatcgaaccatctcctggacaactcgctcgagagagctcatacctgtctggtgtctacgatgattacctttcgatggcagaagagaaatctttgcctgaagtaaagctgccgctccagccaccggcacccgctccggcaatggcgaagcctcaggacgagccagctaccctcgcggcctccgaccccagcagaccgaggcgattttcgtgggaacagggtgccgaagaggtagccttgagcccgacagagacacagaatgtcatacccatcatgccacaggagccccaactgtcggtgcaggagtcgccccccgatgagccaaacgtccaaccccaagccaatatcatttcgccactgtccgcagactcgctagccgcaggtcaaagtggccaaaaagccatgtcacatcagttatcacaagtgtcccaagtatcacaacttagcagcagtgcgctagatgacaaagccacgttggcagcaatcgagccaccttctccggtgtcatatatgcccaagaagagctccgatctagggcccgacaatacgaatccctcgcggctgtctttggcggacgagaaggaaaagtttctcgttgacaccaacgcccatccagcatttactcggtcgccatcgtcatcgcccgttcatgaggtatccatccccacaccgacatctgcggcaacaccaatggcattccgagacattttgaatatcgagtcccgtgagcaacgcatcctgaaactggaggagacgtgcgagcagttctacgccatgaactcgggcctttgcgactgggtctcgcacatgcagatccaagcagatccctcttccgacttccaagccccgatgccaccgcccacacggaccggcacccaaaccaacgcccagctgccgtattatcagcagatgattaacgcgagcaagtccaatgtagcggccacccaaccgcgccgtagcagcatgggcaacgttcaggctctgatggcgggacaaagcagtagctttagtggaggcggtaatcagatggagaaggctggggccaagagtaaagagttgttgcatgccgcgggtgtgtttgggaataagggcctaaagggtggtgtgaagttgttcaataaggggaagaacatcaacgaagaacggatgcagccatcactatacacaatagaaaccctctga

SEQ ID NO: 29023 - protein, 1092 aa, Muscodor strobelii
  misc_feature: SGI Peptide ID NO. 569963
  misc_feature (1)..(376): NCBI GI: 85118912 Blast Desc: NCU01908 [Neurospora crassa OR74A] gi|28927349|gb|EAA36303.1| [Neurospora crassa OR74A]
  misc_feature (650)..(1076): NCBI GI: 261353400 Blast Desc: conserved [Verticillium albo-atrum VaMs.102]
  misc_feature (14)..(310): NCBI GI: 145609874 Blast Desc: MGG_02917 [Magnaporthe grisea 70-15] gi|145017258|gb|EDK01621.1| MGG_02917 [Magnaporthe grisea 70-15]
  misc_feature (14)..(310): NCBI GI: 149210407 Blast Desc: MGCH7_ch7g680 [Magnaporthe grisea 70-15] gi|86196635|gb|EAQ71273.1| MGCH7_ch7g680 [Magnaporthe grisea 70-15]
  misc_feature (3)..(303): NCBI GI: 169595026 Blast Desc: SNOG_00246 [Phaeosphaeria nodorum SN15] gi|111070621|gb|EAT91741.1| SNOG_00246 [Phaeosphaeria nodorum SN15]
  misc_feature (1)..(463): NCBI GI: 116193837 Blast Desc: CHGG_06636 [Chaetomium globosum CBS 148.51] gi|88182549|gb|EAQ90017.1| CHGG_06636 [Chaetomium globosum CBS 148.51]
  misc_feature (616)..(1074): NCBI GI: 46130670 Blast Desc: FG08939.1 [Gibberella zeae PH-1]
  misc_feature (644)..(1075): NCBI GI: 145609874 Blast Desc: MGG_02917 [Magnaporthe grisea 70-15] gi|145017258|gb|EDK01621.1| MGG_02917 [Magnaporthe grisea 70-15]
  misc_feature (24)..(364): NCBI GI: 189201998 Blast Desc: conserved [Pyrenophora tritici-repentis Pt-1C-BFP] gi|187984434|gb|EDU49922.1| conserved [Pyrenophora tritici-repentis Pt-1C-BFP]
  misc_feature (566)..(1074): NCBI GI: 256734275 Blast Desc: NECHADRAFT_36718 [Nectria haematococca mpVI 77-13-4]
  misc_feature: Useful for introducing or modulating the production of volatile compounds
MDSGSYQNIRRGANTPSSMSPSTPSAYKTNVNRTKTKKWVTARQVNYDGDDWGNDYDDEYEDQDDQRDEPEPPPPQTGLRQPGQGGHQLPSSRIFSQPAATAPGPSNYATGPSAMRSPSGPPALQLQTQPGPQMATSSPLATQSAHITSHNNYPSPAAPVVQSAGTAPSQTRFPPRKSSMGQQDRPESIDRMAPRSDAIPDSGSSNKPERTTSPAAKALPFVRPSDIYKRMEEEKEKERLSMESGRPSMDSLMGRREGSSSPTQVRSSGEQRRRTSFESHDGSESARGLKPTLAPVAERKSEYGMEGLLDKHQAEQPVLAHESHESVAPQQQTATGEPTDEAQADAVKSRRFSTSPQLPTLARMSGFGFGDDFFSSSGGFDASASPRLPTTTEEPVDASGQIDTSQSPDGDGETQKMQPPSLLEGPKLERKQTPAAEHSEAVREEVQPPPARPQLPGQWVSETTTIASEQPTPMERPSARGPSALAHVENASEPSHAATYDEEPSDVEPTTEVKQLPQPESLEGVSGNNRDMVTEKFGSQVGKHDDAVASDVVAANAVGAAGAAGAVHEHATPQSLPPLQTNSQSAAQASSRPASTIVPSAQSTAQLASASPTTQSATATSASEFSPTAPLNPYRSDASRPDTVPPPTHQRKSTLSTIDTAVSPEKDSDKLHEEIIKSLSPPPLSPGGVDGRPDYSRTSTIEPSPGQLARESSYLSGVYDDYLSMAEEKSLPEVKLPLQPPAPAPAMAKPQDEPATLAASDPSRPRRFSWEQGAEEVALSPTETQNVIPIMPQEPQLSVQESPPDEPNVQPQANIISPLSADSLAAGQSGQKAMSHQLSQVSQVSQLSSSALDDKATLAAIEPPSPVSYMPKKSSDLGPDNTNPSRLSLADEKEKFLVDTNAHPAFTRSPSSSPVHEVSIPTPTSAATPMAFRDILNIESREQRILKLEETCEQFYAMNSGLCDWVSHMQIQADPSSDFQAPMPPPTRTGTQTNAQLPYYQQMINASKSNVAATQPRRSSMGNVQALMAGQSSSFSGGGNQMEKAGAKSKELLHAAGVFGNKGLKGGVKLFNKGKNINEERMQPSLYTIETL

SEQ ID NO: 29024 - DNA, 4402 bp, Muscodor strobelii
  misc_feature: SGI EST ID NO. CUFF.69023.0
  misc_feature: Variant of the nucleotide sequence at SEQ ID NO 29022
ccaggtatcccggtccaggatctgcattccactctccacctggagaagccgtttgcaccgtagtcgcaaaacggctgcgaatccaccgagggaaacatgcagtctcgcgaggttctcgtatacctaatttgcagccgtacttagagagaaatgtagagcatggatgtggtcgaaggtcccgagaaaacacgttgggcacacctaaatggtagatccccgagccgaacccatgaaaccatagccaactctccaacctgccggggccaacttgtcttgtagagtcatcatctatcgtcacgaccgtcttccactctgctaggttgcattctcattccctacctaacctaaccgctttcattacttacctctcgcgccacctacgagccgcctacgaattgagaagtctgtgagattctcaagcatatctcttacctcctacatacactaggtacatacacctcccgcctcgtgaggatatttcgacgttttacacccgtcgcatcgccgcccttcattcataccatcagatatcgcattcctctcaccccgaccgaccctctgctttaagctcgtcgacgtagactcctcctcggccacccccaacctattatacctacatgtctaccctctagcctatactttatgcttcgtcctttatcccgcgtcgtcgtcacccgaacatgatagtcgagtatttgtcacacgacagctaattcactaattgcatttgctggataccctatttgtctgcactgtttgcattgccattgctcagtccgtctcttgaactctattctgattgctggtttgttgtaccttggttctgtataatacgcttgtcttgagcacttcgccctactcagccagtcaaagggagtgtgtgcttgttagggttcttccaatcccgcccgtcgaggaggctatgcatgtggtgaacgagagcgtcgagtaaagcaataatggattcgggctcgtatcagaacattcggcgcggcgccaatacgccttcgtccatgtcgccatcgacgccgtcggcatacaagaccaacgttaaccgcaccaagacgaagaaatgggtgacagcgaggcaggtcaactatgatggcgacgactggggcaacgattacgacgacgagtacgaggaccaagacgaccagcgagacgaacccgagccgccgccgccgcagacaggtttgcgacagccgggccaaggcggacaccagctcccctcatcacgaatcttctctcagcctgccgcgacggcgccagggccttcgaactatgcgacgggcccctctgccatgcgcagccccagtggcccgcccgccctccagcttcagacgcagcccggtccgcagatggcgacttcgtcaccgctggccacacagtctgcacacatcacctcccataacaactatccatcacccgcagcaccagtagttcagagcgcaggcactgcaccaagccaaacgcgattcccgccccggaaaagcagcatgggccagcaagaccgcccggagagtattgatcggatggcacccagatcagatgcgattcccgactctggttctagcaacaagcccgaacgcacgacgagtccggcggccaaggcactgcccttcgtgcggccgtctgacatatacaagcgcatggaggaggagaaagagaaggaaagattgtcgatggagtccggacggccaagcatggacagtctgatggggcgacgggagggcagctcgtctcccacccaggttcgatcgtctggagaacagcggcggcggacgagcttcgaaagtcacgacggctccgagtcggcgcgtggtctgaagccgactctggcgcccgtcgccgagcgaaagagcgaatacggtatggagggtcttctcgacaaacaccaggctgaacagcccgtcttggcgcatgaatcccacgagtcggtagcgccacagcagcagacggcgacgggtgagccgacagacgaggcccaagccgacgcggtcaagagccgccgcttctcgacaagcccccaattgcccacgttggcgcgcatgtctgggttcgggtttggcgacgatttcttttcttcctctggtggcttcgacgcctccgccagccccagacttccaaccactaccgaagagcctgtcgacgcatcgggccaaatcgacacatcccaatcaccagacggcgacggcgaaacccagaagatgcagccaccaagtctgttggaaggtcctaagctcgagcggaaacaaacacctgcagccgaacatagcgaagccgtgcgcgaggaggtgcagcctcctcccgcccgaccccaacttccaggccaatgggtgtccgagacgacgactatcgcatccgaacagcccacgcccatggaaagaccgagcgcacgtggcccgtcggccttggcccatgttgagaacgctagtgaaccttctcatgcagctacctacgatgaggaacccagcgatgttgagccgacgacagaagtgaagcagctgccgcagcccgaatccttggagggggtgtcgggaaacaaccgcgacatggtaactgagaaattcggcagtcaggttgggaaacatgatgatgcagtggcttccgacgttgtggctgccaatgctgtcggtgctgccggtgctgctggtgctgtccacgaacacgccacccctcagtcccttcctccactgcagacaaacagccaaagcgcagcgcaggccagctcacgaccagcgtccaccattgtcccctctgcccagtccactgcacagctggcctcggcttcacccacaacgcaatcggccaccgccacgagcgcttctgagttttcaccgactgcccctctcaacccgtaccgatcggatgcgagtcgaccagacaccgttcccccgcctacccaccaacggaaatccacattgagcaccatcgacaccgcggtgtctcctgaaaaagacagcgacaaactacatgaagaaatcatcaagtcgctgagccccccgccgctgtctcccggtggtgttgatggccggccagactacagtcgtaccagcaccatcgaaccatctcctggacaactcgctcgagagagctcatacctgtctggtgtctacgatgattacctttcgatggcagaagagaaatctttgcctgaagtaaagctgccgctccagccaccggcacccgctccggcaatggcgaagcctcaggacgagccagctaccctcgcggcctccgaccccagcagaccgaggcgattttcgtgggaacagggtgccgaagaggtagccttgagcccgacagagacacagaatgtcatacccatcatgccacaggagccccaactgtcggtgcaggagtcgccccccgatgagccaaacgtccaaccccaagccaatatcatttcgccactgtccgcagactcgctagccgcaggtcaaagtggccaaaaagccatgtcacatcagttatcacaagtgtcccaagtatcacaacttagcagcagtgcgctagatgacaaagccacgttggcagcaatcgagccaccttctccggtgtcatatatgcccaagaagagctccgatctagggcccgacaatacgaatccctcgcggctgtctttggcggacgagaaggaaaagtttctcgttgacaccaacgcccatccagcatttactcggtcgccatcgtcatcgcccgttcatgaggtatccatccccacaccgacatctgcggcaacaccaatggcattccgagacattttgaatatcgagtcccgtgagcaacgcatcctgaaactggaggagacgtgcgagcagttctacgccatgaactcgggcctttgcgactgggtctcgcacatgcagatccaagcagatccctcttccgacttccaagccccgatgccaccgcccacacggaccggcacccaaaccaacgcccagctgccgtattatcagcagatgattaacgcgagcaagtccaatgtagcggccacccaaccgcgccgtagcagcatgggcaacgttcaggctctgatggcgggacaaagcagtagctttagtggaggcggtaatcagatggagaaggctggggccaagagtaaagagttgttgcatgccgcgggtgtgtttgggaataagggcctaaagggtggtgtgaagttgttcaataaggggaagagtaagttaagggaaaggggggagaaggggagagggtaggttgatgttgcggttgggggtgtgcggctgtgttgtggtaccgtgtatggatcagtgcatgatgaatatgagatggaatgcatccatgagcatcgacattcgaatgactgtatggatatatgtgaacatacgtgccgctgtaactggcgaaatggacataatcctccaatgtagtttct

SEQ ID NO: 29025 - DNA, 927 bp, Muscodor strobelii
  misc_feature: SGI cDNA ID NO. 569964
  misc_feature: Encodes the peptide sequence at SEQ ID NO 29026
atgggaaagaagcgcgttttagttagctatggtgttgatgtcgatgctgtcgcagggtggcttggcagctacggaggagaaaactcaacaagtgacatcagtagaggtctgtttgcaggtaccgtgggcgtccaacgtctccttaaaatgttcaggaagtacaatatgagaacaacatggttcattccaggtcatagtctcgagactttccccgaggacatggcagcggttcgagatgcggggcatgaaatcggtcttcatggttattcgcacgaaaatccggtagatatgacagtccatcagcagcgcgatgtgctggataagacatacaaaatgatgaaggagtttgccgggaaaccaccaaggggatcagtcgcaccgtggtgggaatgcagcaaagagggtgctcagttattgctcgactatggcatcgagtatgatcatagcttcaaccatcaagattgtcaagcgtattatttacgcataggcgatacttggacaaacattgactactcgaaaaaggcagaggagtggatgaagcctttaatccgtgggcaagaaactggactagtcgagataccagcaaactggtacctcgatgatctgccgccgatgatgttcattaagtcatcgccgaacagtcatggattcattaatccccgcgacatcgaagagttatggaaagatcaatttgactacttctatcgcgagcatgacgagttcattttccccatcacaatccatcctgatgtgtccgggagacctcaggttctgctaatgcatgagaggcttattgaatacttccaaaagcatgagggcgttgagtttgttgcgatggagcagatatgtgacgaattcaaggctaagaatgcgcccacccctggggcagtgctccctagaaagactcatgcgaatcttggaaattag

SEQ ID NO: 29026 - protein, 308 aa, Muscodor strobelii
  misc_feature: SGI Peptide ID NO. 569964
  misc_feature (1)..(147): Pfam Id: PF01522 Pfam Desc: Polysaccharide deacetylase
  misc_feature (40)..(147): Pfam Id: PF01522 Pfam Desc: Polysaccharide deacetylase
  misc_feature (1)..(306): NCBI GI: 189192871 Blast Desc: polysaccharide deacetylase family protein [Pyrenophora tritici-repentis Pt-1C-BFP] gi|187978338|gb|EDU44964.1| polysaccharide deacetylase family protein [Pyrenophora Pt-1C-BFP]
  misc_feature (1)..(306): NCBI GI: 255955907 Blast Desc: Pc21g17080 [Penicillium chrysogenum Wisconsin 54-1255] gi|211590417|emb|CAP96605.1| Pc21g17080 [Penicillium chrysogenum Wisconsin 54-1255]
  misc_feature (1)..(306): NCBI GI: 70997986 Blast Desc: polysaccharide deacetylase family protein [Aspergillus fumigatus Af293] gi|66851361|gb|EAL91687.1| polysaccharide deacetylase family protein [Aspergillus fumigatus Af293] family
  misc_feature (1)..(306): NCBI GI: 119479495 Blast Desc: polysaccharide deacetylase, [Neosartorya fischeri NRRL 181] gi|119407930|gb|EAW17879.1| polysaccharide deacetylase, [Neosartorya fischeri NRRL 181]
  misc_feature (1)..(299): NCBI GI: 145601523 Blast Desc: MGG_01922 [Magnaporthe grisea 70-15] gi|145009581|gb|EDJ94237.1| MGG_01922 [Magnaporthe grisea 70-15]
  misc_feature (1)..(308): NCBI GI: 256735676 Blast Desc: carbohydrate esterase family 4 [Nectria haematococca mpVI 77-13-4]
  misc_feature (1)..(306): NCBI GI: 226285772 Blast Desc: Arp2/3 complex subunit Arc16 [Paracoccidioides brasiliensis Pb01]
  misc_feature (1)..(299): NCBI GI: 145250107 Blast Desc: An15g00280 [Aspergillus niger] gi|134082080|emb|CAK42197.1| protein product [Aspergillus niger]
  misc_feature (1)..(301): NCBI GI: 115398524 Blast Desc: ATEG_05673 [Aspergillus terreus NIH2624] gi|114191734|gb|EAU33434.1| ATEG_05673 [Aspergillus terreus NIH2624]
  misc_feature (1)..(299): NCBI GI: 261187586 Blast Desc: Arp2/3 complex subunit Arc16 [Ajellomyces dermatitidis SLH14081] gi|239594103|gb|EEQ76684.1| Arp2/3 complex subunit Arc16 [Ajellomyces dermatitidis SLH14081] Arp2/3 complex subunit
  misc_feature (38)..(290): SWISSPROT Homolog: EC 3.5.1.41 Chitin deacetylase
MGKKRVLVSYGVDVDAVAGWLGSYGGENSTSDISRGLFAGTVGVQRLLKMFRKYNMRTTWFIPGHSLETFPEDMAAVRDAGHEIGLHGYSHENPVDMTVHQQRDVLDKTYKMMKEFAGKPPRGSVAPWWECSKEGAQLLLDYGIEYDHSFNHQDCQAYYLRIGDTWTNIDYSKKAEEWMKPLIRGQETGLVEIPANWYLDDLPPMMFIKSSPNSHGFINPRDIEELWKDQFDYFYREHDEFIFPITIHPDVSGRPQVLLMHERLIEYFQKHEGVEFVAMEQICDEFKAKNAPTPGAVLPRKTHANLGN

SEQ ID NO: 29027 - DNA, 1772 bp, Muscodor strobelii
  misc_feature: SGI EST ID NO. CUFF.68590.0
  misc_feature: Variant of the nucleotide sequence at SEQ ID NO 29025
tttggacgccccaacactagttcctaccgataagcgcttgacgtagttcggcgtgactcggatctgtatgaagctggggtaattatcatcacgcatgtgtcattatctgagatcggcaatctcagcagcattttcctctagactgggtgggagtgaagcgtgtagagggcaacataccactctaggttatctaccctgcgcatgcaatcactttgtcctccaggataactcacttcctgtcagatttattgtcaagcactgcgcgtagttaatatccatcatgggaaagaagcgcgttttagttagctatggtgttgatgtcgatgctgtcgcagggtggcttggcagctacggaggagaaaactcaacaagtgacatcagtagaggtctgtttgcaggtaccgtgggcgtccaacgtctccttaaaatgttcaggaagtacaatatgagaacaacatggttcattccaggtcatagtctcgagactttccccgaggacatggcagcggttcgagatgcggggcatgaaatcggtcttcatggttattcgcacgaaaatccggtagatatgacagtccatcagcagcgcgatgtgctggataagacatacaaaatgatgaaggagtttgccgggaaaccaccaaggggatcagtcgcaccgtggtgggaatgcagcaaagagggtgctcagttattgctcgactatggcatcgagtatgatcatagcttcaaccatcaagattgtcaagcgtattatttacgcataggcgatacttggacaaacattgactactcgaaaaaggcagaggagtggatgaagcctttaatccgtgggcaagaaactggactagtcgagataccagcaaactggtacctcgatgatctgccgccgatgatgttcattaagtcatcgccgaacagtcatggattcattaatccccgcgacatcgaagagttatggaaagatcaatttgactacttctatcgcgagcatgacgagttcattttccccatcacaatccatcctgatgtgtccgggagacctcaggttctgctaatgcatgagaggcttattgaatacttccaaaagcatgagggcgttgagtttgttgcgatggagcagatatgtgacgaattcaaggctaagaatgcgcccacccctggggcagtgctccctagaaagactcatgcgaatcttggaaattaggaacggctttagatttttgcttaaatcgacaatggaacttcacattttactgtcgccaaccacgtccttcgttcacatcagcctcgaccaattcagccagcccactctggaggaatacatgtattccatggactacttgggcaatggagctagtttttcggatgctacaggccatgactatttaccaaacccttcgcaacaatgttggatcattttacaattcgctgacacaattcgtgtattggagatgcaaagctcaagtgcaggagttgtgagttacaaaacagctccaagagggcgagagaaagcacagtgagtcgggttagacgtattgagtgcagggagcagagaatctagacaggaatcaggatgagatttttcgtggatgtgaacctagagattctggtaagaaaacagcaagttttaatcgagtgacaagtcttagtaaaatacgctacgagaagacgcaatgctgcagttgatcttcattgctcagggacgacgtatcacgtaagtttagagcgtcgtgctgcagctctagaacttatctgagaagcaattgaga

SEQ ID NO: 29028 - DNA, 1092 bp, Muscodor strobelii
  misc_feature: SGI cDNA ID NO. 569965
  misc_feature: Encodes the peptide sequence at SEQ ID NO 29029
atgaagactcccatgatcgccatagccttcgggttattgtcacttgatcaaatcatcgcctttcaggctccataccagagaaaagagaccgaatgcacagtcaaatctgttcgcaagccatggcagaacctgacttccgctgaaaagcagtcctatatagagggcgatcgatgtctcatgtctttgccctccaagactggactgccgggagctaagtctagatgggacgagttacaatacgctcatgctgctcaagcgcgatatatccatgggacgggcgcattcttgcctttccaccgttatttcgtgactgttcatgatcatctgttgagagcggagtgtaactataccgggcctttaccttactgggacgagcctgccgatgttggccatatcagagactcggcgttgtttagcggcgaaccaaatttcggtgggaacggcgagggaataaacagatgtgtcaccactggcccatttgcaaacacaacgctgcgcattcaacatgacttaacagctgcggaatattgtctatcgcgggcttttgacgatagaatgttcaatgctgctgcaagtccattcatcgaagcttgtcttcaacaagatgtgtttcttggcgtatggcattgccttgaacaatctcctcacggagccggacacggtggtattggtgggacgatgttggatgtacagctgtctcctggcgaccctctcttttggttgcatcatggttatctcgatatggtttggtggaagtggcaggcacacaatcttacaagccgtctcacggagattgcgggaaacaatacgccaagtgataccttagggcctggcggtgggttcggcggcttcaatttcacgaacccaggatttcctccgcctggagctttcaatggctcctttccagggaatggctccttcccagggttcacaccgcagcccgcaaaccctgccattgagaactatttcaacgacgatggttacctagtaacgctcaaccacacactctggtctgccaatatagtagaaaatgtaacgattgccgatgtcttagatcctaggagcgggtttgtgtgtggtgaattctcgtga

SEQ ID NO: 29029 - protein, 363 aa, Muscodor strobelii
  misc_feature: SGI Peptide ID NO. 569965
  misc_feature (14)..(290): Pfam Id: PF00264 Pfam Desc: Common central domain of tyrosinase
  misc_feature (211)..(255): Pfam Id: PF00264 Pfam Desc: Common central domain of tyrosinase
  misc_feature (26)..(362): NCBI GI: 261356949 Blast Desc: conserved [Verticillium albo-atrum VaMs.102]
  misc_feature (33)..(362): NCBI GI: 145604204 Blast Desc: MGG_13937 [Magnaporthe grisea 70-15] gi|145012249|gb|EDJ96905.1| MGG_13937 [Magnaporthe grisea 70-15]
  misc_feature (30)..(362): NCBI GI: 170940291 Blast Desc: protein product [Podospora anserina]
  misc_feature (18)..(362): NCBI GI: 240277823 Blast Desc: conserved [Ajellomyces capsulatus H143]
  misc_feature (31)..(362): NCBI GI: 154285700 Blast Desc: [Ajellomyces capsulatus NAm1] gi|150407286|gb|EDN02827.1| [Ajellomyces capsulatus NAm1]
  misc_feature (32)..(362): NCBI GI: 116205217 Blast Desc: CHGG_10492 [Chaetomium globosum CBS 148.51] gi|88176620|gb|EAQ84088.1| CHGG_10492 [Chaetomium globosum CBS 148.51]
  misc_feature (32)..(352): NCBI GI: 67540544 Blast Desc: AN6442.2 [Aspergillus nidulans FGSC A4] gi|40739274|gb|EAA58464.1| AN6442.2 [Aspergillus nidulans FGSC A4] gi|259479330|tpe|CBF69463.1| TPA: amino acid transporter FGSC
  misc_feature (37)..(362): NCBI GI: 154321706 Blast Desc: BC1G_01000 [Botryotinia fuckeliana B05.10] gi|150850247|gb|EDN25440.1| BC1G_01000 [Botryotinia fuckeliana B05.10]
  misc_feature (7)..(362): NCBI GI: 116205692 Blast Desc: CHGG_02139 [Chaetomium globosum CBS 148.51] gi|88182736|gb|EAQ90204.1| CHGG_02139 [Chaetomium globosum CBS 148.51]
  misc_feature (36)..(359): NCBI GI: 238507087 Blast Desc: tyrosinase, [Aspergillus flavus NRRL3357] gi|220689458|gb|EED45809.1| tyrosinase, [Aspergillus flavus NRRL3357]
  misc_feature (36)..(272): SWISSPROT Homolog: EC 1.14.18.1 Monophenol monooxygenase
MKTPMIAIAFGLLSLDQIIAFQAPYQRKETECTVKSVRKPWQNLTSAEKQSYIEGDRCLMSLPSKTGLPGAKSRWDELQYAHAAQARYIHGTGAFLPFHRYFVTVHDHLLRAECNYTGPLPYWDEPADVGHIRDSALFSGEPNFGGNGEGINRCVTTGPFANTTLRIQHDLTAAEYCLSRAFDDRMFNAAASPFIEACLQQDVFLGVWHCLEQSPHGAGHGGIGGTMLDVQLSPGDPLFWLHHGYLDMVWWKWQAHNLTSRLTEIAGNNTPSDTLGPGGGFGGFNFTNPGFPPPGAFNGSFPGNGSFPGFTPQPANPAIENYFNDDGYLVTLNHTLWSANIVENVTIADVLDPRSGFVCGEFS

SEQ ID NO: 29030 - DNA, 1383 bp, Muscodor strobelii
  misc_feature: SGI cDNA ID NO. 569966
  misc_feature: Encodes the peptide sequence at SEQ ID NO 29031
atgcccggactatacggatccgtactccgcgacaagtcggcttccgtcaccatatataacgagggtcatcgggtccggcttattacgtcattctcaccgacctcgatacaatgcagattctacactttgcagtctgcgctggtacgtgtagcaatggatgagtttggtgtgttgtcacacgagtacttcaagaccagcgcgcaattctggacgccgcgcacgcattaccccaccatcaccatagaccatccgtctccaagctcgcccgcatcatacggcagtgtgtctgtcgactcttcccagttgtcagagcttttcggagctggagaggaaaatggaatgatcagcgacgtaacgccaaaatcatcatgcctacgtctagtcagaattataggcgcgcgaaattcacagggcaagttgcaacgctccctagagatatctagagatgtcttcttgaggctagtccgtagtattggcatacatccgtctgcgctctggttgatacaatttgcgtacgatggctttcacaatttcagcgacggtgacaaggacactttctatttgggaacgtcggagtttgcccttgcctgggttttctcgtacaagcaatgcactacgcatgcaatcatgatagtacgcaaagttgacgatagcccaacgttcctatggttcatgaaactgttagagcagcacaagaatctgattcattcatcgctgcttttggcttatgttgcctctctcgctctgtgctgtacatatgacgaggagattctcgactctcagatgccggatcttcacgagattgaaaagagaatcggctacggcaaagacacgcataagctccagaaccgcgtagatctcgtgtcagctatggagtcgatacagaaaattgggaaagtgttgcagcatattgcgaggaagagaactcactaccatacaattaatcagatttgtgagttcatggagaaggcacgagaacagcaggaaagacgcacagcatgccaagtgacgctcaaggagcgcatagaagcaaacacagactcgctcctggctgcgctctatgccttaatgactcacgaagacgcttctatcaacaccgagcttgcagctgccagcaagatgattgcagaggctgctaaacgagacagctcctctatgaagacagtcgccatcatgaccatggccttcttacctgccactttctttgctgccttgttcgcattgccctctctagattggcagagcgagagtgtgatacagacaaacttttgggtgtactgggctttcacgctcccttcgactgctttggtcttcattatctggttcgtactggataacaggacagcaattaccaaatggttgcagtcggagatattaacataa

SEQ ID NO: 29031 - protein, 460 aa, Muscodor strobelii
  misc_feature: SGI Peptide ID NO. 569966
  misc_feature (146)..(441): NCBI GI: 261359623 Blast Desc: conserved [Verticillium albo-atrum VaMs.102]
  misc_feature (144)..(442): NCBI GI: 116195042 Blast Desc: [Chaetomium globosum CBS 148.51] gi|88180032|gb|EAQ87500.1| [Chaetomium globosum CBS 148.51]
  misc_feature (338)..(452): NCBI GI: 115443480 Blast Desc: conserved [Aspergillus terreus NIH2624] gi|114188416|gb|EAU30116.1| conserved [Aspergillus terreus NIH2624]
  misc_feature (276)..(442): NCBI GI: 256728825 Blast Desc: NECHADRAFT_79844 [Nectria haematococca mpVI 77-13-4]
  misc_feature (362)..(443): NCBI GI: 169603461 Blast Desc: SNOG_04740 [Phaeosphaeria nodorum SN15] gi|111067380|gb|EAT88500.1| SNOG_04740 [Phaeosphaeria nodorum SN15]
  misc_feature (351)..(447): NCBI GI: 39976933 Blast Desc: MGG_06369 [Magnaporthe grisea 70-15] gi|145016224|gb|EDK00714.1| MGG_06369 [Magnaporthe grisea 70-15]
  misc_feature (351)..(447): NCBI GI: 261360278 Blast Desc: conserved [Verticillium albo-atrum VaMs.102]
  misc_feature (328)..(441): NCBI GI: 67526207 Blast Desc: AN3561.2 [Aspergillus nidulans FGSC A4] gi|40740579|gb|EAA59769.1| AN3561.2 [Aspergillus nidulans FGSC A4] gi|259481916|tpe|CBF75884.1| TPA: [Aspergillus nidulans FGSC
  misc_feature (351)..(447): NCBI GI: 156051792 Blast Desc: SS1G_07303 [Sclerotinia sclerotiorum 1980] gi|154705081|gb|EDO04820.1| SS1G_07303 [Sclerotinia sclerotiorum 1980]
  misc_feature (361)..(447): NCBI GI: 46125749 Blast Desc: FG07252.1 [Gibberella zeae PH-1]
MPGLYGSVLRDKSASVTIYNEGHRVRLITSFSPTSIQCRFYTLQSALVRVAMDEFGVLSHEYFKTSAQFWTPRTHYPTITIDHPSPSSPASYGSVSVDSSQLSELFGAGEENGMISDVTPKSSCLRLVRIIGARNSQGKLQRSLEISRDVFLRLVRSIGIHPSALWLIQFAYDGFHNFSDGDKDTFYLGTSEFALAWVFSYKQCTTHAIMIVRKVDDSPTFLWFMKLLEQHKNLIHSSLLLAYVASLALCCTYDEEILDSQMPDLHEIEKRIGYGKDTHKLQNRVDLVSAMESIQKIGKVLQHIARKRTHYHTINQICEFMEKAREQQERRTACQVTLKERIEANTDSLLAALYALMTHEDASINTELAAASKMIAEAAKRDSSSMKTVAIMTMAFLPATFFAALFALPSLDWQSESVIQTNFWVYWAFTLPSTALVFIIWFVLDNRTAITKWLQSEILT

SEQ ID NO: 29032 - DNA, 1122 bp, Muscodor strobelii
  misc_feature: SGI cDNA ID NO. 569967
  misc_feature: Encodes the peptide sequence at SEQ ID NO 29033
atggccacccagtcgctcgttttcagtccagaattgacaccggccgacgaattggtccttcggaacttggagcgtgacatccgacgttctccggcttcatccgcaccaattagtgccagcaatgattcacttgcaaaatctgtcgatgagcggccccttacgttaggacagtcagaaatcagcaactctgcgcattctcaaactcccagcagcaaatctgggctgtccaacaattacgatgctcgtgatatagctacacttgccaaatcaaatgaccctacgagttcgactttcgaacccaccgtcttttcatcatgggatatgaaagatctagagtctcggatatttgatcaagcttttccgtatgtgatggatccgttgatgggccacacttggaacagttacttctaccaccatgtgaagcatcaccatgttgaaggcaacggtcctgatgatctgtcatcgactgttcgctatcaacgcgacaacatttggcacttcttgcattatgtcggacgattctatatccttatctggttagatctacctctctactttatccgaaaaggcaaaccgataacagcactgcgcgcagcattttgggagctatcgaattatactgttcttattttactacttcagatcaactttagagccagcctcttcacactccttattcccctactcgctatgcgcattggtctcatggttggcaactggggacagcatgcattcgttgatgccgatgagccggactctgactaccgctccagcatcacattgatagatgtaccaagcaaccgatattgttacaatgacggttatcatacatcgcatcatcttaacccgctgcgacattggcgagatcaccctgttcattttctacagaacaaggatacatatggcagagaggcagcacttgtcttccacaacatcgattatctcatgatcactgtaaagctgatgatgcatgactacgagcaccttgcccgatgcctagtacccattggcgatcaaatcaatatgacgatggatcagcgtgttaccatgttgaaacgtcatacgcgaaagttcagcgaagaagagatcaaagaaaagtttggcattgtgaaagcgaagtag

SEQ ID NO: 29033 - protein, 373 aa, Muscodor strobelii
  misc_feature: SGI Peptide ID NO. 569967
  misc_feature (115)..(367): NCBI GI: 46115480 Blast Desc: FG03582.1 [Gibberella zeae PH-1]
  misc_feature (115)..(367): NCBI GI: 212571695 Blast Desc: acylamide-delta3(E)-desaturase [Gibberella zeae] gi|212571702|gb|ACJ35480.1| acylamide-delta3(E)-desaturase [Gibberella zeae]
  misc_feature (115)..(367): NCBI GI: 256721811 Blast Desc: NECHADRAFT_72904 [Nectria haematococca mpVI 77-13-4]
  misc_feature (115)..(368): NCBI GI: 256734908 Blast Desc: NECHADRAFT_90520 [Nectria haematococca mpVI 77-13-4]
  misc_feature (115)..(367): NCBI GI: 145230183 Blast Desc: An01g09800 [Aspergillus niger] gi|134055517|emb|CAK37163.1| protein product [Aspergillus niger]
  misc_feature (115)..(373): NCBI GI: 169596590 Blast Desc: SNOG_01060 [Phaeosphaeria nodorum SN15] gi|160701345|gb|EAT92555.2| SNOG_01060 [Phaeosphaeria nodorum SN15]
  misc_feature (116)..(371): NCBI GI: 239613991 Blast Desc: conserved [Ajellomyces dermatitidis ER-3]
  misc_feature (116)..(371): NCBI GI: 261193353 Blast Desc: conserved [Ajellomyces dermatitidis SLH14081] gi|239588687|gb|EEQ71330.1| conserved [Ajellomyces dermatitidis SLH14081]
  misc_feature (117)..(371): NCBI GI: 225558588 Blast Desc: conserved [Ajellomyces capsulatus G186AR]
  misc_feature (116)..(371): NCBI GI: 154286452 Blast Desc: conserved [Ajellomyces capsulatus NAm1] gi|150407662|gb|EDN03203.1| conserved [Ajellomyces capsulatus NAm1]
MATQSLVFSPELTPADELVLRNLERDIRRSPASSAPISASNDSLAKSVDERPLTLGQSEISNSAHSQTPSSKSGLSNNYDARDIATLAKSNDPTSSTFEPTVFSSWDMKDLESRIFDQAFPYVMDPLMGHTWNSYFYHHVKHHHVEGNGPDDLSSTVRYQRDNIWHFLHYVGRFYILIWLDLPLYFIRKGKPITALRAAFWELSNYTVLILLLQINFRASLFTLLIPLLAMRIGLMVGNWGQHAFVDADEPDSDYRSSITLIDVPSNRYCYNDGYHTSHHLNPLRHWRDHPVHFLQNKDTYGREAALVFHNIDYLMITVKLMMHDYEHLARCLVPIGDQINMTMDQRVTMLKRHTRKFSEEEIKEKFGIVKAK

SEQ ID NO: 29034 - DNA, 2106 bp, Muscodor strobelii
  misc_feature: SGI EST ID NO. CUFF.68611.0
  misc_feature: Variant of the nucleotide sequence at SEQ ID NO 29032
cagtcaccagccacaatatggaatgtcatatcagcttgtttctttcatcattactgacgacacttaatgcgggttcggaccctagattcttcatcaataagcctggccgctaacccatcaaatttgtttaaaatacaaagagcgaaggttgatcgctcttgttgatcgctctgcttgattgatgcggtgaggtgcatggaacggttccaaagtggatttctcttacctagaaacctatcccttatccaggctagtactcaacttacgcccctatcctaggttctgtttcatccttaacattgcaatactcaagtttcttttaccctataaactagattgcagactgcgttccgcatcttggtatcttgacatcttggtcatgatggccacccagtcgctcgttttcagtccagaattgacaccggccgacgaattggtccttcggaacttggagcgtgacatccgacgttctccggcttcatccgcaccaattagtgccagcaatgattcacttgcaaaatctgtcgatgagcggccccttacgttaggacagtcagaaatcagcaactctgcgcattctcaaactcccagcagcaaatctgggctgtccaacaattacgatgctcgtgatatagctacacttgccaaatcaaatgaccctacgagttcgactttcgaacccaccgtcttttcatcatgggatatgaaagatctagagtctcgggtacctacatacatgtaccgcaatgtcatgttgccgtatatttcttgggcgcaaagtgtcgctaggtttgaaacagacgtagtcatggtcacacatttgatcatgtacttcaccacatctcttcccagtgcgatagtgttatttttcaggttttcatacattcatggtatcatccatgtaatcatgcaaggatggtacataggtgcatacacgctcttgcgccatcaacacatacatcaaagaggcgtattggctaagcgctcttggatgcagatatttgatcaagcttttccgtatgtgatggatccgttgatgggccacacttggaacagttacttctaccaccatgtgaagcatcaccatgttgaaggcaacggtcctgatgatctgtcatcgactgttcgctatcaacgcgacaacatttggcacttcttgcattatgtcggacgattctatatccttatctggttagatctacctctctactttatccgaaaaggcaaaccgataacagcactgcgcgcagcattttgggagctatcgaattatactgttcttattttactacttcagatcaactttagagccagcctcttcacactccttattcccctactcgctatgcgcattggtctcatggttggcaactggggacagcatgcattcgttgatgccgatgagccggactctgactaccgctccagcatcacattgatagatgtaccaagcaaccgatattgttacaatgacggttatcatacatcgcatcatcttaacccgctgcgacattggcgagatcaccctgttcattttctacagaacaaggatacatatggcagagaggcagcacttgtcttccacaacatcgattatctcatgatcactgtaaagctgatgatgcatgactacgagcaccttgcccgatgcctagtacccattggcgatcaaatcaatatgacgatggatcagcgtgttaccatgttgaaacgtcatacgcgaaagttcagcgaagaagagatcaaagaaaagtttggcattgtgaaagcgaagtagcggactcgagactagatcatcgcttccaatatttatagtatcttggaagggcgacttccgagaagcatcaaatctggcgcgatatcctcagcagtatatcatcatgagatggcgagtcatgtttagaccatgggaatagttatgtggattttcaaaatggaaggtcaggttatatttagttaaacaacgactaagaaagctcggaattaaaccaatggtgctactttcctgacgagtactacgattagtactccagtacacaccctacatattacattaaatatacaacaaacgtaaaaattttggaggggtaggtggatcaatcgaaa

SEQ ID NO: 29035 - DNA, 1245 bp, Muscodor strobelii
  misc_feature: SGI cDNA ID NO. 569968
  misc_feature: Encodes the peptide sequence at SEQ ID NO 29036
atggcgggccatctcgtcggtcatgtcgtccgccgcggggttcaacacttggctagaaccacaaccaccagcgcccaagacgaatacatgcagaaacttcgtcaagatgctgcattgtacgattcacctggctcggggccagacatggaggtccgcccgcaacatctactaccggcattcatcactgtcttgttggtcctgttcgctgtctcttccatcagctacaccatcggccaggttgtctcgtctcttgccatgatcgagtcttcatcttcatctccatcttcaactatagtcattcataccaaagcgaccgagcccgcctactccgacgacccagacgcacccctcgagaagacaccacacgacaccgccgccgacgtcgaagtcaccgtgctcagccagaagcccatcaccacaaaccttcgacggtcgcttgcccacttgcatcgcgtcggcgggttctttgcgcagtggcgtggctttcctctggccgtgctgtatcagctcttgcacgcctgcacgaccaagtccgtgtccgcaccgcttggcctcggtcttgtcggcgagggcttcgtctacgtcctggtttccgtcggcctcgcccgcctgcacatggcctggacacacaaggtcatcacgcacccgtccaccaagccctggtatcgccgtgctcccagcttcaaggattgcaagcccatcttccgacccgccctcgtcaatgctgctgccgagcaggccaccttgctcctccctgctgccgtggcactggtcctgggtgtaacaccatcttccaatgctgacgtttccacgtcgcacgatacccttgtcttcgccctccgtattggtgccgtcctcctcacctacgtcgtcgtgggtctccacatcctgcttcctgcttccatcacactcgcacgcatcgaagcgtcctgtctgcctgacggcgagaacaccattgtggctttcgacaaggctgccctcatgggtaatgctgacgtggctactcgcgccgggcgttcttcgttgtttgcccagacttggaggtcggttgatcgctcggctaagtggagagtcatcaagctttatgtcaagatgttcgttgctcaggttaccatcctggttgtgggcatgactctggcggcggccgagctcctgcttcttggtgctgaaaggatacgtgtcttctctacgagtgccatggctcagctccagctacttgccatcgagtccagccaaaaccaataa

SEQ ID NO: 29036 - protein, 414 aa, Muscodor strobelii
  misc_feature: SGI Peptide ID NO. 569968
  misc_feature (48)..(396): NCBI GI: 169606478 Blast Desc: SNOG_06282 [Phaeosphaeria nodorum SN15] gi|111064993|gb|EAT86113.1| SNOG_06282 [Phaeosphaeria nodorum SN15]
  misc_feature (62)..(375): NCBI GI: 189192769 Blast Desc: conserved [Pyrenophora tritici-repentis Pt-1C-BFP] gi|187978287|gb|EDU44913.1| conserved [Pyrenophora tritici-repentis Pt-1C-BFP]
  misc_feature (62)..(394): NCBI GI: 154293818 Blast Desc: BC1G_14237 [Botryotinia fuckeliana B05.10] gi|150845210|gb|EDN20403.1| BC1G_14237 [Botryotinia fuckeliana B05.10]
  misc_feature (73)..(390): NCBI GI: 156061699 Blast Desc: SS1G_02995 [Sclerotinia sclerotiorum 1980] gi|154700396|gb|EDO00135.1| SS1G_02995 [Sclerotinia sclerotiorum 1980]
  misc_feature (61)..(398): NCBI GI: 255946658 Blast Desc: Pc22g00510 [Penicillium chrysogenum Wisconsin 54-1255] gi|211591113|emb|CAP97339.1| Pc22g00510 [Penicillium chrysogenum Wisconsin 54-1255]
  misc_feature (6)..(364): NCBI GI: 259485206 Blast Desc: TPA: conserved [Aspergillus nidulans FGSC A4]
  misc_feature (2)..(364): NCBI GI: 67538364 Blast Desc: AN5352.2 [Aspergillus nidulans FGSC A4] gi|40743322|gb|EAA62512.1| AN5352.2 [Aspergillus nidulans FGSC A4]
  misc_feature (60)..(379): NCBI GI: 145236565 Blast Desc: An06g01030 [Aspergillus niger] gi|134075387|emb|CAK39177.1| protein product [Aspergillus niger]
  misc_feature (61)..(369): NCBI GI: 238507768 Blast Desc: conserved [Aspergillus flavus NRRL3357] gi|220688604|gb|EED44956.1| conserved [Aspergillus flavus NRRL3357]
  misc_feature (42)..(414): NCBI GI: 242779995 Blast Desc: ubiquitin conjugating enzyme, [Talaromyces stipitatus ATCC 10500] gi|218719649|gb|EED19068.1| ubiquitin conjugating enzyme, [Talaromyces stipitatus ATCC 10500]
MAGHLVGHVVRRGVQHLARTTTTSAQDEYMQKLRQDAALYDSPGSGPDMEVRPQHLLPAFITVLLVLFAVSSISYTIGQVVSSLAMIESSSSSPSSTIVIHTKATEPAYSDDPDAPLEKTPHDTAADVEVTVLSQKPITTNLRRSLAHLHRVGGFFAQWRGFPLAVLYQLLHACTTKSVSAPLGLGLVGEGFVYVLVSVGLARLHMAWTHKVITHPSTKPWYRRAPSFKDCKPIFRPALVNAAAEQATLLLPAAVALVLGVTPSSNADVSTSHDTLVFALRIGAVLLTYVVVGLHILLPASITLARIEASCLPDGENTIVAFDKAALMGNADVATRAGRSSLFAQTWRSVDRSAKWRVIKLYVKMFVAQVTILVVGMTLAAAELLLLGAERIRVFSTSAMAQLQLLAIESSQNQ

SEQ ID NO: 29037 - DNA, 1758 bp, Muscodor strobelii
  misc_feature: SGI EST ID NO. CUFF.68613.0
  misc_feature: Variant of the nucleotide sequence at SEQ ID NO 29035
cttcgcctccctttgtcgactttgcatcatttcatgccacggtagtctcggcatcgcgttcattgatatatcgaccaaaagactttttcgaaaatccgtactcattcattcttgtctattgacctcaagctttctgttagcaacggtacttaccattttgtaactccttacaaacatacgcgcagcgacagccaatacctagtaatcatggcgggccatctcgtcggtcatgtcgtccgccgcggggttcaacacttggctagaaccacaaccaccagcgcccaagacgaatacatgcagaaacttcgtcaagatgctgcattgtacgattcacctggctcggggccagacatggaggtccgcccgcaacatctactaccggcattcatcactgtcttgttggtcctgttcgctgtctcttccatcagctacaccatcggccaggttgtctcgtctcttgccatgatcgagtcttcatcttcatctccatcttcaactatagtcattcataccaaagcgaccgagcccgcctactccgacgacccagacgcacccctcgagaagacaccacacgacaccgccgccgacgtcgaagtcaccgtgctcagccagaagcccatcaccacaaaccttcgacggtcgcttgcccacttgcatcgcgtcggcgggttctttgcgcagtggcgtggctttcctctggccgtgctgtatcagctcttgcacgcctgcacgaccaagtccgtgtccgcaccgcttggcctcggtcttgtcggcgagggcttcgtctacgtcctggtttccgtcggcctcgcccgcctgcacatggcctggacacacaaggtcatcacgcacccgtccaccaagccctggtatcgccgtgctcccagcttcaaggattgcaagcccatcttccgacccgccctcgtcaatgctgctgccgagcaggccaccttgctcctccctgctgccgtggcactggtcctgggtgtaacaccatcttccaatgctgacgtttccacgtcgcacgatacccttgtcttcgccctccgtattggtgccgtcctcctcacctacgtcgtcgtgggtctccacatcctgcttcctgcttccatcacactcgcacgcatcgaagcgtcctgtctgcctgacggcgagaacaccattgtggctttcgacaaggctgccctcatgggtaatgctgacgtggctactcgcgccgggcgttcttcgttgtttgcccagacttggaggtcggttgatcgctcggctaagtggagagtcatcaagctttatgtcaagatgttcgttgctcaggttaccatcctggttgtgggcatgactctggcggcggccgagctcctgcttcttggtgctgaaaggatacgtgtcttctctacgagtgccatggctcagctccagctacttgccatcgagtccagccaaaaccaataagtctgcgaagacttgcttttggtcttcaatcttgattgttgctatagcttacctaggaaacctgaagtccattgtacaatcgactatgtaaggataacatgctcacgctcctagaactttgtccattgtgtattccgaccgcatcacatatacattccttccttatgccccacttttgtaattgttataggaagatgtccatgtataggtagattgaaaatcttgaatagaactcgatgctgttctcagtgctcaagatcatcgttgtgatatgtgacgaattaaggcgagaatgggctgcctggc

SEQ ID NO: 29038 - DNA, 1923 bp, Muscodor strobelii
  misc_feature: SGI cDNA ID NO. 569969
  misc_feature: Elevated expression when VOC is produced
  misc_feature: Encodes the peptide sequence at SEQ ID NO 29039
atgacagctaattccacggaaaacggctctaaactatgcgacaacaatgccgactcgactgccggctcgcaaatcggtggaacggtcgcagtcggctctgtgagcaacgtgaagaacatctaccagtctaaaaaagacagtgatggcgaatggacatggacagacaaacttccggacaatgttgtcgaggcagctgaaaacgaggagactcgcacgttcgccgtcattgtccgaaacatgaaaagcaaagacagccgcaaaaagctcgaagcacactccatcatcatacagagcccctggctcagagaagccctcggccacatcctcaaagactaccccggtgtcgcttgcgagctcaagcgccttatcttcgaggcacctttccagcccttcgttcatcggtgggccgagtatactgcctatatgaagagtgatgatttggacacaaccacaaaggaacacttgggcatcttacacgatgtccttaaatatgagataggagacagcattgcggccttcgaggactatgtgatgaatcaagtcgtcacatacgagcatctctggatggtgtttcaacccggagccgttgtgttgtcagcatataaaggtccactctccgcgttcgagttcggcgaagcacaatataaggaaacacaatgtggcaaatttttccgtctgaaagcagactgtatagactacagcggcaaggcattcggtcgacacacagaaagtatcgatatccccgaatttatcgggaccaagaagatcaccagtttagacgtctttccattctcataccacgaacagaaagatgcagtgcgcgctacgctgatcaagcgcggtcagacgttcgagaagcttgctggttatcagtataaagcttacgatggcaccgctgtcacttgggatcgagagcgtaatgaagtacccatccaagtctcaggtcgcattgtcgtcgatatcgattctttcaaccgctacagtccctatttccgtcggagcgtaggaaactggaaagacaaagatatcgaggcactctcagcgcaagctcttgtgaaggagagcggaaagagcgagttcacactgacatcatatcatcacatgctggcgcgctctcgcactcggggttattcactaagtctcaagcaatggctagactttttcgtcgacgaggtgaaggaaatcgtctggaacacgagggcatttgatagtctagttcttcccgaagatcagaaagagcttattctgtcctttgctgagtcacaactcgaaggaacttcatttgatgatgtcatctcgggcaaaggaaagggtgtcatttgccttctctcgggccccccaggtgttgggaaaacgctaactgcagaagcggttgccgagaacctcaaagttccactacacatgctcacatcaggcgacttgggctcagcgccatgggaagtcgaaaagggattgaaaaacattctggacctggtagctcgctggaacgctattgtgcttctcgatgagtgcgatgtcttcctcgaggcacgttcaacacatgacttggaacggaataaggtggtgtcaatcttcctacgcacgctcgaatactaccagggtattctgttcatgacaacaaatcgtgtcgacaatatcgatgccgcatttcagtcgcgtatccatgtgtcactcgaatatccggatcttactcaagaaagtcgtcaacagatctgggagcaattcctcggcgcaaccacattgaagaacaacatcacgcaggcagatatcgatgaattgtcgaaactctcactgaatggccgacagattaaaaacgttttgaaaactgcgcagttattagcctcgcggaaaaggtgtggtttgaagagagactttatagatactgtacttgcgattgaaaggcgacgtccgggttgtaagtag

SEQ ID NO: 29039 - protein, 640 aa, Muscodor strobelii
  misc_feature: SGI Peptide ID NO. 569969
  misc_feature (440)..(616): Pfam Id: PF00004 Pfam Desc: ATPase family associated with various cellular activities (AAA)
  misc_feature (31)..(638): NCBI GI: 261357186 Blast Desc: conserved [Verticillium albo-atrum VaMs.102]
  misc_feature (29)..(638): NCBI GI: 171684197 Blast Desc: protein product [Podospora anserina] gi|170942059|emb|CAP67711.1| protein product [Podospora anserina]
  misc_feature (32)..(640): NCBI GI: 149211295 Blast Desc: MGCH7_ch7g1105 [Magnaporthe grisea 70-15] gi|86197060|gb|EAQ71698.1| MGCH7_ch7g1105 [Magnaporthe grisea 70-15]
  misc_feature (32)..(640): NCBI GI: 145601452 Blast Desc: MGG_10327 [Magnaporthe grisea 70-15] gi|145009519|gb|EDJ94186.1| MGG_10327 [Magnaporthe grisea 70-15]
  misc_feature (29)..(639): NCBI GI: 116192721 Blast Desc: CHGG_06078 [Chaetomium globosum CBS 148.51] gi|88181991|gb|EAQ89459.1| CHGG_06078 [Chaetomium globosum CBS 148.51]
  misc_feature (32)..(638): NCBI GI: 169617988 Blast Desc: SNOG_12178 [Phaeosphaeria nodorum SN15] gi|111059470|gb|EAT80590.1| SNOG_12178 [Phaeosphaeria nodorum SN15]
  misc_feature (29)..(636): NCBI GI: 145607209 Blast Desc: MGG_04085 [Magnaporthe grisea 70-15] gi|145014809|gb|EDJ99377.1| MGG_04085 [Magnaporthe grisea 70-15]
  misc_feature (29)..(633): NCBI GI: 46123125 Blast Desc: FG05940.1 [Gibberella zeae PH-1]
  misc_feature (29)..(633): NCBI GI: 256731079 Blast Desc: NECHADRAFT_48916 [Nectria haematococca mpVI 77-13-4]
  misc_feature (4)..(632): NCBI GI: 119483180 Blast Desc: AAA family ATPase, [Neosartorya fischeri NRRL 181] gi|119409773|gb|EAW19721.1| AAA family ATPase, [Neosartorya fischeri NRRL 181]
  misc_feature: Useful for introducing or modulating the production of volatile compounds
MTANSTENGSKLCDNNADSTAGSQIGGTVAVGSVSNVKNIYQSKKDSDGEWTWTDKLPDNVVEAAENEETRTFAVIVRNMKSKDSRKKLEAHSIIIQSPWLREALGHILKDYPGVACELKRLIFEAPFQPFVHRWAEYTAYMKSDDLDTTTKEHLGILHDVLKYEIGDSIAAFEDYVMNQVVTYEHLWMVFQPGAVVLSAYKGPLSAFEFGEAQYKETQCGKFFRLKADCIDYSGKAFGRHTESIDIPEFIGTKKITSLDVFPFSYHEQKDAVRATLIKRGQTFEKLAGYQYKAYDGTAVTWDRERNEVPIQVSGRIVVDIDSFNRYSPYFRRSVGNWKDKDIEALSAQALVKESGKSEFTLTSYHHMLARSRTRGYSLSLKQWLDFFVDEVKEIVWNTRAFDSLVLPEDQKELILSFAESQLEGTSFDDVISGKGKGVICLLSGPPGVGKTLTAEAVAENLKVPLHMLTSGDLGSAPWEVEKGLKNILDLVARWNAIVLLDECDVFLEARSTHDLERNKVVSIFLRTLEYYQGILFMTTNRVDNIDAAFQSRIHVSLEYPDLTQESRQQIWEQFLGATTLKNNITQADIDELSKLSLNGRQIKNVLKTAQLLASRKRCGLKRDFIDTVLAIERRRPGCK

SEQ ID NO: 29040 - DNA, 2350 bp, Muscodor strobelii
  misc_feature: SGI EST ID NO. CUFF.68625.0
  misc_feature: Variant of the nucleotide sequence at SEQ ID NO 29038
ccggacctcttcccggcatccaatccagtggtcgtcagtatgagcaaacatcaccgcctcctctcggggtgagtcgtgcctttggcacggcggcctgatgctgcgtacttctatcagcatccttgccgttggatcccgttaggctatatatctatgagtgtgttagctcactgcccatgctttgaattttctcataatcttcaccatttcttgctccctaaactcactcagttgcagccatgacagctaattccacggaaaacggctctaaactatgcgacaacaatgccgactcgactgccggctcgcaaatcggtggaacggtcgcagtcggctctgtgagcaacgtgaagaacatctaccagtctaaaaaagacagtgatggcgaatggacatggacagacaaacttccggacaatgttgtcgaggcagctgaaaacgaggagactcgcacgttcgccgtcattgtccgaaacatgaaaagcaaagacagccgcaaaaagctcgaagcacactccatcatcatacagagcccctggctcagagaagccctcggccacatcctcaaagactaccccggtgtcgcttgcgagctcaagcgccttatcttcgaggcacctttccagcccttcgttcatcggtgggccgagtatactgcctatatgaagagtgatgatttggacacaaccacaaaggaacacttgggcatcttacacgatgtccttaaatatgagataggagacagcattgcggccttcgaggactatgtgatgaatcaagtcgtcacatacgagcatctctggatggtgtttcaacccggagccgttgtgttgtcagcatataaaggtccactctccgcgttcgagttcggcgaagcacaatataaggaaacacaatgtggcaaatttttccgtctgaaagcagactgtatagactacagcggcaaggcattcggtcgacacacagaaagtatcgatatccccgaatttatcgggaccaagaagatcaccagtttagacgtctttccattctcataccacgaacagaaagatgcagtgcgcgctacgctgatcaagcgcggtcagacgttcgagaagcttgctggttatcagtataaagcttacgatggcaccgctgtcacttgggatcgagagcgtaatgaagtacccatccaagtctcaggtcgcattgtcgtcgatatcgattctttcaaccgctacagtccctatttccgtcggagcgtaggaaactggaaagacaaagatatcgaggcactctcagcgcaagctcttgtgaaggagagcggaaagagcgagttcacactgacatcatatcatcacatgctggcgcgctctcgcactcggggttattcactaagtctcaagcaatggctagactttttcgtcgacgaggtgaaggaaatcgtctggaacacgagggcatttgatagtctagttcttcccgaagatcagaaagagcttattctgtcctttgctgagtcacaactcgaaggaacttcatttgatgatgtcatctcgggcaaaggaaagggtgtcatttgccttctctcgggccccccaggtgttgggaaaacgctaactgcagaagcggttgccgagaacctcaaagttccactacacatgctcacatcaggcgacttgggctcagcgccatgggaagtcgaaaagggattgaaaaacattctggacctggtagctcgctggaacgctattgtgcttctcgatgagtgcgatgtcttcctcgaggcacgttcaacacatgacttggaacggaataaggtggtgtcaatcttcctacgcacgctcgaatactaccagggtattctgttcatgacaacaaatcgtgtcgacaatatcgatgccgcatttcagtcgcgtatccatgtgtcactcgaatatccggatcttactcaagaaagtcgtcaacagatctgggagcaattcctcggcgcaaccacattgaagaacaacatcacgcaggcagatatcgatgaattgtcgaaactctcactgaatggccgacagattaaaaacgttttgaaaactgcgcagttattagcctcgcggaaaaggtgtggtttgaagagagactttatagatactgtacttgcgattgaaaggcgacgtccgggttgtaagtagatgtacggattcatgatgtaaatttacccagaaaacgctcacggtcctggtaaatgtgtatctagctaggtacgagaatacataacgtcgtgatgtaatcgatacgaacattaaaatatatctttgccatcataagaatgcatcacaccgctgatgtttgaaagcttagacggtgttttctaggtgcg

SEQ ID NO: 29041 - DNA, 423 bp, Muscodor strobelii
  misc_feature: SGI cDNA ID NO. 569970
  misc_feature: Encodes the peptide sequence at SEQ ID NO 29042
atgggcgctccggtcattctctgcggcaaaaccaaagccatcggatctagcgttattgctggtctaaagcctcaatatgagacgatccactttgtgatgtctgaagagtcgggtgctactcaaataccggcaattctacgtggcgagataccaatatctgactgtgacctcggaagcaaggagtactctcgatctcccatcgccgttatactcggtggcggctacgatgacaaggctgctggggctatgatggaggcatcgaaaggtatcaagtcgatcccatggctccgacctgatcttaccaaacctgctcccccgcttggtcccgaatacggcaaagttatggtcgcacgtgtcaaaaagacactttcgcaattacaaaaggaggggaagatggaggaagagcttgtacatcagtactga

SEQ ID NO: 29042 - protein, 140 aa, Muscodor strobelii
  misc_feature: SGI Peptide ID NO. 569970
  misc_feature (4)..(133): NCBI GI: 256723000 Blast Desc: NECHADRAFT_97412 [Nectria haematococca mpVI 77-13-4]
  misc_feature (12)..(133): NCBI GI: 261356744 Blast Desc: conserved [Verticillium albo-atrum VaMs.102]
  misc_feature (4)..(133): NCBI GI: 46114244 Blast Desc: FG02964.1 [Gibberella zeae PH-1]
  misc_feature (1)..(140): NCBI GI: 212535678 Blast Desc: conserved [Penicillium marneffei ATCC 18224] gi|210070394|gb|EEA24484.1| conserved [Penicillium marneffei ATCC 18224]
  misc_feature (2)..(138): NCBI GI: 169779703 Blast Desc: [Aspergillus oryzae RIB40] gi|238500373|ref|XP_002381421.1| conserved [Aspergillus flavus NRRL3357] gi|83773055|dbj|BAE63183.1| protein product oryzae]
  misc_feature (4)..(137): NCBI GI: 119467061 Blast Desc: NFIA_047760 [Neosartorya fischeri NRRL 181] gi|119405489|gb|EAW15440.1| conserved [Neosartorya fischeri NRRL 181]
  misc_feature (4)..(137): NCBI GI: 70981428 Blast Desc: conserved [Aspergillus fumigatus Af293] gi|66843865|gb|EAL84206.1| conserved [Aspergillus fumigatus Af293] gi|159122713|gb|EDP47834.1| conserved [Aspergillus A1163]
  misc_feature (4)..(121): NCBI GI: 145228461 Blast Desc: An01g00950 [Aspergillus niger] gi|134054628|emb|CAK43473.1| protein product [Aspergillus niger]
  misc_feature (4)..(137): NCBI GI: 121704246 Blast Desc: conserved [Aspergillus clavatus NRRL 1] gi|119398531|gb|EAW08961.1| conserved [Aspergillus clavatus NRRL 1]
  misc_feature (4)..(137): NCBI GI: 255932415 Blast Desc: Pc12g09370 [Penicillium chrysogenum Wisconsin 54-1255] gi|211582383|emb|CAP80564.1| Pc12g09370 [Penicillium chrysogenum Wisconsin 54-1255]
MGAPVILCGKTKAIGSSVIAGLKPQYETIHFVMSEESGATQIPAILRGEIPISDCDLGSKEYSRSPIAVILGGGYDDKAAGAMMEASKGIKSIPWLRPDLTKPAPPLGPEYGKVMVARVKKTLSQLQKEGKMEEELVHQY

SEQ ID NO: 29043 - DNA, 2876 bp, Muscodor strobelii
  misc_feature: SGI EST ID NO. CUFF.68677.0
  misc_feature: Variant of the nucleotide sequence at SEQ ID NO 29041
gaagcatgccatttcaataacaatgaataaaaatcaacaatttggatgagaggctgccagcgggatgcagtcaatttctcttttcacaatctttgttttgctgaacgccatctatatccaatgacgcctcaagctacaggagttgaccagtacaagttttaatggtataacgtagtcaacggacaccgatagtcttaatcttcaacgtgcggcattcacctaatcctgttctcatatgcaatcgcatgcgctcaaattagttcagaaatagacataattaggtgtggaagaatgacatctctcttcagggtatcagcattaaggtatgccgtatgtttgtaaagatgtgacttttgagagatagcattatgtgtattgatcctattgtgatgcaaggtttcctgggcagtgtgataaagacaacgggattgagatagctacactttgcgataaagtttagactcccctgtaaggtaccagaatatttcccccaaattagtttgatgaatatgagaaaaatgcgaccgtgcaagaaatcgagatcttgacgcttgcgcagctactcgacttgtctgaacaagaaccaatacagagcattcctacgtacacgcaatatactcatgatattgtgaagcaaaaacatacgcccgagagagcttcgactttttgagacttggacccatcaacatgcttgcccgtcttacaaactggacataggtttggaggccgcatgaaaatgcccgatatcacgcagcaggatgtgacaactagcaccaagcgccatattgttcaagcatacctaacagacttacttcctcccacctctcacaattgtcatgatcaatggcttcaatcaaaatgacgccgtgcgaacccgtgatcatacccaacactcatatgtcgaagcaagctacttgaataaccgagctcacggttatgtcgcgctcgcccatcgaacaaactgagctccaacccctgctcctccgatgatacatgatgaacgatacaatcaaggaaccatgatgttttccaatgtgccaggattcgcattaactatgaaagtcagcagtcgcaatgtattttctttagcctcggagaatatataccccggtcggattagtgacttgtccgaacattgatggagctgaatattcaatgcccgattgctcgtacttgatgggaactcgtcttggaaacatccgtggcatgttaatcaaagcatgaacaactagcaaaaatcggtgcgtagcgcaaattccattgaagtttatggcgcgtcggctaatccaaaaagccgaatattgccattccagcaagtaatccagcacgatcgtgatccaattgcaaatagacgcttcggcggaaatcaatcgttgcgacagataaatgtctacacataaaagaactggtcctctcgagtttattcaactggtggaagcatcaagcttgccatggacactcaaagactggtgtttagaatatcgcacaggctgttactaaggacaaccccaagggccccatcatcgaaattcacgaacatcgccacaacaccatacatccgtttgctttcgactatgggcgctccggtcattctctgcggcaaaaccaaagccatcggatctagcgttattgctggtctaaagcctcaatatgagacgatccactttgtgatgtctgaagagtcgggtgctactcaaataccggcaattctacgtggcgagataccaatatctgactgtgacctcggaagcaaggagtactctcgatctcccatcgccgttatactcggtggcggctacgatgacaaggctgctggggctatgatggaggcatcgaaaggtatcaagtcgatcccatggctccgacctgatcttaccaaacctgctcccccgcttggtcccgaatacggcaaagttatggtcgcacgtgtcaaaaagacactttcgcaattacaaaaggaggggaagatggaggaagagcttgtacatcagtactgaattggcaaatgtatgatgcccgtgttgaacttgacacaaacaactaaacaactaaaacagaataggttctgtgtctcccatgcagaatatctaaccactcgagagcactgaggtatcgcacaaggatcgacctcacataacagtctcacggctatcaatatagaataagttcaccctcactcgcaccacgctgccaccactcgtccatgatatctccgaggacagtactctgcttccctgcaaagtttcccgctggattccctgctgtatttgccgctggaattggcacgccacctgatttcttcgagttgtcaccgacaacccaaagtataggcaatttagctaagggttcaaacaatgcgcgtaactctttgccttcctcctccgaaaagccgcggcccatgagcacgcaacggatctgcctggagtagtcacctgtaccaacatcgttggtgggcgcatttggtggtgactgcgcttcaaccagatagggcagatcttgtttcgcggcatccattgactggatgaatcggacgactgtgtttgttagtctctgtcatgcttgtgactgctgtataaagactgagtgcaattgacgcatcaacctaccttcatattttggcttaagtccatcggatactggggctccaatttccgtatgcatgccgatgagggcaacggggattgaggctgatgatgtagccattgtcatttggagtatgcgcgacgactgtggtatagaagtagatccgatggcgaggcttctgctgcaattgatcacaagtcctagattttatacttatgaaacgtggcgaccatagatttatttatacacgttttgcactttcgacaataactgctgtcattgagatgtctttg

SEQ ID NO: 29044 - DNA, 480 bp, Muscodor strobelii
  misc_feature: SGI cDNA ID NO. 569971
  misc_feature: Encodes the peptide sequence at SEQ ID NO 29045
atggctacatcatcagcctcaatccccgttgccctcatcggcatgcatacggaaattggagccccagtatccgatggacttaagccaaaatatgaagtcgtccgattcatccagtcaatggatgccgcgaaacaagatctgccctatctggttgaagcgcagtcaccaccaaatgcgcccaccaacgatgttggtacaggtgactactccaggcagatccgttgcgtgctcatgggccgcggcttttcggaggaggaaggcaaagagttacgcgcattgtttgaacccttagctaaattgcctatactttgggttgtcggtgacaactcgaagaaatcaggtggcgtgccaattccagcggcaaatacagcagggaatccagcgggaaactttgcagggaagcagagtactgtcctcggagatatcatggacgagtggtggcagcgtggtgcgagtgagggtgaacttattctatattga

SEQ ID NO: 29045 - protein, 159 aa, Muscodor strobelii
  misc_feature: SGI Peptide ID NO. 569971
  misc_feature (1)..(159): NCBI GI: 121704246 Blast Desc: conserved [Aspergillus clavatus NRRL 1] gi|119398531|gb|EAW08961.1| conserved [Aspergillus clavatus NRRL 1]
  misc_feature (1)..(159): NCBI GI: 70981428 Blast Desc: conserved [Aspergillus fumigatus Af293] gi|66843865|gb|EAL84206.1| conserved [Aspergillus fumigatus Af293] gi|159122713|gb|EDP47834.1| conserved [Aspergillus A1163]
  misc_feature (5)..(159): NCBI GI: 255932415 Blast Desc: Pc12g09370 [Penicillium chrysogenum Wisconsin 54-1255] gi|211582383|emb|CAP80564.1| Pc12g09370 [Penicillium chrysogenum Wisconsin 54-1255]
  misc_feature (1)..(159): NCBI GI: 119467061 Blast Desc: NFIA_047760 [Neosartorya fischeri NRRL 181] gi|119405489|gb|EAW15440.1| conserved [Neosartorya fischeri NRRL 181]
  misc_feature (5)..(159): NCBI GI: 212528602 Blast Desc: conserved [Penicillium marneffei ATCC 18224] gi|210073856|gb|EEA27943.1| conserved [Penicillium marneffei ATCC 18224]
  misc_feature (7)..(107): NCBI GI: 67901598 Blast Desc: AN7786.2 [Aspergillus nidulans FGSC A4] gi|40742384|gb|EAA61574.1| AN7786.2 [Aspergillus nidulans FGSC A4] gi|259484139|tpe|CBF80104.1| TPA: conserved [Aspergillus FGSC
  misc_feature (1)..(133): NCBI GI: 145228461 Blast Desc: An01g00950 [Aspergillus niger] gi|134054628|emb|CAK43473.1| protein product [Aspergillus niger]
  misc_feature (1)..(108): NCBI GI: 169786540 Blast Desc: [Aspergillus oryzae RIB40] gi|83776480|dbj|BAE66597.1| protein product [Aspergillus oryzae]
  misc_feature (5)..(91): NCBI GI: 256723000 Blast Desc: NECHADRAFT_97412 [Nectria haematococca mpVI 77-13-4]
  misc_feature (6)..(127): NCBI GI: 46114244 Blast Desc: FG02964.1 [Gibberella zeae PH-1]
MATSSASIPVALIGMHTEIGAPVSDGLKPKYEVVRFIQSMDAAKQDLPYLVEAQSPPNAPTNDVGTGDYSRQIRCVLMGRGFSEEEGKELRALFEPLAKLPILWVVGDNSKKSGGVPIPAANTAGNPAGNFAGKQSTVLGDIMDEWWQRGASEGELILY

SEQ ID NO: 29046 - DNA, 1148 bp, Muscodor strobelii
  misc_feature: SGI EST ID NO. CUFF.68678.2
  misc_feature: Variant of the nucleotide sequence at SEQ ID NO 29044
aagacatctcaatgacagcagttattgtcgaaagtgcaaaacgtgtataaataaatctatggtcgccacgtttcataagtataaaatctaggacttgtgatcaattgcagcagaagcctcgccatcggatctacttctataccacagtcgtcgcgcatactccaaatgacaatggctacatcatcagcctcaatccccgttgccctcatcggcatgcatacggaaattggagccccagtatccgatggacttaagccaaaatatgaagtcgtccgattcatccagtcaatggatgccgcgaaacaagatctgccctatctggttgaagcgcagtcaccaccaaatgcgcccaccaacgatgttggtacaggtgactactccaggcagatccgttgcgtgctcatgggccgcggcttttcggaggaggaaggcaaagagttacgcgcattgtttgaacccttagctaaattgcctatactttgggttgtcggtgacaactcgaagaaatcaggtggcgtgccaattccagcggcaaatacagcagggaatccagcgggaaactttgcagggaagcagagtactgtcctcggagatatcatggacgagtggtggcagcgtggtgcgagtgagggtgaacttattctatattgatagccgtgagactgttatgtgaggtcgatccttgtgcgatacctcagtgctctcgagtggttagatattctgcatgggagacacagaacctattctgttttagttgtttagttgtttgtgtcaagttcaacacgggcatcatacatttgccaattcagtactgatgtacaagctcttcctccatcttcccctccttttgtaattgcgaaagtgtctttttgacacgtgcgaccataactttgccgtattcgggaccaagcgggggagcaggtttggtaagatcaggtcggagccatgggatcgacttgatacctttcgatgcctccatcatagccccagcagccttgtcatcgtagccgccaccgagtataacggcgatgggagatcgagagtactccttgcttccgaggtcacagtcagatattggtatctcgccacgtagaattgccggtatttgagtagcacccgactcttcagacatcacaaagtggatcgct

SEQ ID NO: 29047 - DNA, 1218 bp, Muscodor strobelii
  misc_feature: SGI cDNA ID NO. 569972
  misc_feature: Encodes the peptide sequence at SEQ ID NO 29048
atggttcgtcttcctgcggtcgtcgtgctaagctttgcggctcttgccgtgacgtctcccgtcgctgcacccctgccgatcatcacgcccgctccagaccctgcgctcgttaagcgggctacgagctgtaccttttcaggctccaatggcgcttctctcgctagtgtatcgcaaaaatcatgctctacactgattctaagtgctctggctgtgccggctggcgagacgcttgatctctctgatcttcccgacgatactacggtgacattcgaaggcacaacgacgtttggctataaagagtgggatgggccacttatgcaaatcgaaggaactggcatcaagatcatcggagcatccggcgcggtgctaaatggcaacggcgccagttattgggacggcgaaggcggctctggtggaaagacaaaaccgaagttcttctatgcacacgacctaaccgactcctcgatcactaatctctatatcgaaaacacacctgttcaagccgtctcgattaatggtgtggatggtttgaccatcacgggcatgactattaacaaccaagctggcaatagcttggggaagaacactgatggattcgatattggaagcagcaataatgtcgtcattactggtgctaatgtgtacaatcaagatgactgcgttgccatcaactcgggaacagtgagcaccacatatagtctcaatgcttctcctattggtggactaaaccgaacacaggatatcacgttcgaaaacggtgtatgttctggcggccacggtctctcaatcggtagtgttggagggaggtccgacaacaccgtcagcaatgtcaagtttatcaacaacgaagtgaagagttccgttaacggtgtccgcattaaagctattgagggcgacacgggcacaatcagcggtgtcacgtaccagcagattacgctcgttgatatctccaagtacggcattttaatcgagcagaactatgatggcggtgaccttgatggcggcactgcgtccagtggtgttcccattacgggtttaaccctgaacaatattcaaggcaacgttctgagtggcggctacgatatcgtcattacttgcggcagcggcgcttgttctggctggactgtcgaagatgtcaatgttactggcggttcaaaatactcaagtaagcaacactcgcatgagcagagccacgatgatacgataacgctgacttga

SEQ ID NO: 29048 - protein, 405 aa, Muscodor strobelii
  misc_feature: SGI Peptide ID NO. 569972
  misc_feature (61)..(401): Pfam Id: PF00295 Pfam Desc: Glycosyl hydrolases family 28
  misc_feature (61)..(389): Pfam Id: PF00295 Pfam Desc: Glycosyl hydrolases family 28
  misc_feature (1)..(389): NCBI GI: 152963807 Blast Desc: polygalacturonase [Penicillium occitanis]
  misc_feature (8)..(389): NCBI GI: 242779363 Blast Desc: extracellular polygalacturonase, [Talaromyces stipitatus ATCC 10500] gi|218723047|gb|EED22465.1| extracellular polygalacturonase, [Talaromyces stipitatus ATCC 10500]
  misc_feature (19)..(387): NCBI GI: 2967835 Blast Desc: polygalacturonase [Ophiostoma novo-ulmi] gi|67867118|gb|AAY82499.1| polygalacturonase [Ophiostoma novo-ulmi]
  misc_feature (19)..(387): NCBI GI: 67867116 Blast Desc: polygalacturonase [Ophiostoma ulmi]
  misc_feature (4)..(392): NCBI GI: 67902680 Blast Desc: AN8327.2 [Aspergillus nidulans FGSC A4] gi|40747794|gb|EAA66950.1| AN8327.2 [Aspergillus nidulans FGSC A4] gi|95025959|gb|ABF50893.1| endo-polygalacturonase [Emericella
  misc_feature (1)..(392): NCBI GI: 70996670 Blast Desc: extracellular polygalacturonase [Aspergillus fumigatus Af293] gi|66850725|gb|EAL91052.1| extracellular polygalacturonase, [Aspergillus fumigatus Af293] extracellular
  misc_feature (15)..(392): NCBI GI: 219940334 Blast Desc: endopolygalacturonase [Hypocrea lixii]
  misc_feature (1)..(392): NCBI GI: 119494279 Blast Desc: extracellular polygalacturonase, [Neosartorya fischeri NRRL 181] gi|119412197|gb|EAW22138.1| extracellular polygalacturonase, [Neosartorya fischeri NRRL 181]
  misc_feature (36)..(387): NCBI GI: 13160919 Blast Desc: endopolygalacturonase [Alternaria alternata]
  misc_feature (6)..(392): NCBI GI: 3282222 Blast Desc: endopolygalacturonase 4 [Botryotinia fuckeliana] gi|56236520|gb|AAV84616.1| endopolygalacturonase 4 [Botryotinia fuckeliana]
  misc_feature (1)..(385): SWISSPROT Homolog: EC 3.2.1.15 Polygalacturonase
MVRLPAVVVLSFAALAVTSPVAAPLPIITPAPDPALVKRATSCTFSGSNGASLASVSQKSCSTLILSALAVPAGETLDLSDLPDDTTVTFEGTTTFGYKEWDGPLMQIEGTGIKIIGASGAVLNGNGASYWDGEGGSGGKTKPKFFYAHDLTDSSITNLYIENTPVQAVSINGVDGLTITGMTINNQAGNSLGKNTDGFDIGSSNNVVITGANVYNQDDCVAINSGTVSTTYSLNASPIGGLNRTQDITFENGVCSGGHGLSIGSVGGRSDNTVSNVKFINNEVKSSVNGVRIKAIEGDTGTISGVTYQQITLVDISKYGILIEQNYDGGDLDGGTASSGVPITGLTLNNIQGNVLSGGYDIVITCGSGACSGWTVEDVNVTGGSKYSSKQHSHEQSHDDTITLT

SEQ ID NO: 29049 - DNA, 180 bp, Muscodor strobelii
  misc_feature: SGI EST ID NO. CUFF.68644.0
  misc_feature: Variant of the nucleotide sequence at SEQ ID NO 29047
agtgttggagggaggtccgacaacaccgtcagcaatgtcaagtttatcaacaacgaagtgaagagttccgttaacggtgtccgcattaaagctattgagggcgacacgggcacaatcagcggtgtcacgtaccagcagattacgctcgttgatatctccaagtacggcattttaatcgag

SEQ ID NO: 29050 - DNA, 1017 bp, Muscodor strobelii
  misc_feature: SGI cDNA ID NO. 569973
  misc_feature: Reduced expression when VOC is produced
  misc_feature: Encodes the peptide sequence at SEQ ID NO 29051
atggacgcagacacgccgccattgcagcacaaggggtcgcaagacacactcatctcgctcatgcagctcgatccgtcgcccatcgacagcccgtcgcaagagaaggacctgccgccgctgcccgagcattctgtttctaccactgccacttcgataccagccgccgcggccaggtcgtcgacgacgtcctctgtcggcctcagcggcactggtcgcgggcccatcttctacttgacacgcatccagcgctactccagctacaccttcgccgccttcgccggcctgcacctcgccaacacctctctgatccccctcgtctacaactcggtgccgtactcggagcccttcctgctcatgacccgcgagatctaccagacgcgcatctccgaacctctcctcgtcgccctgcccgtcctcgcccacgtcgcctcgggcctcgccatccgcgtcatccgccggaaccagaacatgaagcgttacggcggcggcactcccggcctctacgcgaccacgacgtcgaaagcttctctcgctccgtccacgacatccacgacatcttcgaaccggatatggcctttcttctcctacatcgccgcctcgggctacgcattgtccgtgctcctttcctcccacgtcgccatgaaccgcgtcttgcctcttgtcgttgacggcgacagcagcaacgtcggtctcgcctacgtctcccacggcttcgcccgccaccccgccttcgcctgggccgcctacatcctccttctctccgtcagtgcgggtcacatggcttggggcatggccaagtggctcgacctcgcgccccccgccaactggaagcgcatcaccttcgacaagccctcgcgccgtcgcaggagaagggcctggtgggctgtcaatactgctgccgcctcgctcgctctgttctgggcggccggcggtctgggcattgtcgcgagggccggagcagctgagggatggctgggcacggtatacgatggcatctacgcctacgctggccggtag

SEQ ID NO: 29051 - protein, 338 aa, Muscodor strobelii
  misc_feature: SGI Peptide ID NO. 569973
  misc_feature (204)..(329): Pfam Id: PF07950 Pfam Desc: Domain of function (DUF1691)
  misc_feature (89)..(185): Pfam Id: PF07950 Pfam Desc: Domain of function (DUF1691)
  misc_feature (89)..(153): Pfam Id: PF07950 Pfam Desc: Domain of function (DUF1691)
  misc_feature (1)..(337): NCBI GI: 46111815 Blast Desc: FG02789.1 [Gibberella zeae PH-1]
  misc_feature (80)..(337): NCBI GI: 256721891 Blast Desc: NECHADRAFT_36928 [Nectria haematococca mpVI 77-13-4]
  misc_feature (13)..(327): NCBI GI: 156040696 Blast Desc: SS1G_11326 [Sclerotinia sclerotiorum 1980] gi|154695710|gb|EDN95448.1| SS1G_11326 [Sclerotinia sclerotiorum 1980]
  misc_feature (4)..(333): NCBI GI: 39955708 Blast Desc: MGG_09029 [Magnaporthe grisea 70-15] gi|149209407|ref|XP_001522078.1| MGCH7_ch7g195 [Magnaporthe grisea 70-15] gi|86196150|gb|EAQ70788.1| MGCH7_ch7g195 grisea
  misc_feature (78)..(333): NCBI GI: 171683167 Blast Desc: protein product [Podospora anserina] gi|170941543|emb|CAP67195.1| protein product [Podospora anserina]
  misc_feature (1)..(333): NCBI GI: 85089746 Blast Desc: NCU09972 [Neurospora crassa OR74A] gi|28919411|gb|EAA28854.1| [Neurospora crassa OR74A]
  misc_feature (2)..(335): NCBI GI: 189205002 Blast Desc: conserved [Pyrenophora tritici-repentis Pt-1C-BFP] gi|187985935|gb|EDU51423.1| conserved [Pyrenophora tritici-repentis Pt-1C-BFP]
  misc_feature (16)..(334): NCBI GI: 145228303 Blast Desc: An01g00080 [Aspergillus niger] gi|134054546|emb|CAK36859.1| protein product [Aspergillus niger]
  misc_feature (16)..(335): NCBI GI: 115394854 Blast Desc: conserved [Aspergillus terreus NIH2624] gi|114193007|gb|EAU34707.1| conserved [Aspergillus terreus NIH2624]
  misc_feature (1)..(335): NCBI GI: 169609771 Blast Desc: SNOG_07978 [Phaeosphaeria nodorum SN15] gi|111063134|gb|EAT84254.1| SNOG_07978 [Phaeosphaeria nodorum SN15]
  misc_feature: Useful for introducing or modulating the production of volatile compounds
MDADTPPLQHKGSQDTLISLMQLDPSPIDSPSQEKDLPPLPEHSVSTTATSIPAAAARSSTTSSVGLSGTGRGPIFYLTRIQRYSSYTFAAFAGLHLANTSLIPLVYNSVPYSEPFLLMTREIYQTRISEPLLVALPVLAHVASGLAIRVIRRNQNMKRYGGGTPGLYATTTSKASLAPSTTSTTSSNRIWPFFSYIAASGYALSVLLSSHVAMNRVLPLVVDGDSSNVGLAYVSHGFARHPAFAWAAYILLLSVSAGHMAWGMAKWLDLAPPANWKRITFDKPSRRRRRRAWWAVNTAAASLALFWAAGGLGIVARAGAAEGWLGTVYDGIYAYAGR

SEQ ID NO: 29052 - DNA, 4378 bp, Muscodor strobelii
  misc_feature: SGI EST ID NO. CUFF.68697.0
  misc_feature: Variant of the nucleotide sequence at SEQ ID NO 29050
tcacgatcgtcgccgccatcatccaacaatttcaccttccattacactgctataactctgtaaccttccgcaacattaccagtattagatatcatggacgcagacacgccgccattgcagcacaaggggtcgcaagacacactcatctcgctcatgcagctcgatccgtcgcccatcgacagcccgtcgcaagagaaggacctgccgccgctgcccgagcattctgtttctaccactgccacttcgataccagccgccgcggccaggtcgtcgacgacgtcctctgtcggcctcagcggcactggtcgcgggcccatcttctacttgacacgcatccagcgctactccagctacaccttcgccgccttcgccggcctgcacctcgccaacacctctctgatccccctcgtctacaactcggtgccgtactcggagcccttcctgctcatgacccgcgagatctaccagacgcgcatctccgaacctctcctcgtcgccctgcccgtcctcgcccacgtcgcctcgggcctcgccatccgcgtcatccgccggaaccagaacatgaagcgttacggcggcggcactcccggcctctacgcgaccacgacgtcgaaagcttctctcgctccgtccacgacatccacgacatcttcgaaccggatatggcctttcttctcctacatcgccgcctcgggctacgcattgtccgtgctcctttcctcccacgtcgccatgaaccgcgtcttgcctcttgtcgttgacggcgacagcagcaacgtcggtctcgcctacgtctcccacggcttcgcccgccaccccgccttcgcctgggccgcctacatcctccttctctccgtcagtgcgggtcacatggcttggggcatggccaagtggctcgacctcgcgccccccgccaactggaagcgcatcaccttcgacaagccctcgcgccgtcgcaggagaagggcctggtgggctgtcaatactgctgccgcctcgctcgctctgttctgggcggccggcggtctgggcattgtcgcgagggccggagcagctgagggatggctgggcacggtatacgatggcatctacgcctacgctggccggtagccgatcgccatgccatctaagatgcaccttaaggacttagtggatattcttagcgtttcttcggcgaaacaaagactgcgaaggacaaatcgacagcgtcccgctggcggcccctcatcaaatccttgatgtttattccattgtaaaagaatcgatatgcttttttttttttgcgccgaataggcatacatcgcagcctgcttgcctatcccgttaacgatcgatctttatagatttatgggttaatgtacttattgtattaagatggcatcgtcacttcggccgtggtgatctctttcctgcataatctgaagaagtgaggttcgaagttcgtgtgtttgtatataacaatcaatatattgtcgaaggggcttgttgacaaacagtatggataggctccgcattgcgatcatcgagaggtaggagaatgatgggactggaagctgagagacgtgattttggtgcaccggatgcagctggaggagcacaacggcattcagcgggacgcatcctcgtcctccttcgtgcttgagaagcagagcgatatcgaaccaaccgtcctttcgccgcctcctttcagccagagaagcatagcgaatctacagtcttctatactgccccaagacagaacgcaggtcctcgactatcataccttcagtgcagagcatcgtcccgctgatatgctgtatttgtccgaaacacagatttggacggtgaggcgcgaacttttcgagcacctctatcttctttggatggctgcagctctaccttcatttgctcgatcatgaagactggactcgattattcttgcatccgcccggttggatcctgccaatcctctgaggctcttgccagggccaatcgagggtttcaacctccgaagtggatggccgcgattatttcgacaagctggttttcctgacgcacgcgagaatgcgcctctacgagtgtacacccctgcgacggtaccgaaagcaggacaccccgcattgactagcctcacttcagctgagcacaagaccgttcaacaggaggataatagcaatgtagcttgcggtagcaactcttgaacttctggcgtctgtgggatacgtgcctgagcatttggatcatgctgtttctcaatgacacgctcaagcagcttccgtatgcacatttgtacgatgatatggtttgagcaggcgcacttatcggccgcgctgcaacgttgatcactgcgattcattcacatcatcgtcacaacgattatggctgcacgggggccgtttaaacaatacggaatgtatatgatgactggtccctcgagtaatctggccccatatttatatcactcagccaacttatggcgcacgagagacggcttgttagcttgcagcatccttacgtacggggactattaggagatactgtctatcgcgaaatgttgatattggagaacgtgaatgactctgaaggaatggcataggcgaccggtgatgatgcgatcgcagagaccaagataatcaaagaaaccgagaatgattcgaatgaggaagagtggcgttcatatattcgacaaaaagaaaacgatcgatcaaacaggattcctgcataatagtcttcggaattcccgtggtcgaaaaccccgttgaatcgaaagctcacgttccgccacaacgcccggaatctgagatgttgaagaagcgacataggatggagccccgttcgtgtctatggaggattgtggacggagagagccccctgcaatactctgaatctgtctcccttggacttttcggaaagaccaagtccaatcgctccatagttgcgaattgcgatcattgcaacctcttgccgatacacaccaacgacatccgaagatatgcattgccattattgtgatgccgacaactgtatgcgacaggaccgtcgaatgcgcacgcattttgtacgcatttcggataaaggccagcacactagaaccacttcatagttgcgaattgtcatcaacaaccttgatgcaatcgacgacggtctatatccgagccctacatcggctccagctcgaagctcctacgatctcggactctctcataatgacctttgggtataaatagtaaccctagatacccagatattatctcggtctggtctgtggtgatttctgctttaacttttcacaatgggcgggagcttcgtcgcgttgtcatttgagggttttgatcaagcttaaaacaggtcgcctactagatccgattctacatcctcgcacactcagaggtaacagactcttgacgcccacgaataacatccgaaaactcgttattacgaactaggtcaaagacactcgtcggtgcctgggacggggaggggtcggactgcatcagctaattatggctctgtcatgaacagcatgtcgcttttccatcactctcttcagtcttggtctgtttatgcgacgcagagccaacaggggttcctgtgagatgtgtaccgctcattagagagacaacgcgctgccagccctgaaccgctgcacatgaaacttcccatccccttttccatgagttgtcccctatgtaaggatcacgataagtctgataatgagttgaactgtatttcgaaatggagagtacgacgtaggtgcatacatgagagctgcttgtttttgttcggagcgtgaacagctttgtcattcgagaaattgcctaatcaggtaatagggaggcaagcttgattggcggaaattgtgtctctccataaatgatgagatgacgacgactcctgtgaaaccgctagttccacaagagccttgtagctaagaaactactgggatattggaacaacgtgtgaacaatctggattagcaacatcagagcaattaatacgtgtttagtggtctttgccgctgctggaaagtaggagagtaggatgctacgccaacctagtgctcttcaggggtacacgcatgcgtcccaggcaatgacccgcttatgagcagttcctgatagaactgacaaagttacacatgcagcaccttgctgtcgcgtggagtcgtttagcgacggtctttctagattgcggagcttattggaggaacattaaaatcatctatgtacggaaatatcactctagtgcttctcattcttcacaaacctcattggagggattcgagaaacaactcccgatcaagcaaaagtcgatatgccttatccatagcctcaagtatataacattgatggccaagaaagccaagagttatcgtattcttggcagcttgggacctttc

SEQ ID NO: 29053 - DNA, 528 bp, Muscodor strobelii
  misc_feature: SGI cDNA ID NO. 569974
  misc_feature: Encodes the peptide sequence at SEQ ID NO 29054
atgcctccgcgacaccagaccctgccgccggcccagacttcgtcggcccgccaggcgctgcagtcgttctactgcgagctctgcgccaagggctactcgcgcatgaacgactacgaggcccacctcggctcctacgaccactcccaccgccagcgcatgaaggacatgaagcagatggtcaaggaccccaccgccggcgcccgcgcacgccgcgccgaggccaaggccgacgggctcatcagcatcaagattccttcctccgacgcgaccggccccgatgacaagaatcccaccactgccgcctcctcttctggcttcaagaagggcggcttcaagaagtcgggtttcaagagtgcattcgcacctgtcgtcaccgctacgaccgcaagtgtcaccacagatgagagggcagacatcaagacagacaagatcccgaccatgcccggtcgtgagatgttggaactcgatgtggagagcgacaccgacgacgactttgagctctacgacccccgatttcctaccgactga

SEQ ID NO: 29054 - protein, 175 aa, Muscodor strobelii
  misc_feature: SGI Peptide ID NO. 569974
  misc_feature (1)..(175): NCBI GI: 156040698 Blast Desc: SS1G_11327 [Sclerotinia sclerotiorum 1980] gi|154695711|gb|EDN95449.1| SS1G_11327 [Sclerotinia sclerotiorum 1980]
  misc_feature (1)..(175): NCBI GI: 85089748 Blast Desc: NCU09973 [Neurospora crassa OR74A] gi|28919412|gb|EAA28855.1| conserved [Neurospora crassa OR74A]
  misc_feature (4)..(175): NCBI GI: 256721928 Blast Desc: NECHADRAFT_36864 [Nectria haematococca mpVI 77-13-4]
  misc_feature (1)..(175): NCBI GI: 116193985 Blast Desc: CHGG_06710 [Chaetomium globosum CBS 148.51] gi|88182623|gb|EAQ90091.1| CHGG_06710 [Chaetomium globosum CBS 148.51]
  misc_feature (1)..(175): NCBI GI: 39955694 Blast Desc: MGG_09028 [Magnaporthe grisea 70-15] gi|145017735|gb|EDK02098.1| MGG_09028 [Magnaporthe grisea 70-15]
  misc_feature (1)..(175): NCBI GI: 171683165 Blast Desc: protein product [Podospora anserina] gi|170941542|emb|CAP67194.1| protein product [Podospora anserina]
  misc_feature (1)..(175): NCBI GI: 46111813 Blast Desc: FG02788.1 [Gibberella zeae PH-1]
  misc_feature (1)..(175): NCBI GI: 154303786 Blast Desc: BC1G_08777 [Botryotinia fuckeliana B05.10] gi|150854361|gb|EDN29553.1| BC1G_08777 [Botryotinia fuckeliana B05.10]
  misc_feature (1)..(82): NCBI GI: 212545144 Blast Desc: C2H2 finger domain protein, [Penicillium marneffei ATCC 18224] gi|210065695|gb|EEA19789.1| C2H2 finger domain protein, [Penicillium marneffei ATCC 18224]
  misc_feature (1)..(175): NCBI GI: 67904834 Blast Desc: AN9404.2 [Aspergillus nidulans FGSC A4] gi|40747315|gb|EAA66471.1| AN9404.2 [Aspergillus nidulans FGSC A4] gi|259488246|tpe|CBF87547.1| TPA: C2H2 finger domain protein,
MPPRHQTLPPAQTSSARQALQSFYCELCAKGYSRMNDYEAHLGSYDHSHRQRMKDMKQMVKDPTAGARARRAEAKADGLISIKIPSSDATGPDDKNPTTAASSSGFKKGGFKKSGFKSAFAPVVTATTASVTTDERADIKTDKIPTMPGREMLELDVESDTDDDFELYDPRFPTD

SEQ ID NO: 29055 - DNA, 4195 bp, Muscodor strobelii
  misc_feature: SGI EST ID NO. CUFF.68780.1
  misc_feature: Variant of the nucleotide sequence at SEQ ID NO 29053
cgggtctgggttaggggagttggcgggagttggggcagttgaatggggggctacagtaggtacatcgtcaacagtcgggtgcatccatccaacggacagtgttccagcagaccggcccacttttgtttttcacaagctgcaatttgacaggtcgacggcgacgctagcacggctaggccgatgcctgcgtttctgtctccaacctgtactccaactattctgactatttgcgcgtccgcatctaccgatccacctcgcggctttgacatcaacacgttgacggcggccagaagacagaatccacaagacaccactcatcattgcacacgtgcctcgtacagcacaacggcaccataacgacaacacaaccacagcacaaacaatacagcaatacccaacatccaaacacccagcatgcctccgcgacaccagaccctgccgccggcccagacttcgtcggcccgccaggcgctgcagtcgttctactgcgagctctgcgccaagggctactcgcgcatgaacgactacgaggcccacctcggctcctacgaccactcccaccgccagcgcatgaaggacatgaagcagatggtcaaggaccccaccgccggcgcccgcgcacgccgcgccgaggccaaggccgacgggctcatcagcatcaagattccttcctccgacgcgaccggccccgatgacaagaatcccaccactgccgcctcctcttctggcttcaagaagggcggcttcaagaagtcgggtttcaagagtgcattcgcacctgtcgtcaccgctacgaccgcaagtgtcaccacagatgagagggcagacatcaagacagacaagatcccgaccatgcccggtcgtgagatgttggaactcgatgtggagagcgacaccgacgacgactttgagctctacgacccccgatttcctaccgactgaaccgcaacccatccaagaaatttcgagactcattttcagtcggggttaacatgtacgcaggagacgccgtgagacaccatggcagaagcaaaagggacgatgcaaatacacatgtaccaggcactccgaggactgcgttggcggacaggcagatggacgccgtggttgtagctggctgctgttcatacgcgcaatctaacgtcacggagttttgcggtgtagagttatcgtgacaagtttgacgaagccaacgtgctactaattaagggtcgtgtggcttgccgattgcgccaagtgtttcattgatgcagtctagaagaaggttaacggggatggtacagtgggttatgttctccgggatcactactgggaggtatagaacgaggcgagaatggaagcatgtctcccgcaatgaatagattcgggtcaccggactccggttcgaaagtctcactctccgctgcttacgagatgggactaatcgatttctcataacaaagtaaacgccgactcctcgagagaatcaggtttgaacgcccgtttcagccaactctcacccgactcaaagttaggaaacgtaatcatcagcaaaccaatacgctcatacgacagtgtatcagccacagcttgattcaaaatcaggaaatacgtcgtcacgtcactactcttgacgtctccgacacggagcaagtgaaacagcccaagcgtgcactgtccgccgtcctcagccttgaacgagaagagcgcttcatcatacacatagtccgggaagatctgcagattatggctctcaagttcaaatcccctgactgtgaatctgcatgcttcgtaaccaacatacctgctgtcgcggaaccgatcgctagtctcgacttggtatcggaggcgcgccttgcttccccggacggaatgatggcagacgggacacatacggcgaatataaatcggatagaggcgagacttgacgcgtatatacgcagaacccgccagcagggaatcgctaccctcctttgtcgggcgcgaaattccctgcgtcatgtactggatacccatcttcgtatccacagccgcccacgaccacgacggcgccctccacgccgccggacgcgcacactcgattaacgtatcctttacgacccagaggagatcctgggcaaagctgttctgccacagccccgcgaaatatctctcccggtcgaggtcgcgcgtgtctttggcacaaccactgagcgccggcaacgtatcagtgcgtttcgtgatgccgagcgccgtgtaatgctccacaatctgatgccaccgctcgctgcgacggaagtgatactttgacttggacgcgaggtcgcgcgggctcaagtgcggcggcatcttctcgttgccgcattcgcacgccttggactcgcggcactcgaattggtactcggtcgctgtgcagtagaggatgcggcgcgatagcatgcgttcttggaatacccatgctcgtttcaggagaggggagtggtcttctatgtctccggggcgcacttcgcgtactgcgatgtgtgttgtgagattggggtggtcgtgatcgatgcgcagacatacgtcgccgtggccgacggagaagcacccaccgcggaagtcgggggaggatacagctgcgatagtgagaaagctgtttctgtagatgttggccattttactggactcgacttgccagtcttcggttgagtcctggatgatgcagagggagtcgatccagatatagtttatccctagctgatgggatattatgcatgcctcttggaatgttcttgggaggatattgaactcgaatccccggagccattttctcagtgtgcgaagggtcgtccgcgtcggcatgggccgtttaccccagcaatgcgagaggcatgtgtaggttccagtgcgttcttcgccttctccgatcgcgtccgtttcgacaagtctgaccgtcgggatcttgtcacccagatttgacaagtctaggagacgtctcggcagttcttgctggcgaccctcgccacagacactatgatgcgtctcacagttggctaccatgcgctttgccctggctaatgatacgggcgaggcggtattccctgttagcacattcgcagagcgcatgcctagaatagtagttttaacccctgatcgtaaagttcagtcctacgctcaaccagaatatcctttccgtgccttggaggtgacctgcctgtggggttgaatagctgcagcttgacagaccgagacccaactccagaactcatcgtcagcgcatatgcgaacgattcccagttgaaagtcaatccgcgaccacttaagcctccccgcgtaggaacatacgcctcaatcaaggctctgaagaaactacaggttccgcatccggctgtggtggaatgttggagatcatcgagcgtgaagctccgaggcccagattccgagcctctggcctcctggaagaactccgacctggactctaccctcgatttacctcccttttctcgtttcttatggctccggaactccaacgacctttgccattgcatgcagttgagctggcagttctccgtcccaagaccagagaagatgttgaaacgcgatggcttggtgccgacatgctcagacgacgagtcgttttgagtgatctcttcagcgagcaccacagtgactttcattgtgagaaccgatatgtgcgcggtgacagtgactagagcattgagcgaaatattgggctgtcgagtttggttgccgctgggctgagtttggagaaggtgatgtgcttactggggcattgctcagctcgtacgccgcacgcgtgctgccttgacagtctacgagccacggtcccgagaacccatcgttcaaaggttccaaatagtgctactctcctttgcaagtaatgctagaagtctaggatcaccaggcgatacactctctttcttcggaacaccgaacgaagaccaagatatcttctacgccgcagacgggaacagattctatggcacatgtctgtgatcgccggtcattacaattgggcaatacttttcattggcgacctggcaggccgcagtcaaaataaacgagacatctacatgtatcagtaccttatctaattgtaccaataatatagccttaggacattatttatgtaaaatgaaacctgtgaatatatcagatgttatggaacttccagaattgattccgttgagatgtagattgctagcagaacattattcgctgttctattgggaac

SEQ ID NO: 29056 - DNA, 1251 bp, Muscodor strobelii
  misc_feature: SGI cDNA ID NO. 569975
  misc_feature: Encodes the peptide sequence at SEQ ID NO 29057
atggccaacatctacagaaacagctttctcactatcgcagctgtatcctcccccgacttccgcggtgggtgcttctccgtcggccacggcgacgtatgtctgcgcatcgatcacgaccaccccaatctcacaacacacatcgcagtacgcgaagtgcgccccggagacatagaagaccactcccctctcctgaaacgagcatgggtattccaagaacgcatgctatcgcgccgcatcctctactgcacagcgaccgagtaccaattcgagtgccgcgagtccaaggcgtgcgaatgcggcaacgagaagatgccgccgcacttgagcccgcgcgacctcgcgtccaagtcaaagtatcacttccgtcgcagcgagcggtggcatcagattgtggagcattacacggcgctcggcatcacgaaacgcactgatacgttgccggcgctcagtggttgtgccaaagacacgcgcgacctcgaccgggagagatatttcgcggggctgtggcagaacagctttgcccaggatctcctctgggtcgtaaaggatacgttaatcgagtgtgcgcgtccggcggcgtggagggcgccgtcgtggtcgtgggcggctgtggatacgaagatgggtatccagtacatgacgcagggaatttcgcgcccgacaaaggagggtagcgattccctgctggcttttcagaagagtgtgactgtcagctgtgagcccaagggtcttgatccgacaggcgaggtcctaccgggttctgcgtatatacgcgtcaagtctcgcctctatccgatttatattcgccgtatgtgtcccgtctgccatcattccgtccggggaagcaaggcgcgcctccgataccaagtcgagactagcgatcggttccgcgacagcaggtatgttggttacgaagcatgcagattcacagtcaggggatttgaacttgagagccataatctgcagatcttcccggactatgtgtatgatgaagcgctcttctcgttcaaggctgaggacggcggacagtgcacgcttgggctgtttcacttgctccgtgtcggagacgtcaagagtagtgacgtgacgacgtatttcctgattttgaatcaagctgtggctgatacactgtcgtatgagcgtattggtttgctgatgattacgtttcctaactttgagtcgggtgagagttggctgaaacgggcgttcaaacctgattctctcgaggagtcggcgtttactttgttatga

SEQ ID NO: 29057 - protein, 416 aa, Muscodor strobelii
  misc_feature: SGI Peptide ID NO. 569975
  misc_feature (1)..(72): Pfam Id: PF06985 Pfam Desc: Heterokaryon incompatibility protein (HET)
  misc_feature (1)..(416): NCBI GI: 256722024 Blast Desc: NECHADRAFT_86169 [Nectria haematococca mpVI 77-13-4]
  misc_feature (1)..(254): NCBI GI: 256721585 Blast Desc: NECHADRAFT_78531 [Nectria haematococca mpVI 77-13-4]
  misc_feature (1)..(260): NCBI GI: 169617423 Blast Desc: SNOG_11890 [Phaeosphaeria nodorum SN15] gi|111059814|gb|EAT80934.1| SNOG_11890 [Phaeosphaeria nodorum SN15]
  misc_feature (1)..(212): NCBI GI: 169597427 Blast Desc: SNOG_01499 [Phaeosphaeria nodorum SN15] gi|160707520|gb|EAT91148.2| SNOG_01499 [Phaeosphaeria nodorum SN15]
  misc_feature (1)..(265): NCBI GI: 256720767 Blast Desc: NECHADRAFT_85408 [Nectria haematococca mpVI 77-13-4]
  misc_feature (1)..(275): NCBI GI: 169617421 Blast Desc: SNOG_11889 [Phaeosphaeria nodorum SN15] gi|160703405|gb|EAT80933.2| SNOG_11889 [Phaeosphaeria nodorum SN15]
  misc_feature (1)..(206): NCBI GI: 226291939 Blast Desc: conserved [Paracoccidioides brasiliensis Pb18]
  misc_feature (1)..(206): NCBI GI: 225680144 Blast Desc: conserved [Paracoccidioides brasiliensis Pb03]
  misc_feature (1)..(206): NCBI GI: 226286490 Blast Desc: conserved [Paracoccidioides brasiliensis Pb01]
  misc_feature (1)..(250): NCBI GI: 256728739 Blast Desc: NECHADRAFT_85989 [Nectria haematococca mpVI 77-13-4]
MANIYRNSFLTIAAVSSPDFRGGCFSVGHGDVCLRIDHDHPNLTTHIAVREVRPGDIEDHSPLLKRAWVFQERMLSRRILYCTATEYQFECRESKACECGNEKMPPHLSPRDLASKSKYHFRRSERWHQIVEHYTALGITKRTDTLPALSGCAKDTRDLDRERYFAGLWQNSFAQDLLWVVKDTLIECARPAAWRAPSWSWAAVDTKMGIQYMTQGISRPTKEGSDSLLAFQKSVTVSCEPKGLDPTGEVLPGSAYIRVKSRLYPIYIRRMCPVCHHSVRGSKARLRYQVETSDRFRDSRYVGYEACRFTVRGFELESHNLQIFPDYVYDEALFSFKAEDGGQCTLGLFHLLRVGDVKSSDVTTYFLILNQAVADTLSYERIGLLMITFPNFESGESWLKRAFKPDSLEESAFTLL

SEQ ID NO: 29058 - DNA, 273 bp, Muscodor strobelii
  misc_feature: SGI cDNA ID NO. 569976
  misc_feature: Encodes the peptide sequence at SEQ ID NO 29059
atgccgtccagctcgcagtcctactctttcacttcctacagctcgtcttcctccacgaatgggggtccgccccagaagaccacgtttgccgagcgcagctataccgacgcctccggcactgtcaccgaacgaatgcaccagctacccggccaacaagccgtctacgagactaccgaacgacccagcggccgccaagttgagggcggctccaccgcctctgctcaacatcgcatcacggacgtgactgaagccgagaaggattccaataattaa

SEQ ID NO: 29059 - protein, 90 aa, Muscodor strobelii
  misc_feature: SGI Peptide ID NO. 569976
MPSSSQSYSFTSYSSSSSTNGGPPQKTTFAERSYTDASGTVTERMHQLPGQQAVYETTERPSGRQVEGGSTASAQHRITDVTEAEKDSNN

SEQ ID NO: 29060 - DNA, 1312 bp, Muscodor strobelii
  misc_feature: SGI EST ID NO. CUFF.68787.0
  misc_feature: Variant of the nucleotide sequence at SEQ ID NO 29058
ccttgcttcccccagtcacttattgcttcgctgctggaacaaagtatggcaagacattcaaaatccacaagcttgttttaagggctcagtggacaaatgccttgataggcccggtaatggaaattatgtgattgcactgctcctgttgtcctgctctgtttcaagtgactattgcgtgtgtttgttcaattgctctgagtgtttctgacgataggaccgtcttctgtactacgagacattcgccatgacgtcagaggcaagctcccacctctcttacctctcctcacccgccttcgatcgtatgacctttgattctcttgatgctacttcaaactcctcgcacacataaaagaggacgaaaaggtcctctgcaaataatcaacagcccgggattcaataagacacacctcaagcactgccaataatcgatcacaatgccgtccagctcgcagtcctactctttcacttcctacagctcgtcttcctccacgaatgggggtccgccccagaagaccacgtttgccgagcgcagctataccgacgcctccggcactgtcaccgaacgaatgcaccagctacccggccaacaagccgtctacgagactaccgaacgacccagcggccgccaagttgagggcggctccaccgcctctgctcaacatcgcatcacggacgtgactgaagccgagaaggattccaataattaaatccaacgggaaaagatcaactacacgcctggtagtttggatctccatctcacgacggtgtagaagaggatacatttgtaatgtgcacaaatgagctactaggacagggacagcgggcacaacaacagtgcatcagaccttgggactgccgttgaaagagtgcacatggcgtattggaatgccagtacctgctaggagtgtaaacgaggtagctatcattttacggttttttcaaaagcccttgagcagcagcagtgattgccacctaatattctgacaatggcgccttcagtccaagcacagttactaagtaagcttgcaatgccatatccaagtagctaccatgctagagatacaccctgttgtagttctaggtgatacagtcagtctggcgagtggttagattcgccatctagaaatgggagtggcgcatttgtagcttccccatgggtgttcatacgaaacagagcggaaggtgcaggcggggtatgagcttgacatgcttaatcctcaagattgcgagttggaaggcacgagatgttcgtatataagctacggatgggagtgcactttacaacgaccaaggccgcgtggcttaatggcaa

SEQ ID NO: 29061 - DNA, 1566 bp, Muscodor strobelii
  misc_feature: SGI cDNA ID NO. 569977
  misc_feature: Encodes the peptide sequence at SEQ ID NO 29062
atggagaaaatgaataacgggacatcagatgcaggacgtgatgagaaagagccgttacggttaccacggaggcttcgagccctgaaagactctgcggatgcgaaagaccacccacgcacactaatcatttgtctagatggcacgggtgatcagtttgacaacgacaacagtaacattgtacactttgtttcatgcctcaaaaagcattcgcccgagcatcaagttacatactatcaatctggcattggcacgtacgaccgaggcggtctacaaaatggcattggtgctgctatggacatggctgtcggtagcggacttggaattcacgtcaaagatgcgtacaaattcttaatgcagaactaccgagaaggtgacaagatctgccttttgggcttctccagaggagcatatactgttcgttgtctcgctggcatgcttcgcaaagtcggactcctcccagcaagcaatggctcgcaagtgaatttcgcatataacttttataaagacaactcgaaaaacggagcgaagcttgccgaagacttcaaaaggacattttgcacagatgtcgatgtctatttcttgggactcttcgattgcgtagcaagcgtgggatttttccctcgaaaactccctttcagcaaagaggccacaaacacggtgcactactttcgacatgcgatggcccttgacgagcacagagcaaagttcaaagtctgccactggcagcacgagatgccagacatgaatgaaccttctgcactcaagcgtcgtgcgacggtggactttacacctggggcacggatgcgtcgaggcctgggtctcgatctagcaagcaagaagatgttaaaagaggcacaaaaggcgaacaggaagaatatccacagaaaaagcgatagtgatagcgatgacacttggaccgccaagttcaacgaacaggagaaagccaacaaagcctaccaatatttccaaactgacgcgctcgaagtatggttcatgggcgcacacgcagatatcggagggggcgccgttgctaacgagagtcgacacatgctctcgcgtattccacttcgctggatgatccgacaatgtttcgaatgcgatacaggtatcttgttcgacaccgctgcgctcgctgagcagggtcttgacgtagcgagtctgtggccagtgtaccgcaaaccaatcaagcccactagacgctccacattcttacccatcgggcccgtgaacaacattatcaacaatgccccgacggcggaagacttaaactacattctgccatcggaggcggacgaagatcacttcgatgctatggagaaagcgcacgatcaactcatcgaagcaaaaggatggtgggttcttgaaatctggcccgtgaagatccgcgtcttgtcaaaggatagtgcgggttgggagaagagagtgaggatgaatctggggcgacatcgagcgattcgaactctcaaccccaatatgcattggactgttcaaaagcggatcgacgaccaagagtacgtcctcaggacgcgggagactgagggtacaagttggcagcacgttatataa

SEQ ID NO: 29062 - protein, 521 aa, Muscodor strobelii
  misc_feature: SGI Peptide ID NO. 569977
  misc_feature (26)..(515): NCBI GI: 169857843 Blast Desc: CC1G_03350 [Coprinopsis cinerea okayama7#130] gi|116503244|gb|EAU86139.1| CC1G_03350 [Coprinopsis cinerea okayama7#130]
  misc_feature (32)..(500): NCBI GI: 170090370 Blast Desc: [Laccaria bicolor S238N-H82] gi|164647900|gb|EDR12143.1| [Laccaria bicolor S238N-H82]
  misc_feature (36)..(515): NCBI GI: 242213353 Blast Desc: [Postia placenta Mad-698-R] gi|220728396|gb|EED82291.1| [Postia placenta Mad-698-R]
  misc_feature (38)..(382): NCBI GI: 169857873 Blast Desc: CC1G_03365 [Coprinopsis cinerea okayama7#130] gi|116503259|gb|EAU86154.1| CC1G_03365 [Coprinopsis cinerea okayama7#130]
  misc_feature (39)..(241): NCBI GI: 169857502 Blast Desc: [Coprinopsis cinerea okayama7#130] gi|116503472|gb|EAU86367.1| [Coprinopsis cinerea okayama7#130]
  misc_feature (39)..(461): NCBI GI: 170106479 Blast Desc: [Laccaria bicolor S238N-H82] gi|164640797|gb|EDR05061.1| [Laccaria bicolor S238N-H82]
  misc_feature (39)..(461): NCBI GI: 170101024 Blast Desc: [Laccaria bicolor S238N-H82] gi|164643084|gb|EDR07337.1| [Laccaria bicolor S238N-H82]
  misc_feature (38)..(500): NCBI GI: 254568540 Blast Desc: of function [Pichia pastoris GS115] gi|238031177|emb|CAY69100.1| of function [Pichia pastoris GS115]
  misc_feature (39)..(496): NCBI GI: 50289909 Blast Desc: CAGL0I03168g [Candida glabrata CBS138] gi|49526696|emb|CAG60323.1| protein product [Candida glabrata]
  misc_feature (40)..(220): NCBI GI: 170088715 Blast Desc: [Laccaria bicolor S238N-H82] gi|164648840|gb|EDR13082.1| [Laccaria bicolor S238N-H82]
MEKMNNGTSDAGRDEKEPLRLPRRLRALKDSADAKDHPRTLIICLDGTGDQFDNDNSNIVHFVSCLKKHSPEHQVTYYQSGIGTYDRGGLQNGIGAAMDMAVGSGLGIHVKDAYKFLMQNYREGDKICLLGFSRGAYTVRCLAGMLRKVGLLPASNGSQVNFAYNFYKDNSKNGAKLAEDFKRTFCTDVDVYFLGLFDCVASVGFFPRKLPFSKEATNTVHYFRHAMALDEHRAKFKVCHWQHEMPDMNEPSALKRRATVDFTPGARMRRGLGLDLASKKMLKEAQKANRKNIHRKSDSDSDDTWTAKFNEQEKANKAYQYFQTDALEVWFMGAHADIGGGAVANESRHMLSRIPLRWMIRQCFECDTGILFDTAALAEQGLDVASLWPVYRKPIKPTRRSTFLPIGPVNNIINNAPTAEDLNYILPSEADEDHFDAMEKAHDQLIEAKGWWVLEIWPVKIRVLSKDSAGWEKRVRMNLGRHRAIRTLNPNMHWTVQKRIDDQEYVLRTRETEGTSWQHVI

SEQ ID NO: 29063 - DNA, 1158 bp, Muscodor strobelii
  misc_feature: SGI EST ID NO. CUFF.68671.0
  misc_feature: Variant of the nucleotide sequence at SEQ ID NO 29061
ggatttttccctcgaaaactccctttcagcaaagaggccacaaacacggtgcactactttcgacatgcgatggcccttgacgagcacagagcaaagttcaaagtctgccactggcagcacgagatgccagacatgaatgaaccttctgcactcaagcgtcgtgcgacggtggactttacacctggggcacggatgcgtcgaggcctgggtctcgatctagcaagcaagaagatgttaaaagaggcacaaaaggcgaacaggaagaatatccacagaaaaagcgatagtgatagcgatgacacttggaccgccaagttcaacgaacaggagaaagccaacaaagcctaccaatatttccaaactgacgcgctcgaagtatggttcatgggcgcacacgcagatatcggagggggcgccgttgctaacgagagtcgacacatgctctcgcgtattccacttcgctggatgatccgacaatgtttcgaatgcgatacaggtatcttgttcgacaccgctgcgctcgctgagcagggtcttgacgtagcgagtctgtggccagtgtaccgcaaaccaatcaagcccactgtcggaccccccgataagctgatggcgaaatataaaaaagaaaattctcgcacctgtgcagagacgctccacattcttacccatcgggcccgtgaacaacattatcaacaatgccccgacggcggaagacttaaactacattctgccatcggaggcggacgaagatcacttcgatgctatggagaaagcgcacgatcaactcatcgaagcaaaaggatggtgggttcttgaaatctggcccgtgaagatccgcgtcttgtcaaaggatagtgcgggttgggagaagagagtgaggatgaatctggggcgacatcgagcgattcgaactctcaaccccaatatgcattggactgttcaaaagcggatcgacgaccaagagtacgtcctcaggacgcgggagactgagggtacaagttggcagcacgttatataaggcggagaaccgcataataaacgagtaatgacagggaacaaaatagtcgagtctatcccgccatcttgagtatgaaacatatgccacctacgtgtatcaaagacgcggtcccctttaagtacggaggatatttagggttg

SEQ ID NO: 29064 - DNA, 1602 bp, Muscodor strobelii
  misc_feature: SGI cDNA ID NO. 569978
  misc_feature: Encodes the peptide sequence at SEQ ID NO 29065
atggagaaaatgaataacgggacatcagatgcaggacgtgatgagaaagagccgttacggttaccacggaggcttcgagccctgaaagactctgcggatgcgaaagaccacccacgcacactaatcatttgtctagatggcacgggtgatcagtttgacaacgacaacagtaacattgtacactttgtttcatgcctcaaaaagcattcgcccgagcatcaagttacatactatcaatctggcattggcacgtacgaccgaggcggtctacaaaatggcattggtgctgctatggacatggctgtcggtagcggacttggaattcacgtcaaagatgcgtacaaattcttaatgcagaactaccgagaaggtgacaagatctgccttttgggcttctccagaggagcatatactgttcgttgtctcgctggcatgcttcgcaaagtcggactcctcccagcaagcaatggctcgcaagtgaatttcgcatataacttttataaagacaactcgaaaaacggagcgaagcttgccgaagacttcaaaaggacattttgcacagatgtcgatgtctatttcttgggactcttcgattgcgtagcaagcgtgggatttttccctcgaaaactccctttcagcaaagaggccacaaacacggtgcactactttcgacatgcgatggcccttgacgagcacagagcaaagttcaaagtctgccactggcagcacgagatgccagacatgaatgaaccttctgcactcaagcgtcgtgcgacggtggactttacacctggggcacggatgcgtcgaggcctgggtctcgatctagcaagcaagaagatgttaaaagaggcacaaaaggcgaacaggaagaatatccacagaaaaagcgatagtgatagcgatgacacttggaccgccaagttcaacgaacaggagaaagccaacaaagcctaccaatatttccaaactgacgcgctcgaagtatggttcatgggcgcacacgcagatatcggagggggcgccgttgctaacgagagtcgacacatgctctcgcgtattccacttcgctggatgatccgacaatgtttcgaatgcgatacaggtatcttgttcgacaccgctgcgctcgctgagcagggtcttgacgtagcgagtctgtggccagtgtaccgcaaaccaatcaagcccactagacgctccacattcttacccatcgggcccgtgaacaacattatcaacaatgccccgacggcggaagacttaaactacattctgccatcggaggcggacgaagatcacttcgatgctatggagaaagcgcacgatcaactcatcgaagcaaaaggatggtgggttcttgaaatctggcccgtgaagatccgcgtcttgtcaaaggatagtgcgggttgggagaagagagtgaggatgaatctggggcgacatcgagcgattcgaactctcaaccccaatatgcattggactgttcaaaagcggatcgacgaccaagagtacgtcctcaggacgcgggagactgagggtacaagtgtgagtcttgcttcgcatgtgtcccatcatcctgatatgagccagcacctgtag

SEQ ID NO: 29065 - protein, 533 aa, Muscodor strobelii
  misc_feature: SGI Peptide ID NO. 569978
  misc_feature (26)..(515): NCBI GI: 169857843 Blast Desc: CC1G_03350 [Coprinopsis cinerea okayama7#130] gi|116503244|gb|EAU86139.1| CC1G_03350 [Coprinopsis cinerea okayama7#130]
  misc_feature (32)..(500): NCBI GI: 170090370 Blast Desc: [Laccaria bicolor S238N-H82] gi|164647900|gb|EDR12143.1| [Laccaria bicolor S238N-H82]
  misc_feature (36)..(517): NCBI GI: 242213353 Blast Desc: [Postia placenta Mad-698-R] gi|220728396|gb|EED82291.1| [Postia placenta Mad-698-R]
  misc_feature (38)..(382): NCBI GI: 169857873 Blast Desc: CC1G_03365 [Coprinopsis cinerea okayama7#130] gi|116503259|gb|EAU86154.1| CC1G_03365 [Coprinopsis cinerea okayama7#130]
  misc_feature (39)..(241): NCBI GI: 169857502 Blast Desc: [Coprinopsis cinerea okayama7#130] gi|116503472|gb|EAU86367.1| [Coprinopsis cinerea okayama7#130]
  misc_feature (39)..(461): NCBI GI: 170106479 Blast Desc: [Laccaria bicolor S238N-H82] gi|164640797|gb|EDR05061.1| [Laccaria bicolor S238N-H82]
  misc_feature (39)..(461): NCBI GI: 170101024 Blast Desc: [Laccaria bicolor S238N-H82] gi|164643084|gb|EDR07337.1| [Laccaria bicolor S238N-H82]
  misc_feature (38)..(500): NCBI GI: 254568540 Blast Desc: of function [Pichia pastoris GS115] gi|238031177|emb|CAY69100.1| of function [Pichia pastoris GS115]
  misc_feature (40)..(220): NCBI GI: 170088715 Blast Desc: [Laccaria bicolor S238N-H82] gi|164648840|gb|EDR13082.1| [Laccaria bicolor S238N-H82]
  misc_feature (39)..(496): NCBI GI: 50289909 Blast Desc: CAGL0I03168g [Candida glabrata CBS138] gi|49526696|emb|CAG60323.1| protein product [Candida glabrata]
MEKMNNGTSDAGRDEKEPLRLPRRLRALKDSADAKDHPRTLIICLDGTGDQFDNDNSNIVHFVSCLKKHSPEHQVTYYQSGIGTYDRGGLQNGIGAAMDMAVGSGLGIHVKDAYKFLMQNYREGDKICLLGFSRGAYTVRCLAGMLRKVGLLPASNGSQVNFAYNFYKDNSKNGAKLAEDFKRTFCTDVDVYFLGLFDCVASVGFFPRKLPFSKEATNTVHYFRHAMALDEHRAKFKVCHWQHEMPDMNEPSALKRRATVDFTPGARMRRGLGLDLASKKMLKEAQKANRKNIHRKSDSDSDDTWTAKFNEQEKANKAYQYFQTDALEVWFMGAHADIGGGAVANESRHMLSRIPLRWMIRQCFECDTGILFDTAALAEQGLDVASLWPVYRKPIKPTRRSTFLPIGPVNNIINNAPTAEDLNYILPSEADEDHFDAMEKAHDQLIEAKGWWVLEIWPVKIRVLSKDSAGWEKRVRMNLGRHRAIRTLNPNMHWTVQKRIDDQEYVLRTRETEGTSVSLASHVSHHPDMSQHL

SEQ ID NO: 29066 - DNA, 154 bp, Muscodor strobelii
  misc_feature: SGI EST ID NO. CUFF.68668.0
  misc_feature: Variant of the nucleotide sequence at SEQ ID NO 29064
tgccttttgggcttctccagaggagcatatactgttcgttgtctcgctggcatgcttcgcaaagtcggactcctcccagcaagcaatggctcgcaagtgaatttcgcatataacttttataaagacaactcgaaaaacggagcgaagcttgccg

SEQ ID NO: 29067 - DNA, 816 bp, Muscodor strobelii
  misc_feature: SGI cDNA ID NO. 569979
  misc_feature: Encodes the peptide sequence at SEQ ID NO 29068
atgggcggcgtgccatcggtaccgcgagatagctcgcgacaactcgaggttatatgtgccggatactcccggaccggtacttccagcatgcagcttgcgcttgagaagttgctccgtggaccagtttgtcatggaggaacgcagatcctcaatcgtgaagacgcatacgtcaggaagtggtacctcgcgtatctggccaagaaccgaggcgacaaggcggagcttcacagacttcttcgcgagctgacggcgggtttcgttggcgtatgcgacatgccgcccatcgacttcatccccgagctgctcgagctatacccaggcgccaaagtgatcctcacgacgcgtgacccctcctcttggcttcagagcctccaagttgttgcatcggccacgcagcccgggctattgtactacttcctgtggccgattccgggctggcggtggttccctgccatccatcaccagtttggagagagcgggcgcaagatcctggcttatggcacgggcggagagaagaaggggagcggagcttttgacccggcggcaacgctgctactggactggaaccagatggtcaaggacatggtaccgcaagagaagctgctgattatggacttgaacgagggatggaagccgatatgcgagcttctaggtgttggtgtgccgagcgagctgatgcctcgcgtcaatgagaaggcggcaattgggaagatcgcgggcgatatcaggagccgagtcttgcgaatctggatgacgggattgagctcggtagctatcgtgggctttgtggcgtggaggttctcgcgtgtgaggtga

SEQ ID NO: 29068 - protein, 271 aa, Muscodor strobelii
  misc_feature: SGI Peptide ID NO. 569979
  misc_feature (1)..(269): NCBI GI: 145601239 Blast Desc: MGG_08722 [Magnaporthe grisea 70-15] gi|145009265|gb|EDJ93976.1| MGG_08722 [Magnaporthe grisea 70-15]
  misc_feature (1)..(270): NCBI GI: 169774259 Blast Desc: [Aspergillus oryzae RIB40] gi|83769460|dbj|BAE59595.1| protein product [Aspergillus oryzae]
  misc_feature (1)..(270): NCBI GI: 238497233 Blast Desc: NAD dependent epimerase/dehydratase, [Aspergillus flavus NRRL3357] gi|220694732|gb|EED51076.1| NAD dependent epimerase/dehydratase, [Aspergillus flavus NRRL3357]
  misc_feature (1)..(257): NCBI GI: 145246676 Blast Desc: An12g05170 [Aspergillus niger] gi|134080308|emb|CAK46230.1| protein product [Aspergillus niger]
  misc_feature (1)..(255): NCBI GI: 145234771 Blast Desc: An03g01320 [Aspergillus niger] gi|134057707|emb|CAK38105.1| protein product [Aspergillus niger]
  misc_feature (1)..(265): NCBI GI: 256728385 Blast Desc: NECHADRAFT_54291 [Nectria haematococca mpVI 77-13-4]
  misc_feature (1)..(269): NCBI GI: 169620261 Blast Desc: SNOG_13333 [Phaeosphaeria nodorum SN15] gi|111058097|gb|EAT79217.1| SNOG_13333 [Phaeosphaeria nodorum SN15]
  misc_feature (1)..(248): NCBI GI: 145247056 Blast Desc: An12g07240 [Aspergillus niger] gi|134080504|emb|CAK46352.1| protein product [Aspergillus niger]
  misc_feature (1)..(266): NCBI GI: 255941500 Blast Desc: Pc16g12200 [Penicillium chrysogenum Wisconsin 54-1255] gi|211586142|emb|CAP93890.1| Pc16g12200 [Penicillium chrysogenum Wisconsin 54-1255]
  misc_feature (1)..(239): NCBI GI: 67904648 Blast Desc: AN9311.2 [Aspergillus nidulans FGSC A4] gi|40747222|gb|EAA66378.1| AN9311.2 [Aspergillus nidulans FGSC A4] gi|259488146|tpe|CBF87380.1| TPA: conserved [Aspergillus FGSC
MGGVPSVPRDSSRQLEVICAGYSRTGTSSMQLALEKLLRGPVCHGGTQILNREDAYVRKWYLAYLAKNRGDKAELHRLLRELTAGFVGVCDMPPIDFIPELLELYPGAKVILTTRDPSSWLQSLQVVASATQPGLLYYFLWPIPGWRWFPAIHHQFGESGRKILAYGTGGEKKGSGAFDPAATLLLDWNQMVKDMVPQEKLLIMDLNEGWKPICELLGVGVPSELMPRVNEKAAIGKIAGDIRSRVLRIWMTGLSSVAIVGFVAWRFSRVR

SEQ ID NO: 29069 - DNA, 1732 bp, Muscodor strobelii
  misc_feature: SGI EST ID NO. CUFF.68761.0
  misc_feature: Variant of the nucleotide sequence at SEQ ID NO 29067
cgccgccaagacaacggaggggatgattcattctgacggagcacgatgtaggcactactttgtcgcccacaccaggcggatcggccacctatttgctatcttacttgcagatccctcgcatataatattgcctatgatgcatacttcaatgaccagcgacagcttacatatcggagggggcggcctctcgcttacaagcttggagagtcttgtctcttggtgtcgagcattgcttaattactggagagaagtgcggcacttgcgggacatcaaaagggagtaggtatacactggtaaaggacacaactggtcgttgggcatcggattcgtttcagaagcaaatgaaaacacttcgatctgttggctaagatagacagagtgtcttcatctcaaatatctgtcaaccaatcacagtaccctcaactacgacttgggactaaagttacacgaagatcaagcatgggcggcgtgccatcggtaccgcgagatagctcgcgacaactcgaggttatatgtgccggatactcccggaccggtacttccagcatgcagcttgcgcttgagaagttgctccgtggaccagtttgtcatggaggaacgcagatcctcaatcgtgaagacgcatacgtcaggaagtggtacctcgcgtatctggccaagaaccgaggcgacaaggcggagcttcacagacttcttcgcgagctgacggcgggtttcgttggcgtatgcgacatgccgcccatcgacttcatccccgagctgctcgagctatacccaggcgccaaagtgatcctcacgacgcgtgacccctcctcttggcttcagagcctccaagttgttgcatcggccacgcagcccgggctattgtactacttcctgtggccgattccgggctggcggtggttccctgccatccatcaccagtttggagagagcgggcgcaagatcctggcttatggcacgggcggagagaagaaggggagcggagcttttgacccggcggcaacgctgctactggactggaaccagatggtcaaggacatggtaccgcaagagaagctgctgattatggacttgaacgagggatggaagccgatatgcgagcttctaggtgttggtgtgccgagcgagctgatgcctcgcgtcaatgagaaggcggcaattgggaagatcgcgggcgatatcaggagccgagtcttgcgaatctggatgacgggattgagctcggtagctatcgtgggctttgtggcgtggaggttctcgcgtgtgaggtgaggtgttcaaacgccggtctgctgatattgtaaatatccttgatagagaaagaaaggcgagggacaatgagtgcaatcaatgccggttgaattggacgaagggacaactacgaacaatcacatacctacctcagctacactcgaaaaaatggtactgtaggcaattgcgcctctctcgtgctgaacatgggcggtgcgccgttggacagcggcttggctttgtggcagtggcagtgatcgtgacggtcaacctgtggcaggtgcgctttcttcttcgccgcgctccgacacgggagcgcaagagatgaaaaaaaacccagtggtcttgttggtacaaaaattccctacccggcgcagaggccaaataggagtggtcatagtatagttttcaactagcagacacgcactcggattgctcctcactgtgacgcgaaccagccctagcacttggatgggga

SEQ ID NO: 29070 - DNA, 2022 bp, Muscodor strobelii
  misc_feature: SGI cDNA ID NO. 569980
  misc_feature: Encodes the peptide sequence at SEQ ID NO 29071
atgagggcgggtatacttgacgctcgtggcaggcaaacccgaggggagcatttcaaaggccgtggaggaccggaggagaagatcgcgcagcaagcccgcgaattcggcggggagaaaacctttgatccgactggtagacgccaaccgaactacgtttacagcgcacaagaggcgtctgtgccatattctcggtctggaggtgacgtgatgccgcaaggcaaggaagccgttcaatcgaatttgcagagtgaaggtactcctcgggagaagaagaagttcccgggatccgaatactacaaaccggaatctgttccggggtcaatttctgcagagggatacgaagcgccgggtgccagtctagtcgacagttcaactgttacggccgcggcatgtacgggtgcttttgcatctatctctgcatcggattacgtagcagcgatcaatccaggctggaaccttgggaatacgctcgatgccattcctgatgaaggttcttggggacatacagccaatcaagctgtttttgatacagtcgcgaagggcggattcaagagtgtcaggatccctgtcacatacgcggatcattatgtcgaaagctcacctaactggacaatcgatcccgcatggctcgaaagagtttccgcagtcgtcgatatggcactttctagtggtctctatgtcatcaccaatatgcaccatgattcctgggaatgggcagatgtgacagcctccggagctaatatctcaatgattgaagagaagttctatcgctcatggattcaaattggaacaacgttggcatgtaaatcttcaaaggttgcatttgaacccatcaatgagcccccggcgaatgttgaagcagatgggttggagctgaacaagctcaacaatctatttcttcaggcactccaagagtcgggcggattcaatgagctgcgcgttgtcactcttgttggtggcggcgaggacagcatcaaaacctccgagtggttcaacccgccgacgggataccagaatccatgggcaatccaataccactactacagtccttatgacttcgttttccaagcctggggcaaaacaacctggggatctgcggatgacaagttggcaatgaaaaccgacttggctaacattagaggcaacttcacgggtgttcctcttgttataggagagacagaagcgggaatgcttctagagccctcggcaagacgcaagtatatcgactatcttgcacagactacccactcgcttaatacatctcttattgtttgggataatggggatgggtatttagacagagaaacaagcacctggcgcgacccagtactcatagatattctgatgaacgcagtcaagggcacagcgaatagtctagcggactcgacaacagacatactcgctccttcgcaatggagttcatcttacatttttcacaaggttggcgacattgttacagcacaaacggtccaattcatcttgaatggcaatactgtggaatcgatcacggcaaccgatggtaccatcttgaacgccaacactgattacacgatatcggaaagcaatgtaaccatgagctcatcatttctcgcaaaatacttctcctccactgcggctactggaagcaagacgaacttgacggtggcgttttcgaaaggtgctcaggctagagttgaactaatgcaatgggatactccagctctatcatcaactacatctaaagcggtggcaggaaccgaagttgttattcccacgacatataaaggtctgtaccgtcttgcagccgtgaagatgctccggaatgatgggatttacttgtttgatgactggactacatatctcggacctcttcaacaagcacgcggcacttacagtgggcaatgggatcgggacggatcaagtgtcaagctcacaagtagtacagtggatgcggtcattgctgctgacgtcgatactacattcacttttgaattttatcctagagtcgcgggtaactcagtgaactacactcttaccgtctag

SEQ ID NO: 29071 - protein, 673 aa, Muscodor strobelii
  misc_feature: SGI Peptide ID NO. 569980
  misc_feature (155)..(435): Pfam Id: PF00150 Pfam Desc: Cellulase (glycosyl hydrolase family 5)
  misc_feature (468)..(560): Pfam Id: PF03442 Pfam Desc: Domain of function
  misc_feature (473)..(532): Pfam Id: PF03442 Pfam Desc: Domain of function
  misc_feature (131)..(672): NCBI GI: 115443234 Blast Desc: conserved [Aspergillus terreus NIH2624] gi|114188293|gb|EAU29993.1| conserved [Aspergillus terreus NIH2624]
  misc_feature (119)..(673): NCBI GI: 119499183 Blast Desc: cellulase, [Neosartorya fischeri NRRL 181] gi|119414513|gb|EAW24452.1| cellulase, [Neosartorya fischeri NRRL 181]
  misc_feature (119)..(673): NCBI GI: 70985306 Blast Desc: extracellular endoglucanase [Aspergillus fumigatus Af293] gi|66845787|gb|EAL86121.1| extracellular endoglucanase, [Aspergillus fumigatus Af293] gi|159125918|gb|EDP51034.1| A1163]
  misc_feature (127)..(673): NCBI GI: 255955405 Blast Desc: Pc21g14410 [Penicillium chrysogenum Wisconsin 54-1255] gi|211590166|emb|CAP96338.1| Pc21g14410 [Penicillium chrysogenum Wisconsin 54-1255]
  misc_feature (117)..(673): NCBI GI: 67902162 Blast Desc: AN8068.2 [Aspergillus nidulans FGSC A4] gi|40740500|gb|EAA59690.1| AN8068.2 [Aspergillus nidulans FGSC A4] gi|259480825|tpe|CBF73818.1| TPA: extracellular AFUA_5G01830)
  misc_feature (128)..(621): NCBI GI: 238485532 Blast Desc: extracellular endoglucanase, [Aspergillus flavus NRRL3357] gi|220698883|gb|EED55222.1| extracellular endoglucanase, [Aspergillus flavus NRRL3357]
  misc_feature (124)..(673): NCBI GI: 189202438 Blast Desc: endoglucanase D precursor [Pyrenophora tritici-repentis Pt-1C-BFP] gi|187984654|gb|EDU50142.1| endoglucanase D precursor [Pyrenophora tritici-repentis
  misc_feature (129)..(672): NCBI GI: 154308153 Blast Desc: BC1G_07822 [Botryotinia fuckeliana B05.10] gi|150852907|gb|EDN28099.1| BC1G_07822 [Botryotinia fuckeliana B05.10]
  misc_feature (119)..(673): NCBI GI: 169596042 Blast Desc: SNOG_00770 [Phaeosphaeria nodorum SN15] gi|160701216|gb|EAT92265.2| SNOG_00770 [Phaeosphaeria nodorum SN15]
  misc_feature (131)..(673): NCBI GI: 242765236 Blast Desc: extracellular endoglucanase, [Talaromyces stipitatus ATCC 10500] gi|218724129|gb|EED23546.1| extracellular endoglucanase, [Talaromyces stipitatus ATCC 10500]
  misc_feature (143)..(671): SWISSPROT Homolog: EC 3.2.1.4 Cellulase
MRAGILDARGRQTRGEHFKGRGGPEEKIAQQAREFGGEKTFDPTGRRQPNYVYSAQEASVPYSRSGGDVMPQGKEAVQSNLQSEGTPREKKKFPGSEYYKPESVPGSISAEGYEAPGASLVDSSTVTAAACTGAFASISASDYVAAINPGWNLGNTLDAIPDEGSWGHTANQAVFDTVAKGGFKSVRIPVTYADHYVESSPNWTIDPAWLERVSAVVDMALSSGLYVITNMHHDSWEWADVTASGANISMIEEKFYRSWIQIGTTLACKSSKVAFEPINEPPANVEADGLELNKLNNLFLQALQESGGFNELRVVTLVGGGEDSIKTSEWFNPPTGYQNPWAIQYHYYSPYDFVFQAWGKTTWGSADDKLAMKTDLANIRGNFTGVPLVIGETEAGMLLEPSARRKYIDYLAQTTHSLNTSLIVWDNGDGYLDRETSTWRDPVLIDILMNAVKGTANSLADSTTDILAPSQWSSSYIFHKVGDIVTAQTVQFILNGNTVESITATDGTILNANTDYTISESNVTMSSSFLAKYFSSTAATGSKTNLTVAFSKGAQARVELMQWDTPALSSTTSKAVAGTEVVIPTTYKGLYRLAAVKMLRNDGIYLFDDWTTYLGPLQQARGTYSGQWDRDGSSVKLTSSTVDAVIAADVDTTFTFEFYPRVAGNSVNYTLTV

SEQ ID NO: 29072 - DNA, 1309 bp, Muscodor strobelii
  misc_feature: SGI EST ID NO. CUFF.68685.0
  misc_feature: Variant of the nucleotide sequence at SEQ ID NO 29070
cgacgatcgcccgtaagccaattggccaccatattgttctgtgccttacacatatgtgtacatgccagtctagtcgacagttcaactgttacggccgcggcatgtacgggtgcttttgcatctatctctgcatcggattacgtagcagcgatcaatccaggctggaaccttgggaatacgctcgatgccattcctgatgaaggttcttggggacatacagccaatcaagctgtttttgatacagtcgcgaagggcggattcaagagtgtcaggatccctgtcacatacgcggatcattatgtcgaaagctcacctaactggacaatcgatcccgcatggctcgaaagagtttccgcagtcgtcgatatggcactttctagtggtctctatgtcatcaccaatatgcaccatgattcctgggaatgggcagatgtgacagcctccggagctaatatctcaatgattgaagagaagttctatcgctcatggattcaaattggaacaacgttggcatgtaaatcttcaaaggttgcatttgaacccatcaatgagcccccggcgaatgttgaagcagatgggttggagctgaacaagctcaacaatctatttcttcaggcactccaagagtcgggcggattcaatgagctgcgcgttgtcactcttgttggtggcggcgaggacagcatcaaaacctccgagtggttcaacccgccgacgggataccagaatccatgggcaatccaataccactactacagtccttatgacttcgttttccaagcctggggcaaaacaacctggggatctgcggatgacaagttggcaatgaaaaccgacttggctaacattagaggcaacttcacgggtgttcctcttgttataggagagacagaagcgggaatgcttctagagccctcggcaagacgcaagtatatcgactatcttgcacagactacccactcgcttaatacatctcttattgtttgggataatggggatgggtatttagacagagaaacaagcacctggcgcgacccagtactcatagatattctgatgaacgcagtcaagggcacagcgaatagtctagcggactcgacaacagacatactcgctccttcgcaatggagttcatcttacatttttcacaaggttggcgacattgttacagcacaaacggtccaattcatcttgaatggcaatactgtggaatcgatcacggcaaccgatggtaccatcttgaacgccaacactgattacacgatatcggaaagcaatgtaaccatgagctcatcatttctcgcaaaat

SEQ ID NO: 29073 - DNA, 1326 bp, Muscodor strobelii
  misc_feature: SGI cDNA ID NO. 569981
  misc_feature: Encodes the peptide sequence at SEQ ID NO 29074
atgccattgagactcgttcacctcgctgctctcgctgctgccgcagccctgcaggttgctgcttcgccgcacggagcagaccagcaagttgtctttggcgccaatgatgtcgtcggcgatgatggcaatctccggatgcacaccgtcgaccagaccgtcctcaccgccctcgagacctacgtcgaccctgtcgcggccctcatcgctctgcatcccgagctcaccgacgagcttctcgagccccgtctcatccacgtcctcggcgaaggcgaagcacaatggatgactgagggtgacaagctgcggctgcgtcgcgccggcaagaagttccgggacgccaccgacttccaggacatgcccggcgacgcgtcgtcgtgggcgggccaagcgcatacgcccaagctggcgcaccagtcgctcgtcaagccgctgttccccaagatctcgacggaccgcatgcacgacgtcctcgcgcacatgaccagctactacaaccgctactacggcgacgtccacggcgagcagagcgccctctggctgcacgaccacctcgccgacatcatcaaatctgcaccattccacacccatatatcgctcgagttcttcacacacaagtttccccagccttccatcattgcccgcttcgagcccaaggtccgcaacgcgtccttgcccttgaccatcatcggcgcccatcaagactcggccaactacctgttcccgctgctgcctgcgcccggcgccgacgacgactgctccggcaccgtcagcatcctcgaagccttccgcgtcctggccacctcaggcttcctccccaagaacggccccgtcgagttccattggtttgccgcagaagaaggtggtcttttgggaagtcaggcaatcgcacgagacaagaaacaacaaggtgcaactattggtgctatgctcgagttcgacatgaccgcctacgtctcccgcaactcgtccgaatccattggcctcatcaagaccgacgccgacgacgccctcaccgcatggacattggctttgagcaaagaatacatctccatccccacgggcgtctacgggctcattcccggcgccgggtccgactacatgtccttcacccagaatggttttccttctgcattcgcttccgaaggcaatccactcagcaatggcggctttcccggcgacttcgatccttacgtccacaccgtcaaagacaccatggatgtcgatgacgatcttggctacttttctcttgatcatatggctcggttttctgaacttgctattgccttcattgtggaacaggctggctgggacaacacgtggcggtaa

SEQ ID NO: 29074 - protein, 441 aa, Muscodor strobelii
  misc_feature: SGI Peptide ID NO. 569981
  misc_feature (228)..(425): Pfam Id: PF01546 Pfam Desc: Peptidase family M20/M25/M40
  misc_feature (225)..(415): Pfam Id: PF04389 Pfam Desc: Peptidase family M28
  misc_feature (240)..(297): Pfam Id: PF01546 Pfam Desc: Peptidase family M20/M25/M40
  misc_feature (225)..(406): Pfam Id: PF04389 Pfam Desc: Peptidase family M28
  misc_feature (13)..(441): NCBI GI: 145253511 Blast Desc: An17g00390 [Aspergillus niger] gi|134083835|emb|CAK97399.1| protein product [Aspergillus niger]
  misc_feature (64)..(439): NCBI GI: 169861404 Blast Desc: CC1G_01248 [Coprinopsis cinerea okayama7#130] gi|116501357|gb|EAU84252.1| CC1G_01248 [Coprinopsis cinerea okayama7#130]
  misc_feature (67)..(435): NCBI GI: 58271490 Blast Desc: peptidase [Cryptococcus neoformans var. neoformans JEC21] gi|134115278|ref|XP_773937.1| CNBH3890 [Cryptococcus neoformans var. neoformans B-3501A] gi|50256565|gb|EAL19290.1|
  misc_feature (82)..(432): NCBI GI: 169850242 Blast Desc: CC1G_05917 [Coprinopsis cinerea okayama7#130] gi|116507106|gb|EAU90001.1| CC1G_05917 [Coprinopsis cinerea okayama7#130]
  misc_feature (68)..(437): NCBI GI: 145607679 Blast Desc: MGG_10171 [Magnaporthe grisea 70-15] gi|145015187|gb|EDJ99755.1| MGG_10171 [Magnaporthe grisea 70-15]
  misc_feature (87)..(434): NCBI GI: 116195320 Blast Desc: CHGG_04258 [Chaetomium globosum CBS 148.51] gi|88180171|gb|EAQ87639.1| CHGG_04258 [Chaetomium globosum CBS 148.51]
  misc_feature (82)..(432): NCBI GI: 169850244 Blast Desc: CC1G_05918 [Coprinopsis cinerea okayama7#130] gi|116507107|gb|EAU90002.1| CC1G_05918 [Coprinopsis cinerea okayama7#130]
  misc_feature (77)..(438): NCBI GI: 71004338 Blast Desc: UM00688.1 [Ustilago maydis 521] gi|46095637|gb|EAK80870.1| UM00688.1 [Ustilago maydis 521]
  misc_feature (77)..(434): NCBI GI: 145583571 Blast Desc: aminopeptidase [Hypocrea lixii]
  misc_feature (72)..(432): NCBI GI: 18250467 Blast Desc: aminopeptidase [Agaricus bisporus]
  misc_feature (133)..(432): SWISSPROT Homolog: EC 3.4.11.10 Bacterial leucyl aminopeptidase
MPLRLVHLAALAAAAALQVAASPHGADQQVVFGANDVVGDDGNLRMHTVDQTVLTALETYVDPVAALIALHPELTDELLEPRLIHVLGEGEAQWMTEGDKLRLRRAGKKFRDATDFQDMPGDASSWAGQAHTPKLAHQSLVKPLFPKISTDRMHDVLAHMTSYYNRYYGDVHGEQSALWLHDHLADIIKSAPFHTHISLEFFTHKFPQPSIIARFEPKVRNASLPLTIIGAHQDSANYLFPLLPAPGADDDCSGTVSILEAFRVLATSGFLPKNGPVEFHWFAAEEGGLLGSQAIARDKKQQGATIGAMLEFDMTAYVSRNSSESIGLIKTDADDALTAWTLALSKEYISIPTGVYGLIPGAGSDYMSFTQNGFPSAFASEGNPLSNGGFPGDFDPYVHTVKDTMDVDDDLGYFSLDHMARFSELAIAFIVEQAGWDNTWR

SEQ ID NO: 29075 - DNA, 1651 bp, Muscodor strobelii
  misc_feature: SGI EST ID NO. CUFF.68716.0
  misc_feature: Variant of the nucleotide sequence at SEQ ID NO 29073
ccaagatcagcaccttaggtaaggtatatacatgtagctatggagagctgacagagctcctcagtcaacctcgatccgcatcctaaagcaactcgttcttcacgatgccattgagactcgttcacctcgctgctctcgctgctgccgcagccctgcaggttgctgcttcgccgcacggagcagaccagcaagttgtctttggcgccaatgatgtcgtcggcgatgatggcaatctccggatgcacaccgtcgaccagaccgtcctcaccgccctcgagacctacgtcgaccctgtcgcggccctcatcgctctgcatcccgagctcaccgacgagcttctcgagccccgtctcatccacgtcctcggcgaaggcgaagcacaatggatgactgagggtgacaagctgcggctgcgtcgcgccggcaagaagttccgggacgccaccgacttccaggacatgcccggcgacgcgtcgtcgtgggcgggccaagcgcatacgcccaagctggcgcaccagtcgctcgtcaagccgctgttccccaagatctcgacggaccgcatgcacgacgtcctcgcgcacatgaccagctactacaaccgctactacggcgacgtccacggcgagcagagcgccctctggctgcacgaccacctcgccgacatcatcaaatctgcaccattccacacccatatatcgctcgagttcttcacacacaagtttccccagccttccatcattgcccgcttcgagcccaaggtccgcaacgcgtccttgcccttgaccatcatcggcgcccatcaagactcggccaactacctgttcccgctgctgcctgcgcccggcgccgacgacgactgctccggcaccgtcagcatcctcgaagccttccgcgtcctggccacctcaggcttcctccccaagaacggccccgtcgagttccattggtttgccgcagaagaaggtggtcttttgggaagtcaggcaatcgcacgagacaagaaacaacaaggtgcaactattggtgctatgctcgagttcgacatgaccgcctacgtctcccgcaactcgtccgaatccattggcctcatcaagaccgacgccgacgacgccctcaccgcatggacattggctttgagcaaagaatacatctccatccccacgggcgtctacgggctcattcccggcgccgggtccgactacatgtccttcacccagaatggttttccttctgcattcgcttccgaaggcaatccactcagcaatggcggctttcccggcgacttcgatccttacgtccacaccgtcaaagacaccatggatgtcgatgacgatcttggctacttttctcttgatcatatggctcggttttctgaacttgctattgccttcattgtggaacaggctggctgggacaacacgtggcggtaaccttgcctgttctatgcctcgggcatttttgcaatattcgtacagcatagcatcgattcttgatttaatcatcattgccaacataggtacttaggataagcatgataggacatagtatcttgttaacgatagaagtgtcaatttgccttgtgtcgaccaatgatcacaacatagccatgcgtgatactacgactctagaatcgcaacttttgacaactgtg

SEQ ID NO: 29076 - DNA, 6081 bp, Muscodor strobelii
  misc_feature: SGI cDNA ID NO. 569982
  misc_feature: Encodes the peptide sequence at SEQ ID NO 29077
atgcgcggcccccagccagtaccacaaccagcgacccgatctctggatatccatccccaatccgctctagaccagacattccgactcctccagcctgcccagcctgcccagctagatccatcacaatttcatccgccgtcttcatcatttcgcggccggcctctcgctgccgcagactcgacggcttcaggttcatcaggttctgcacttttcgcagcttctgttgggggtgtcctatcgattcatcagcatccgcagggcgagagacaacagttgcaacaacaccagacccagaacccgaatcaaccccggccaactgttgctgctgctactagtactgtgtttccatcgctacggaaagctgtcaagctgatcaacacgaccagttcagcaaaccaaccgccgccatcaccgccgtacacctcgactccgagcactccaccacatcagcatcaggcagaggcacaagctcatcatctggctcagtctcagtctcagtctcagtctcgtcgcccccgtcacaagcactctcactcacatcccactccccagctccatcttccgctccttcatcaacatcagccctactcttccaattgggactcttcctcctctcaacccccccagctcccacccctgtcagcctcgctgtccccaatctcgcccttcgacccattcaatcttcgtgacgccgcaagcaattattttcttgcttctgcttctgaatctgtctcgccgtctcaagctctagctcatgatcatcgctctgttcctcgctttgccgtagcacagcagctggccgacgattgcgtagtctcccccatttccgatactgaatacccaattgccacatcagccattcgtagcccccatcacaccgaagatcctactgcttctcacgcatccagctcggcctttgcacgtctcaccccggcgacttcatctgtcagccgtcggcgcacttgggactcactcattggctcttcgctacttgacgatcgagaattcgaacgaagtctcggtgttgccgctgccgataaatctgatcgcgctccggcacgtttggccccgcgcctgcttgctacctctactgccgtcacaaacgctgttgcgcatgatgcggcgcatttgataactgacgacggatctgacgattggtttgggttcactgccagagagtctacagcctctaaacatactcgtaattcatttcacggtactcatcgcgacatgtctgtggctatggcatctgactgggctaatgcgccggggcaacaacagcaaaccgccggcccatcgtcatctttcatcccactgccgccgatccgtcggacatccacttttgacctgttgagagccaaaggctacgtgaatgacgacgggagcgacacggcgccgtctccaatagagaaggacataccgccaatgccgccgttggctcaggcaactaacggccaattgtcaccctctcatacttccccgcacaacgccatatcacagctaccatctcagcaaaatcctagcttgactcgccagagcccacctcccatgcaacaccagtatcagtctaatggttttgttcccgccggtccgactcggcagagtcagtccacacctcaagcgcagacccaaatgcaaggacaaaattctcaacagtctttcatgggaagagtcagtccagccgggcagcatcccccgggtcaaatctctgtgaacggccaaggtcagaccatcatctcactaccgggtggtcgtcaattgaccctgcaggaatctcgccttgccgaacccttgaatccctccaacaggaatcgcgcggcaagcccacagctgcaacagtctgcatataccgcttatgataaggagacagagggcgaaccggcaccagcagctcaagccggggcaccatcacagccgtttccaatccagacacgtccgaagaacccaagtagtagtgttccaccgagtgctgcatctaaatatcctgcactattcaataatgcaggacctaacggacaattgcaatcgcaacagcaaggtcagataccgataggtcaacagcatcccctgatgcgtgggcaaaataatatcggcgcaggctcaagaccgagcatggatactaaagacacagtgcgttttgaccaaatttcagtctcgagcgaagaggttggtgataagccgcctagacggggttctgcatcattgttcggtctggggcatcgtcgcaactcgagcgatgtcaaaagcccaccacaggcttcacctgaaaagaagaagcactttttcggttctgttcctggcataacttctcttcaggcaaaagcgaagtccaatctagggtttgcccagaatccaccgcctgaagaatccgatcaggcttctactcacacgactgaacatccggtgccaggtggtagaaagcggctctccgagctcaagggtatgatcaagggtgttggtaatgcaaaagagggcgccagagacgaacaacccacgagagccgaaaatgcctacccgtctgttccgccgattcagaatccacctcgaaatttcagtggacaatttggtctgccaaactcacaaaggccgcaggggatgccaatgcctcagggtcaaatcaatccactcgctagaacgcagacagcaccacaaggtcaattaccaccatcggaatctcaacatcaggctcagggacagccgcaaggtcaaggtcagcagcttgcccagggtcagatgcagatggggcgtccaatgatggcaggtcaacctcctgttggaatgggaagaggtaatcccatggcgatgggtcgcggcggtcctccgatggctatgggccgaggtaatccaacaggacctccagtgcagatgccacactatcaggcggcatcaatgggacagcaggccaaaaacgaagaaaatggtaataagagcacagtcggtggattcttgggtggtctgttcaataagcagacaagcaaaggaaaggagacgaagatgccagttactcagcagacatctactcctggtccctggcctccacaatctcatcctatgcaaccagtccagcaattccgacccggacaaatgccaattcctggtcaaccactcggacctcacccgatgctcgctggacagcctccgttccaacctccgccaccgggccaatctccctcgcccggagccatgcaagattccaatcagcctcccccatctctagaaacagcccaagctgtgatgattcgccgtccatcagaaatcaccgtttcatcacagtctgggatcgctcagcctcaatccggatctcaacaaggatctccaaataccgctcgacaacgcgttgcaagcccgctcggacagccatccatccagagagggtcgttggacgacgccagtggcgggcagtcagaggcttcaccacaactctctcagacaacgtcaaatgagcagccgctctctgcgccggccccagttgtcgctcggatctcgccgaacaggaagcctgttggttccggcgcgtctaagccgattgcatcccaaagggattcaggcgtgtcgccttctatgggaatgccggacagggccactgcatcaccgtcaccgacacccaatcaacgacctttatccagccgccaaggacctacgcagagccctccgtccgcgtcgtctgcctttaacaatgctcaacaacagctatacccttctccatcgccttcgccagcaccttctcaatccaaccagtcttctgcctcgactcagatgcctggcgagcaagcatcgcgtatatctcctgatccgcgagaaactggccaaggtctgggcgtctttcaaagtggcgttccgtcaaccgctggacctggcaatggcccaggaacgttgcaatggggtccaaatggcttcaggccaactgggccaccaattgtacaacagcaagcacccaaaccaccgagcagcccagtcccatcgatggatcagagcaagttatcaaagttctttggcgcatatgatggtggaaagccttccggtcagtctcaagctgcaaaggacaagagtgctgcctccaagtttctcggggcattcaagaaaactaagcaatctggagcaccacaaccccagacaggcatacaatcaccccaggtctcacaacaggctgctggacctggcatgactggaccacagattcctggtatgaccgggccaatcggcgtgggaagaggacaaccgcagccgcaagggccgcctggcgctggtcgtggtcagccattgacgccacagcaaatgcaagccctgcaagctgctgctggaagaggacaaccatcttctggctcggctcagacaggtctgcgaccaccacaagcaatgtcaatgcaagctggaagaggacagatgcctccaggcgccatgcaggcaggacgtggacaaatgccatcgcagatggtcatcgggccaggagggatacctcgcccagtacaggcacctcctccacatggaaacgagccgaaatatgaccaagtcccaattcccggaggttatcaggccgttcatggatatggtggtggtatgatgatttcgccttcaccatataattttgcaccgatgccgatgcaatatatgcaatatccaccacacatgatgcaacaagggatgcaacagggtgctcctatgcgccaatgggatcctcgtatgatgccaccaccgcagggtggaagttcaacgaacatggcgcctggagttggtcagcctcaaggtgttcctcaacaacatcaacaaccgcagacggggacaccgcctcagaatccgtcgccgaatgatcaaatatctcaggcccaatcaatgcaaatccaacagaatgcacaacaatccgctcaacagcggcaagcgaatttgaccagccaatcaccaccaccacgagaacaagtccaggggcagtcgcacgtggttcagcaaaccgtcccagattcgcaaccatcacccccggtcccaaatgacagtatccaaccagatgtcggttccgttatacggacacagcatcattctcagcatggacagtcgcctccactctctcaaagcccaacatctgttcgccagcagaatccgcctatgtcgaatgccaactcaggagtggctgtgaacaagatgcaatcccagagctccgcaaccaccaatgcactaaaatctccacagggccaacctatatgggtaccagcttcggcttctggccagcgatctgactcaagctcggtgcaatcttctcggccagagtcaatacggcagcataattcacaagttgaacggattaacaatgctcctattcaaccacctggcatgtcatctcagagacaacaatccgttctggactctcaaagccctacattgggtgttgcggctggaggatttgttagatcacgggacgccactcgattgacgagccgcatgtctgtcgacaacaatataccaagcaacacatctcggagctctgattcaagcgaagaccgcaagatgagtgttagtccagagccacctggacctcgacctataccactacatcaagtctccgaacaggcgtcagagcaaaatcttcaagtcaatgtcgaacgtgccaatactcacacaagagctgaaagtgaagacatttatgatgctacgcctcgtcttcctagttcccaggtacatgcccgcacacagagtcctcgatcgcaaggcggagatgagacgcaacagagcaagggtttcgcaatgtcaaatggtattgctgtgacaccgggagccgcgactggggctggagccgttatccccgataatatgagtttcttggccgggccagattcatccgacccagaagacgatgagccaacgccagcagaaggaaagaaaccacaatatccacgacaagtctcacccccgcaacaagcctcgccaccaccaaacatgaatacagagccagaggagaagatcctcgtcgacatgccggttgagcttgctgccgtgaacgatgatgatggtcttcctgagatgagtgcaacgagttatcctggtcaagaatggaatccatatggagctggcgaattcgaggactacctataa

SEQ ID NO: 29077 - protein, 2026 aa, Muscodor strobelii
  misc_feature: SGI Peptide ID NO. 569982
  misc_feature (581)..(678): NCBI GI: 256734275 Blast Desc: NECHADRAFT_36718 [Nectria haematococca mpVI 77-13-4]
  misc_feature (1981)..(2025): NCBI GI: 116193835 Blast Desc: CHGG_06635 [Chaetomium globosum CBS 148.51] gi|88182548|gb|EAQ90016.1| CHGG_06635 [Chaetomium globosum CBS 148.51]
MRGPQPVPQPATRSLDIHPQSALDQTFRLLQPAQPAQLDPSQFHPPSSSFRGRPLAAADSTASGSSGSALFAASVGGVLSIHQHPQGERQQLQQHQTQNPNQPRPTVAAATSTVFPSLRKAVKLINTTSSANQPPPSPPYTSTPSTPPHQHQAEAQAHHLAQSQSQSQSRRPRHKHSHSHPTPQLHLPLLHQHQPYSSNWDSSSSQPPQLPPLSASLSPISPFDPFNLRDAASNYFLASASESVSPSQALAHDHRSVPRFAVAQQLADDCVVSPISDTEYPIATSAIRSPHHTEDPTASHASSSAFARLTPATSSVSRRRTWDSLIGSSLLDDREFERSLGVAAADKSDRAPARLAPRLLATSTAVTNAVAHDAAHLITDDGSDDWFGFTARESTASKHTRNSFHGTHRDMSVAMASDWANAPGQQQQTAGPSSSFIPLPPIRRTSTFDLLRAKGYVNDDGSDTAPSPIEKDIPPMPPLAQATNGQLSPSHTSPHNAISQLPSQQNPSLTRQSPPPMQHQYQSNGFVPAGPTRQSQSTPQAQTQMQGQNSQQSFMGRVSPAGQHPPGQISVNGQGQTIISLPGGRQLTLQESRLAEPLNPSNRNRAASPQLQQSAYTAYDKETEGEPAPAAQAGAPSQPFPIQTRPKNPSSSVPPSAASKYPALFNNAGPNGQLQSQQQGQIPIGQQHPLMRGQNNIGAGSRPSMDTKDTVRFDQISVSSEEVGDKPPRRGSASLFGLGHRRNSSDVKSPPQASPEKKKHFFGSVPGITSLQAKAKSNLGFAQNPPPEESDQASTHTTEHPVPGGRKRLSELKGMIKGVGNAKEGARDEQPTRAENAYPSVPPIQNPPRNFSGQFGLPNSQRPQGMPMPQGQINPLARTQTAPQGQLPPSESQHQAQGQPQGQGQQLAQGQMQMGRPMMAGQPPVGMGRGNPMAMGRGGPPMAMGRGNPTGPPVQMPHYQAASMGQQAKNEENGNKSTVGGFLGGLFNKQTSKGKETKMPVTQQTSTPGPWPPQSHPMQPVQQFRPGQMPIPGQPLGPHPMLAGQPPFQPPPPGQSPSPGAMQDSNQPPPSLETAQAVMIRRPSEITVSSQSGIAQPQSGSQQGSPNTARQRVASPLGQPSIQRGSLDDASGGQSEASPQLSQTTSNEQPLSAPAPVVARISPNRKPVGSGASKPIASQRDSGVSPSMGMPDRATASPSPTPNQRPLSSRQGPTQSPPSASSAFNNAQQQLYPSPSPSPAPSQSNQSSASTQMPGEQASRISPDPRETGQGLGVFQSGVPSTAGPGNGPGTLQWGPNGFRPTGPPIVQQQAPKPPSSPVPSMDQSKLSKFFGAYDGGKPSGQSQAAKDKSAASKFLGAFKKTKQSGAPQPQTGIQSPQVSQQAAGPGMTGPQIPGMTGPIGVGRGQPQPQGPPGAGRGQPLTPQQMQALQAAAGRGQPSSGSAQTGLRPPQAMSMQAGRGQMPPGAMQAGRGQMPSQMVIGPGGIPRPVQAPPPHGNEPKYDQVPIPGGYQAVHGYGGGMMISPSPYNFAPMPMQYMQYPPHMMQQGMQQGAPMRQWDPRMMPPPQGGSSTNMAPGVGQPQGVPQQHQQPQTGTPPQNPSPNDQISQAQSMQIQQNAQQSAQQRQANLTSQSPPPREQVQGQSHVVQQTVPDSQPSPPVPNDSIQPDVGSVIRTQHHSQHGQSPPLSQSPTSVRQQNPPMSNANSGVAVNKMQSQSSATTNALKSPQGQPIWVPASASGQRSDSSSVQSSRPESIRQHNSQVERINNAPIQPPGMSSQRQQSVLDSQSPTLGVAAGGFVRSRDATRLTSRMSVDNNIPSNTSRSSDSSEDRKMSVSPEPPGPRPIPLHQVSEQASEQNLQVNVERANTHTRAESEDIYDATPRLPSSQVHARTQSPRSQGGDETQQSKGFAMSNGIAVTPGAATGAGAVIPDNMSFLAGPDSSDPEDDEPTPAEGKKPQYPRQVSPPQQASPPPNMNTEPEEKILVDMPVELAAVNDDDGLPEMSATSYPGQEWNPYGAGEFEDYL

SEQ ID NO: 29078 - DNA, 6679 bp, Muscodor strobelii
  misc_feature: SGI EST ID NO. CUFF.68931.0
  misc_feature: Variant of the nucleotide sequence at SEQ ID NO 29076
ccacaaccagcgacccgatctctggatatccatccccaatccgctctagaccagacattccgactcctccagcctgcccagcctgcccagctagatccatcacaatttcatccgccgtcttcatcatttcgcggccggcctctcgctgccgcagactcgacggcttcaggttcatcaggttctgcacttttcgcagcttctgttgggggtgtcctatcgattcatcagcatccgcagggcgagagacaacagttgcaacaacaccagacccagaacccgaatcaaccccggccaactgttgctgctgctactagtactgtgtttccatcgctacggaaagctgtcaagctgatcaacacgaccagttcagcaaaccaaccgccgccatcaccgccgtacacctcgactccgagcactccaccacatcagcatcaggcagaggcacaagctcatcatctggctcagtctcagtctcagtctcagtctcgtcgcccccgtcacaagcactctcactcacatcccactccccagctccatcttccgctccttcatcaacatcagccctactcttccaattgggactcttcctcctctcaacccccccagctcccacccctgtcagcctcgctgtccccaatctcgcccttcgacccattcaatcttcgtgacgccgcaagcaattattttcttgcttctgcttctgaatctgtctcgccgtctcaagctctagctcatgatcatcgctctgttcctcgctttgccgtagcacagcagctggccgacgattgcgtagtctcccccatttccgatactgaatacccaattgccacatcagccattcgtagcccccatcacaccgaagatcctactgcttctcacgcatccagctcggcctttgcacgtctcaccccggcgacttcatctgtcagccgtcggcgcacttgggactcactcattggctcttcgctacttgacgatcgagaattcgaacgaagtctcggtgttgccgctgccgataaatctgatcgcgctccggcacgtttggccccgcgcctgcttgctacctctactgccgtcacaaacgctgttgcgcatgatgcggcgcatttgataactgacgacggatctgacgattggtttgggttcactgccagagagtctacagcctctaaacatactcgtaattcatttcacggtactcatcgcgacatgtctgtggctatggcatctgactgggctaatgcgccggggcaacaacagcaaaccgccggcccatcgtcatctttcatcccactgccgccgatccgtcggacatccacttttgacctgttgagagccaaaggctacgtgaatgacgacgggagcgacacggcgccgtctccaatagagaaggacataccgccaatgccgccgttggctcaggcaactaacggccaattgtcaccctctcatacttccccgcacaacgccatatcacagctaccatctcagcaaaatcctagcttgactcgccagagcccacctcccatgcaacaccagtatcagtctaatggttttgttcccgccggtccgactcggcagagtcagtccacacctcaagcgcagacccaaatgcaaggacaaaattctcaacagtctttcatgggaagagtcagtccagccgggcagcatcccccgggtcaaatctctgtgaacggccaaggtcagaccatcatctcactaccgggtggtcgtcaattgaccctgcaggaatctcgccttgccgaacccttgaatccctccaacaggaatcgcgcggcaagcccacagctgcaacagtctgcatataccgcttatgataaggagacagagggcgaaccggcaccagcagctcaagccggggcaccatcacagccgtttccaatccagacacgtccgaagaacccaagtagtagtgttccaccgagtgctgcatctaaatatcctgcactattcaataatgcaggacctaacggacaattgcaatcgcaacagcaaggtcagataccgataggtcaacagcatcccctgatgcgtgggcaaaataatatcggcgcaggctcaagaccgagcatggatactaaagacacagtctcgagcgaagaggttggtgataagccgcctagacggggttctgcatcattgttcggtctggggcatcgtcgcaactcgagcgatgtcaaaagcccaccacaggcttcacctgaaaagaagaagcactttttcggttctgttcctggcataacttctcttcaggcaaaagcgaagtccaatctagggtttgcccagaatccaccgcctgaagaatccgatcaggcttctactcacacgactgaacatccggtgccaggtggtagaaagcggctctccgagctcaagggtatgatcaagggtgttggtaatgcaaaagagggcgccagagacgaacaacccacgagagccgaaaatgcctacccgtctgttccgccgattcagaatccacctcgaaatttcagtggacaatttggtctgccaaactcacaaaggccgcaggggatgccaatgcctcagggtcaaatcaatccactcgctagaacgcagacagcaccacaaggtcaattaccaccatcggaatctcaacatcaggctcagggacagccgcaaggtcaaggtcagcagcttgcccagggtcagatgcagatggggcgtccaatgatggcaggtcaacctcctgttggaatgggaagaggtaatcccatggcgatgggtcgcggcggtcctccgatggctatgggccgaggtaatccaacaggacctccagtgcagatgccacactatcaggcggcatcaatgggacagcaggccaaaaacgaagaaaatggtaataagagcacagtcggtggattcttgggtggtctgttcaataagcagacaagcaaaggaaaggagacgaagatgccagttactcagcagacatctactcctggtccctggcctccacaatctcatcctatgcaaccagtccagcaattccgacccggacaaatgccaattcctggtcaaccactcggacctcacccgatgctcgctggacagcctccgttccaacctccgccaccgggccaatctccctcgcccggagccatgcaagattccaatcagcctcccccatctctagaaacagcccaagctgtgatgattcgccgtccatcagaaatcaccgtttcatcacagtctgggatcgctcagcctcaatccggatctcaacaaggatctccaaataccgctcgacaacgcgttgcaagcccgctcggacagccatccatccagagagggtcgttggacgacgccagtggcgggcagtcagaggcttcaccacaactctctcagacaacgtcaaatgagcagccgctctctgcgccggccccagttgtcgctcggatctcgccgaacaggaagcctgttggttccggcgcgtctaagccgattgcatcccaaagggattcaggcgtgtcgccttctatgggaatgccggacagggccactgcatcaccgtcaccgacacccaatcaacgacctttatccagccgccaaggacctacgcagagccctccgtccgcgtcgtctgcctttaacaatgctcaacaacagctatacccttctccatcgccttcgccagcaccttctcaatccaaccagtcttctgcctcgactcagatgcctggcgagcaagcatcgcgtatatctcctgatccgcgagaaactggccaaggtctgggcgtctttcaaagtggcgttccgtcaaccgctggacctggcaatggcccaggaacgttgcaatggggtccaaatggcttcaggccaactgggccaccaattgtacaacagcaagcacccaaaccaccgagcagcccagtcccatcgatggatcagagcaagttatcaaagttctttggcgcatatgatggtggaaagccttccggtcagtctcaagctgcaaaggacaagagtgctgcctccaagtttctcggggcattcaagaaaactaagcaatctggagcaccacaaccccagacaggcatacaatcaccccaggtctcacaacaggctgctggacctggcatgactggaccacagattcctggtatgaccgggccaatcggcgtgggaagaggacaaccgcagccgcaagggccgcctggcgctggtcgtggtcagccattgacgccacagcaaatgcaagccctgcaagctgctgctggaagaggacaaccatcttctggctcggctcagacaggtctgcgaccaccacaagcaatgtcaatgcaagctggaagaggacagatgcctccaggcgccatgcaggcaggacgtggacaaatgccatcgcagatggtcatcgggccaggagggatacctcgcccagtacaggcacctcctccacatggaaacgagccgaaatatgaccaagtcccaattcccggaggttatcaggccgttcatggatatggtggtggtatgatgatttcgccttcaccatataattttgcaccgatgccgatgcaatatatgcaatatccaccacacatgatgcaacaagggatgcaacagggtgctcctatgcgccaatgggatcctcgtatgatgccaccaccgcagggtggaagttcaacgaacatggcgcctggagttggtcagcctcaaggtgttcctcaacaacatcaacaaccgcagacggggacaccgcctcagaatccgtcgccgaatgatcaaatatctcaggcccaatcaatgcaaatccaacagaatgcacaacaatccgctcaacagcggcaagcgaatttgaccagccaatcaccaccaccacgagaacaagtccaggggcagtcgcacgtggttcagcaaaccgtcccagattcgcaaccatcacccccggtcccaaatgacagtatccaaccagatgtcggttccgttatacggacacagcatcattctcagcatggacagtcgcctccactctctcaaagcccaacatctgttcgccagcagaatccgcctatgtcgaatgccaactcaggagtggctgtgaacaagatgcaatcccagagctccgcaaccaccaatgcactaaaatctccacagggccaacctatatgggtaccagcttcggcttctggccagcgatctgactcaagctcggtgcaatcttctcggccagagtcaatacggcagcataattcacaagttgaacggattaacaatgctcctattcaaccacctggcatgtcatctcagagacaacaatccgttctggactctcaaagccctacattgggtgttgcggctggaggatttgttagatcacgggacgccactcgattgacgagccgcatgtctgtcgacaacaatataccaagcaacacatctcggagctctgattcaagcgaagaccgcaagatgagtgttagtccagagccacctggacctcgacctataccactacatcaagtctccgaacaggcgtcagagcaaaatcttcaagtcaatgtcgaacgtgccaatactcacacaagagctgaaagtgaagacatttatgatgctacgcctcgtcttcctagttcccaggtacatgcccgcacacagagtcctcgatcgcaaggcggagatgagacgcaacagagcaagggtttcgcaatgtcaaatggtattgctgtgacaccgggagccgcgactggggctggagccgttatccccgataatatgagtttcttggccgggccagattcatccgacccagaagacgatgagccaacgccagcagaaggaaagaaaccacaatatccacgacaagtctcacccccgcaacaagcctcgccaccaccaaacatgaatacagagccagaggagaagatcctcgtcgacatgccggttgagcttgctgccgtgaacgatgatgatggtcttcctgagatgagtgcaacgagttatcctggtcaagaatggaatccatatggagctggcgaattcgaggactacctataagacttgggggatgataccatacccacctggcacttcgcttaattattctgcattcgcgcccgtttggttttttaatcgtatctgtttgcagtgcgtttggcatagacgaagagactacgtcgctcatctgtatctagaaagacaggaggcattgagaattaacttggagactatctctatcttctcgattttgggagacattatgagaataacacactcggccacacatacatacctcctatcttttattactttacttcacttcacattatctcatgtcatcacaaaagcagcaccgtctttcgttttttacttattgttattggataccataagggaatatactgcatatatacctatagttgaaatttatactgtcgatagaccttattatcgatggtatatctacgtacgcaaacacaaggctctctccacatatatatctacatagctctatcattgatctgaacggacaggatgattctagtcaagtgagagtctatctatacgtctttcagttaattactatcttgcagatagacatatcctaatacactccaattttgactaaacagttttcacatacaaagactttttcttttcacctctagcaatttgggatgtgctctgacgatggcga

SEQ ID NO: 29079 - DNA, 738 bp, Muscodor strobelii
  misc_feature: SGI cDNA ID NO. 569983
  misc_feature: Encodes the peptide sequence at SEQ ID NO 29080
atgacagatacagccagcatcccaaatgtagcaaaggctgcgggagaggtggcagcagactatgcgatggccaatattgtcatgcaatctgtgcacaatcatcaaacttcagatttcatgatccctacacctcaagcatcgaccgggcaaagcgccgccgcatttcgtttcaatcctcgtgctccaaactttattcctgatgagacgcactttgctcaacatccgtcacccagttctcgatgtcttggccatgaggagtcgatggctaggatgtttcctaacttgaatgatcaccatcagcccagagatcaatatcaattccctgtcgtcgccgagagcagcagcaagacctcacataccaatagacgtcatggggtctatcggcttggtcctgaagatgtagatgccatcggaaaagagtcactacaaacgaagcaaatgtctgaactaccggatgaacgagcatgggctgccagatcaagccatgcattagctactggatcaagttgtactcgattcaatgctcaagtttcggctttcataccaggcgtcaattggtacgagggtgagaggagacgaaaagaaaccggcgagttcctaaaccaaaatcaaggtgcatatccagttgtccctcaacaagcctgcaactctctacctcttggccctgcacctcatggcactacgactccgccacccggccctgataatggctcttttgctggctgttttgcaacatga

SEQ ID NO: 29080 - protein, 245 aa, Muscodor strobelii
  misc_feature: SGI Peptide ID NO. 569983
MTDTASIPNVAKAAGEVAADYAMANIVMQSVHNHQTSDFMIPTPQASTGQSAAAFRFNPRAPNFIPDETHFAQHPSPSSRCLGHEESMARMFPNLNDHHQPRDQYQFPVVAESSSKTSHTNRRHGVYRLGPEDVDAIGKESLQTKQMSELPDERAWAARSSHALATGSSCTRFNAQVSAFIPGVNWYEGERRRKETGEFLNQNQGAYPVVPQQACNSLPLGPAPHGTTTPPPGPDNGSFAGCFAT

SEQ ID NO: 29081 - DNA, 210 bp, Muscodor strobelii
  misc_feature: SGI cDNA ID NO. 569984
  misc_feature: Encodes the peptide sequence at SEQ ID NO 29082
atgctcgcatctttgacgcctgcgcgacaatggtatcgcgacctccaccacggcagcttctcctatcactacgaccgccatacgcgcaataacaacgacgccgacgagcccttcgacgtcaaccactacgacgacgaccccgctaccgctgccgctaccgccaacaccgctgccgccgatcctggagcccatcctgccggcaacccctga

SEQ ID NO: 29082 - protein, 69 aa, Muscodor strobelii
  misc_feature: SGI Peptide ID NO. 569984
MLASLTPARQWYRDLHHGSFSYHYDRHTRNNNDADEPFDVNHYDDDPATAAATANTAAADPGAHPAGNP

SEQ ID NO: 29083 - DNA, 867 bp, Muscodor strobelii
  misc_feature: SGI cDNA ID NO. 569985
  misc_feature: Encodes the peptide sequence at SEQ ID NO 29084
atgagttccgggactcaggagaacggacacaacgggatatacggggcggtgcccggagccccttcagtcgcggacactcccgcgtcggtccccgctgacgggaccgacgaggtagcagagagccttacattccatcagcgtctacatgagttctacgagcgaaacattgggcttttattagtgttcctagctcagacttttggttcgctaatgaacgtcgcagcgaaactattgacatcgcagcaaactcccgagggcgaattccatgctctacatatcatatttgttcgcatgttctgtactgctatcctaggttcaatttacatgtggtacaagcaggttcctgaaccatttgggtcacgaaacgtctttggcctgctgatcttgcgcggcactgctgggtttctcggactttttggcatgtactattctttgtcgtatctggagatatcggatgctactgctataacttttctagtcccaacttggactgctattctctgttatgtctggttgaaggagccttacggtatccaagacgcttcagctggtctcatatcactagctggagtccttctgatcgcgcgaccggcgtttctttttggagggctgaggaatgagcaccgggaggtacctgtgggagctccctcatcgcctcagagagcaattgccgtggtattctccatcttaagcaccttcatggccgcgacggcgtatagtacgatacgtcacattggcaagcgagcacactcgctcgtgagtgtcaattattttgcggtgctgtcgacgatcggctctggcttcattcttgtgagtccaattgaaatgttctctggccttgtactgttccaaaccacacagcggtga

SEQ ID NO: 29084 - protein, 288 aa, Muscodor strobelii
  misc_feature: SGI Peptide ID NO. 569985
  misc_feature (66)..(196): Pfam Id: PF00892 Pfam Desc: Integral membrane protein DUF6
  misc_feature (19)..(271): NCBI GI: 256730037 Blast Desc: NECHADRAFT_45556 [Nectria haematococca mpVI 77-13-4]
  misc_feature (19)..(273): NCBI GI: 145602747 Blast Desc: MGG_09833 [Magnaporthe grisea 70-15] gi|145011137|gb|EDJ95793.1| MGG_09833 [Magnaporthe grisea 70-15]
  misc_feature (13)..(270): NCBI GI: 46127235 Blast Desc: FG07995.1 [Gibberella zeae PH-1]
  misc_feature (11)..(274): NCBI GI: 171689940 Blast Desc: protein product [Podospora anserina] gi|170944932|emb|CAP71043.1| protein product [Podospora anserina]
  misc_feature (31)..(264): NCBI GI: 116200061 Blast Desc: CHGG_08186 [Chaetomium globosum CBS 148.51] gi|88179465|gb|EAQ86933.1| CHGG_08186 [Chaetomium globosum CBS 148.51]
  misc_feature (48)..(274): NCBI GI: 39943892 Blast Desc: MGG_03957 [Magnaporthe grisea 70-15] gi|145014669|gb|EDJ99237.1| MGG_03957 [Magnaporthe grisea 70-15]
  misc_feature (53)..(268): NCBI GI: 146414896 Blast Desc: PGUG_04147 [Pichia guilliermondii ATCC 6260]
  misc_feature (23)..(264): NCBI GI: 119184739 Blast Desc: CIMG_07136 [Coccidioides immitis RS]
  misc_feature (53)..(268): NCBI GI: 190347719 Blast Desc: PGUG_04147 [Pichia guilliermondii ATCC 6260]
  misc_feature (41)..(273): NCBI GI: 240109966 Blast Desc: Integral membrane family protein [Coccidioides posadasii C735 delta SOWgp]
MSSGTQENGHNGIYGAVPGAPSVADTPASVPADGTDEVAESLTFHQRLHEFYERNIGLLLVFLAQTFGSLMNVAAKLLTSQQTPEGEFHALHIIFVRMFCTAILGSIYMWYKQVPEPFGSRNVFGLLILRGTAGFLGLFGMYYSLSYLEISDATAITFLVPTWTAILCYVWLKEPYGIQDASAGLISLAGVLLIARPAFLFGGLRNEHREVPVGAPSSPQRAIAVVFSILSTFMAATAYSTIRHIGKRAHSLVSVNYFAVLSTIGSGFILVSPIEMFSGLVLFQTTQR

SEQ ID NO: 29085 - DNA, 1088 bp, Muscodor strobelii
  misc_feature: SGI EST ID NO. CUFF.68752.1
  misc_feature: Variant of the nucleotide sequence at SEQ ID NO 29083
ccgaggatcatgttcatttcattcggaactgaatctctacgcacgcgccatcatgagttccgggactcaggagaacggacacaacgggatatacggggcggtgcccggagccccttcagtcgcggacactcccgcgtcggtccccgctgacgggaccgacgaggtagcagagagccttacattccatcagcgtctacatgagttctacgagcgaaacattgggcttttattagtgttcctagctcagacttttggttcgctaatgaacgtcgcagcgaaactattgacatcgcagcaaactcccgagggcgaattccatgctctacatatcatatttgttcgcatgttctgtactgctatcctaggttcaatttacatgtggtacaagcaggttcctgaaccatttgggtcacgaaacgtctttggcctgctgatcttgcgcggcactgctgggtttctcggactttttggcatgtactattctttgtcgtatctggagatatcggatgctactgctataacttttctagtcccaacttggactgctattctctgttatgtctggttgaaggagccttacggtatccaagacgcttcagctggtctcatatcactagctggagtccttctgatcgcgcgaccggcgtttctttttggagggctgaggaatgagcaccgggaggtacctgtgggagctccctcatcgcctcagagagcaattgccgtggtattctccatcttaagcaccttcatggccgcgacggcgtatagtacgatacgtcacattggcaagcgagcacactcgctcgtgagtgtcaattattttgcggtgctgtcgacgatcggctctggcttcattcttttggtgcatccatacctgcactttagactccctcacggcgccacacaatgggtacttttggtgattatcggcatagcaggattcctacttcagttcctcttaacggaagggcttcgtagagatgcgtgcatgaaataagcgcgttttggcatttttttcgtgatcttatagaataggggcgaattaaggcatttttttcgtaatgcttaataagtagtaatattag

SEQ ID NO: 29086 - DNA, 654 bp, Muscodor strobelii
  misc_feature: SGI cDNA ID NO. 569986
  misc_feature: Encodes the peptide sequence at SEQ ID NO 29087
atgaggcctgcgaccgccacccttcttggcctcggcagtgtggctcaggctgctgtgtccggctttgatatctctcactaccaatcttcagtcaactttgcagccgcatacagctcaggagctcgtttcgttattatcaaggcaaccgaaggcactacgtatcaggacccatcgttttcctctcactacgatggtgccactgcggctgggttcatccgtggtggctaccacttcgcacacctcgactctagctcgggcgccacgcaggccaactacttccttgctcacggtggtggctggaccagtgacgggatcacccttcccggcatgttggatctagagggcagctgtgtgctctcaaccagcgccaccgtgtcctggattaaggacttcagcgacacatatcactccaagactggtgtctatccactgctatacaccagcccttcgtggtggaacgagtgcgctggtggctccagtgcattctacgatacgaaccctctcgtgcttgctaattacgctagcagcccgagcgttccctccggcttcccttatcaaacaatctggcagttcaatgacgcctataaatatggtggcgactcggataccttcaatggcgatatggctgctttgatgagacttgcatctggttaa

SEQ ID NO: 29087 - protein, 217 aa, Muscodor strobelii
  misc_feature: SGI Peptide ID NO. 569986
  misc_feature (22)..(200): Pfam Id: PF01183 Pfam Desc: Glycosyl hydrolases family 25
  misc_feature (8)..(217): NCBI GI: 85113524 Blast Desc: N,O-diacetylmuramidase [Neurospora crassa OR74A] gi|28926321|gb|EAA35299.1| N,O-diacetylmuramidase [Neurospora crassa OR74A]
  misc_feature (5)..(217): NCBI GI: 242772268 Blast Desc: N,O-diacetyl muramidase, [Talaromyces stipitatus ATCC 10500] gi|218721625|gb|EED21043.1| N,O-diacetyl muramidase, [Talaromyces stipitatus ATCC 10500]
  misc_feature (1)..(216): NCBI GI: 121699715 Blast Desc: N,O-diacetyl muramidase, [Aspergillus clavatus NRRL 1] gi|119396265|gb|EAW06697.1| N,O-diacetyl muramidase, [Aspergillus clavatus NRRL 1]
  misc_feature (1)..(217): NCBI GI: 119471205 Blast Desc: N,O-diacetyl muramidase, [Neosartorya fischeri NRRL 181] gi|119406291|gb|EAW16242.1| N,O-diacetyl muramidase, [Neosartorya fischeri NRRL 181]
  misc_feature (21)..(217): NCBI GI: 115399456 Blast Desc: N,O-diacetylmuramidase [Aspergillus terreus NIH2624] gi|114192200|gb|EAU33900.1| N,O-diacetylmuramidase [Aspergillus terreus NIH2624]
  misc_feature (4)..(217): NCBI GI: 212531207 Blast Desc: N,O-diacetyl muramidase, [Penicillium marneffei ATCC 18224] gi|210071124|gb|EEA25213.1| N,O-diacetyl muramidase, [Penicillium marneffei ATCC 18224]
  misc_feature (19)..(217): NCBI GI: 126597 Blast Desc: N,O-diacetyl muramidase, [Penicillium marneffei ATCC 18224] gi|210071124|gb|EEA25213.1| N,O-diacetyl muramidase, [Penicillium marneffei ATCC 18224]
  misc_feature (19)..(217): NCBI GI: 70992107 Blast Desc: N,O-diacetyl muramidase [Aspergillus fumigatus Af293] gi|66848535|gb|EAL88864.1| N,O-diacetyl muramidase, [Aspergillus fumigatus Af293] gi|159124471|gb|EDP49589.1| N,O-diacetyl A1163]
  misc_feature (19)..(217): NCBI GI: 238840164 Blast Desc: N,O-diacetylmuramidase [Microsporum canis CBS 113480]
  misc_feature (7)..(217): NCBI GI: 67540600 Blast Desc: AN6470.2 [Aspergillus nidulans FGSC A4] gi|40739302|gb|EAA58492.1| AN6470.2 [Aspergillus nidulans FGSC A4] gi|95025931|gb|ABF50879.1| N,O-diacetylmuramidase [Emericella
  misc_feature (11)..(216): SWISSPROT Homolog: EC 3.2.1.17 Lysozyme
MRPATATLLGLGSVAQAAVSGFDISHYQSSVNFAAAYSSGARFVIIKATEGTTYQDPSFSSHYDGATAAGFIRGGYHFAHLDSSSGATQANYFLAHGGGWTSDGITLPGMLDLEGSCVLSTSATVSWIKDFSDTYHSKTGVYPLLYTSPSWWNECAGGSSAFYDTNPLVLANYASSPSVPSGFPYQTIWQFNDAYKYGGDSDTFNGDMAALMRLASG

SEQ ID NO: 29088 - DNA, 1158 bp, Muscodor strobelii
  misc_feature: SGI EST ID NO. CUFF.68759.0
  misc_feature: Variant of the nucleotide sequence at SEQ ID NO 29086
ccgtattccaataatctgcagcacatgtaacggcagaaggaagatcatcgcctctaattgtcccttaacaaaccaagcctctgcagatcgctttccagctctttgcctgacttgcctggtctcttcaggctcagctaggagctcctcaaacctgcattgaagtaccgccttggttatcttttactcagatggggcaacccatttagtcctttgttactgcattgcatcatagtagccagcacgatgggtagaggaaggtgttcggaatgctgcgttggtcatgtaaatttcgagatacgcaaaaagtataaaggagtggccgtgcccacgttctaaaaactttcctcattcttatttgtataagcggcatcaagttattcatttccctactcaaatcccaaagtaaagaaggagaaaataatgaggcctgcgaccgccacccttcttggcctcggcagtgtggctcaggctgctgtgtccggctttgatatctctcactaccaatcttcagtcaactttgcagccgcatacagctcaggagctcgtttcgttattatcaaggcaaccgaaggcactacgtatcaggacccatcgttttcctctcactacgatggtgccactgcggctgggttcatccgtggtggctaccacttcgcacacctcgactctagctcgggcgccacgcaggccaactacttccttgctcacggtggtggctggaccagtgacgggatcacccttcccggcatgttggatctagagggcagctgtgtgctctcaaccagcgccaccgtgtcctggattaaggacttcagcgacacatatcactccaagactggtgtctatccactgctatacaccagcccttcgtggtggaacgagtgcgctggtggctccagtgcattctacgatacgaaccctctcgtgcttgctaattacgctagcagcccgagcgttccctccggcttcccttatcaaacaatctggcagttcaatgacgcctataaatatggtggcgactcggataccttcaatggcgatatggctgctttgatgagacttgcatctggttaaatctagggctattggcagtacattttttgttccatagcccacaagtctagttagcaatacgtaaactcaacattatgtttttgc

SEQ ID NO: 29089 - DNA, 726 bp, Muscodor strobelii
  misc_feature: SGI cDNA ID NO. 569987
  misc_feature: Encodes the peptide sequence at SEQ ID NO 29090
atgtcttcaccgaccgaggccgagtatccccgcggcggaaagcgtccccgcacgcaatcgctcccgccgccggtgctcccgcagctcgtcgcagagcagcacgtacccattgccgcgagcgacaaggacacgcagaggctgatcgtcgtcctgtccaacgccagcctcgagacgtacaaggcctcgcacggcggcgccggccgcatgggcatgcagcgcgaggacaagtactcgctgctcaacagcgacgagcacatcggcgtcatgcgcaagatgaaccgcgacatcagcgacgcccgccccgacatcacccaccagtgcctcctgacgctcctcgactcccccatcaacaaggccggcaagctgcagatctacatccacaccgccaagggcgtcctcatcgaagtctccccgaccgtccgcatcccccgcaccttcaagcgcttcgccggcctcatgaaccccatcaccgaccacctgcccccgaactgccgcaaggtcaccctgagcttcgacgaggagatcgtgcgcccgcgcgactacatggccaagctcgagcccaacgagagcatctgcgtcttcgtcggcgccatggccaagggcaccgacaacttcgccgacgagtttgtcgacgagaagatctccatcagcaactacagcctctcggccagcgtcgcctgcagcaagttctgccacgccgccgaggacgtgtgggacgtcatctag

SEQ ID NO: 29090 - protein, 241 aa, Muscodor strobelii
  misc_feature: SGI Peptide ID NO. 569987
  misc_feature (93)..(236): Pfam Id: PF03587 Pfam Desc: Nep1 ribosome biogenesis protein
  misc_feature (93)..(153): Pfam Id: PF03587 Pfam Desc: Nep1 ribosome biogenesis protein
  misc_feature (154)..(236): Pfam Id: PF03587 Pfam Desc: Nep1 ribosome biogenesis protein
  misc_feature (18)..(241): NCBI GI: 164427114 Blast Desc: nucleolar essential protein 1 [Neurospora crassa OR74A] gi|157071613|gb|EAA30197.2| nucleolar essential protein 1 [Neurospora crassa OR74A]
  misc_feature (18)..(241): NCBI GI: 256732867 Blast Desc: [Nectria haematococca mpVI 77-13-4]
  misc_feature (18)..(241): NCBI GI: 189091778 Blast Desc: [Podospora anserina] gi|188219242|emb|CAP49222.1| protein product [Podospora anserina]
  misc_feature (18)..(241): NCBI GI: 27802999 Blast Desc: protein product [Podospora anserina]
  misc_feature (17)..(241): NCBI GI: 116179662 Blast Desc: conserved [Chaetomium globosum CBS 148.51] gi|88184756|gb|EAQ92224.1| conserved [Chaetomium globosum CBS 148.51]
  misc_feature (1)..(241): NCBI GI: 261193819 Blast Desc: nucleolar essential protein 1 [Ajellomyces dermatitidis SLH14081] gi|239588920|gb|EEQ71563.1| nucleolar essential protein 1 [Ajellomyces dermatitidis SLH14081] nucleolar
  misc_feature (14)..(241): NCBI GI: 226279365 Blast Desc: nucleolar essential protein [Paracoccidioides brasiliensis Pb01]
  misc_feature (18)..(241): NCBI GI: 154304656 Blast Desc: conserved [Botryotinia fuckeliana B05.10] gi|150853967|gb|EDN29159.1| conserved [Botryotinia fuckeliana B05.10]
  misc_feature (1)..(241): NCBI GI: 154286834 Blast Desc: nucleolar essential protein 1 [Ajellomyces capsulatus NAm1] gi|150407853|gb|EDN03394.1| nucleolar essential protein 1 [Ajellomyces capsulatus NAm1]
  misc_feature (1)..(241): NCBI GI: 212544838 Blast Desc: RNA processing protein Emg1, [Penicillium marneffei ATCC 18224] gi|210065542|gb|EEA19636.1| RNA processing protein Emg1, [Penicillium marneffei ATCC 18224]
MSSPTEAEYPRGGKRPRTQSLPPPVLPQLVAEQHVPIAASDKDTQRLIVVLSNASLETYKASHGGAGRMGMQREDKYSLLNSDEHIGVMRKMNRDISDARPDITHQCLLTLLDSPINKAGKLQIYIHTAKGVLIEVSPTVRIPRTFKRFAGLMNPITDHLPPNCRKVTLSFDEEIVRPRDYMAKLEPNESICVFVGAMAKGTDNFADEFVDEKISISNYSLSASVACSKFCHAAEDVWDVI

SEQ ID NO: 29091 - DNA, 2850 bp, Muscodor strobelii
  misc_feature: SGI EST ID NO. CUFF.69122.2
  misc_feature: Variant of the nucleotide sequence at SEQ ID NO 29089
cgggtctccggcttatgctcaagggtgcaggcgaggcgtgggtgcaagtctggggtgggcgaggtgatgaaggtgcacagagccgagcccgactattcgggtcccctgttgggtcaagagtgacggagggctggggcaataaaggcaggctatcctcgccgttcagaccgctccatctctgtgccaatttcgccgatttcttctcgtgctcacatatcgactactaaatctcaccacactcaattccattaccccaagccttgctcctgcattggcctgcccgtagatcaattgcgcagcgggaacgacattgttatttcaaataccctgccctccaattctttactcgcccgccgcgccagcttgcattgcggttgactagagctgttatcggtctctattgtacctatcttatctgagcgtatctcgagaagaggggcagacaggaaacgaggggagcgaactcagtttaaaggctagggtttcgcgacaagaagaggaaaggaaaaaaaaggagaaatatgtcttcaccgaccgaggccgagtatccccgcggcggaaagcgtccccgcacgcaatcgctcccgccgccggtgctcccgcagctcgtcgcagagcagcacgtacccattgccgcgagcgacaaggacacgcagaggctgatcgtcgtcctgtccaacgccagcctcgagacgtacaaggcctcgcacggcggcgccggccgcatgggcatgcagcgcgaggacaagtactcgctgctcaacagcgacgagcacatcggcgtcatgcgcaagatgaaccgcgacatcagcgacgcccgccccgacatcacccaccagtgcctcctgacgctcctcgactcccccatcaacaaggccggcaagctgcagatctacatccacaccgccaagggcgtcctcatcgaagtctccccgaccgtccgcatcccccgcaccttcaagcgcttcgccggcctcatggtccagctcctgcaccgcctgtccatccgctccacaaactcccaggagaagcctgctgcgcgtcatccagaaccccatcaccgaccacctgcccccgaactgccgcaaggtcaccctgagcttcgacgaggagatcgtgcgcccgcgcgactacatggccaagctcgagcccaacgagagcatctgcgtcttcgtcggcgccatggccaagggcaccgacaacttcgccgacgagtttgtcgacgagaagatctccatcagcaactacagcctctcggccagcgtcgcctgcagcaagttctgccacgccgccgaggacgtgtgggacgtcatctagtgcacccgcgccccgacgtttcccgagccatctcttcgcctgggctggcttgcaagaggcaaacgtgacgacgaggggggccgcaggcggtggacgcgtgtgagagttgacatcatgagtgggcgacggcccgtcgcgacctgctatcctaacattgcagcgacggcgggacgtccccgagcttgggtctacgtggtttttctgtcttctgtttttacaaccaaaacaccaggcgttcaacagggatccaagacgttttttgccgtctgcgtggccatttcaacctggccgccacttcttgtccttcatgtttcttttcttccgacttctccatgtccatgtccgatcaggacgatcccgctctagctgttggcctgtgccactgactcggatagacgtggatggagacaaaggccgcgcgactcgtaatgagtacatgccgacgtatagaaatgagcgcaattcgtcgccacccaaaacaagactccgcttctggggatcgaagcattcaaagccaacctaactgtgctcacgcccggggtcgcccgaaacggcaattcaaggacttgatcggggttgtggctggttggctgccgggctttgaagtaccaatgggatccggcacttgagtggactatataaggcgatacatttgcggtcgatggccaggtcggataggagtagggctcacaatgctccccgactcttccacctcgacatatcccgtcgtactcgcaatcctatcagaacagggtgcgagagggacggagcaagagataaaaatgaagaagcattataatggtagcgtattaaatcaggctctttggccaggtagcgacggcagccgatcgccgcgtgaagctgtgaagctgtttagctactgaacctatgtatggagagtgccgtacttgagagcaaatttaaaaaaaaaacttgatccaatctcatatgatgaaaataatctcgaagtgcgatctcacattaatgatcattgctcaccctcgtcaccacgccggccagattcatcacaacacagtcggcggtccacttagaagtgcaaaatgcgggtgtcgtctataattgctcctgaacacgtgtgccactcattagccattcgtctgggatagggagacggaaagttgcccggtggagatggacactggagatgcagtgctctatcccagacactatgtaggtcccgtagatggccatcgtcggaagtattggctggctccgcggcaagcgcccgccctagatccgtatgcagctactttgcagcaaagcccatgcgcagcacatttgcagtatgccctcctcggtgcccacgtctgtgccagctccatttcggcgtgtgtcgctccagtcgtccaagacggtggaatgccgctgacagcttgacagcgaccgggagccaaacaaggaccgtaatgcagcaacacgacggcgctggtcttgccccacctcctccgcgtcaaatcaggtcctgacaggacagacacggacgagctggcaacgacattggtggtaggtctc

SEQ ID NO: 29092 - DNA, 1653 bp, Muscodor strobelii
  misc_feature: SGI cDNA ID NO. 569988
  misc_feature: Encodes the peptide sequence at SEQ ID NO 29093
atgcaggagcttccgttcgtcgaggtcagggatctcccgccttccgcctccttttactcggctatatcacaaccgcttggcctgcgctttatatctgccgattcctccaatatcgtatttggtgacacctcgtcaacgcctccgatccccgtctttcgagttagggtcgccgtgtctgatgtcggtgcacagccacctaagcgtacacgcctggttctttcggctgactctcctgcggtcgtatctgcctttcacgccgccgctcggagagcgaactctgacttattggcccacgataactttcttcgcatccaggacgtagacggccctgctggcggtgagagccgtgcacgcatcacagacctcgagggcaacatcatggaggttgtctatgtgaacccgcctggttatccttcccactatggagggtccaccgtgcgtcgcactcagtccactgacaaagaagtgagccggattcttgactggaatctggacgtcgcaacatccgtcgccccgcggcccacagcccgatccgtggttccgtcgagacggatgatcgatggcgtggagattcctgacgagggtccttttcagtacatgcgtcggaccgtcacgatgtcaacgatcgagacgccgcagtcggagccgcagtccacctcgaagggaatgagcacgggtgccatggtcggaaccgtactcggagctgtcgcagccggcgccgctgtaggtgcgggaatcacgtatgccctgtcacgcaacgaccgccggagggctccgcgtcaggagttcgatatgccgcccatgcagcgccgggccacgtatccagatccctatccaaatcatcatcctcggtatgtcgaggtagagagaaccgtagagaagatccacttccccgatcaatacccgccttcgtcgaagaagtatccaccacccgcttacatgactagatactctcaagtgggcggtccggcggcgagcagggcacccgacgacctggatgacgaccgagcgaaaagccattataccaccggcacacgaactcgtgatcgcagcgaaactcggcggcctctgatgatcaccaatgcggagcacagaagcaatgtaggctcacagtattcggagacgccccgttatatcatggaagccgaacccagcatcgcgccctcaagacattccaaggccagatccaaggtgtattccgaagtagccgatagtcactctagggcaccctccaaagtgtactcgcaagcacccgcgcgtagccacgtctcctcccgccactccaagcatgatgatagtagccggagtcacgtgagctcgcggcacagtcgagtacgcgacagcgatcattatacgtacatctctgcgcgtagcgaaaaatctgcttccaccgtacgcccggtacggtcaaaggccccaagtcactattcatcagctaccgtgaagccggctggcaagagccgtagcccaacgtatgtctcagtgcgcgatgagccgccttcaagtcgtgctggtgatgacaccgacgacgcgggtagcgtcgcgcctagcgatagtattagctgtgtgggaagtagacatcaccgaccgcggcctcacccaagagacttgccgttcttgcagagtattcgggaacgcttaatcattgaataa

SEQ ID NO: 29093 - protein, 550 aa, Muscodor strobelii
  misc_feature: SGI Peptide ID NO. 569988
  misc_feature (4)..(526): NCBI GI: 116179664 Blast Desc: CHGG_00460 [Chaetomium globosum CBS 148.51] gi|88184757|gb|EAQ92225.1| CHGG_00460 [Chaetomium globosum CBS 148.51]
  misc_feature (1)..(529): NCBI GI: 189091776 Blast Desc: [Podospora anserina] gi|27802997|emb|CAD60700.1| protein product [Podospora anserina] gi|188219241|emb|CAP49221.1| protein product [Podospora anserina]
  misc_feature (127)..(526): NCBI GI: 145616082 Blast Desc: [Magnaporthe grisea 70-15] gi|145009844|gb|EDJ94500.1| [Magnaporthe grisea 70-15]
  misc_feature (4)..(364): NCBI GI: 85067696 Blast Desc: NCU02429 [Neurospora crassa OR74A] gi|28920856|gb|EAA30198.1| [Neurospora crassa OR74A]
  misc_feature (4)..(310): NCBI GI: 256732866 Blast Desc: NECHADRAFT_67950 [Nectria haematococca mpVI 77-13-4]
  misc_feature (4)..(312): NCBI GI: 46136677 Blast Desc: FG09854.1 [Gibberella zeae PH-1]
  misc_feature (7)..(236): NCBI GI: 169618152 Blast Desc: SNOG_12264 [Phaeosphaeria nodorum SN15] gi|160703564|gb|EAT80676.2| SNOG_12264 [Phaeosphaeria nodorum SN15]
MQELPFVEVRDLPPSASFYSAISQPLGLRFISADSSNIVFGDTSSTPPIPVFRVRVAVSDVGAQPPKRTRLVLSADSPAVVSAFHAAARRANSDLLAHDNFLRIQDVDGPAGGESRARITDLEGNIMEVVYVNPPGYPSHYGGSTVRRTQSTDKEVSRILDWNLDVATSVAPRPTARSVVPSRRMIDGVEIPDEGPFQYMRRTVTMSTIETPQSEPQSTSKGMSTGAMVGTVLGAVAAGAAVGAGITYALSRNDRRRAPRQEFDMPPMQRRATYPDPYPNHHPRYVEVERTVEKIHFPDQYPPSSKKYPPPAYMTRYSQVGGPAASRAPDDLDDDRAKSHYTTGTRTRDRSETRRPLMITNAEHRSNVGSQYSETPRYIMEAEPSIAPSRHSKARSKVYSEVADSHSRAPSKVYSQAPARSHVSSRHSKHDDSSRSHVSSRHSRVRDSDHYTYISARSEKSASTVRPVRSKAPSHYSSATVKPAGKSRSPTYVSVRDEPPSSRAGDDTDDAGSVAPSDSISCVGSRHHRPRPHPRDLPFLQSIRERLIIE

SEQ ID NO: 29094 - DNA, 2951 bp, Muscodor strobelii
  misc_feature: SGI EST ID NO. CUFF.69319.1
  misc_feature: Variant of the nucleotide sequence at SEQ ID NO 29092
gctgctcattcctccatgccacccaccactgtcggggatagctttcgagactgccagtggcgagtcctgtacaggtcccggtgtattggattgggctctagtgaatttgcatagatcgcacaacgtgaagcgcgacattctccagctgtcacgagactggtgcatcgcgccgttgcccctctcggcccagcatctccttctgttaccacgtgtagggccttcaggaatgtcgacacacatataatgcatacgagggcctgtacatacatagacttgtcgaaaagtctgaactgcatccgtacctaagacactcgtcaacatctagcgtatgtcggcccgtcacatcttaggtggatagagtggctgatctcgtcattggtgaaatccatctgtcttgatgggcacagtgacatcgctgttcctatattaacttgcaaatctgcatttctgctcacgagatacggcgtaactctcgctttccctttgcttccattctgttactgccccttccctgaggtgaaaagaatattcgcggaggaagactctggacgcaagaattccaacagacctccctgtcgagaggagtagctcctcttcccttaaccgttaggtcgcactatcgtgagaaatctaagctcgaacagctcaggcaagtcaggttgcattctaccccggttgggcctatcgatcttttcagatttgccaccgtcacaaaagagccccatgcaggagcttccgttcgtcgaggtcagggatctcccgccttccgcctccttttactcggctatatcacaaccgcttggcctgcgctttatatctgccgattcctccaatatcgtatttggtgacacctcgtcaacgcctccgatccccgtctttcgagttagggtcgccgtgtctgatgtcggtgcacagccacctaagcgtacacgcctggttctttcggctgactctcctgcggtcgtatctgcctttcacgccgccgctcggagagcgaactctgacttattggcccacgataactttcttcgcatccaggacgtagacggccctgctggcggtgagagccgtgcacgcatcacagacctcgagggcaacatcatggaggttgtctatgtgaacccgcctggttatccttcccactatggagggtccaccgtgcgtcgcactcagtccactgacaaagaagtgagccggattcttgactggaatctggacgtcgcaacatccgtcgccccgcggcccacagcccgatccgtggttccgtcgagacggatgatcgatggcgtggagattcctgacgagggtccttttcagtacatgcgtcggaccgtcacgatgtcaacgatcgagacgccgcagtcggagccgcagtccacctcgaagggaatgagcacgggtgccatggtcggaaccgtactcggagctgtcgcagccggcgccgctgtaggtgcgggaatcacgtatgccctgtcacgcaacgaccgccggagggctccgcgtcaggagttcgatatgccgcccatgcagcgccgggccacgtatccagatccctatccaaatcatcatcctcggtatgtcgaggtagagagaaccgtagagaagatccacttccccgatcaatacccgccttcgtcgaagaagtatccaccacccgcttacatgactagatactctcaagtgggcggtccggcggcgagcagggcacccgacgacctggatgacgaccgagcgaaaagccattataccaccggcacacgaactcgtgatcgcagcgaaactcggcggcctctgatgatcaccaatgcggagcacagaagcaatgtaggctcacagtattcggagacgccccgttatatcatggaagccgaacccagcatcgcgccctcaagacattccaaggccagatccaaggtgtattccgaagtagccgatagtcactctagggcaccctccaaagtgtactcgcaagcacccgcgcgtagccacgtctcctcccgccactccaagcatgatgatagtagccggagtcacgtgagctcgcggcacagtcgagtacgcgacagcgatcattatacgtacatctctgcgcgtagcgaaaaatctgcttccaccgtacgcccggtacggtcaaaggccccaagtcactattcatcagctaccgtgaagccggctggcaagagccgtagcccaacgtatgtctcagtgcgcgatgagccgccttcaagtcgtgctggtgatgacaccgacgacgcgggtagcgtcgcgcctagcgatagtattagctgtgtgggaagtagacatcaccgaccgcggcctcacccaagagacttgccgttcttgcagagtattcgggaacgcttaatcattgaataatcagagatacgtgattgaggttggcaaaatgccgttcaatcttgcactgccttataatcctctaagcgctattcattgaaagtttgaagacgactgagtagatgctcctcctggtgcggtaaacactgtcggcatcgacagcaactattttgcttgccgtctcatatgtgcttccgggtgtaatgtatctaaacctggctaagggttcgctggaaggaagactcggtgaacagaacgaacagctgagcataaagaccggagttgatagatggcaaatgtccttttttcctctttgctatatataggtcagggaatggtgtaaatctttcggtagagcttcaccccaattctggtcaggtcgtcccgagacacggcccctgtatattcggacctgtagcatcatacttgagcgcacagggtgtttggcgtctacctacaacgtttgggatagtatcgggtaacgtaatgggctacgacagatagacctgcatgcgcacgcactacatgtggcgcgcgatggatataatgagattaatgattcacgctataaaccggcttgatagaccgggataaaa

SEQ ID NO: 29095 - DNA, 1341 bp, Muscodor strobelii
  misc_feature: SGI cDNA ID NO. 569989
  misc_feature: Encodes the peptide sequence at SEQ ID NO 29096
atgcccaaggagatggacacggttggactgccggatgcctacacgtatccacgacgcctgcgtttctcccgcctgccttgttggctgctgagagacgaccaccgaccttcctctggccttgttgcagctcgatctcttcacctcctcacctcccgccgctcatcgacgccagcgagacatcgccctcagctgtatctgtccctactgtgtgtccagctctccaccctcgcctgtggacaggagccgtggcccattgcgccgtcgacgtcggcaccttgcgctcggaagcttgagatcagcgactcctcctcttcacctctggctacagcgcccggtcctctgtccaacgcaacgctggcgcttcaacccggcaacaccttcggcgccggcccgacagctgtggccaacatggcccagcccaccgccgagcctgtcgaggactacgactacgaggccctccctcccaacttctccctcgtccagaacatggccgccggcgcctttgccggcatagccgagcacaccgtcatgtaccccatcgacgccataaagacgcgcatgcagatcatagggccgaacacgggcaatgcctacaagggcatgatccagagcaccatgcgcatcgccagcgccgagggcgtcttgcagctctggcgaggcatgtccagcgtcgtcgtcggagccggccctgcgcatgccgtctacttcgccacctacgaggccgtcaagcacctcatgggcggcaacaagaccggcgtccatcacccgctggctgccgctaccagcggagcctgtgccaccatcgcgagcgatgccctgatgaacccctttgacgtcatcaagcagcgcatgcagatgcagaactctaacaagatgtaccgctccatgaccgactgcgccagatacgtctacaggaccgagggcctcggcgccttctacatctcctacccgaccaccctgtccatgacggtgcccttcaccgccctccagttcctcgcctacgagtccatctccaccaccatgaaccccaacaagaactacgaccccttcacccactgcaccgccggcgccgtcgccgggggctttgccgccgccctgaccacccccatggacgtcgtcaagaccatgttgcagacccgcggcaccgcctccgaccctgagctgcgctccgtcaacggcttcatcaacggctgcaagcttgtctaccagcgagagggcgcccgcggcttcttcaagggcgtccggccccgcgttgtcaccaccatgcccagcaccgccatctgctggtcggcatacgaggcatccaaggcctacttcattcgcacaaacacatcctcgtaa

SEQ ID NO: 29096 - protein, 446 aa, Muscodor strobelii
  misc_feature: SGI Peptide ID NO. 569989
  misc_feature (158)..(250): Pfam Id: PF00153 Pfam Desc: Mitochondrial carrier protein
  misc_feature (348)..(443): Pfam Id: PF00153 Pfam Desc: Mitochondrial carrier protein
  misc_feature (255)..(345): Pfam Id: PF00153 Pfam Desc: Mitochondrial carrier protein
  misc_feature (137)..(443): NCBI GI: 261361148 Blast Desc: mitochondrial RNA-splicing protein MRS3 [Verticillium albo-atrum VaMs.102]
  misc_feature (137)..(446): NCBI GI: 189091790 Blast Desc: [Podospora anserina] gi|27803005|emb|CAD60708.1| protein product [Podospora anserina] gi|188219248|emb|CAP49228.1| protein product [Podospora anserina]
  misc_feature (137)..(446): NCBI GI: 85092992 Blast Desc: NCU02423 [Neurospora crassa OR74A] gi|28921049|gb|EAA30369.1| NCU02423 [Neurospora crassa OR74A]
  misc_feature (137)..(436): NCBI GI: 116179652 Blast Desc: CHGG_00454 [Chaetomium globosum CBS 148.51] gi|88184751|gb|EAQ92219.1| CHGG_00454 [Chaetomium globosum CBS 148.51]
  misc_feature (137)..(443): NCBI GI: 154308585 Blast Desc: BC1G_07715 [Botryotinia fuckeliana B05.10] gi|150852666|gb|EDN27858.1| BC1G_07715 [Botryotinia fuckeliana B05.10]
  misc_feature (137)..(446): NCBI GI: 256732428 Blast Desc: [Nectria haematococca mpVI 77-13-4]
  misc_feature (137)..(443): NCBI GI: 156050733 Blast Desc: SS1G_07954 [Sclerotinia sclerotiorum 1980] gi|154692354|gb|EDN92092.1| SS1G_07954 [Sclerotinia sclerotiorum 1980]
  misc_feature (146)..(446): NCBI GI: 189200503 Blast Desc: mitoferrin-1 [Pyrenophora tritici-repentis Pt-1C-BFP] gi|187983687|gb|EDU49175.1| mitoferrin-1 [Pyrenophora tritici-repentis Pt-1C-BFP]
  misc_feature (134)..(445): NCBI GI: 169622583 Blast Desc: SNOG_14516 [Phaeosphaeria nodorum SN15] gi|111056936|gb|EAT78056.1| SNOG_14516 [Phaeosphaeria nodorum SN15]
  misc_feature (137)..(445): NCBI GI: 261203739 Blast Desc: mitochondrial RNA splicing protein [Ajellomyces dermatitidis SLH14081] gi|239586868|gb|EEQ69511.1| mitochondrial RNA splicing protein [Ajellomyces dermatitidis SLH14081] RNA
MPKEMDTVGLPDAYTYPRRLRFSRLPCWLLRDDHRPSSGLVAARSLHLLTSRRSSTPARHRPQLYLSLLCVQLSTLACGQEPWPIAPSTSAPCARKLEISDSSSSPLATAPGPLSNATLALQPGNTFGAGPTAVANMAQPTAEPVEDYDYEALPPNFSLVQNMAAGAFAGIAEHTVMYPIDAIKTRMQIIGPNTGNAYKGMIQSTMRIASAEGVLQLWRGMSSVVVGAGPAHAVYFATYEAVKHLMGGNKTGVHHPLAAATSGACATIASDALMNPFDVIKQRMQMQNSNKMYRSMTDCARYVYRTEGLGAFYISYPTTLSMTVPFTALQFLAYESISTTMNPNKNYDPFTHCTAGAVAGGFAAALTTPMDVVKTMLQTRGTASDPELRSVNGFINGCKLVYQREGARGFFKGVRPRVVTTMPSTAICWSAYEASKAYFIRTNTSS

SEQ ID NO: 29097 - DNA, 2558 bp, Muscodor strobelii
  misc_feature: SGI EST ID NO. CUFF.69115.2
  misc_feature: Variant of the nucleotide sequence at SEQ ID NO 29095
gccagagttgggggtgcaccaacggcgtgtccctggtggcccagcgtcggggtgctaggccggggtgggcttagcgccaaaaagttatcagatcaaatcaatccagtgtctccagtgaaatcaaagcagtccactcaagccatcaccacatctcgccgtggtccccagtgccggatgcctacacgtatccacgacgcctgcgtttctcccgcctgccttgttggctgctgagagacgaccaccgaccttcctctggccttgttgcagctcgatctcttcacctcctcacctcccgccgctcatcgacgccagcgagacatcgccctcagctgtatctgtccctactgtgtgtccagctctccaccctcgcctgtggacaggagccgtggcccattgcgccgtcgacgtcggcaccttgcgctcggaagcttgagatcagcgactcctcctcttcacctctggctacagcgcccggtcctctgtccaacgcaacgctggcgcttcaacccggcaacaccttcggcgccggcccgacagctgtggccaacatggcccagcccaccgccgagcctgtcgaggactacgactacgaggccctccctcccaacttctccctcgtccagaacatggccgccggcgcctttgccggcatagccgtacgaccctttttccccctcgctgcgctgccgaggcacgtcctgacccgtctgtgtcgtttaggagcacaccgtcatgtaccccatcgacgccataaagacgcgcatgcagatcatagggccgaacacgggcaatgcctacaagggcatgatccagagcaccatgcgcatcgccagcgccgagggcgtcttgcagctctggcgaggcatgtccagcgtcgtcgtcggagccggccctgcgcatgccgtctacttcgccacctacgaggccgtcaagcacctcatgggcggcaacaagaccggcgtccatcacccgctggctgccggtatgtccccctgctgcggttgtcttgtgtgcttattgcgctaatctggctgcccgaccctagctaccagcggagcctgtgccaccatcgcgagcgatgccctgatgaacccctttgacgtcatcaagcagcgcatgcagatgcagaactctaacaagatgtaccgctccatgaccgactgcgccagatacgtctacaggaccgagggcctcggcgccttctacatctcctacccgaccaccctgtccatgacggtgcccttcaccgccctccagttcctcgcctacgagtccatctccaccaccatgaaccccaacaagaactacgaccccttcacccactgcaccgccggcgccgtcgccgggggctttgccgccgccctgaccacccccatggacgtcgtcaagaccatgttgcagacccgcggcaccgcctccgaccctgagctgcgctccgtcaacggcttcatcaacggctgcaagcttgtctaccagcgagagggcgcccgcggcttcttcaagggcgtccggccccgcgttgtcaccaccatgcccagcaccgccatctgctggtcggcatacgaggcatccaaggcctacttcattcgcacaaacacatcctcgtaacctgcggttccaggcagccatgtaagtcgctcggctcggaaatacagggttggtgcatggaagatggcaacatccccgaccgaccactgccgaggccgaagccgagaaggcccggccgagccccgaactcgttggctgccaatctccggcggtcccgaacaaaccgatattgattgttgtaccgcacctctggcacgtcaagccatgaaaccctgtccataatcctctgtccataaaatgcttcggcgctgccggcgctgttacgacctgtctggaaaagcgatgcccaattttcaccaggattactctctatagacgcgatggaaagcgacgtgaaagaaactaaaaatgagaccttcgaccgaaatctaatgtacaatatatatcccatctgctatcccccggcgcggccatgtcttggaactggtgcctgcaagagaaaagtcacataaaggggtggtggtcctcattcgccgagggcggggggcaaaacctcggcgaggcggcgttcttttgattatatacaatgctgagatcatctgcgtagcataatgggatctgtttggggctctgccctatcttgccgtcgactgatgccaaccctgccttttctcttcgttggtctgatttgcatggcatgagagatgtgataagggacgctcatctctgtacagcaattcaaagaactgcttggacgtctgagcgcaggtaagactggacatggccgcaaagcgttgactgtcgtgtaagttgggagccaatggtcgtcggcctggcggctatcgtccctggtgatgcatcatccattctagtactgagataggatcagagtgatccatgctctcagtatgtgcacgtgttgtttttcaactctatagctaagtccatgagtctcttgccagggaaatactcatccacgggcctcagggggaatggtgaatgaactctcg

SEQ ID NO: 29098 - DNA, 1311 bp, Muscodor strobelii
  misc_feature: SGI cDNA ID NO. 569990
  misc_feature: Reduced expression when VOC is produced
  misc_feature: Encodes the peptide sequence at SEQ ID NO 29099
atgcccaaggagatggacacggttggactgccggatgcctacacgtatccacgacgcctgcgtttctcccgcctgccttgttggctgctgagagacgaccaccgaccttcctctggccttgttgcagctcgatctcttcacctcctcacctcccgccgctcatcgacgccagcgagacatcgccctcagctgtatctgtccctactgtgtgtccagctctccaccctcgcctgtggacaggagccgtggcccattgcgccgtcgacgtcggcaccttgcgctcggaagcttgagatcagcgactcctcctcttcacctctggctacagcgcccggtcctctgtccaacgcaacgctggcgcttcaacccggcaacaccttcggcgccggcccgacagctgtggccaacatggcccagcccaccgccgagcctgtcgaggactacgactacgaggccctccctcccaacttctccctcgtccagaacatggccgccggcgcctttgccggcatagccgagcacaccgtcatgtaccccatcgacgccataaagacgcgcatgcagatcatagggccgaacacgggcaatgcctacaagggcatgatccagagcaccatgcgcatcgccagcgccgagggcgtcttgcagctctggcgaggcatgtccagcgtcgtcgtcggagccggccctgcgcatgccgtctacttcgccacctacgaggccgtcaagcacctcatgggcggcaacaagaccggcgtccatcacccgctggctgccgctaccagcggagcctgtgccaccatcgcgagcgatgccctgatgaacccctttgacgtcatcaagcagcgcatgcagatgcagaactctaacaagatgtaccgctccatgaccgactgcgccagatacgtctacaggaccgagggcctcggcgccttctacatctcctacccgaccaccctgtccatgacggtgcccttcaccgccctccagttcctcgcctacgagtccatctccaccaccatgaaccccaacaagaactacgaccccttcacccactgcaccgccggcgccgtcgccgggggctttgccgccgccctgaccacccccatggacgtcgtcaagaccatgttgcagacccgcggcaccgcctccgaccctgagctgcgctccgtcaacggcttcatcaacggctgcaagcttgtctaccagcgagagggcgcccgcggcttcttcaagggcgtccggccccgcgttgtcaccaccatgcccagcaccgccatctgctggtcggcatacgaggcatccaagtga

SEQ ID NO: 29099 - protein, 436 aa, Muscodor strobelii
  misc_feature: SGI Peptide ID NO. 569990
  misc_feature (158)..(250): Pfam Id: PF00153 Pfam Desc: Mitochondrial carrier protein
  misc_feature (255)..(345): Pfam Id: PF00153 Pfam Desc: Mitochondrial carrier protein
  misc_feature (348)..(436): Pfam Id: PF00153 Pfam Desc: Mitochondrial carrier protein
  misc_feature (137)..(436): NCBI GI: 261361148 Blast Desc: mitochondrial RNA-splicing protein MRS3 [Verticillium albo-atrum VaMs.102]
  misc_feature (137)..(436): NCBI GI: 116179652 Blast Desc: CHGG_00454 [Chaetomium globosum CBS 148.51] gi|88184751|gb|EAQ92219.1| CHGG_00454 [Chaetomium globosum CBS 148.51]
  misc_feature (137)..(436): NCBI GI: 189091790 Blast Desc: [Podospora anserina] gi|27803005|emb|CAD60708.1| protein product [Podospora anserina] gi|188219248|emb|CAP49228.1| protein product [Podospora anserina]
  misc_feature (137)..(436): NCBI GI: 85092992 Blast Desc: NCU02423 [Neurospora crassa OR74A] gi|28921049|gb|EAA30369.1| NCU02423 [Neurospora crassa OR74A]
  misc_feature (137)..(436): NCBI GI: 154308585 Blast Desc: BC1G_07715 [Botryotinia fuckeliana B05.10] gi|150852666|gb|EDN27858.1| BC1G_07715 [Botryotinia fuckeliana B05.10]
  misc_feature (137)..(436): NCBI GI: 256732428 Blast Desc: [Nectria haematococca mpVI 77-13-4]
  misc_feature (137)..(436): NCBI GI: 156050733 Blast Desc: SS1G_07954 [Sclerotinia sclerotiorum 1980] gi|154692354|gb|EDN92092.1| SS1G_07954 [Sclerotinia sclerotiorum 1980]
  misc_feature (134)..(436): NCBI GI: 169622583 Blast Desc: SNOG_14516 [Phaeosphaeria nodorum SN15] gi|111056936|gb|EAT78056.1| SNOG_14516 [Phaeosphaeria nodorum SN15]
  misc_feature (137)..(436): NCBI GI: 261203739 Blast Desc: mitochondrial RNA splicing protein [Ajellomyces dermatitidis SLH14081] gi|239586868|gb|EEQ69511.1| mitochondrial RNA splicing protein [Ajellomyces dermatitidis SLH14081] RNA
  misc_feature (146)..(436): NCBI GI: 189200503 Blast Desc: mitoferrin-1 [Pyrenophora tritici-repentis Pt-1C-BFP] gi|187983687|gb|EDU49175.1| mitoferrin-1 [Pyrenophora tritici-repentis Pt-1C-BFP]
  misc_feature: Useful for introducing or modulating the production of volatile compounds
MPKEMDTVGLPDAYTYPRRLRFSRLPCWLLRDDHRPSSGLVAARSLHLLTSRRSSTPARHRPQLYLSLLCVQLSTLACGQEPWPIAPSTSAPCARKLEISDSSSSPLATAPGPLSNATLALQPGNTFGAGPTAVANMAQPTAEPVEDYDYEALPPNFSLVQNMAAGAFAGIAEHTVMYPIDAIKTRMQIIGPNTGNAYKGMIQSTMRIASAEGVLQLWRGMSSVVVGAGPAHAVYFATYEAVKHLMGGNKTGVHHPLAAATSGACATIASDALMNPFDVIKQRMQMQNSNKMYRSMTDCARYVYRTEGLGAFYISYPTTLSMTVPFTALQFLAYESISTTMNPNKNYDPFTHCTAGAVAGGFAAALTTPMDVVKTMLQTRGTASDPELRSVNGFINGCKLVYQREGARGFFKGVRPRVVTTMPSTAICWSAYEASK

SEQ ID NO: 29100 - DNA, 2558 bp, Muscodor strobelii; identical to SEQ ID NO: 29097
  misc_feature: SGI EST ID NO. CUFF.69115.2
  misc_feature: Variant of the nucleotide sequence at SEQ ID NO 29098

SEQ ID NO: 29101 - DNA, 969 bp, Muscodor strobelii
  misc_feature: SGI cDNA ID NO. 569991
  misc_feature: Reduced expression when VOC is produced
  misc_feature: Encodes the peptide sequence at SEQ ID NO 29102
atgcgccccggcgacaccaccccgcacctcaagatctccgccaccaccttctacggcctcggcgacaccgaccagggcctggcccagatccggaagtgcctgatctccgacccggactccaagacgtgcaagaagttgatgaagcagcagaagtccatcaccaagacctgggacagggtcaacaaggccctcgacaagaaccagcccatgaccggcgtcaagatgctcgtcccctcggccgacgacaagggcctgatcgaccacgtccgagaccaagtcgccgagctgaagaaggacggcatcatcccggacagggcccccaacgctctgttgaccaggtttgtcgaggctgcttgccaggcttattacgacgccaatggtaagaaagcgagcacgtactgcaccgaagcgctggaattagacgagaactcgttgtatggattgctacacaaggccaaggtgcaaatggacgccgaggacttcgaggcttgcgtcggcacgctgaagcaggcgtccgaagtgcggcccgacaaaaacaacatcatcaacccgctgatgcagaaggcccaggtcgccctcaagcgcagcaagaccaaggactactacaagatcctcggcgtcgcgcacgacgccgacgacaggcagatcaaggcggcctaccgcaagctgtccaagcagcaccacccggacaaggccatgaagcaggggctcaccaaggacgaggccgagaagaagatggccggcatcaacgaggcctacgaggtgctgtccgacccggagctgcgcgcccgcttcgaccgcggcgacgaccccaactcgcacgagcagcagcagcaccccttccagggcagccccttcggcggcggccaccccttcatgttccagcagggcggccaacagttcaacttcaagtttggcggctcgggaggcggcggcgggggccacggctttggagggtttccgttttag

SEQ ID NO: 29102 - protein, 322 aa, Muscodor strobelii
  misc_feature: SGI Peptide ID NO. 569991
  misc_feature (200)..(266): Pfam Id: PF00226 Pfam Desc: DnaJ domain
  misc_feature (1)..(291): NCBI GI: 116179654 Blast Desc: CHGG_00455 [Chaetomium globosum CBS 148.51] gi|88184752|gb|EAQ92220.1| CHGG_00455 [Chaetomium globosum CBS 148.51]
  misc_feature (1)..(294): NCBI GI: 39942970 Blast Desc: MGG_03565 [Magnaporthe grisea 70-15] gi|145009872|gb|EDJ94528.1| MGG_03565 [Magnaporthe grisea 70-15]
  misc_feature (1)..(278): NCBI GI: 189091788 Blast Desc: [Podospora anserina] gi|188219247|emb|CAP49227.1| protein product [Podospora anserina]
  misc_feature (1)..(275): NCBI GI: 85092996 Blast Desc: NCU02424 [Neurospora crassa OR74A] gi|28921050|gb|EAA30370.1| NCU02424 [Neurospora crassa OR74A]
  misc_feature (1)..(278): NCBI GI: 27803004 Blast Desc: protein product [Podospora anserina]
  misc_feature (1)..(309): NCBI GI: 256732870 Blast Desc: NECHADRAFT_78614 [Nectria haematococca mpVI 77-13-4]
  misc_feature (1)..(304): NCBI GI: 46136665 Blast Desc: FG09848.1 [Gibberella zeae PH-1]
  misc_feature (1)..(318): NCBI GI: 154300308 Blast Desc: BC1G_11343 [Botryotinia fuckeliana B05.10] gi|150856666|gb|EDN31858.1| BC1G_11343 [Botryotinia fuckeliana B05.10]
  misc_feature (1)..(318): NCBI GI: 156042368 Blast Desc: SS1G_10981 [Sclerotinia sclerotiorum 1980] gi|154695368|gb|EDN95106.1| SS1G_10981 [Sclerotinia sclerotiorum 1980]
  misc_feature (1)..(293): NCBI GI: 261361149 Blast Desc: DnaJ and TPR domain-containing protein [Verticillium albo-atrum VaMs.102]
  misc_feature: Useful for introducing or modulating the production of volatile compounds
MRPGDTTPHLKISATTFYGLGDTDQGLAQIRKCLISDPDSKTCKKLMKQQKSITKTWDRVNKALDKNQPMTGVKMLVPSADDKGLIDHVRDQVAELKKDGIIPDRAPNALLTRFVEAACQAYYDANGKKASTYCTEALELDENSLYGLLHKAKVQMDAEDFEACVGTLKQASEVRPDKNNIINPLMQKAQVALKRSKTKDYYKILGVAHDADDRQIKAAYRKLSKQHHPDKAMKQGLTKDEAEKKMAGINEAYEVLSDPELRARFDRGDDPNSHEQQQHPFQGSPFGGGHPFMFQQGGQQFNFKFGGSGGGGGGHGFGGFPF

SEQ ID NO: 29103 - DNA, 1316 bp, Muscodor strobelii
  misc_feature: SGI EST ID NO. CUFF.69239.1
  misc_feature: Variant of the nucleotide sequence at SEQ ID NO 29101
ccacctcctgcagatgcgccccggcgacaccaccccgcacctcaagatctccgccaccaccttctacggcctcggcgacaccgaccagggcctggcccagatccggaagtgcctgatctccgacccggactccaagacgtgcaagaagttgatgaagcagcagaagtccatcaccaagacctgggacagggtcaacaaggccctcgacaagaaccagcccatgaccggcgtcaagatgctcgtcccctcggccgacgacaagggcctgatcgaccacgtccgagaccaagtcgccgagctgaagaaggacggcatcatcccggacagggcccccaacgctctgttgaccaggtttgtcgaggctgcttgccaggcttattacgacgccaatggtaagaaagcgagcacgtactgcaccgaagcgctggaattagacgagaactcgttgtatggattgctacacaaggccaaggtgcaaatggacgccgaggacttcgaggcttgcgtcggcacgctgaagcaggcgtccgaagtgcggcccgacaaaaacaacatcatcaacccgctgatgcagaaggcccaggtcgccctcaagcgcagcaagaccaaggactactacaagatcctcggcgtcgcgcacgacgccgacgacaggcagatcaaggcggcctaccgcaagctgtccaagcagcaccacccggacaaggccatgaagcaggggctcaccaaggacgaggccgagaagaagatggccggcatcaacgaggcctacgaggtgctgtccgacccggagctgcgcgcccgcttcgaccgcggcgacgaccccaactcgcacgagcagcagcagcaccccttccagggcagccccttcggcggcggccaccccttcatgttccagcagggcggccaacagttcaacttcaagtttggcggctcgggaggcggcggcgggggccacggctttggagggtttccgttttagttgggcgtcggcatgggctttgccccttcccgtcgacaagggttatctatttttgtttttcgtcttgtcaatacttgatatcatcagcatggctacggttgggacccaaggagttagaggctggatcgacctcgttattaatcaaccaggattatcatcatcaatggctatcaatggctatagtaatcgtgtctgcgcaatctctgtgaatatctgtctgcgtgtctcacaagtaaagatcaaaatatcacgtttgttccatgatatgtaattctacttgtttgggatgatgcgtaaatcgccaatatcttcatcatacttgacttggctacgc

SEQ ID NO: 29104 - DNA, 2538 bp, Muscodor strobelii
  misc_feature: SGI cDNA ID NO. 569992
  misc_feature: Encodes the peptide sequence at SEQ ID NO 29105
atgcagtcgcactccagcccgccggttcagcccgccggcgcgagctcgtcggcctatccagccatgcccgcatcaccgaccctcacgaacccagatctgatcctgcccgactacgacgatcctgtctcgccagaccgctcgcagtctcccttgatgatgtggaaaaacgcccatgacgcgggcacgcagttcgacctaaactcccagtccttcgtcgccggccctatcacgcccaccacgcccatcatctacggcaatggcaccatgctgtctgacatcggcgaggtcaccgaagtcgaaagcacctgtgcccccacaaggtcgcgctccgcctctacgcgcagcgaatttgcaatcgtcacaagcaccgccttgccctacgaggctatcaagaagaagatcaaggaatccagggctgcccatgagaggcacacgtctatcgactccacaagcaccgttacgaatcataaccaggccgacctctttgccgatttcgacgacagcgtcagcgtcgacgacagcaacttccaaggagacgatgaagacagtgtcgctgactcgtacatcgacgaaacgtccgtgcaggagaccgtatcggccgccaggcccgtgtctcacaacgaggacgatgagagatactcaacgcccttgtcccgtagagccgagcatatcttggccaacgccaagcgtcggttgaataatatggaagggaatctgagtcgagcgcgatccacgctgtattcacccggcctgtcctcgataggctctcaatcgacaccgtctcccaccgtggggcgtcccacgacctcgatcagcacccatgggcacacccgaatctcaagcgagagcaatatcccaactgagaacaaggcaagtgtatctacgcagaggtcctctagcgccttgggtaccgctggagggtaccgtcggccaggccaaaagaacgcgaaaacgaatctgaacaattctgtacacgaggactcttcttactccaaaagtaaaacatccctacacacacgcgagtggcctctcgagccgctcagtgaagacgaggtactcgaagaggaaacgtctaggtccaccagcgaggatgccaaatcagatgtcttcctcactccgactttcggggtctttgcggacaaaaacctgaaacggtcgacctcaaccgctcagatgcgggatttgaaagatcaagtaaatgatctgaaaggcaggttgtccacactgagagaccaagctcgagccgacagcatgaagcgtcgtagcttgcaaagcctgcggaccccgagcccctttacgcatgcccaagtcgaccagtggtatgctgaaaggagcggccacgacgatagtggagaatctacgccacaattaacagatgtgagagaccaggctgtccgagacccctctgaccaaactcccgacgtagagaaagccagtgaagagcacaatgggacgttattggtcgaatctactcgcggagacgataccgcgacatcaaggttccttgcgcctttggatgcatcccatacttcatccgatgtggttttggactctgcgccaattcaggaaaatggcatgatcggtgacacaaacaagagagagacgtttggaccgtttggaaactcgaatggatatatggactcccaagcggatcagtatgatgacggagcaagcgagagcggtgaatctgcatatcatgactcggttcaagcccaggtgtctcatgaagatcgcgaggatgcttttgactatgaacatttcttcttgcatagtgctatggggagcatgagccgaagggcgatgcgtcgaagaggcagtaatgatagcttttcctcggaaggctcagtcgagacaacaaggggacccactgcatctgactccctgaatccagctacaagcagggctagtcgtcactctcggagcggaagtgttggctccacctctacgatagattcgtttgccacggctacagagggacggaacacgagagctggcggacgtacatcttacgatgacttggacatcaacaacagtattccagagcgggccaggacccacacaccctatactgcaagacgaagcgtaatcaccccggatgtgagcgctttgagaccagctccaaaccagacagcgcatgtccttgcccgccgtccccaaagcagcgccgccgtctacaaacaccgcccttctgcaccatcgtacgactcagtgggcacgaacaggagtttccctcttgtcaatcacagagtgcaggccagtggcggtattctaactccgggtggttctccagaccaagacatgaagcgcatatcggaacaactcacgcgagatgttattcccatgtccggccttaatgttgatacagctggacttatgcaaatactgcacaaagacgatcaaatactagtggagcgactcatgggaaccctcagccggtgcatcgcaggattaagcgagtcgggacgagcgagtaccgatcgaagaacgtatcggagaaagatcgaagctgcccatagaatcttggagggtttggaataa

SEQ ID NO: 29105 - protein, 845 aa, Muscodor strobelii
  misc_feature: SGI Peptide ID NO. 569992
  misc_feature (18)..(845): NCBI GI: 261357580 Blast Desc: conserved [Verticillium albo-atrum VaMs.102]
  misc_feature (19)..(845): NCBI GI: 46106321 Blast Desc: FG00418.1 [Gibberella zeae PH-1]
  misc_feature (14)..(845): NCBI GI: 256735293 Blast Desc: NECHADRAFT_74973 [Nectria haematococca mpVI 77-13-4]
  misc_feature (16)..(845): NCBI GI: 145611440 Blast Desc: MGG_00384 [Magnaporthe grisea 70-15] gi|145018725|gb|EDK03004.1| MGG_00384 [Magnaporthe grisea 70-15]
  misc_feature (20)..(844): NCBI GI: 171684363 Blast Desc: protein product [Podospora anserina] gi|170942142|emb|CAP67794.1| protein product [Podospora anserina]
  misc_feature (18)..(845): NCBI GI: 156052887 Blast Desc: SS1G_06611 [Sclerotinia sclerotiorum 1980] gi|154704389|gb|EDO04128.1| SS1G_06611 [Sclerotinia sclerotiorum 1980]
  misc_feature (27)..(689): NCBI GI: 85118382 Blast Desc: NCU02656 [Neurospora crassa OR74A] gi|28927238|gb|EAA36193.1| [Neurospora crassa OR74A] gi|38567173|emb|CAE76466.1| [Neurospora crassa]
  misc_feature (18)..(845): NCBI GI: 154315170 Blast Desc: BC1G_04624 [Botryotinia fuckeliana B05.10] gi|150847587|gb|EDN22780.1| BC1G_04624 [Botryotinia fuckeliana B05.10]
  misc_feature (20)..(375): NCBI GI: 116192257 Blast Desc: CHGG_05846 [Chaetomium globosum CBS 148.51] gi|88181759|gb|EAQ89227.1| CHGG_05846 [Chaetomium globosum CBS 148.51]
  misc_feature (558)..(830): NCBI GI: 116192257 Blast Desc: CHGG_05846 [Chaetomium globosum CBS 148.51] gi|88181759|gb|EAQ89227.1| CHGG_05846 [Chaetomium globosum CBS 148.51]
MQSHSSPPVQPAGASSSAYPAMPASPTLTNPDLILPDYDDPVSPDRSQSPLMMWKNAHDAGTQFDLNSQSFVAGPITPTTPIIYGNGTMLSDIGEVTEVESTCAPTRSRSASTRSEFAIVTSTALPYEAIKKKIKESRAAHERHTSIDSTSTVTNHNQADLFADFDDSVSVDDSNFQGDDEDSVADSYIDETSVQETVSAARPVSHNEDDERYSTPLSRRAEHILANAKRRLNNMEGNLSRARSTLYSPGLSSIGSQSTPSPTVGRPTTSISTHGHTRISSESNIPTENKASVSTQRSSSALGTAGGYRRPGQKNAKTNLNNSVHEDSSYSKSKTSLHTREWPLEPLSEDEVLEEETSRSTSEDAKSDVFLTPTFGVFADKNLKRSTSTAQMRDLKDQVNDLKGRLSTLRDQARADSMKRRSLQSLRTPSPFTHAQVDQWYAERSGHDDSGESTPQLTDVRDQAVRDPSDQTPDVEKASEEHNGTLLVESTRGDDTATSRFLAPLDASHTSSDVVLDSAPIQENGMIGDTNKRETFGPFGNSNGYMDSQADQYDDGASESGESAYHDSVQAQVSHEDREDAFDYEHFFLHSAMGSMSRRAMRRRGSNDSFSSEGSVETTRGPTASDSLNPATSRASRHSRSGSVGSTSTIDSFATATEGRNTRAGGRTSYDDLDINNSIPERARTHTPYTARRSVITPDVSALRPAPNQTAHVLARRPQSSAAVYKHRPSAPSYDSVGTNRSFPLVNHRVQASGGILTPGGSPDQDMKRISEQLTRDVIPMSGLNVDTAGLMQILHKDDQILVERLMGTLSRCIAGLSESGRASTDRRTYRRKIEAAHRILEGLE

SEQ ID NO: 29106 - DNA, 3838 bp, Muscodor strobelii
  misc_feature: SGI EST ID NO. CUFF.68844.0
  misc_feature: Variant of the nucleotide sequence at SEQ ID NO 29104
gccgtgtgctcctgcgaacctcgaagcctctctctgtccaggccgtctctctgcaccaccagagcagccctaccgtcgcgactcactcgccaaagctggcaagtcctctgcgaaggcgaccgtcacggcagtccctcgaccgttcgcccacggctaggtagccacaccgtctcgtcccgtccccggcgcgacagccaaggagccacgaccgtcgctggcccgtggccgcctcgactcggactcgaaattagagttgcgatcggtcgtcagcatctccagcagcgtcagcagcgtccgtccgcgccaccactggtcccgccgccatgagcaacatcgctcgtcagagcaattgctgattgatcgtctgccggccgccttcctcgccccgacctcgaaactgcgagccttgaattgcccagctccagctccagctcccggcccgccgagcccgtcactcgttttttgtccttgctctgtctccgctgctctgttgctcccgtgtgcgccatactcgactggcttgccgcgcccgctatcgcactcaaatccgcagcaagaaagggctgtggcagctcacctgagccggaatccgtggcccagctcgccagctctgccctggcgccgttgctcccagatgcgccgtccatcgtcccagcttctccaaactttgtctatctacaggaaggagccagcttctttgcccgccctgtctcaccgtgattctaacgcgcccaacctgggcctcgactacggcacccgccccattggcgcgacccgtcgagaatcctccgtgtgacagcaaccaaggacgaaggacaagaagcatctccagatcacccgacactcagcatgcagtcgcactccagcccgccggttcagcccgccggcgcgagctcgtcggcctatccagccatgcccgcatcaccgaccctcacgaacccagatctgatcctgcccgactacgacgatcctgtctcgccagaccgctcgcagtctcccttgatgatgtggaaaaacgcccatgacgcgggcacgcagttcgacctaaactcccagtccttcgtcgccggccctatcacgcccaccacgcccatcatctacggcaatggcaccatgctgtctgacatcggcgaggtcaccgaagtcgaaagcacctgtgcccccacaaggtcgcgctccgcctctacgcgcagcgaatttgcaatcgtcacaagcaccgccttgccctacgaggctatcaagaagaagatcaaggaatccagggctgcccatgagaggcacacgtctatcgactccacaagcaccgttacgaatcataaccaggccgacctctttgccgatttcgacgacagcgtcagcgtcgacgacagcaacttccaaggagacgatgaagacagtgtcgctgactcgtacatcgacgaaacgtccgtgcaggagaccgtatcggccgccaggcccgtgtctcacaacgaggacgatgagagatactcaacgcccttgtcccgtagagccgagcatatcttggccaacgccaagcgtcggttgaataatatggaagggaatctgagtcgagcgcgatccacgctgtattcacccggcctgtcctcgataggctctcaatcgacaccgtctcccaccgtggggcgtcccacgacctcgatcagcacccatgggcacacccgaatctcaagcgagagcaatatcccaactgagaacaaggcaagtgtatctacgcagaggtcctctagcgccttgggtaccgctggagggtaccgtcggccaggccaaaagaacgcgaaaacgaatctgaacaattctgtacacgaggactcttcttactccaaaagtaaaacatccctacacacacgcgagtggcctctcgagccgctcagtgaagacgaggtactcgaagaggaaacgtctaggtccaccagcgaggatgccaaatcagatgtcttcctcactccgactttcggggtctttgcggacaaaaacctgaaacggtcgacctcaaccgctcagatgcgggatttgaaagatcaagtaaatgatctgaaaggcaggttgtccacactgagagaccaagctcgagccgacagcatgaagcgtcgtagcttgcaaagcctgcggaccccgagcccctttacgcatgcccaagtcgaccagtggtatgctgaaaggagcggccacgacgatagtggagaatctacgccacaattaacagatgtgagagaccaggctgtccgagacccctctgaccaaactcccgacgtagagaaagccagtgaagagcacaatgggacgttattggtcgaatctactcgcggagacgataccgcgacatcaaggttccttgcgcctttggatgcatcccatacttcatccgatgtggttttggactctgcgccaattcaggaaaatggcatgatcggtgacacaaacaagagagagacgtttggaccgtttggaaactcgaatggatatatggactcccaagcggatcagtatgatgacggagcaagcgagagcggtgaatctgcatatcatgactcggttcaagcccaggtgtctcatgaagatcgcgaggatgcttttgactatgaacatttcttcttgcatagtgctatggggagcatgagccgaagggcgatgcgtcgaagaggcagtaatgatagcttttcctcggaaggctcagtcgagacaacaaggggacccactgcatctgactccctgaatccagctacaagcagggctagtcgtcactctcggagcggaagtgttggctccacctctacgatagattcgtttgccacggctacagagggacggaacacgagagctggcggacgtacatcttacgatgacttggacatcaacaacagtattccagagcgggccaggacccacacaccctatactgcaagacgaagcgtaatcaccccggatgtgagcgctttgagaccagctccaaaccagacagcgcatgtccttgcccgccgtccccaaagcagcgccgccgtctacaaacaccgcccttctgcaccatcgtacgactcagtgggcacgaacaggagtttccctcttgtcaatcacagagtgcaggccagtggcggtattctaactccgggtggttctccagaccaagacatgaagcgcatatcggaacaactcacgcgagatgttattcccatgtccggccttaatgttgatacagctggacttatgcaaatactgcacaaagacgatcaaatactagtggagcgactcatgggaaccctcagccggtgcatcgcaggattaagcgagtcgggacgagcgagtaccgatcgaagaacgtatcggagaaagatcgaagctgcccatagaatcttggagggtttggaataatcctacacttacaaggcaaatcgttagccacatttggtctatggatttaggatataggcaggatcgagaaacaccctctgattgttaagtattggcgacacattcacaggcttacccttttgtatagtcgatttttatgagcatgaggatcttaatccatggggtatgagacatggcaatccctttcaaattgttactaacttattcgatacccaacatatttatatgtacttagtatttatagacacatattatatatacattttttttgtttcaatttatcattagcccaagttcaccctcgaatttctccaacaccttgatgcaacttgcaagttaatacgatgtgtttcctcgacgagttgagcgtggtcacatgtaccatctggcaccctcattcaaccggcagatgacggcacaacggcgaaattatcaagatatctggcatcgg

SEQ ID NO: 29107 - DNA, 3285 bp, Muscodor strobelii
  misc_feature: SGI cDNA ID NO. 569993
  misc_feature: Encodes the peptide sequence at SEQ ID NO 29108
atggctgaacatttcacacggaatttcatcgcggccggctgtctgattttcaaccattctgcatcggcaccagagctgctttcccggtctcattcgcaggaatggctttacttgctgagaaactctgatgagatacctgccaaccttgccgtgtcaaaggatgtgcagaaaggcatacttgcatcttcaactttcgcgccattttcagctctgtggagccatggatggctgcaagctgcgttctcaccaggcgtgggccggcttagagtttatgtccttccccatgatgtcgatagaagttcaatgatcccgcgaagtgactcgatgaagcttatcaccactctgcttagccagctggaatattcccatgattgttggaatggagccaacgtgtttgtaccacagaactggcctacactacaaaccacccccaccctatctggtgactctgatacgtcactcttggccatctttaataacgttgcctcgcctaaccctcgtccacaaacagagcccgacgagcttcgttatgtaatggagaatttgatggagagtcagatacctggtctcacaactaaactctacccgtatcaaggaagatcggcggctctcatgctgaagcgggagttggcacccggaagagttgtagatcctcggcttcactccgcatgggatcagttgggcaaagtctggtactttgacgacatctcaggatttgtcttgaatgagcccaggctttatgacgctccaaatggtggaatactcgctgaagagatggggacaggaaagacaattatatgccttgccctgatcctcagtactaagtccgaaccatcaaaacctccagagcatttcgttgccgagacacaacctcgtaagcggatagcgagcttgatggacatggctgccgctgtagccaataaagcgtcaatcgcctggaaaccatatttcgaattctacgatgaagccggcttggattaccaaaattgcaagaaggctctagtcagagtcgaaaacagagccatgttcagggcaacaaacactcttgttgaaccgcgtcgaagcaatcggattgttcctcgaccgattccatctaaaatagtatatttgagctgtgtcagcctcatcgttgcccctggcaatcttgtcaagcaatggcaaaacgagattaagaaacacacgattggtttgaatgttcttgtgattgtagctagagatgcgattccctcggtgagcgaacttttgaaatatgatattattcttttctccgacagccgccttgagcggatccaaaaggaacgttcaaatggcgaaggcccacctttggacacatattgttctctagaacacatacaattcaagcgctgcattattgacgagggccacaaacttggcaatggtagtcgagggtggaagaatgatgtgatgcgtgtcatcgatcggtttgagatttccgcaagatgggttgttactggcacgccgtcgcgtggtctctgtaagttatatggcgttcaagcccaggagcttccagacctagaatccacgaacaatgcaagctccttcccattgacagataccgctcttaaacaggaacgagatgatttacagcgcatagggaacctcactgcaaaatatctcaaagttcggccgtgggccaatgccagagatgaaataggtgacagtgttgctgattggaacatatataataggggtgccaatcgtaagaactgcttgattacaaccctgggctccttactggttcgacaccgcctctgcgacgtgagcacacttctcccgcctgtccatgagagggtagttgtcttggacggatcattccaagaccagctctgtctcaatcttttttctatgatgatcattttcaatgcggttcaatcacaaagaactgatatggattatttcttccacgaccggcagaggaaaagtcttcttcagctcgtgaagaacttgaggcaggccagtttttttggcggagttttcttttcttctcaagacatcgtcaaagctgtgaagcttgctagcaagttccttgaggagaagaatgttcccgtttcacccgaagatgagcaatcattacgcgaagccctcgagttcggccggaacgtcatagaaaatcgactcaaggatgtcagcaaccgcttccacgcgctaccggcacgaatagccgaacggtcacagacattagcaaccaattctaataatgaagatggagtagaaatccaggcgccgcagtcttcacaagcgatacatctagcaggatctctagcaggtgttacttcccttggggatgatcgacatacgacgcttaaatccaagaacagtgtcttcgattctgacgtcgagatcaatgacgaatctaccaatctagcgacttccgctatgagcgagatcgaaattgctgagcctctttccgagactgcaattatatctactgcctcggccaagttatcgtacctgattgattcgattgtcaaatatcaagacgacgaacagattctcatattctatgacaatgacaacgttgctttctatctggcggaagctcttgagattcttgatatccaatacctaatctacacgcgagctgggctcaccgccgagcgacgggcacaatatgttgccaccttcactcacaaccccaagtttcgagtgttgttgatggacatcactcaagcagcatttggtcttgacatgaaaactgcctcacgtatctatttcatctcgccagtgctcaacccacaagtggtagcgcaagcaattggaagagcccggagaattagccaacagaagccggtcaccgtcgagacactagtcctgcggaacagcatcgaggaagttgtggtggatcgtcaaaagcacatgacccaagctgagcacagcaaaatcaagaatgttctcgacgatggcaagatcaaagaatggattcgcaacgcgaagatcaaccctttgcccgatagtagggagggactagcacagacagccatgctagcaaccccgcaatatgtctttgggagaagcttcggccgagtctcacatcctgacgatggactgattacaggcagtcctgaaactgagaacagaccaagagcagagcagtcacaacaacctgcgcctattcagtacaaattggatgtccaattgaagagacggcgcagtctcagccacagcgacaatgagaaggcccagaagctagagcatccagacacagagcatcctagccaaaggaaacggcggccacgtatcgcatgggctgatgagcaaacttag

SEQ ID NO: 29108 - protein, 1094 aa, Muscodor strobelii
  misc_feature: SGI Peptide ID NO. 569993
  misc_feature (245)..(666): Pfam Id: PF00176 Pfam Desc: SNF2 family N-terminal domain
  misc_feature (245)..(271): Pfam Id: PF00176 Pfam Desc: SNF2 family N-terminal domain
  misc_feature (9)..(1024): NCBI GI: 256735190 Blast Desc: NECHADRAFT_30723 [Nectria haematococca mpVI 77-13-4]
  misc_feature (1)..(1024): NCBI GI: 171684657 Blast Desc: protein product [Podospora anserina] gi|170942289|emb|CAP67941.1| protein product [Podospora anserina]
  misc_feature (86)..(1032): NCBI GI: 46108188 Blast Desc: FG00976.1 [Gibberella zeae PH-1]
  misc_feature (67)..(1024): NCBI GI: 39975031 Blast Desc: MGG_00338 [Magnaporthe grisea 70-15] gi|145018771|gb|EDK03050.1| MGG_00338 [Magnaporthe grisea 70-15]
  misc_feature (10)..(929): NCBI GI: 116192583 Blast Desc: CHGG_06009 [Chaetomium globosum CBS 148.51] gi|88181922|gb|EAQ89390.1| CHGG_06009 [Chaetomium globosum CBS 148.51]
  misc_feature (113)..(1014): NCBI GI: 85089833 Blast Desc: NCU07358 [Neurospora crassa OR74A] gi|28919457|gb|EAA28895.1| [Neurospora crassa OR74A]
  misc_feature (10)..(1009): NCBI GI: 156034667 Blast Desc: SS1G_13268 [Sclerotinia sclerotiorum 1980] gi|154698672|gb|EDN98410.1| SS1G_13268 [Sclerotinia sclerotiorum 1980]
  misc_feature (66)..(1021): NCBI GI: 261199876 Blast Desc: SNF2 family helicase [Ajellomyces dermatitidis SLH14081] gi|239594547|gb|EEQ77128.1| SNF2 family helicase [Ajellomyces dermatitidis SLH14081]
  misc_feature (66)..(1021): NCBI GI: 239607939 Blast Desc: SNF2 family helicase [Ajellomyces dermatitidis ER-3]
  misc_feature (48)..(1023): NCBI GI: 225559892 Blast Desc: conserved [Ajellomyces capsulatus G186AR] gi|225559942|gb|EEH08224.1| conserved [Ajellomyces capsulatus G186AR]
MAEHFTRNFIAAGCLIFNHSASAPELLSRSHSQEWLYLLRNSDEIPANLAVSKDVQKGILASSTFAPFSALWSHGWLQAAFSPGVGRLRVYVLPHDVDRSSMIPRSDSMKLITTLLSQLEYSHDCWNGANVFVPQNWPTLQTTPTLSGDSDTSLLAIFNNVASPNPRPQTEPDELRYVMENLMESQIPGLTTKLYPYQGRSAALMLKRELAPGRVVDPRLHSAWDQLGKVWYFDDISGFVLNEPRLYDAPNGGILAEEMGTGKTIICLALILSTKSEPSKPPEHFVAETQPRKRIASLMDMAAAVANKASIAWKPYFEFYDEAGLDYQNCKKALVRVENRAMFRATNTLVEPRRSNRIVPRPIPSKIVYLSCVSLIVAPGNLVKQWQNEIKKHTIGLNVLVIVARDAIPSVSELLKYDIILFSDSRLERIQKERSNGEGPPLDTYCSLEHIQFKRCIIDEGHKLGNGSRGWKNDVMRVIDRFEISARWVVTGTPSRGLCKLYGVQAQELPDLESTNNASSFPLTDTALKQERDDLQRIGNLTAKYLKVRPWANARDEIGDSVADWNIYNRGANRKNCLITTLGSLLVRHRLCDVSTLLPPVHERVVVLDGSFQDQLCLNLFSMMIIFNAVQSQRTDMDYFFHDRQRKSLLQLVKNLRQASFFGGVFFSSQDIVKAVKLASKFLEEKNVPVSPEDEQSLREALEFGRNVIENRLKDVSNRFHALPARIAERSQTLATNSNNEDGVEIQAPQSSQAIHLAGSLAGVTSLGDDRHTTLKSKNSVFDSDVEINDESTNLATSAMSEIEIAEPLSETAIISTASAKLSYLIDSIVKYQDDEQILIFYDNDNVAFYLAEALEILDIQYLIYTRAGLTAERRAQYVATFTHNPKFRVLLMDITQAAFGLDMKTASRIYFISPVLNPQVVAQAIGRARRISQQKPVTVETLVLRNSIEEVVVDRQKHMTQAEHSKIKNVLDDGKIKEWIRNAKINPLPDSREGLAQTAMLATPQYVFGRSFGRVSHPDDGLITGSPETENRPRAEQSQQPAPIQYKLDVQLKRRRSLSHSDNEKAQKLEHPDTEHPSQRKRRPRIAWADEQT

SEQ ID NO: 29109 - DNA, 2443 bp, Muscodor strobelii
  misc_feature: SGI EST ID NO. CUFF.68790.0
  misc_feature: Variant of the nucleotide sequence at SEQ ID NO 29107
tgataatctaatattcgtcccgcgaccattcttttctagatgcgtttcatcataataggggccttggtttagaattcatctagtcacaaggcctgatgctcccattttctggtcgaaaatccgacctttagggaggactgaacggcttcctctcaaagccatatgtcgatctcaccgtcctttgcatctccttcgctcattcatgatggctgaacatttcacacggaatttcatcgcggccggctgtctgattttcaaccattctgcatcggcaccagagctgctttcccggtctcattcgcaggaatggctttacttgctgagaaactctgatgagatacctgccaaccttgccgtgtcaaaggatgtgcagaaaggcatacttgcatcttcaactttcgcgccattttcagctctgtggagccatggatggctgcaagctgcgttctcaccaggcgtgggccggcttagagtttatgtccttccccatgatgtcgatagaagttcaatgatcccgcgaagtgactcgatgaagcttatcaccactctgcttagccagctggaatattcccatgattgttggaatggagccaacgtgtttgtaccacagaactggcctacactacaaaccacccccaccctatctggtgactctgatacgtcactcttggccatctttaataacgttgcctcgcctaaccctcgtccacaaacagagcccgacgagcttcgttatgtaatggagaatttgatggagagtcagatacctggtctcacaactaaactctacccgtatcaaggaagatcggcggctctcatgctgaagcgggagttggcacccggaagagttgtagatcctcggcttcactccgcatgggatcagttgggcaaagtctggtactttgacgacatctcaggatttgtcttgaatgagcccaggctttatgacgctccaaatggtggaatactcgctgaagagatggggacaggaaagacaattatatgccttgccctgatcctcagtactaagtccgaaccatcaaaacctccagagcatttcgttgccgagacacaacctcgtaagcggatagcgagcttgatggacatggctgccgctgtagccaataaagcgtcaatcgcctggaaaccatatttcgaattctacgatgaagccggcttggattaccaaaattgcaagaaggctctagtcagagtcgaaaacagagccatgttcagggcaacaaacactcttgttgaaccgcgtcgaagcaatcggattgttcctcgaccgattccatctaaaatagtatatttgagctgtgtcagcctcatcgttgcccctggcaatcttgtcaagcaatggcaaaacgagattaagaaacacacgattggtttgaatgttcttgtgattgtagctagagatgcgattccctcggtgagcgaacttttgaaatatgatattattcttttctccgacagccgccttgagcggatccaaaaggaacgttcaaatggcgaaggcccacctttggacacatattgttctctagaacacatacaattcaagcgctgcattattgacgagggccacaaacttggcaatggtagtcgagggtggaagaatgatgtgatgcgtgtcatcgatcggtttgagatttccgcaagatgggttgttactggcacgccgtcgcgtggtctctgtaagttatgtccgccagtcatcagagtctcatctttgtatcaaaaacaaggctctgtgtagtgaattggggaaatagctaatgcggcacttttctgggtactagatggcgttcaagcccaggagcttccagacctagaatccacgaacaatgcaagctccttcccattgacagataccgctcttaaacaggaacgagatgatttacagcgcatagggaacctcactgcaaaatatctcaaagttcggccgtgggccaatgccagagatgaaataggtgacagtgttgctgattggaacatatataataggggtgccaatcgtaagaactgcttgattacaaccctgggctccttactggttcgacaccgcctctgcgacgtgagcacacttctcccgcctgtccatgagagggtagttgtcttggacggatcattccaagaccagctctgtctcaatcttttttctatgatgatcattttcaatgcggttcaatcacaaagaactgatatggattatttcttccacgaccggcagaggaaaagtcttcttcagctcgtgaagaacttgaggcaggccagtttttttggcggagttttcttttcttctcaagacatcgtcaaagctgtgaagcttgctagcaagttccttgaggagaagaatgttcccgtttcacccgaagatgagcaatcattacgcgaagccctcgagttcggccggaacgtcatagaaaatcgactcaag

SEQ ID NO: 29110 - DNA, 1587 bp, Muscodor strobelii
  misc_feature: SGI cDNA ID NO. 569994
  misc_feature: Encodes the peptide sequence at SEQ ID NO 29111
atgagagatttgtgttccatcgccgtttctgcgaagagattacaccaggcggcacggaaagcattatacgaagatatccagctcgtgggggccgattcacaaacacagaagaaacggctgaggctctctttcggttcccgccttatccttctccggcgaactctgaggtctcggcctgatattgcagtccttgtccgcagcttgaaggtgcctgctgttccacagggagtccccaccgacacgtaccaaaacctcgtggcatcggtcatcatggcatgcccgaatttcgaaagattgctcggatttcatcaaaattacgacttctcgtttagtcgtctcttctacgcgctgtcgacccgagaacaactgagggaaatccattggacattggaagcatcgaaattccaaagcacgcgtcgaatgtccaatgcagcacccatgttaaattcggggaacccaaactatcgggaggcaccaggagacttacggcctgagcagagtgatggctttcttgagcttcattcgaactgggccaatctaacgactttgtctatccactgtctcgcgggcgccactttgacaccagtctcacttttacctgacatattagcagacataccgtcgcttcgacatctgcatttatcacacctcccgttcacatcattcaatgatgcgaatctcctatcgcttcctccattacgaactatcacactctcacatcttcccggtatatccagcgaagggctctcatcttttgctagacgaccgtcaagtagaaccatcaggagactcaccttggatcatgccgacatagattcattagctacaatcagtctgatcctctccaatctggttgtccttgagacattcacacttgtacaggctcgtattcccatactgccacacgacgagatggtctggttgttcccctaccttgcctcgtcgacggtcaggaagttgcattgggacatcccacctatcggttctggggccaatgttgcagattccatcttggctaaaagcatcacgaccaacggctttccagccctccgcaccttacgcacgccgtccgatcccgatggcatttttcaggcactctgtaagccagttgaaaaaatcgacatggcaagcgacaagtatcgggggcttatcgcaaaggcagggtcgcgtcccaagagcccgcccgcgacaccgacgactcctacaaccccccggactcccgggaagtcgccgtatgcactaagcttccccatggaagataacctattcccatctacaatgtctagcaatctggcgcagtcccgtctcgaggcacagcagcggctagaggcagcacgtaacgatcctcggttcacattcaatctggtaggcgatcgcggaaggttgctcgaaacgaagaagatggccgggtttgcgggtgaaatcgggtcacgaattgactatagtcttgtacctgacgtaggtggtacggacgaaaatggtggacttatccacgtagcggactacctgggtgacgggggcgagaacctgaagagtggtaatcgcgaaggctgcacgggacgttggaatcgtactcgggtgctgtga

SEQ ID NO: 29111 - protein, 528 aa, Muscodor strobelii
  misc_feature: SGI Peptide ID NO. 569994
  misc_feature (1)..(523): NCBI GI: 256735189 Blast Desc: NECHADRAFT_32121 [Nectria haematococca mpVI 77-13-4]
  misc_feature (1)..(523): NCBI GI: 46108186 Blast Desc: FG00975.1 [Gibberella zeae PH-1]
  misc_feature (9)..(523): NCBI GI: 261356270 Blast Desc: conserved [Verticillium albo-atrum VaMs.102]
  misc_feature (1)..(510): NCBI GI: 85089835 Blast Desc: NCU07359 [Neurospora crassa OR74A] gi|28919458|gb|EAA28896.1| NCU07359 [Neurospora crassa OR74A]
  misc_feature (1)..(382): NCBI GI: 171684659 Blast Desc: protein product [Podospora anserina] gi|170942290|emb|CAP67942.1| protein product [Podospora anserina]
  misc_feature (1)..(523): NCBI GI: 156052677 Blast Desc: SS1G_06505 [Sclerotinia sclerotiorum 1980] gi|154704284|gb|EDO04023.1| SS1G_06505 [Sclerotinia sclerotiorum 1980]
  misc_feature (1)..(523): NCBI GI: 154314905 Blast Desc: BC1G_04794 [Botryotinia fuckeliana B05.10] gi|150848332|gb|EDN23525.1| BC1G_04794 [Botryotinia fuckeliana B05.10]
  misc_feature (2)..(497): NCBI GI: 119496555 Blast Desc: conserved [Neosartorya fischeri NRRL 181] gi|119413213|gb|EAW23154.1| conserved [Neosartorya fischeri NRRL 181]
  misc_feature (2)..(497): NCBI GI: 159130839 Blast Desc: conserved [Aspergillus fumigatus A1163]
  misc_feature (2)..(497): NCBI GI: 146322493 Blast Desc: conserved [Aspergillus fumigatus Af293] gi|129557044|gb|EAL88327.2| conserved [Aspergillus fumigatus Af293]
MRDLCSIAVSAKRLHQAARKALYEDIQLVGADSQTQKKRLRLSFGSRLILLRRTLRSRPDIAVLVRSLKVPAVPQGVPTDTYQNLVASVIMACPNFERLLGFHQNYDFSFSRLFYALSTREQLREIHWTLEASKFQSTRRMSNAAPMLNSGNPNYREAPGDLRPEQSDGFLELHSNWANLTTLSIHCLAGATLTPVSLLPDILADIPSLRHLHLSHLPFTSFNDANLLSLPPLRTITLSHLPGISSEGLSSFARRPSSRTIRRLTLDHADIDSLATISLILSNLVVLETFTLVQARIPILPHDEMVWLFPYLASSTVRKLHWDIPPIGSGANVADSILAKSITTNGFPALRTLRTPSDPDGIFQALCKPVEKIDMASDKYRGLIAKAGSRPKSPPATPTTPTTPRTPGKSPYALSFPMEDNLFPSTMSSNLAQSRLEAQQRLEAARNDPRFTFNLVGDRGRLLETKKMAGFAGEIGSRIDYSLVPDVGGTDENGGLIHVADYLGDGGENLKSGNREGCTGRWNRTRVL

SEQ ID NO: 29112 - DNA, 2914 bp, Muscodor strobelii
  misc_feature: SGI EST ID NO. CUFF.68808.0
  misc_feature: Variant of the nucleotide sequence at SEQ ID NO 29110
ctgctggcgcgcggcaagttctggtccgttcgtcaccaagctccgctcattaataataagaaagatgatcgttgatatcgggaattggagagcaacgtcgcctccagctgccagggctctccgatgtacctacctagcgagcactggcccttcaatccctagccctgtaccatttattgatcctctttgtagttcctacggttcgatttcccataatcaaggtctccttttcgaattacatgtaaactcataaacttcgattcttacaatcaaatagaacccatccatctaccgttaggtttcgttcgtggcacgagcctaccttgttagatcacgagtttcccgctaatgccggtgtctacgctggagaacgtttctatgatccaattctcgccagacctcagctggaatctcatcggtcgcataagttgcgacacgcgaacaagatggatcgtccgatttttggagcagcggacatgatggccggtccccaaccgctacagcgaccaaccagaatgccctcggcttccagctatgcgcatattgatgctcagtctacgctctaccaacggcgaccttctaacagctctagcatgatgagctcagtccgggtcaatgatagcttcgatgcaattcttgcctctcctgccagtagtcggactagctttgaatcgtatcattcagctccgcgcaaagaatatggatggcaacggcccgcaccgattaagcagtacaggcgaagaagagaggaaggcgaattgttcacgctccttcccgacgaaatactggacatcattttggaaagactgaaacaatcacacctaaaccctggaagcacaagctgcgcgacttgcatgatgagagatttgtgttccatcgccgtttctgcgaagagattacaccaggcggcacggaaagcattatacgaagatatccagctcgtgggggccgattcacaaacacagaagaaacggctgaggctctctttcggttcccgccttatccttctccggcgaactctgaggtctcggcctgatattgcagtccttgtccgcagcttgaaggtgcctgctgttccacagggagtccccaccgacacgtaccaaaacctcgtggcatcggtcatcatggcatgcccgaatttcgaaagattgctcggatttcatcaaaattacgacttctcgtttagtcgtctcttctacgcgctgtcgacccgagaacaactgagggaaatccattggacattggaagcatcgaaattccaaagcacgcgtcgaatgtccaatgcagcacccatgttaaattcggggaacccaaactatcgggaggcaccaggagacttacggcctgagcagagtgatggctttcttgagcttcattcgaactgggccaatctaacgactttgtctatccactgtctcgcgggcgccactttgacaccagtctcacttttacctgacatattagcagacataccgtcgcttcgacatctgcatttatcacacctcccgttcacatcattcaatgatgcgaatctcctatcgcttcctccattacgaactatcacactctcacatcttcccggtatatccagcgaagggctctcatcttttgctagacgaccgtcaagtagaaccatcaggagactcaccttggatcatgccgacatagattcattagctacaatcagtctgatcctctccaatctggttgtccttgagacattcacacttgtacaggctcgtattcccatactgccacacgacgagatggtctggttgttcccctaccttgcctcgtcgacggtcaggaagttgcattgggacatcccacctatcggttctggggccaatgttgcagattccatcttggctaaaagcatcacgaccaacggctttccagccctccgcaccttacgcacgccgtccgatcccgatggcatttttcaggcactctgtaagccagttgaaaaaatcgacatggcaagcgacaagtatcgggggcttatcgcaaaggcagggtcgcgtcccaagagcccgcccgcgacaccgacgactcctacaaccccccggactcccgggaagtcgccgtatgcactaagcttccccatggaagataacctattcccatctacaatgtctagcaatctggcgcagtcccgtctcgaggcacagcagcggctagaggcagcacgtaacgatcctcggttcacattcaatctggtaggcgatcgcggaaggttgctcgaaacgaagaagatggccgggtttgcgggtgaaatcgggtcacgaattgactatagtcttgtacctgacgtaggtggtacggacgaaaatggtggacttatccacgtagcggactacctgggtgacgggggcgagaacctgaagagtggtaatcgcgaaggctgcacgggacgttggaatcgtactcgggtgctgtgattgacaagaaagatcgcgagcgctggtggcatactgagagggggagatggagggccatcgaactctgaatgagaaattgtatatgacacatgcgagtagctaacacatattatgacaaagacgcatgcctctagaagggtgccttatgtgcacgagaggccgttgttgttggtcgatgagctggggaacttcctagtctcgcaaactcccggtgtaaatgatacgagacgcttggaccatgaaacatagactcctttcttgatactgtgctttgtcggtcttgaagtcgttctctcttgggtgtacgctgtagtccgttcttttaggaaacatttattgccccgtgaggctgcctgtcgcatacctaactagctagaggaatgcttggtagttcatcctacatgatactagagtcctcactgtagacaccaccttgtttcaaaaagtaaacgtgaagttaaggttgtttt

SEQ ID NO: 29113 - DNA, 795 bp, Muscodor strobelii
  misc_feature: SGI cDNA ID NO. 569995
  misc_feature: Reduced expression when VOC is produced
  misc_feature: Encodes the peptide sequence at SEQ ID NO 29114
atgcgtttgtctataattacgacacaaagcgctcgcatttgcgccaactgccgaccacggtgcgtcgacgccacgcgcgctgtattttccacgtcttctcaggcgcatggcatcccgacaccgaagcctcagacccaatcctgccataccagcacgagaatatcaggctctacgaggcaattcacaaacagtgcgagccggcgcgcacggccagcgccgccgtcaccacaggcgagccatgagcccaaggcgcccatgccgcagacgcactacgacttcttccccaagaccctgcccgacggccctccaccgaaaggagccttcgccatggacgtccggacgctccggcgtgagtttctggcgctgcaggctggtgcgcatcccgatcttcacccgcagcacatgaaagcgcgggcggaagcgacatcggcgcgcatcaacgaggcattcaagacgctcgagagccccttgctccgagcccagtacctgctttctctgcggggcctcgacgtggccaacgacgagacagccaaggtggaagacccggagctgctcatgttggtgttggagacacgggaggttatcgaggaagcgttggaagaaggggacctggaagggccgaggatagaaaatgaagagaggataaaggagacggagaagacactagcggccatgttcgaggttgatgatctagagggggctaaggcagaggtcgtcaggctaagatactgggtgaacatccgagagagcattcggaattgggagaaggggaagccgattgtgcttgagcattag

SEQ ID NO: 29114 - protein, 264 aa, Muscodor strobelii
  misc_feature: SGI Peptide ID NO. 569995
  misc_feature (89)..(163): Pfam Id: PF00226 Pfam Desc: DnaJ domain
  misc_feature (179)..(253): Pfam Id: PF07743 Pfam Desc: HSCB C-terminal oligomerisation domain
  misc_feature (127)..(163): Pfam Id: PF00226 Pfam Desc: DnaJ domain
  misc_feature (38)..(264): NCBI GI: 62953162 Blast Desc: chaperone [Gibberella fujikuroi]
  misc_feature (90)..(264): NCBI GI: 46108292 Blast Desc: FG01028.1 [Gibberella zeae PH-1]
  misc_feature (46)..(264): NCBI GI: 156062630 Blast Desc: SS1G_01431 [Sclerotinia sclerotiorum 1980] gi|154696767|gb|EDN96505.1| SS1G_01431 [Sclerotinia sclerotiorum 1980]
  misc_feature (10)..(264): NCBI GI: 154308852 Blast Desc: BC1G_07954 [Botryotinia fuckeliana B05.10] gi|150852580|gb|EDN27772.1| BC1G_07954 [Botryotinia fuckeliana B05.10]
  misc_feature (89)..(260): NCBI GI: 256735166 Blast Desc: NECHADRAFT_74727 [Nectria haematococca mpVI 77-13-4]
  misc_feature (87)..(241): NCBI GI: 169602247 Blast Desc: SNOG_04121 [Phaeosphaeria nodorum SN15] gi|160706128|gb|EAT87881.2| SNOG_04121 [Phaeosphaeria nodorum SN15]
  misc_feature (89)..(251): NCBI GI: 189203375 Blast Desc: co-chaperone protein HscB, mitochondrial precursor [Pyrenophora tritici-repentis Pt-1C-BFP] gi|187985122|gb|EDU50610.1| co-chaperone protein HscB, precursor
  misc_feature (64)..(257): NCBI GI: 119195643 Blast Desc: CIMG_02196 [Coccidioides immitis RS]
  misc_feature (10)..(264): NCBI GI: 171684661 Blast Desc: protein product [Podospora anserina] gi|170942291|emb|CAP67943.1| protein product [Podospora anserina]
  misc_feature (42)..(257): NCBI GI: 240110442 Blast Desc: DnaJ domain containing protein [Coccidioides posadasii C735 delta SOWgp]
  misc_feature: Useful for introducing or modulating the production of volatile compounds
MRLSIITTQSARICANCRPRCVDATRAVFSTSSQAHGIPTPKPQTQSCHTSTRISGSTRQFTNSASRRARPAPPSPQASHEPKAPMPQTHYDFFPKTLPDGPPPKGAFAMDVRTLRREFLALQAGAHPDLHPQHMKARAEATSARINEAFKTLESPLLRAQYLLSLRGLDVANDETAKVEDPELLMLVLETREVIEEALEEGDLEGPRIENEERIKETEKTLAAMFEVDDLEGAKAEVVRLRYWVNIRESIRNWEKGKPIVLEH

SEQ ID NO: 29115 - DNA, 1261 bp, Muscodor strobelii
  misc_feature: SGI EST ID NO. CUFF.68811.0
  misc_feature: Variant of the nucleotide sequence at SEQ ID NO 29113
cgggcttccgatacatcattctactcctctgtgcctcgtgattgtgcgcagttgggttatattcatcggattgagtcgatcgcaaaaccaaagatgcgtttgtctataattacgacacaaagcgctcgcatttgcgccaactgccgaccacggtgcgtcgacgccacgcgcgctgtattttccacgtcttctcaggcgcatggcatcccgacaccgaagcctcagacccaatcctgccataccagcacgagaatatcaggctctacgaggcaattcacaaacagtgcgagccggcgcgcacggccagcgccgccgtcaccacaggcgagccatgagcccaaggcgcccatgccgcagacgcactacgacttcttccccaagaccctgcccgacggccctccaccgaaaggagccttcgccatggacgtccggacgctccggcgtgagtttctggcgctgcaggctggtgcgcatcccgatcttcacccgcagcacatgaaagcgcgggcggaagcgacatcggcgcgcatcaacgaggcattcaagacgctcgagagccccttgctccgagcccagtacctgctttctctgcggggcctcgacgtggccaacgacgagacagccaaggtggaagacccggagctgctcatgttggtgttggagacacgggaggttatcgaggaagcgttggaagaaggggacctggaagggccgaggatagaaaatgaagagaggataaaggagacggagaagacactagcggccatgttcgaggttgatgatctagagggggctaaggcagaggtcgtcaggctaagatactgggtgaacatccgagagagcattcggaattgggagaaggggaagccgattgtgcttgagcattagacgtgcacggcaagaggtcggactgtacaatgttggttatactatcgggatattcgaattagacttggtggcaacatagatagatgtacgatacatgggttggatatagaagatagtgtttccgggacaggatgcttttatcgtcctgttatcctagagcttctacgtgaagacagccatcaggattactagatgaaggcatcacatatgatatctaggtacataacgactggctcgtctcgctcgtctctaccattgcgacggatgcctaccttagtttatgttggtgagcacttgatacgctggagtgaaaatagtagatgtgatactaggtggtgcaagctcgaatgcaattgcgtttcttctctccccg

SEQ ID NO: 29116 - DNA, 681 bp, Muscodor strobelii
  misc_feature: SGI cDNA ID NO. 569996
  misc_feature: Reduced expression when VOC is produced
  misc_feature: Encodes the peptide sequence at SEQ ID NO 29117
atggccagcccaacgatcagccagctgctggcggagctcaagacgaaaggcgccgacgagcaggaggccgccttggaccgcctcgtcgtcgaagcgcagtccagccggtcgccgccatccctcaaggccgtggccgacgccgtcttctccaacggcctccgcatcgtcgcccagcgcagcctcgtcgtcgccctcatcgccggcctcaaggccgccaagaagaacccgagcctccagctcgacgtcggccagcacctcctcgccctgctcgcctcgcagcagcagtcggccaccttcctcgacctggacgcggacctgcgcgaggtgctggcgggcgcgcacgaggagaacggcgacaacgacgaggcggtcaaggtgctcgtcgccatcaacctcgactcggcgcagcgcaacgtctccaacgacaagcgcgtcgagatctgggtccgcatcgtccgcaactgcctcgaggccgacgacaccaccgccgccgaggtctacctcaacaagctcaagaacatcatctacaccgtctccagcccggagctgaacctgcacttccgcctgtcccaggcccgcatccaggacgccacccgcgacttcctcgccgccagccaggcctaccacagcatctccctctccgccgtcgtcgacgacaccgaccgcctgctcaccctcgcc

SEQ ID NO: 29117 - protein, 227 aa, Muscodor strobelii
  misc_feature: SGI Peptide ID NO. 569996
  misc_feature (6)..(227): NCBI GI: 156062638 Blast Desc: SS1G_01435 [Sclerotinia sclerotiorum 1980] gi|154696771|gb|EDN96509.1| SS1G_01435 [Sclerotinia sclerotiorum 1980]
  misc_feature (1)..(227): NCBI GI: 154308858 Blast Desc: BC1G_07957 [Botryotinia fuckeliana B05.10] gi|150852583|gb|EDN27775.1| BC1G_07957 [Botryotinia fuckeliana B05.10]
  misc_feature (41)..(227): NCBI GI: 46107480 Blast Desc: FG00623.1 [Gibberella zeae PH-1]
  misc_feature (28)..(227): NCBI GI: 256735191 Blast Desc: [Nectria haematococca mpVI 77-13-4]
  misc_feature (1)..(227): NCBI GI: 39975035 Blast Desc: MGG_00336 [Magnaporthe grisea 70-15] gi|145018778|gb|EDK03057.1| MGG_00336 [Magnaporthe grisea 70-15]
  misc_feature (1)..(227): NCBI GI: 85089839 Blast Desc: NCU07361 [Neurospora crassa OR74A] gi|74614642|sp|Q7S0P8.1|CSN4_NEUCR RecName: Full=COP9 signalosome complex subunit 4; Short=Signalosome subunit 4 NCU07361 crassa
  misc_feature (1)..(227): NCBI GI: 145253016 Blast Desc: An16g07210 [Aspergillus niger] gi|134083579|emb|CAL00494.1| protein product [Aspergillus niger]
  misc_feature (1)..(227): NCBI GI: 171684667 Blast Desc: protein product [Podospora anserina] gi|170942294|emb|CAP67946.1| protein product [Podospora anserina]
  misc_feature (1)..(227): NCBI GI: 121719916 Blast Desc: COP9 signalosome subunit 4 (CsnD), [Aspergillus clavatus NRRL 1] gi|119404868|gb|EAW15230.1| COP9 signalosome subunit 4 (CsnD), [Aspergillus clavatus NRRL 1]
  misc_feature (1)..(227): NCBI GI: 70983650 Blast Desc: COP9 signalosome subunit CsnD [Aspergillus fumigatus Af293] gi|66844978|gb|EAL85314.1| COP9 signalosome subunit CsnD [Aspergillus fumigatus Af293] gi|159123643|gb|EDP48762.1| COP9 4
  misc_feature: Useful for introducing or modulating the production of volatile compounds
MASPTISQLLAELKTKGADEQEAALDRLVVEAQSSRSPPSLKAVADAVFSNGLRIVAQRSLVVALIAGLKAAKKNPSLQLDVGQHLLALLASQQQSATFLDLDADLREVLAGAHEENGDNDEAVKVLVAINLDSAQRNVSNDKRVEIWVRIVRNCLEADDTTAAEVYLNKLKNIIYTVSSPELNLHFRLSQARIQDATRDFLAASQAYHSISLSAVVDDTDRLLTLA

SEQ ID NO: 29118 - DNA, 851 bp, Muscodor strobelii
  misc_feature: SGI EST ID NO. CUFF.68814.0
  misc_feature: Variant of the nucleotide sequence at SEQ ID NO 29116
ccatgacctccgtctcatcttgccagcttcccagctagctccccactacctacactttcgacccgtcgacctcgggcactgctctactccaagacaaccacgacatcgagggcaatcaacacccgcggcattcagcacactccttgacacagaccgaccccctcgatgcttggacgctgagccatggccagcccaacgatcagccagctgctggcggagctcaagacgaaaggcgccgacgagcaggaggccgccttggaccgcctcgtcgtcgaagcgcagtccagccggtcgccgccatccctcaaggccgtggccgacgccgtcttctccaacggcctccgcatcgtcgcccagcgcagcctcgtcgtcgccctcatcgccggcctcaaggccgccaagaagaacccgagcctccagctcgacgtcggccagcacctcctcgccctgctcgcctcgcagcagcagtcggccaccttcctcgacctggacgcggacctgcgcgaggtgctggcgggcgcgcacgaggagaacggcgacaacgacgaggcggtcaaggtgctcgtcgccatcaacctcgactcggcgcagcgcaacgtctccaacgacaagcgcgtcgagatctgggtccgcatcgtccgcaactgcctcgaggccgacgacaccaccgccgccgaggtctacctcaacaagctcaagaacatcatctacaccgtctccagcccggagctgaacctgcacttccgcctgtcccaggcccgcatccaggacgccacccgcgacttcctcgccgccagccaggcctaccacagcatctccctctccgccgtcgtcgacgacaccgaccgcct

SEQ ID NO: 29119 - DNA, 1029 bp, Muscodor strobelii
  misc_feature: SGI cDNA ID NO. 569997
  misc_feature: Encodes the peptide sequence at SEQ ID NO 29120
atggggccctcttctggatcagacgacaagatcgagcgtctccacactcacgatctcgaactaggcgccacagaggccgtgcagcagcactacgcgcgacacgtcatcgagaggaagccggtcacgcaacgaaggcttgatttcgagcaccgccggccgagatggctgagagaaatgctgggtgaaggcatcggcgtcttcttctacgtctttcccggtctcgcttccaccgccgccttgatcttaaacttgcaaagcccagtcggtgtcactgccttcagtagtttcttccagatcggtttggcctacgccatcggtatcgcttttgccatcatcgtcgccgcaccctcatccggcggccacttcagtccggctgttaccatttctttcgcgatctggcaaggttttccctggaagaaggttccttactacattttcagtcaagtctttgggtcattcctggctggtgttttggtgatgggcatgtatcgaccccagatcgccgcgtacgaggcggagctgctagcagcaggagcaccactcgtctctagtaccgggcccgcgggcatattcatatcgctgcccgccgaaacggagacaaaccttggcttcattgtcctcaccgagttcttcgtctgtagcttcctcgccattctcatctgggcctgcctagatcgcggcaaccccttcatcgcagcgtcttccgctccattcgttatcggcttgggctacgctgtcagcatatggggtttcgctggagtcactatcagtctaaacacagccaaggagttaggttgtctctttgctgcggctatatggtacaagggcgaggcattctcgtatatgacttatgcgcctattggtattctggtcaatattccggccactatctttggtacagcgatatacgagtttgtgctgagagatagcgtcagtgtcattggagcgggcggtgcactgcacgaggacggcgaagagggtttgaagaggcacattagtcgtcctggagtcctaggagaccggcattga

SEQ ID NO: 29120 - protein, 342 aa, Muscodor strobelii
  misc_feature: SGI Peptide ID NO. 569997
  misc_feature (49)..(284): Pfam Id: PF00230 Pfam Desc: Major intrinsic protein
  misc_feature (49)..(165): Pfam Id: PF00230 Pfam Desc: Major intrinsic protein
  misc_feature (4)..(342): NCBI GI: 242795448 Blast Desc: glycerol uptake facilitator, [Talaromyces stipitatus ATCC 10500] gi|218719180|gb|EED18600.1| glycerol uptake facilitator, [Talaromyces stipitatus ATCC 10500]
  misc_feature (4)..(342): NCBI GI: 212536352 Blast Desc: aquaporin transporter, [Penicillium marneffei ATCC 18224] gi|210070731|gb|EEA24821.1| aquaporin transporter, [Penicillium marneffei ATCC 18224]
  misc_feature (7)..(338): NCBI GI: 154311873 Blast Desc: BC1G_05970 [Botryotinia fuckeliana B05.10] gi|150850620|gb|EDN25813.1| BC1G_05970 [Botryotinia fuckeliana B05.10]
  misc_feature (7)..(339): NCBI GI: 156060529 Blast Desc: SS1G_02403 [Sclerotinia sclerotiorum 1980] gi|154699811|gb|EDN99549.1| SS1G_02403 [Sclerotinia sclerotiorum 1980]
  misc_feature (20)..(342): NCBI GI: 261361250 Blast Desc: aquaporin-9 [Verticillium albo-atrum VaMs.102]
  misc_feature (15)..(342): NCBI GI: 145603699 Blast Desc: MGG_05880 [Magnaporthe grisea 70-15] gi|145011874|gb|EDJ96530.1| MGG_05880 [Magnaporthe grisea 70-15]
  misc_feature (34)..(342): NCBI GI: 170109444 Blast Desc: [Laccaria bicolor S238N-H82] gi|164639200|gb|EDR03473.1| [Laccaria bicolor S238N-H82]
  misc_feature (4)..(330): NCBI GI: 71009825 Blast Desc: UM02169.1 [Ustilago maydis 521] gi|46098058|gb|EAK83291.1| UM02169.1 [Ustilago maydis 521]
  misc_feature (97)..(310): NCBI GI: 170099029 Blast Desc: [Laccaria bicolor S238N-H82] gi|164644258|gb|EDR08508.1| [Laccaria bicolor S238N-H82]
  misc_feature (24)..(309): NCBI GI: 169862326 Blast Desc: CC1G_11437 [Coprinopsis cinerea okayama7#130] gi|116501104|gb|EAU83999.1| CC1G_11437 [Coprinopsis cinerea okayama7#130]
MGPSSGSDDKIERLHTHDLELGATEAVQQHYARHVIERKPVTQRRLDFEHRRPRWLREMLGEGIGVFFYVFPGLASTAALILNLQSPVGVTAFSSFFQIGLAYAIGIAFAIIVAAPSSGGHFSPAVTISFAIWQGFPWKKVPYYIFSQVFGSFLAGVLVMGMYRPQIAAYEAELLAAGAPLVSSTGPAGIFISLPAETETNLGFIVLTEFFVCSFLAILIWACLDRGNPFIAASSAPFVIGLGYAVSIWGFAGVTISLNTAKELGCLFAAAIWYKGEAFSYMTYAPIGILVNIPATIFGTAIYEFVLRDSVSVIGAGGALHEDGEEGLKRHISRPGVLGDRH

SEQ ID NO: 29121 - DNA, 1526 bp, Muscodor strobelii
  misc_feature: SGI EST ID NO. CUFF.68818.0
  misc_feature: Variant of the nucleotide sequence at SEQ ID NO 29119
gcaaaacttgcctctcgtcgttgaccccggcctccccgggtccgcacatgtactacgtcaagactatacaacataataaaaggatgtgtcctcgcctgtattatttttcgccgcttgtcatctctcctccgggctgagcactctcacgacaatccagagacagactactagatatcatcgtcatcatggggccctcttctggatcagacgacaagatcgagcgtctccacactcacgatctcgaactaggcgccacagaggccgtgcagcagcactacgcgcgacacgtcatcgagaggaagccggtcacgcaacgaaggcttgatttcgagcaccgccggccgagatggctgagagaaatgctgggtgaaggcatcggcgtcttcttctacgtctttcccggtctcgcttccaccgccgccttgatcttaaacttgcaaagcccagtcggtgtcactgccttcagtagtttcttccagatcggtttggcctacgccatcggtatcgcttttgccatcatcgtcgccgcaccctcatccggcggccacttcagtccggctgttaccatttctttcgcgatctggcaaggttttccctggaagaaggttccttactacattttcagtcaagtctttgggtcattcctggctggtgttttggtgatgggcatgtatcgaccccagatcgccgcgtacgaggcggagctgctagcagcaggagcaccactcgtctctagtaccgggcccgcgggcatattcatatcgctgcccgccgaaacggagacaaaccttggcttcattgtcctcaccgagttcttcgtctgtagcttcctcgccattctcatctgggcctgcctagatcgcggcaaccccttcatcgcagcgtcttccgctccattcgttatcggcttgggctacgctgtcagcatatggggtttcgctggagtcactatcagtctaaacacagccaaggagttaggttgtctctttgctgcggctatatggtacaagggcgaggcattctcgtatatgacttatgcgcctattggtattctggtcaatattccggccactatctttggtacagcgatatacgagtttgtgctgagagatagcgtcagtgtcattggagcgggcggtgcactgcacgaggacggcgaagagggtttgaagaggcacattagtcgtcctggagtcctaggagaccggcattgaaatgtctagaaagcactgtcgactaggaattgacggtgtgactaacgcggtgctgtgtgacataggcatatgagaaatgtcaagaatggctaggcattgataaacagactacattactaaactccagataccaattcggtttgctgcgaaccctgtgtgcttccacctatgtcgatgggatgctccaagtcgaatgcttgccaactcgcatattgttaaagcaactacgcactggcagactcacgatacttcgcactagacgagtcgacctaagctcaatgaactaactacctacagtttacgcgtttgctg

SEQ ID NO: 29122 - DNA, 1392 bp, Muscodor strobelii
  misc_feature: SGI cDNA ID NO. 569998
  misc_feature: Encodes the peptide sequence at SEQ ID NO 29123
atgttcaccctcctcgccatcctcgccgtcttcctgctgctgctgctcctccccatcatgagcaagcccgagcagcaggcgtgtctcgccatgctggtctttgtgagtctgctgtgggcgaccgaggctatcccccttttcgtgacctctctcttgatccccttcctctgtgtgctgctgaatgtcgtgcgctccgagcagccgccctaccggaggctgagctccaaggaggccaccaactatgtcttttcggccatgtggacgcccgtcatcatgcttctcctgggtggcttcaccgtggccgcggccttgtctaagtgcaagatcgacaagcgtatcgccaccttcgtcctcagcaaggccggcacccgcccgcggaccgtccttgtcgccaacatgttcgtcgccgcctttgccagtatgctcgtcagtaacgtggctgctccggtcctctgctttagcatcattgaaccgatgctccgcaacttgccctccgactccaacatgtccaaagctgtcatcatgggcatcgccctggcctccaacgtgggtggcatgctgtcccccatcgcttcgccacagaacgtcgtggcgctcggcatcatggagcccgcacccacctgggggcagtggttcttcatcgtcatccccgtcggcattgtgtccttgtttctcatctggattctcctcctcatgacattccagcctggcaagggcaccaccatcgtacccattcgctctgttaaggaggagttcacgggtctgcaatggtttgtctccgtcgtctgtgtcgtcaccatcggtctctggtgcgccagtcacgcactcgagtccacctttggccacatgggtgtcatcgccatccttcccatcgtcatcttcttcggtgtcggtattctgaccaaggaagacttcaataacttcccctggaccatcatcatcttggccgccggtggtctggcgctgggcaaagctgtcgagtcttcaggcctgctccacaccgtggccgagaagatctcggccgaagtacatgacctcgatctgtacgtcgttctcctcatcttctcgagcttggctctcgtcattgcaacctttatcagccacaccgtggccgcgctgattatcctaccgctcgtatacgatatcggaaaggcgatggaggagccccacccgaatctgctcgtcatggctgctactcttatgtgcagtgcggctatggctctcccaacgagtggtttccccaatatgacggcgatcatgaaggaagatgccactggccaacgctatctctccgtcaagcactttatcagccggggtgttcccagtagtgtcctcactctctgtgttgttgtaactattgggtatggcgctatgcgtgtcattggaatgtag

SEQ ID NO: 29123 - protein, 463 aa, Muscodor strobelii
  misc_feature: SGI Peptide ID NO. 569998
  misc_feature (1)..(462): Pfam Id: PF00939 Pfam Desc: Sodium:sulfate symporter transmembrane region
  misc_feature (1)..(463): NCBI GI: 261354514 Blast Desc: inorganic phosphate transporter PHO87 [Verticillium albo-atrum VaMs.102]
  misc_feature (1)..(463): NCBI GI: 145610613 Blast Desc: MGG_01050 [Magnaporthe grisea 70-15] gi|145017994|gb|EDK02273.1| MGG_01050 [Magnaporthe grisea 70-15]
  misc_feature (1)..(463): NCBI GI: 18376151 Blast Desc: related to PHO87 protein [Neurospora crassa]
  misc_feature (1)..(463): NCBI GI: 256729225 Blast Desc: NECHADRAFT_63039 [Nectria haematococca mpVI 77-13-4]
  misc_feature (7)..(463): NCBI GI: 116199663 Blast Desc: CHGG_07987 [Chaetomium globosum CBS 148.51] gi|88179266|gb|EAQ86734.1| CHGG_07987 [Chaetomium globosum CBS 148.51]
  misc_feature (1)..(463): NCBI GI: 154315900 Blast Desc: BC1G_04522 [Botryotinia fuckeliana B05.10] gi|150846918|gb|EDN22111.1| BC1G_04522 [Botryotinia fuckeliana B05.10]
  misc_feature (1)..(419): NCBI GI: 46116990 Blast Desc: FG04337.1 [Gibberella zeae PH-1]
  misc_feature (4)..(462): NCBI GI: 169608556 Blast Desc: SNOG_07360 [Phaeosphaeria nodorum SN15] gi|111063706|gb|EAT84826.1| SNOG_07360 [Phaeosphaeria nodorum SN15]
  misc_feature (3)..(463): NCBI GI: 121702923 Blast Desc: SPX domain protein [Aspergillus clavatus NRRL 1] gi|119397869|gb|EAW08300.1| SPX domain protein [Aspergillus clavatus NRRL 1]
  misc_feature (3)..(463): NCBI GI: 240111068 Blast Desc: SPX domain containing protein [Coccidioides posadasii C735 delta SOWgp]
MFTLLAILAVFLLLLLLPIMSKPEQQACLAMLVFVSLLWATEAIPLFVTSLLIPFLCVLLNVVRSEQPPYRRLSSKEATNYVFSAMWTPVIMLLLGGFTVAAALSKCKIDKRIATFVLSKAGTRPRTVLVANMFVAAFASMLVSNVAAPVLCFSIIEPMLRNLPSDSNMSKAVIMGIALASNVGGMLSPIASPQNVVALGIMEPAPTWGQWFFIVIPVGIVSLFLIWILLLMTFQPGKGTTIVPIRSVKEEFTGLQWFVSVVCVVTIGLWCASHALESTFGHMGVIAILPIVIFFGVGILTKEDFNNFPWTIIILAAGGLALGKAVESSGLLHTVAEKISAEVHDLDLYVVLLIFSSLALVIATFISHTVAALIILPLVYDIGKAMEEPHPNLLVMAATLMCSAAMALPTSGFPNMTAIMKEDATGQRYLSVKHFISRGVPSSVLTLCVVVTIGYGAMRVIGM

SEQ ID NO: 29124 - DNA, 2001 bp, Muscodor strobelii
  misc_feature: SGI EST ID NO. CUFF.68827.0
  misc_feature: Variant of the nucleotide sequence at SEQ ID NO 29122
gcttcgcctgccccacctggctgttcggctccaccatgttcaccctcctcgccatcctcgccgtcttcctgctgctgctgctcctccccatcatgagcaagcccgagcagcaggcgtgtctcgccatgctggtctttgtgagtctgctgtgggcgaccgaggctatcccccttttcgtgacctctctcttgatccccttcctctgtgtgctgctgaatgtcgtgcgctccgagcagccgccctaccggaggctgagctccaaggaggccaccaactatgtcttttcggccatgtggacgcccgtcatcatgcttctcctgggtggcttcaccgtggccgcggccttgtctaagtgcaagatcgacaagcgtatcgccaccttcgtcctcagcaaggccggcacccgcccgcggaccgtccttgtcgccaacatgttcgtcgccgcctttgccagtatgctcgtcagtaacgtggctgctccggtcctctgctttagcatcattgaaccgatgctccgcaacttgccctccgactccaacatgtccaaagctgtcatcatgggcatcgccctggcctccaacgtgggtggcatgctgtcccccatcgcttcgccacagaacgtcgtggcgctcggcatcatggagcccgcacccacctgggggcagtggttcttcatcgtcatccccgtcggcattgtgtccttgtttctcatctggattctcctcctcatgacattccagcctggcaagggcaccaccatcgtacccattcgctctgttaaggaggagttcacgggtctgcaatggtttgtctccgtcgtctgtgtcgtcaccatcggtctctggtgcgccagtcacgcactcgagtccacctttggccacatgggtgtcatcgccatccttcccatcgtcatcttcttcggtgtcggtattctgaccaaggaagacttcaataacttcccctggaccatcatcatcttggccgccggtggtctggcgctgggcaaagctgtcgagtcttcaggcctgctccacaccgtggccgagaagatctcggccgaagtacatgacctcgatctgtacgtcgttctcctcatcttctcgagcttggctctcgtcattgcaacctttatcagccacaccgtggccgcgctgattatcctaccgctcgtatacgatatcggaaaggcgatggaggagccccacccgaatctgctcgtcatggctgctactcttatgtgcagtgcggctatggctctcccaacgagtggtttccccaatatgacggcgatcatgaaggaagatgccactggccaacgctatctctccgtcaagcactttatcagccggggtgttcccagtagtgtcctcactctctgtgttgttgtaactattgggtatggcgctatgcgtgtcattggaatgtagacaaattggatatcttgggtaattggcccatatggcgatgggaagtaacttattctcaattttgtattccttcgtccagagctgtatatataaatgggcgtgctgtgttgcttacatcgaaggctagatacaaagccaaatactcgtgcggatagacataggccatagagtcggattgtaaattgttaacgcatggcgccgggttcaggttttgctttgcaagctccatattctctctgacgtggcgaaatgtgtccgcgcaccatagtgaattggcaaattcacctgaagtgctcgattatcttaggaatatggagatcatgggccgtttggcacggtggaatctgtcgttgtgatcccctcaaccacgattggtacaatgtcgacgctcttttcaggccactaccagcccatcagcggcagtcgtcgtaaactatacaatgtctaccattgagtaaaactgcaaccgctgaaattttcgggtttagcaatgctcattgtgtatcggccaataaattgattgtaatgcccatgcacatgacgatgttcatagtggaacctcattagaattttg

SEQ ID NO: 29125 - DNA, 873 bp, Muscodor strobelii
  misc_feature: SGI cDNA ID NO. 569999
  misc_feature: Elevated expression when VOC is produced
  misc_feature: Encodes the peptide sequence at SEQ ID NO 29126
atggtcgcaactattcgcgagtaccatattcttggacgacatgtccaacttgatcgactcaagctgggcagtgtaatcagcaatatcgaagaggttctcaccttgaatacaggatcagagttggagattgacgatagcaggttgtactgtctccatgatactaacttcgaggcaacacgggccaaggcacgtggcggtcaagtctctgtggcgctgaaagccctaaatctcgagaccgttggtggcgacgccagtgcggattacctgtctgacagcaatgatgagtacaaatactcatcactcgacaccatcgaatttgatgctggaacaaacgactatgaagaagcggtggccaagtcacctaaactccagagatatctcgaaagctcgaactgtcatcctatctttttcgttatgggactaaagagtgggcgaaggacatcgcagagactcaccaagacggcaaaaacgggaggtagcatgagcctcggtctagaaatagggacagcaatatcaattggcccacgggcaaacttgagcgatgcgaccactctgactcagcaatcggagggttcgaccgaccacatattcgctatcaaggtcagaaagcttgcatatcggaagagacatggtcttattgggaaacgaaccctgcgggatagtgcgcacaatcatggagcagagttagcaggtgtcggacaacgaaaaggacttgaacaggcaaatcaagtttctgatgaagaagcattgtcgccttttgaacttcacgaagagattgcacttgaagaggacgacctggagggacgggagatgattacagaaatggacacaaacggcgaggagatagcttggtcggtgcctgaagattggtag

SEQ ID NO: 29126 - protein, 290 aa, Muscodor strobelii
  misc_feature: SGI Peptide ID NO. 569999
  misc_feature (1)..(259): NCBI GI: 256720882 Blast Desc: NECHADRAFT_85629 [Nectria haematococca mpVI 77-13-4]
  misc_feature (20)..(286): NCBI GI: 256722216 Blast Desc: NECHADRAFT_86784 [Nectria haematococca mpVI 77-13-4]
  misc_feature (20)..(204): NCBI GI: 256722219 Blast Desc: NECHADRAFT_52455 [Nectria haematococca mpVI 77-13-4]
  misc_feature (20)..(273): NCBI GI: 39976549 Blast Desc: MGG_05802 [Magnaporthe grisea 70-15] gi|145011965|gb|EDJ96621.1| MGG_05802 [Magnaporthe grisea 70-15]
  misc_feature (20)..(271): NCBI GI: 46138135 Blast Desc: FG10582.1 [Gibberella zeae PH-1]
  misc_feature (20)..(212): NCBI GI: 256727337 Blast Desc: NECHADRAFT_76111 [Nectria haematococca mpVI 77-13-4]
  misc_feature: Useful for introducing or modulating the production of volatile compounds
MVATIREYHILGRHVQLDRLKLGSVISNIEEVLTLNTGSELEIDDSRLYCLHDTNFEATRAKARGGQVSVALKALNLETVGGDASADYLSDSNDEYKYSSLDTIEFDAGTNDYEEAVAKSPKLQRYLESSNCHPIFFVMGLKSGRRTSQRLTKTAKTGGSMSLGLEIGTAISIGPRANLSDATTLTQQSEGSTDHIFAIKVRKLAYRKRHGLIGKRTLRDSAHNHGAELAGVGQRKGLEQANQVSDEEALSPFELHEEIALEEDDLEGREMITEMDTNGEEIAWSVPEDW

SEQ ID NO: 29127 - DNA, 1320 bp, Muscodor strobelii
  misc_feature: SGI EST ID NO. CUFF.68841.0
  misc_feature: Variant of the nucleotide sequence at SEQ ID NO 29125
gatgataagcgataggccacttgtgaagcactgaggctctctgcgaccaattcttgagggcagactcagcgcgtcagactccccctcttctattttacagcccgagccagaatatctatcgggaggccttcttattcaatttttatactggctcctaattctacaaaccaggttcttgacatacgacctatatgatctgtcaaatcaagacacattgaatataacaactcgctttagcatacaatcgaagcctggatgctggaggtagaaatcgacgcttctacacgaatcacgacactgagcacttaatggcaagagtcactgattgattttgctgtcatactcattatggtcgcaactattcgcgagtaccatattcttggacgacatgtccaacttgatcgactcaagctgggcagtgtaatcagcaatatcgaagaggttctcaccttgaatacaggatcagagttggagattgacgatagcaggttgtactgtctccatgatactaacttcgaggcaacacgggccaaggcacgtggcggtcaagtctctgtggcgctgaaagccctaaatctcgagaccgttggtggcgacgccagtgcggattacctgtctgacagcaatgatgagtacaaatactcatcactcgacaccatcgaatttgatgctggaacaaacgactatgaagaagcggtggccaagtcacctaaactccagagatatctcgaaagctcgaactgtcatcctatctttttcgttatgggactaaagagtgggcgaaggacatcgcagagactcaccaagacggcaaaaacgggaggtagcatgagcctcggtctagaaatagggacagcaatatcaattggcccacgggcaaacttgagcgatgcgaccactctgactcagcaatcggagggttcgaccgaccacatattcgctatcaaggtcagaaagcttgcatatcggaagagacatggtcttattgggaaacgaaccctgcgggatagtgcgcacaatcatggagcagagttagcaggtgtcggacaacgaaaaggacttgaacaggcaaatcaagtttctgatgaagaagcattgtcgccttttgaacttcacgaagagattgcacttgaagaggacgacctggagggacgggagatgattacagaaatggacacaaacggcgaggagatagcttggtcggtgcctgaagattggtagccaggatgctcaataggacgtttcgttagcaagaggcttgtcgggaagcgtccgtgttagtatgagctcattctacattatgtggtgtgtggtggtcgc

SEQ ID NO: 29128 - DNA, 2505 bp, Muscodor strobelii
  misc_feature: SGI cDNA ID NO. 570000
  misc_feature: Encodes the peptide sequence at SEQ ID NO 29129
atggcctggcagctgctcagagacgtattatctactaaatttgcagctgttcttgacgatgttgcagattttcatctcgacacagaatacgacctcgaaaagtcccaaacagatgcagttgctgtcgaagcaaagacagtcgcggcatttgcacaatgcgatgccctctttgtgaatacctcttgggagatgtttggcaacagcgaggatgccgttcaatttgaggattttatagccaattccatgaagactcttccgaatgagattgaacagggaattagagataccggcaaacatcgtgcaatgccgaagactcccaccgacgctcagcgaaaaagcctcataatggaagagttcataatgcgtctgaaaccaccagatatgccaatggtcgaggacgtcttgatgagcgatccaaacaagtctcaactcgactcccgccaattaatccaagagcgaagacgtatacagttcagcgtgttattcaacacgctagctcgtcagctagactgctgtgatgagaatcactacgcacgactcaaactatctggctttatcgaacaaacagatgctcagttccaacctttctatgacgtttacttatcatcgcgctatgactggggctcttgtcgctgggttcggagtcgatgtaccattgtaaaaactattacgaaatgtgagagtcccggatgcatgatcatcagcaaagcagaggaacaatgccaacatctcaatgtcttgataagcgaaaaatcacaaggagatgacgaaagagccggcaacctacaattgggaaagggtgacaagcgcaagtcgtccgtcgctcctattgtgccgctctgggaacttttcgagccacccacttccgatggcgaaagctatattcagaataccgaaaagtggccacctaaagtcacagatacgttaagtctcaatctggccttatctttgttacaattatccaacgatgaatggcagcaagtccgatggtgttcagggaaagatagtggtatttttttccttcgtgatcctgctacccgcctgattttggacaggactcgtccatatctctcatggcagctaaaggcgccccccaagaatcaagtggggacgaacgcaatagcccagctactggactttggtcagctcctaattgaaattcatcgctgggagaagttgcctgccgatatacagtgcttgcgatctaagtccgatgattcatttcgatcaagactattagaatacattgaggaggtgacgagctatcgagatgaacactttacgcgcgcagtcaaggcgtgcctcgattttcaacagcatcaataccagtctactcttgggaacctgcaagattatattttttcaaaaatcgtctctcctttagaagcatactgtggttacgaatatgaacgagatgctaccgacgacacttatgttccagcaacctatcgcaaacatctcgaagtgtacgacaaaaagatcagtcccaatgagcctgacgataaaagttcaaacgcaagcatcttttttaaactcatgagcgacttcactgaccaacatattggaacctcgcggtcgagaaaagtgcggattgcagtgttggacaatggggtagatcagtttaatgacccggttatcaacgcatggcgtacgattaagaaaatacaagactgccgaaattttacgtcttcaaatccacatcaatgggatgacaaggatgctgacggccacggcactatgattgctcgcctcttaggaacagtcgcgccagaggctaaattgttcattgcaaaagtgtctcaggggaaacgtatcggccctaacgagcttcatcgcatagctgaggccgtcaattgggctgtccaagtctgggatgtggacatcatttctctatcgatcgttcttcatggcgagcatccagatattgataaagaacttgaaaaagcattgaaaccatcgtataagcaagctaccagtaagatcgtctttgccgccgctggcaaccgagcgggtaatgcgcccatagggtggccagcccgtaaacctggggtgattgccatccatgctacaaattggcaaggcacaggtgcagattttaatgccagccgtgatccagggcgcgagaactttgccacactcgggcgcgatatcaggatggaacgatgggatccctctggtaacaaggagttcacctacatttccggtacctcctttgcaacgcccatcgctgctggtatcgccgcgaacgtcttgcactacgcgagacataacatggaccttagtttggccagagaggctctgtatttctcaccccttggtatgaagaagatcttccaggctatgtctagttctcgtggagactatgattatgtccaaccatggacgttgtgggacgcagctaaaaaggggacatggagaagcccttgggcaagcgaatctacccttcatctaacacctggggcagatgataatatttgcaaggtgctggatcgtatcctcctgtga

SEQ ID NO: 29129 - protein, 834 aa, Muscodor strobelii
  misc_feature: SGI Peptide ID NO. 570000
  misc_feature (509)..(784): Pfam Id: PF00082 Pfam Desc: Subtilase family
  misc_feature (529)..(806): NCBI GI: 256722217 Blast Desc: NECHADRAFT_86785 [Nectria haematococca mpVI 77-13-4]
  misc_feature (161)..(801): NCBI GI: 46117328 Blast Desc: FG04506.1 [Gibberella zeae PH-1]
  misc_feature (522)..(797): NCBI GI: 256732380 Blast Desc: NECHADRAFT_80887 [Nectria haematococca mpVI 77-13-4]
  misc_feature (491)..(791): NCBI GI: 212545194 Blast Desc: subtilisin, [Penicillium marneffei ATCC 18224] gi|210065720|gb|EEA19814.1| subtilisin, [Penicillium marneffei ATCC 18224]
  misc_feature (529)..(800): NCBI GI: 238841164 Blast Desc: conserved [Microsporum canis CBS 113480]
  misc_feature (527)..(805): NCBI GI: 256733904 Blast Desc: NECHADRAFT_77513 [Nectria haematococca mpVI 77-13-4]
  misc_feature (507)..(758): NCBI GI: 256722178 Blast Desc: NECHADRAFT_86790 [Nectria haematococca mpVI 77-13-4]
  misc_feature (529)..(800): NCBI GI: 256726775 Blast Desc: [Nectria haematococca mpVI 77-13-4]
  misc_feature (497)..(802): NCBI GI: 238843386 Blast Desc: NWD2 [Microsporum canis CBS 113480]
  misc_feature (526)..(789): NCBI GI: 116182816 Blast Desc: CHGG_02036 [Chaetomium globosum CBS 148.51] gi|88186333|gb|EAQ93801.1| CHGG_02036 [Chaetomium globosum CBS 148.51]
MAWQLLRDVLSTKFAAVLDDVADFHLDTEYDLEKSQTDAVAVEAKTVAAFAQCDALFVNTSWEMFGNSEDAVQFEDFIANSMKTLPNEIEQGIRDTGKHRAMPKTPTDAQRKSLIMEEFIMRLKPPDMPMVEDVLMSDPNKSQLDSRQLIQERRRIQFSVLFNTLARQLDCCDENHYARLKLSGFIEQTDAQFQPFYDVYLSSRYDWGSCRWVRSRCTIVKTITKCESPGCMIISKAEEQCQHLNVLISEKSQGDDERAGNLQLGKGDKRKSSVAPIVPLWELFEPPTSDGESYIQNTEKWPPKVTDTLSLNLALSLLQLSNDEWQQVRWCSGKDSGIFFLRDPATRLILDRTRPYLSWQLKAPPKNQVGTNAIAQLLDFGQLLIEIHRWEKLPADIQCLRSKSDDSFRSRLLEYIEEVTSYRDEHFTRAVKACLDFQQHQYQSTLGNLQDYIFSKIVSPLEAYCGYEYERDATDDTYVPATYRKHLEVYDKKISPNEPDDKSSNASIFFKLMSDFTDQHIGTSRSRKVRIAVLDNGVDQFNDPVINAWRTIKKIQDCRNFTSSNPHQWDDKDADGHGTMIARLLGTVAPEAKLFIAKVSQGKRIGPNELHRIAEAVNWAVQVWDVDIISLSIVLHGEHPDIDKELEKALKPSYKQATSKIVFAAAGNRAGNAPIGWPARKPGVIAIHATNWQGTGADFNASRDPGRENFATLGRDIRMERWDPSGNKEFTYISGTSFATPIAAGIAANVLHYARHNMDLSLAREALYFSPLGMKKIFQAMSSSRGDYDYVQPWTLWDAAKKGTWRSPWASESTLHLTPGADDNICKVLDRILL

SEQ ID NO: 29130 - DNA, 3289 bp, Muscodor strobelii
  misc_feature: SGI EST ID NO. CUFF.68877.0
  misc_feature: Variant of the nucleotide sequence at SEQ ID NO 29128
atttgattgtgtagggtgacgatgtcgacaactcgagagacgaccggaaaatagcacagtgaacgtcaaggtctcataaaacgcgccgcatctacccacggcgacatggcctggcagctgctcagagacgtattatctactaaatttgcagctgttcttgacgatgttgcagattttcatctcgacacagaatacgacctcgaaaagtcccaaacagatgcagttgctgtcgaagcaaagacagtcgcggcatttgcacaatgcgatgccctctttgtgaatacctcttgggagatgtttggcaacagcgaggatgccgttcaatttgaggattttatagccaattccatgaagactcttccgaatgagattgaacagggaattagagataccggcaaacatcgtgcaatgccgaagactcccaccgacgctcagcgaaaaagcctcataatggaagagttcataatgcgtctgaaaccaccagatatgccaatggtcgaggacgtcttgatgagcgatccaaacaagtctcaactcgactcccgccaattaatccaagagcgaagacgtatacagttcagcgtgttattcaacacgctagctcgtcagctagactgctgtgatgagaatcactacgcacgactcaaactatctggctttatcgaacaaacagatgctcagttccaacctttctatgacgtttacttatcatcgcgctatgactggggctcttgtcgctgggttcggagtcgatgtaccattgtaaaaactattacgaaatgtgagagtcccggatgcatgatcatcagcaaagcagaggaacaatgccaacatctcaatgtcttgataagcgaaaaatcacaaggagatgacgaaagagccggcaacctacaattgggaaagggtgacaagcgcaagtcgtccgtcgctcctattgtgccgctctgggaacttttcgagccacccacttccgatggcgaaagctatattcagaataccgaaaagtggccacctaaagtcacagatacgttaagtctcaatctggccttatctttgttacaattatccaacgatgaatggcagcaagtccgatggtgttcagggaaagatagtggtatttttttccttcgtgatcctgctacccgcctgattttggacaggactcgtccatatctctcatggcagctaaaggcgccccccaagaatcaagtggggacgaacgcaatagcccagctactggactttggtcagctcctaattgaaattcatcgctgggagaagttgcctgccgatatacagtgcttgcgatctaagtccgatgattcatttcgatcaagactattagaatacattgaggaggtgacgagctatcgagatgaacactttacgcgcgcagtcaaggcgtgcctcgattttcaacagcatcaataccagtctactcttgggaacctgcaagattatattttttcaaaaatcgtctctcctttagaagcatactgtggttacgaatatgaacgagatgctaccgacgacacttatgttccagcaacctatcgcaaacatctcgaagtgtacgacaaaaagatcagtcccaatgagcctgacgataaaaggtacatcatacggctttccgtatatcaagatgacatgaagaatcctatgcaatgttttctctcgacaatctaatccatcgcttagttcaaacgcaagcatcttttttaaactcatgagcgacttcactgaccaacatattggaacctcgcggtcgagaaaagtgcggattgcagtgttggacaatggggtagatcagtttaatgacccggttatcaacgcatggcgtacgattaagaaaatacaagactgccgaaattttacgtcttcaaatccacatcaatgggatgacaaggatgctgacggccacggcactatgattgctcgcctcttaggaacagtcgcgccagaggctaaattgttcattgcaaaagtgtctcaggggaaacgtatcggccctaacgagcttcatcgcatagctgaggccgtcaattgggctgtccaagtctgggatgtggacatcatttctctatcgatcgttcttcatggcgagcatccagatattgataaagaacttgaaaaagcattgaaaccatcgtataagcaagctaccagtaagatcgtctttgccgccgctggcaaccgagcgggtaatgcgcccatagggtggccagcccgtaaacctggggtgattgccatccatgctacaaattggcaaggcacaggtgcagattttaatgccagccgtgatccagggcgcgagaactttgccacactcgggcgcgatatcaggatggaacgatgggatccctctggtaacaaggagttcacctacatttccggtacctcctttgcaacgcccatcgctgctggtatcgccgcgaacgtcttgcactacgcgagacataacatggaccttagtttggccagagaggctctgtatttctcaccccttggtatgaagaagatcttccaggctatgtctagttctcgtggagactatgattatgtccaaccatggacgttgtgggacgcagctaaaaaggggacatggagaagcccttgggcaagcgaatctacccttcatctaacacctggggcagatgataatatttgcaaggtgctggatcgtatcctcctgtgatatgacaagtcgctctacggcctggttggttcgaacttcacgcgcctcggattcctatgtatcaatcctgtactcattttcacgaccgcgagggcctgcgccgaccctactagaaagagacaaaatcactgccttcttatcttacgataactacagattccaaatcataaaaagagcatggattatcgctacctatcttctctttgccttcgaatgtacttatagagactatgggatccgttggaattgctagtgctaacctgtgtagagccaagctcgtctacttacttcgaagctagtcatttttgtctgaagaatatacatgaagatgaacgttaagtatgaaagctgtagctcgattcatttgtaagtactcaatatggagtactacgctttgattgcgttcaaataccagcaatcagatcaaaatagaatggatttcctgtcattctgttctgttttatgatcgcatggattattttcgacctgtttgctatttgctcggctgctgcgcttgtatttttgttgcactcatcttatttgttgacaatctgaaagggcttattgagtgttaggataagaagccaatatgag

SEQ ID NO: 29131 - DNA, 3483 bp, Muscodor strobelii
  misc_feature: SGI cDNA ID NO. 570001
  misc_feature: Encodes the peptide sequence at SEQ ID NO 29132
atgattttggcacttctcaaagtcttgaaagacaatcttgctctagcgctgcaattagacacgccgacccagatcgaaggaagaaacgacactgatgcccttggaatctcttattttggtgtcgatggagccttgagacgactagaacgagttggcgtggcgatcacacatgcctccaaagcaagcctaacacgaaggatcatagcgtttgcgcggaaacaagatgagttgcgagacatatctgaaattttctcactagtgatcttgcgtcggtatagaggactagcaccagagaagcttcaaaccgagatcgagctaaaggatctcccgtcggttgagacaatcctccaggcaaaaaagtctggcttactgatcgcgttagtgagatcctcagtcgtccgacattttaagctccagtatgaaatccggaacatgaacaaacaacatgcagaagacattgtagccctccgagacagtagtggagacggcaatctaggctacaatactctgcatccggaggcaagagaacaaactcctgatcagcatatggcgcagcatacgggtctagttgaagagacagaatctcaggccgaaacagatccattgtctattcaattgtcgctggctgagaaaatacttcaacatgacgaaccaaatccgggtttcgtcataaaacagaccactctttccgaggcaggcattgcagaatatccaagatgccctaggaaaaaggactctcaggataatggcatctgcccaatctgcggaaaggttctatctgacgaagatatcgcagacccagaggcctggagacagcatgtcgatatggatataagtccattggtctgcatatcggaagactgcgtatcaaatcttcaatattttaacagtcgatcatcatggatcaaccatatgcacaaaactcatactaaaaactggacgcgttatctatataacacacaagagtggatatgccctgtgtgtcaacagaaatctgaacggcagttttggtccgaagaggagatggaggacaatttgagggaacatatgaaggatgcccatgctaccgtagtcaaaccatcaggtattcagaatctagcaagtcttcacggtattcggcagtatttcaacgcgaatcattgcccgctctgtggcgagccccctaaggagatcaccaatcttcagacgcaacacgatctgcccatgaccccggatgccactgatgttaaagaaacaccgctcggcactgaacactcaggggcgacaaaacgagtgacatttgggaatctaccaaatgcaagccatgacaccagaactgctaggtcgtctattccatcgtctcagggacagataaaccttacaggcgtcgaaaaatgcatagctcaacatttgaaagcactggcgctatatttcctcagtcgtttcattgacgaacagcaagaggttaggaatatccatgacgatatgtcgcacttgtctgcacgcgcaactgaagagtctcgtcaaatccgccttctctcactttcttcagtgcggtctttgccggacccgccgagaaaaccgaatcatctacacaatgacccgcatgtaacgggcaaggaagagaaagaagttcaagaatgccttgattggaatgccaatatcttgcacgagaacagcgattggtacgattgggacagcgatgacaggaaaaggtactcaaacccttccccaagtgaaagtgaacgccttttgcccggaatttcaacggggtcggaagatatctggcgtggcatgaacccagaggactttttcttgtgcatgtcatgtaccctggtatctagcgcactctgctggacacttctccaggcagctgctagaggcatacttagcgacaagtcactacgcgacttaggtcaattctcagacctctgtgcgggactccagcatgctttggtaaagctcgcacttacgccagataatgcgggacatagagacagcaattacgtcgcaatcactaaacgctgttcacgcgaagtggcagatgttatcgtggcgattaagaggcatctcccggatattgtaaatcctacggctcaaggtgaccgtgacgaatttgttttttcggcgcgaaggaagctcgaggagagcgaaaacgctctctgctggaacatcgcattagtgcaaatcaacatcgagcctaacaaagcagctctcgacatgaatgtaagtctaattcctcgattagatattgaaatctcgcagaaaatacaagaaatagcgctgtccatcattaacaaccgacttaataatctccgcgagactatacttgcgtgggccactggaaagatatctcgggaaatcgaatctggccatgaacgacaaagtcctttaagcgcaaatatccgattggaaaagacaagcgaccttactgatgaagcagtgcctacgtcgcattggactgtcccgttcaatcgcaatgagcatttcgttggacgagctgagattcttgaaatgattctggagaagattccaccagacgcaaataacgagagctgccaacataccgttgtcctgggcctcggtggcgtcgggaagtcccatatagccctcgaggctgcatacagattccgcgacaagagactagactgctccatcttctggatttcggccacaagcgagacgacctttacggcagcatgtagagaaatttgctttgcgctcaaagtacctaataccgacaaacctgaggccgatgtcatgaatctagtccaagctgcgctaaatcgaggggaaactggcagttggctgctgatcatcgatgatgtcgacgatgttgagttgctattcgacgacatctctctattgaaatgtctaccatctaacaagcaaggctcaattttgttcatatctcgagctatcagcctggtaactaattaccttagggtcccggagcatcaagtcatccatgtggagccgatggatcgcggtgaagctgcaactctaatgtacacagtcgtgcccaataaatctctggtgggcgacagtgagagcatagacaagctacttgcatttctggattatatacctctggccataatgcaggcatccgcattcatgtctcaaacagactctacaagcacagagtatctcaagcaatgtctatcaactgcaacgcagcgactaatggaagagttcatcggccaccacgggtccccaggtgcgaatgcagttgctcaaacatggtggcagtctttcaaaataatctcccgcgatcacccgttggcttcattatgtctccaggtcatagctgtttcgggtggggagaatgtaccgttgagtctgctaccggaagcatcaccctcagacatagaagctgccattgacacgttgaagaactacgcattcatcacccaacgaaaagaccgaaacaatcttgacatgcatcaaatcgtgaaactaacagtgcaaaagtgggtcaagcaggggggttccctaaggtga

SEQ ID NO: 29132 - protein, 1160 aa, Muscodor strobelii
  misc_feature: SGI Peptide ID NO. 570001
  misc_feature (812)..(1157): NCBI GI: 171693841 Blast Desc: protein product [Podospora anserina] gi|170946869|emb|CAP73673.1| protein product [Podospora anserina]
  misc_feature (813)..(1157): NCBI GI: 116206052 Blast Desc: CHGG_02319 [Chaetomium globosum CBS 148.51] gi|88182916|gb|EAQ90384.1| CHGG_02319 [Chaetomium globosum CBS 148.51]
  misc_feature (834)..(1157): NCBI GI: 171691590 Blast Desc: protein product [Podospora anserina] gi|170945743|emb|CAP71856.1| protein product [Podospora anserina]
  misc_feature (813)..(1159): NCBI GI: 169762868 Blast Desc: [Aspergillus oryzae RIB40] gi|83770362|dbj|BAE60495.1| protein product [Aspergillus oryzae]
  misc_feature (765)..(1160): NCBI GI: 255930795 Blast Desc: Pc12g00510 [Penicillium chrysogenum Wisconsin 54-1255] gi|211581573|emb|CAP79678.1| Pc12g00510 [Penicillium chrysogenum Wisconsin 54-1255]
  misc_feature (796)..(1155): NCBI GI: 156053556 Blast Desc: SS1G_05625 [Sclerotinia sclerotiorum 1980] gi|154703406|gb|EDO03145.1| SS1G_05625 [Sclerotinia sclerotiorum 1980]
  misc_feature (810)..(1155): NCBI GI: 156050931 Blast Desc: SS1G_08054 [Sclerotinia sclerotiorum 1980] gi|154692453|gb|EDN92191.1| SS1G_08054 [Sclerotinia sclerotiorum 1980]
  misc_feature (796)..(1155): NCBI GI: 156034877 Blast Desc: SS1G_13374 [Sclerotinia sclerotiorum 1980] gi|154698777|gb|EDN98515.1| SS1G_13374 [Sclerotinia sclerotiorum 1980]
  misc_feature (810)..(1155): NCBI GI: 156041064 Blast Desc: SS1G_11511 [Sclerotinia sclerotiorum 1980] gi|154695894|gb|EDN95632.1| SS1G_11511 [Sclerotinia sclerotiorum 1980]
  misc_feature (799)..(1155): NCBI GI: 154310212 Blast Desc: BC1G_07026 [Botryotinia fuckeliana B05.10] gi|150851587|gb|EDN26780.1| BC1G_07026 [Botryotinia fuckeliana B05.10]
MILALLKVLKDNLALALQLDTPTQIEGRNDTDALGISYFGVDGALRRLERVGVAITHASKASLTRRIIAFARKQDELRDISEIFSLVILRRYRGLAPEKLQTEIELKDLPSVETILQAKKSGLLIALVRSSVVRHFKLQYEIRNMNKQHAEDIVALRDSSGDGNLGYNTLHPEAREQTPDQHMAQHTGLVEETESQAETDPLSIQLSLAEKILQHDEPNPGFVIKQTTLSEAGIAEYPRCPRKKDSQDNGICPICGKVLSDEDIADPEAWRQHVDMDISPLVCISEDCVSNLQYFNSRSSWINHMHKTHTKNWTRYLYNTQEWICPVCQQKSERQFWSEEEMEDNLREHMKDAHATVVKPSGIQNLASLHGIRQYFNANHCPLCGEPPKEITNLQTQHDLPMTPDATDVKETPLGTEHSGATKRVTFGNLPNASHDTRTARSSIPSSQGQINLTGVEKCIAQHLKALALYFLSRFIDEQQEVRNIHDDMSHLSARATEESRQIRLLSLSSVRSLPDPPRKPNHLHNDPHVTGKEEKEVQECLDWNANILHENSDWYDWDSDDRKRYSNPSPSESERLLPGISTGSEDIWRGMNPEDFFLCMSCTLVSSALCWTLLQAAARGILSDKSLRDLGQFSDLCAGLQHALVKLALTPDNAGHRDSNYVAITKRCSREVADVIVAIKRHLPDIVNPTAQGDRDEFVFSARRKLEESENALCWNIALVQINIEPNKAALDMNVSLIPRLDIEISQKIQEIALSIINNRLNNLRETILAWATGKISREIESGHERQSPLSANIRLEKTSDLTDEAVPTSHWTVPFNRNEHFVGRAEILEMILEKIPPDANNESCQHTVVLGLGGVGKSHIALEAAYRFRDKRLDCSIFWISATSETTFTAACREICFALKVPNTDKPEADVMNLVQAALNRGETGSWLLIIDDVDDVELLFDDISLLKCLPSNKQGSILFISRAISLVTNYLRVPEHQVIHVEPMDRGEAATLMYTVVPNKSLVGDSESIDKLLAFLDYIPLAIMQASAFMSQTDSTSTEYLKQCLSTATQRLMEEFIGHHGSPGANAVAQTWWQSFKIISRDHPLASLCLQVIAVSGGENVPLSLLPEASPSDIEAAIDTLKNYAFITQRKDRNNLDMHQIVKLTVQKWVKQGGSLR

SEQ ID NO: 29133 - DNA, 569 bp, Muscodor strobelii
  misc_feature: SGI EST ID NO. CUFF.68859.0
  misc_feature: Variant of the nucleotide sequence at SEQ ID NO 29131
taaagctcgcacttacgccagataatgcgggacatagagacagcaattacgtcgcaatcactaaacgctgttcacgcgaagtggcagatgttatcgtggcgattaagaggcatctcccggatattgtaaatcctacggctcaaggtgaccgtgacgaatttgttttttcggcgcgaaggaagctcgaggagagcgaaaacgctctctgctggaacatcgcattagtgcaaatcaacatcgagcctaacaaagcagctctcgacatgaatgtaagtctaattcctcgattagatattgaaatctcgcagaaaatacaagaaatagcgctgtccatcattaacaaccgacttaataatctccgcgagactatacttgcgtgggccactggaaagatatctcgggaaatcgaatctggccatgaacgacaaagtcctttaagcgcaaatatccgattggaaaagacaagcgaccttactgatgaagcagtgcctacgtcgcattggactgtcccgttcaatcgcaatgagcatttcgttggacgagctgagattcttgaaatgattctggag

SEQ ID NO: 29134 - DNA, 2484 bp, Muscodor strobelii
  misc_feature: SGI cDNA ID NO. 570002
  misc_feature: Reduced expression when VOC is produced
  misc_feature: Encodes the peptide sequence at SEQ ID NO 29135
atgggtttccagaagaagactggcaagggccgtttggacaagtactaccggctggcaaaagagaaaggataccgagctcgtgcagccttcaaattggtacagttgaacaagaaatatgaattcttgcagggctctaaagtgtgcatcgatctttgcgctgcgccaggatcatggtgtcaagtggccgtccagaccatgcctccaggcagtctaattgttggcgtcgatttatctcccataaaaccgatacctggtgtcatcactttccagtccgatattacaaccgacaaatgtcgagccacacttcgccaacatctcaagacatggaaagccgataccgtgctacacgatggcgcacccaacgttggtaccgcgtggattcaagattctttcaaccaggcagagcttgtgttgcagtcaatgaagcttgcctgcgagtttctagtcgagggtggtaattttgtcaccaaagtcttcagatcctcccaatacaaccaacttctgtggatcttcaagcagctcttcacgaaagtcgaggcaacgaagccgccatcttcgcgaaatgtctctgccgagatcttcgtcgtctgccgcggctacaaagcgccgaagcacatcgatccccgattcctcgatcctcgaaccgcctttgccgatctgtccgagcctgttgttgccgatgaagccaaagtgtacaagcctgaagtcaagaagaggaaaagaggaggttacgaagaaggcgattatactctttacaaggaagtgctggcttctgacttcatcgaaactgccgaccctatcgctattctagccaatacaaacaagattgtctttgactctgccacgccttctctgtctctgtctgcgttgaacaagatgcctgagaccacggtcgaaatccgacaatactgttcagatctgaaagttcttggccgaagagaattcaagattctactgaaatatcgtcttttagctcgggaggctttcggccttcctacgaagagaacgtcgaagcccgccgtgcaagaggaggtcgccgaggtggaagacatggacgaggaactcaagattcaggaagagctacaggccatgaaagacaaagacagtgccaagaggaagagagagaaacggaaagcaaacgagaagaagcaaaaggagatccagcggttacaactgcacatgactgctcccatggatattggagtcgaagctgcgacggaacaagggatgttcgctttgaaaaaggttgcggataaagacatcaacaagctgggcaagggtcgtatgacagtcgtagctgaacgaccgaaaccggaagagaatggcgctgagtctgaatcggaatacgaatctgatgacctgggcgacgctcttgagcgcgagcttgatgcaaactgggagcaatttcaagagaagagagcaaatcatgctgcccggctgaaacgagccaggcaagcagaggatggggagtgggaaggagtgtcaggtgatgaaaaccagtccagcgatgatgatgacatcgttgaagaggaagacaccgatgactcagacgaagaaaacgaccagccatccggcaagttgttgacggacttggacaatacacctgagaatggcaatctctcgaagcgtgcgtcgaggttctttagccaggatgtttttaaggatataccaggccttgaagattccgaggaagaggaagaggaagaagacgacccgattgtttcagatgaggatgtcggcatggaggaggcttcgacgcagaaagcagtcaacggcaaggtatccaagaaacaggccgagaagtcaactaaatcaaaatctaagaaagaaatgctcgccgcatttgacgatgatgaggaagaggctgaggatgacaaggaagaagtcgatgaatgggaaaacgagagacagcatgcggacggcagaccaaatatcgatattgtgacagcggaagcaatgatgttagcacaacagttagcatccggtcagaagaccaaagaggatgttatagacgacgcattcactcgattcaacttcaaagaccgcgatggtctcccagactggttcatagatgacgaatcaaagcatgacaagaagcaaaagcccataaccaaagaagctgctgctgctatcaaagagaagactcgcgcccttaacgcgcgacccatcaagaaagtacgagaagcacaggccaggaagaagttcaaggcagcgcaacgcctagagaagctaaagaagaagtcggatcttcttgccaacgaggaaggcatgacggagaaggagaaggccgagggtattgcgaagctcatgagcaaggcacaatcaaagaagcccaagcggcaggtcaaggttgtggttgctaggggctcgaaccgtggtgttcaggggcggcctaagggcgtgaagggcaggtataagatggtggatggcaggatgaagaaagagatgagggcaatgaagcggattgagaagagaaataagtag

SEQ ID NO: 29135 - protein, 827 aa, Muscodor strobelii
  misc_feature: SGI Peptide ID NO. 570002
  misc_feature (24)..(202): Pfam Id: PF01728 Pfam Desc: FtsJ-like methyltransferase
  misc_feature (623)..(825): Pfam Id: PF07780 Pfam Desc: Spb1 C-terminal domain
  misc_feature (1)..(827): NCBI GI: 39946040 Blast Desc: MGG_08140 [Magnaporthe grisea 70-15] gi|73621941|sp|Q52C47.1|SPB1_MAGGR RecName: Full=AdoMet-dependent rRNA methyltransferase SPB1; AltName: Full=2'-O-ribose RNA grisea
  misc_feature (1)..(825): NCBI GI: 85103106 Blast Desc: AdoMet-dependent rRNA methyltransferase spb1 [Neurospora crassa OR74A] gi|73621942|sp|Q9P6V8.2|SPB1_NEUCR RecName: Full=AdoMet-dependent rRNA methyltransferase spb-1; RNA
  misc_feature (1)..(825): NCBI GI: 256730890 Blast Desc: [Nectria haematococca mpVI 77-13-4]
  misc_feature (1)..(827): NCBI GI: 169614552 Blast Desc: SNOG_10422 [Phaeosphaeria nodorum SN15] gi|111060696|gb|EAT81816.1| SNOG_10422 [Phaeosphaeria nodorum SN15]
  misc_feature (1)..(827): NCBI GI: 171692335 Blast Desc: protein product [Podospora anserina] gi|170946116|emb|CAP72917.1| protein product [Podospora anserina]
  misc_feature (1)..(827): NCBI GI: 154309412 Blast Desc: BC1G_07600 [Botryotinia fuckeliana B05.10] gi|150852424|gb|EDN27616.1| BC1G_07600 [Botryotinia fuckeliana B05.10]
  misc_feature (1)..(818): NCBI GI: 189207701 Blast Desc: AdoMet-dependent rRNA methyltransferase spb-1 [Pyrenophora tritici-repentis Pt-1C-BFP] gi|187976277|gb|EDU42903.1| AdoMet-dependent rRNA spb-1
  misc_feature (1)..(827): NCBI GI: 119174478 Blast Desc: CIMG_09221 [Coccidioides immitis RS]
  misc_feature (1)..(825): NCBI GI: 67515621 Blast Desc: AN0092.2 [Aspergillus nidulans FGSC A4] gi|73621939|sp|Q5BH88.1|SPB1_EMENI RecName: Full=AdoMet-dependent rRNA methyltransferase spb1; AltName: Full=2'-O-ribose RNA FGSC
  misc_feature (1)..(825): NCBI GI: 169779173 Blast Desc: [Aspergillus oryzae RIB40] gi|238499797|ref|XP_002381133.1| rRNA methyltransferase Spb1, [Aspergillus flavus NRRL3357] gi|83772790|dbj|BAE62918.1| protein
  misc_feature: Useful for introducing or modulating the production of volatile compounds
MGFQKKTGKGRLDKYYRLAKEKGYRARAAFKLVQLNKKYEFLQGSKVCIDLCAAPGSWCQVAVQTMPPGSLIVGVDLSPIKPIPGVITFQSDITTDKCRATLRQHLKTWKADTVLHDGAPNVGTAWIQDSFNQAELVLQSMKLACEFLVEGGNFVTKVFRSSQYNQLLWIFKQLFTKVEATKPPSSRNVSAEIFVVCRGYKAPKHIDPRFLDPRTAFADLSEPVVADEAKVYKPEVKKRKRGGYEEGDYTLYKEVLASDFIETADPIAILANTNKIVFDSATPSLSLSALNKMPETTVEIRQYCSDLKVLGRREFKILLKYRLLAREAFGLPTKRTSKPAVQEEVAEVEDMDEELKIQEELQAMKDKDSAKRKREKRKANEKKQKEIQRLQLHMTAPMDIGVEAATEQGMFALKKVADKDINKLGKGRMTVVAERPKPEENGAESESEYESDDLGDALERELDANWEQFQEKRANHAARLKRARQAEDGEWEGVSGDENQSSDDDDIVEEEDTDDSDEENDQPSGKLLTDLDNTPENGNLSKRASRFFSQDVFKDIPGLEDSEEEEEEEDDPIVSDEDVGMEEASTQKAVNGKVSKKQAEKSTKSKSKKEMLAAFDDDEEEAEDDKEEVDEWENERQHADGRPNIDIVTAEAMMLAQQLASGQKTKEDVIDDAFTRFNFKDRDGLPDWFIDDESKHDKKQKPITKEAAAAIKEKTRALNARPIKKVREAQARKKFKAAQRLEKLKKKSDLLANEEGMTEKEKAEGIAKLMSKAQSKKPKRQVKVVVARGSNRGVQGRPKGVKGRYKMVDGRMKKEMRAMKRIEKRNK

SEQ ID NO: 29136 - DNA, 5818 bp, Muscodor strobelii
  misc_feature: SGI EST ID NO. CUFF.68881.0
  misc_feature: Variant of the nucleotide sequence at SEQ ID NO 29134
ctggtattcattactctactccatgtatctcaacactactctccttcaagtccgaaccaataagcagtaacagtgctcaaacaataatgggtataatgctatgttcttcctcctctttcaactctcacctccttcatatgcccatcagctgagtcatactcactcgctgtttctctctcaaatctcatgtatccgtactctaacaccacacaatgcaaacaattccgatcataacaagaaatccaacacgcgcaatgctatgcacacataaagtcccgaccagcccaacaacaagttcaaaagacctcaacactcctcttcatcctcctcatcccaatccccgccaacatccgcccaaccacagccccatcgtctaccctctccctcaccacccgttctcaagtccttcgccaactccctctgttcactccaacacctgatcaagtaatcatcaccaacactaacaagtttcccctcgctcgtccacgccacgctgcccacttcgcgctcatggcccctcacaagaggggttcccgagtgaatgatgggtatatcgtctttcaatctcgcagagaaattcgttgtactattcttccggaacaaaggccggcgaactgagtctgtccgtcgaattgggttgtcaacagaagtagtggcaactgttgagtcctcgagactcaaattccccatctgtcccaaaagctcgtcctggaagtatcgctcatttgtgggaaatagaactgcacaggcatcattgctgcccactgccaacatctcgcttcttccgtcgcgggccggtctgacggcgcacttgatgtagaaactcgtagcgtggaatgatgggtgtcggaacccatagagcgggcctaagccgttttgtgtaacggcattgggacgccgtctagggggttcggtgttcgtggttgagagctccggtgcatggccgaggatgagatgtgctgttgagtatgcataaacagtgttgtctttgcatacagcgtagagccgagacccgtctgatccgagggcgagagatgagataccgaagggacgccagcttccgtgggactttggaggtgttgttgctgagatgggcgttgggactttgttttttgatgagtggacgaaacgaatatcccataacttgatggaagcatctgcctcacatgctgttaagagtaggtgttcctggcctcttggtaagaactgcaatgctgttactgagacgtcgtttgagcggctagggatctcgcgacgtgagggcgtatcgccgggtccggctggaacggacgatcgaagttggcgtgatgtacgtgcgtgggcgtgatagaagctgttcacggcatatccagttttcgggtgaggtgcagaatatctaagatcagtggctctgccctcgtcatgttggaaatcctctactgggcggctacacctcatgtcccaaatttgaacacttccatctctcgacgacgtagccagaacactactatttgcctgaccaggctgaaaacggatctgtttcaatgaggcggtatgctgtccgagatatgccacgggtgattgtgtcatcatatcaatgacttgtcccgtctggtcacctgacgccgtggcgagtaaatagtcatcgtctgagaaatcgagatcgatgatagcgttcgtatgggcagtgaaagagagatgaattttgctgaaaggttccgacgagttgctcgaggagtcgagcagtcgtatacgaccttcttcgtctccaattgctgtaagaccatttctatggcatgtggcggcagagaatggtatgcaatggcccggcccttcatggcttacacaccaatggacgtcatcgggtctagtctgaaaatcggatgtctcattcctccaatcagcggcaggatatgccaggtatgaacgtccagattgtggtaacgctcccaattctctttgagcaagctggccagccagaccacgaccagccaatgtgttcaatcgttttggcgggggttgcttcggagtatcattcgctaggggtgaactttgtaggccgggccgcctgcgaccggacgagcgaccgccggtgtggggtgtcttctttgccgatgttcgagtattatgacttgaagatgagggagtgtcaattggactgagcagacatggttccaaagatcgtgccgaagttgagaggaggaaaggtcgaattggcgaagactcaggagtatggtggaatttcctcctcttgttctgtcttgcagagtctgtttctatatcatcatcgtcatcgtcttgtaatacgtcaacgtcactcaatggtttcagtggactggatggtgcaggagtctgatatcgacggttgacagccgacgatccaaggtctagtagtgcctcacgtgccgggctgagctttgagggaacacgggaacgtggttgaaagaatcgaccaaactttctaggcgtaatcgacggttcctttcgttctttcccggctctctttctcggtggcgatgtgagagggttaacattctcattgatggatgttggtgagttcatcatgtcaagctgggccggtgtccttcaatatctgtcttcttccacaaggcgaagtgagcgtccgcccgtgctggattacccaagttccaaacaccttgttcgtctcaagaaaagatcaaatcaaacacatgagataaccgaggaaaagacaaggttcacgacagatcgttctgtttgatatttgtagtgttcaattggcttcatcagagaaagacagtggcggggaagggaaggaaaggatgaggcgggtcatgacgccttatatcagagtggaacatacgctgcaagtgagtatcgcgaaagaacgcggttgttagaggcacttaacacgataatccctgaccactgcgatccaatggcaaccgttgactgctcgtgtgctcatgggtatgcgtcagacactgtgtttggtcgcttgtcgcgaacgctacaggggggttggcgccggctgaaagaccgtgttagcgcgattcttggtgtctgcaccgcctgaaaacaaggcgcaccaaggcaatgctagctccaatgtcgagcatcacgctctactccatactgtacgctagatgattggattacctaaaagggcaatagcaactcgcattaggtgggctggaactctggccgttatcgataaacttttttcttgatgttcggtcaatggcgggacagaatttcagtatctcgaatcttcatgcgaccgtctgcaatcattgcgctcccacttccttacactctccggtcgctcaactcataaatcatgggtttccagaagaagactggcaagggccgtttggacaagtactaccggctggcaaaagagaaaggataccgagctcgtgcagccttcaaattggtacagttgaacaagaaatatgaattcttgcagggctctaaagtgtgcatcgatctttgcgctgcgccaggatcatggtgtcaagtggccgtccagaccatgcctccaggcagtctaattgttggcgtcgatttatctcccataaaaccgatacctggtgtcatcactttccagtccgatattacaaccgacaaatgtcgagccacacttcgccaacatctcaagacatggaaagccgataccgtgctacacgatggcgcacccaacgttggtaccgcgtggattcaagattctttcaaccaggcagagcttgtgttgcagtcaatgaagcttgcctgcgagtttctagtcgagggtggtaattttgtcaccaaagtcttcagatcctcccaatacaaccaacttctgtggatcttcaagcagctcttcacgaaagtcgaggcaacgaagccgccatcttcgcgaaatgtctctgccgagatcttcgtcgtctgccgcggctacaaagcgccgaagcacatcgatccccgattcctcgatcctcgaaccgcctttgccgatctgtccgagcctgttgttgccgatgaagccaaagtgtacaagcctgaagtcaagaagaggaaaagaggaggttacgaagaaggcgattatactctttacaaggaagtgctggcttctgacttcatcgaaactgccgaccctatcgctattctagccaatacaaacaagattgtctttgactctgccacgccttctctgtctctgtctgcgttgaacaagatgcctgagaccacggtcgaaatccgacaatactgttcagatctgaaagttcttggccgaagagaattcaagattctactgaaatatcgtcttttagctcgggaggctttcggccttcctacgaagagaacgtcgaagcccgccgtgcaagaggaggtcgccgaggtggaagacatggacgaggaactcaagattcaggaagagctacaggccatgaaagacaaagacagtgccaagaggaagagagagaaacggaaagcaaacgagaagaagcaaaaggagatccagcggttacaactgcacatgactgctcccatggatattggagtcgaagctgcgacggaacaagggatgttcgctttgaaaaaggttgcggataaagacatcaacaagctgggcaagggtcgtatgacagtcgtagctgaacgaccgaaaccggaagagaatggcgctgagtctgaatcggaatacgaatctgatgacctgggcgacgctcttgagcgcgagcttgatgcaaactgggagcaatttcaagagaagagagcaaatcatgctgcccggctgaaacgagccaggcaagcagaggatggggagtgggaaggagtgtcaggtgatgaaaaccagtccagcgatgatgatgacatcgttgaagaggaagacaccgatgactcagacgaagaaaacgaccagccatccggcaagttgttgacggacttggacaatacacctgagaatggcaatctctcgaagcgtgcgtcgaggttctttagccaggatgtttttaaggatataccaggccttgaagattccgaggaagaggaagaggaagaagacgacccgattgtttcagatgaggatgtcggcatggaggaggcttcgacgcagaaagcagtcaacggcaaggtatccaagaaacaggccgagaagtcaactaaatcaaaatctaagaaagaaatgctcgccgcatttgacgatgatgaggaagaggctgaggatgacaaggaagaagtcgatgaatgggaaaacgagagacagcatgcggacggcagaccaaatatcgatattgtgacagcggaagcaatgatgttagcacaacagttagcatccggtcagaagaccaaagaggatgttatagacgacgcattcactcgattcaacttcaaagaccgcgatggtctcccagactggttcatagatgacgaatcaaagcatgacaagaagcaaaagcccataaccaaagaagctgctgctgctatcaaagagaagactcgcgcccttaacgcgcgacccatcaagaaagtacgagaagcacaggccaggaagaagttcaaggcagcgcaacgcctagagaagctaaagaagaagtcggatcttcttgccaacgaggaaggcatgacggagaaggagaaggccgagggtattgcgaagctcatgagcaaggcacaatcaaagaagcccaagcggcaggtcaaggttgtggttgctaggggctcgaaccgtggtgttcaggggcggcctaagggcgtgaagggcaggtataagatggtggatggcaggatgaagaaagagatgagggcaatgaagcggattgagaagagaaataagtagttccgctacttcaatacatgatatgatgatccagtt

SEQ ID NO: 29137 - DNA, 2463 bp, Muscodor strobelii
  misc_feature: SGI cDNA ID NO. 570003
  misc_feature: Elevated expression when VOC is produced
  misc_feature: Encodes the peptide sequence at SEQ ID NO 29138
atggatgtgatagtggacaagtactaccggctggcaaaagagaaaggataccgagctcgtgcagccttcaaattggtacagttgaacaagaaatatgaattcttgcagggctctaaagtgtgcatcgatctttgcgctgcgccaggatcatggtgtcaagtggccgtccagaccatgcctccaggcagtctaattgttggcgtcgatttatctcccataaaaccgatacctggtgtcatcactttccagtccgatattacaaccgacaaatgtcgagccacacttcgccaacatctcaagacatggaaagccgataccgtgctacacgatggcgcacccaacgttggtaccgcgtggattcaagattctttcaaccaggcagagcttgtgttgcagtcaatgaagcttgcctgcgagtttctagtcgagggtggtaattttgtcaccaaagtcttcagatcctcccaatacaaccaacttctgtggatcttcaagcagctcttcacgaaagtcgaggcaacgaagccgccatcttcgcgaaatgtctctgccgagatcttcgtcgtctgccgcggctacaaagcgccgaagcacatcgatccccgattcctcgatcctcgaaccgcctttgccgatctgtccgagcctgttgttgccgatgaagccaaagtgtacaagcctgaagtcaagaagaggaaaagaggaggttacgaagaaggcgattatactctttacaaggaagtgctggcttctgacttcatcgaaactgccgaccctatcgctattctagccaatacaaacaagattgtctttgactctgccacgccttctctgtctctgtctgcgttgaacaagatgcctgagaccacggtcgaaatccgacaatactgttcagatctgaaagttcttggccgaagagaattcaagattctactgaaatatcgtcttttagctcgggaggctttcggccttcctacgaagagaacgtcgaagcccgccgtgcaagaggaggtcgccgaggtggaagacatggacgaggaactcaagattcaggaagagctacaggccatgaaagacaaagacagtgccaagaggaagagagagaaacggaaagcaaacgagaagaagcaaaaggagatccagcggttacaactgcacatgactgctcccatggatattggagtcgaagctgcgacggaacaagggatgttcgctttgaaaaaggttgcggataaagacatcaacaagctgggcaagggtcgtatgacagtcgtagctgaacgaccgaaaccggaagagaatggcgctgagtctgaatcggaatacgaatctgatgacctgggcgacgctcttgagcgcgagcttgatgcaaactgggagcaatttcaagagaagagagcaaatcatgctgcccggctgaaacgagccaggcaagcagaggatggggagtgggaaggagtgtcaggtgatgaaaaccagtccagcgatgatgatgacatcgttgaagaggaagacaccgatgactcagacgaagaaaacgaccagccatccggcaagttgttgacggacttggacaatacacctgagaatggcaatctctcgaagcgtgcgtcgaggttctttagccaggatgtttttaaggatataccaggccttgaagattccgaggaagaggaagaggaagaagacgacccgattgtttcagatgaggatgtcggcatggaggaggcttcgacgcagaaagcagtcaacggcaaggtatccaagaaacaggccgagaagtcaactaaatcaaaatctaagaaagaaatgctcgccgcatttgacgatgatgaggaagaggctgaggatgacaaggaagaagtcgatgaatgggaaaacgagagacagcatgcggacggcagaccaaatatcgatattgtgacagcggaagcaatgatgttagcacaacagttagcatccggtcagaagaccaaagaggatgttatagacgacgcattcactcgattcaacttcaaagaccgcgatggtctcccagactggttcatagatgacgaatcaaagcatgacaagaagcaaaagcccataaccaaagaagctgctgctgctatcaaagagaagactcgcgcccttaacgcgcgacccatcaagaaagtacgagaagcacaggccaggaagaagttcaaggcagcgcaacgcctagagaagctaaagaagaagtcggatcttcttgccaacgaggaaggcatgacggagaaggagaaggccgagggtattgcgaagctcatgagcaaggcacaatcaaagaagcccaagcggcaggtcaaggttgtggttgctaggggctcgaaccgtggtgttcaggggcggcctaagggcgtgaagggcaggtataagatggtggatggcaggatgaagaaagagatgagggcaatgaagcggattgagaagagaaataagtag

SEQ ID NO: 29138 - protein, 820 aa, Muscodor strobelii
  misc_feature: SGI Peptide ID NO. 570003
  misc_feature (17)..(195): Pfam Id: PF01728 Pfam Desc: FtsJ-like methyltransferase
  misc_feature (616)..(818): Pfam Id: PF07780 Pfam Desc: Spb1 C-terminal domain
  misc_feature (5)..(820): NCBI GI: 39946040 Blast Desc: MGG_08140 [Magnaporthe grisea 70-15] gi|73621941|sp|Q52C47.1|SPB1_MAGGR RecName: Full=AdoMet-dependent rRNA methyltransferase SPB1; AltName: Full=2'-O-ribose RNA grisea
  misc_feature (5)..(818): NCBI GI: 85103106 Blast Desc: AdoMet-dependent rRNA methyltransferase spb1 [Neurospora crassa OR74A] gi|73621942|sp|Q9P6V8.2|SPB1_NEUCR RecName: Full=AdoMet-dependent rRNA methyltransferase spb-1; RNA
  misc_feature (5)..(818): NCBI GI: 256730890 Blast Desc: [Nectria haematococca mpVI 77-13-4]
  misc_feature (5)..(820): NCBI GI: 169614552 Blast Desc: SNOG_10422 [Phaeosphaeria nodorum SN15] gi|111060696|gb|EAT81816.1| SNOG_10422 [Phaeosphaeria nodorum SN15]
  misc_feature (5)..(820): NCBI GI: 171692335 Blast Desc: protein product [Podospora anserina] gi|170946116|emb|CAP72917.1| protein product [Podospora anserina]
  misc_feature (5)..(820): NCBI GI: 154309412 Blast Desc: BC1G_07600 [Botryotinia fuckeliana B05.10] gi|150852424|gb|EDN27616.1| BC1G_07600 [Botryotinia fuckeliana B05.10]
  misc_feature (5)..(811): NCBI GI: 189207701 Blast Desc: AdoMet-dependent rRNA methyltransferase spb-1 [Pyrenophora tritici-repentis Pt-1C-BFP] gi|187976277|gb|EDU42903.1| AdoMet-dependent rRNA spb-1
  misc_feature (5)..(820): NCBI GI: 119174478 Blast Desc: CIMG_09221 [Coccidioides immitis RS]
  misc_feature (5)..(818): NCBI GI: 67515621 Blast Desc: AN0092.2 [Aspergillus nidulans FGSC A4] gi|73621939|sp|Q5BH88.1|SPB1_EMENI RecName: Full=AdoMet-dependent rRNA methyltransferase spb1; AltName: Full=2'-O-ribose RNA FGSC
  misc_feature (5)..(818): NCBI GI: 169779173 Blast Desc: [Aspergillus oryzae RIB40] gi|238499797|ref|XP_002381133.1| rRNA methyltransferase Spb1, [Aspergillus flavus NRRL3357] gi|83772790|dbj|BAE62918.1| protein
  misc_feature: Useful for introducing or modulating the production of volatile compounds
MDVIVDKYYRLAKEKGYRARAAFKLVQLNKKYEFLQGSKVCIDLCAAPGSWCQVAVQTMPPGSLIVGVDLSPIKPIPGVITFQSDITTDKCRATLRQHLKTWKADTVLHDGAPNVGTAWIQDSFNQAELVLQSMKLACEFLVEGGNFVTKVFRSSQYNQLLWIFKQLFTKVEATKPPSSRNVSAEIFVVCRGYKAPKHIDPRFLDPRTAFADLSEPVVADEAKVYKPEVKKRKRGGYEEGDYTLYKEVLASDFIETADPIAILANTNKIVFDSATPSLSLSALNKMPETTVEIRQYCSDLKVLGRREFKILLKYRLLAREAFGLPTKRTSKPAVQEEVAEVEDMDEELKIQEELQAMKDKDSAKRKREKRKANEKKQKEIQRLQLHMTAPMDIGVEAATEQGMFALKKVADKDINKLGKGRMTVVAERPKPEENGAESESEYESDDLGDALERELDANWEQFQEKRANHAARLKRARQAEDGEWEGVSGDENQSSDDDDIVEEEDTDDSDEENDQPSGKLLTDLDNTPENGNLSKRASRFFSQDVFKDIPGLEDSEEEEEEEDDPIVSDEDVGMEEASTQKAVNGKVSKKQAEKSTKSKSKKEMLAAFDDDEEEAEDDKEEVDEWENERQHADGRPNIDIVTAEAMMLAQQLASGQKTKEDVIDDAFTRFNFKDRDGLPDWFIDDESKHDKKQKPITKEAAAAIKEKTRALNARPIKKVREAQARKKFKAAQRLEKLKKKSDLLANEEGMTEKEKAEGIAKLMSKAQSKKPKRQVKVVVARGSNRGVQGRPKGVKGRYKMVDGRMKKEMRAMKRIEKRNK

SEQ ID NO: 29139 - DNA, 5818 bp, Muscodor strobelii; identical to SEQ ID NO: 29136
  misc_feature: SGI EST ID NO. CUFF.68881.0
  misc_feature: Variant of the nucleotide sequence at SEQ ID NO 29137

SEQ ID NO: 29140 - DNA, 2235 bp, Muscodor strobelii
  misc_feature: SGI cDNA ID NO. 570004
  misc_feature: Encodes the peptide sequence at SEQ ID NO 29141
atgaactcaccaacatccatcaatgagaatgttaaccctctcacatcgccaccgagaaagagagccgggaaagaacgaaaggaaccgtcgattacgcctagaaagtttggtcgattctttcaaccacgttcccgtgttccctcaaagctcagcccggcacgtgaggcactactagaccttggatcgtcggctgtcaaccgtcgatatcagactcctgcaccatccagtccactgaaaccattgagtgacgttgacgtattacaagacgatgacgatgatgatatagaaacagactctgcaagacagaacaagaggaggaaattccaccatactcctgagtcttcgccaattcgacctttcctcctctcaacttcggcacgatctttggaaccatgtctgctcagtccaattgacactccctcatcttcaagtcataatactcgaacatcggcaaagaagacaccccacaccggcggtcgctcgtccggtcgcaggcggcccggcctacaaagttcacccctagcgaatgatactccgaagcaacccccgccaaaacgattgaacacattggctggtcgtggtctggctggccagcttgctcaaagagaattgggagcgttaccacaatctggacgttcatacctggcatatcctgccgctgattggaggaatgagacatccgattttcagactagacccgatgacgtccattggtgtgtaagccatgaagggccgggccattgcataccattctctgccgccacatgccatagaaatggtcttacagcaattggagacgaagaaggtcgtatacgactgctcgactcctcgagcaactcgtcggaacctttcagcaaaattcatctctctttcactgcccatacgaacgctatcatcgatctcgatttctcagacgatgactatttactcgccacggcgtcaggtgaccagacgggacaagtcattgatatgatgacacaatcacccgtggcatatctcggacagcataccgcctcattgaaacagatccgttttcagcctggtcaggcaaatagtagtgttctggctacgtcgtcgagagatggaagtgttcaaatttgggacatgaggtgtagccgcccagtagaggatttccaacatgacgagggcagagccactgatcttagatattctgcacctcacccgaaaactggatatgccgtgaacagcttctatcacgcccacgcacgtacatcacgccaacttcgatcgtccgttccagccggacccggcgatacgccctcacgtcgcgagatccctagccgctcaaacgacgtctcagtaacagcattgcagttcttaccaagaggccaggaacacctactcttaacagcatgtgaggcagatgcttccatcaagttatgggatattcgtttcgtccactcatcaaaaaacaaagtcccaacgcccatctcagcaacaacacctccaaagtcccacggaagctggcgtcccttcggtatctcatctctcgccctcggatcagacgggtctcggctctacgctgtatgcaaagacaacactgtttatgcatactcaacagcacatctcatcctcggccatgcaccggagctctcaaccacgaacaccgaaccccctagacggcgtcccaatgccgttacacaaaacggcttaggcccgctctatgggttccgacacccatcattccacgctacgagtttctacatcaagtgcgccgtcagaccggcccgcgacggaagaagcgagatgttggcagtgggcagcaatgatgcctgtgcagttctatttcccacaaatgagcgatacttccaggacgagcttttgggacagatggggaatttgagtctcgaggactcaacagttgccactacttctgttgacaacccaattcgacggacagactcagttcgccggcctttgttccggaagaatagtacaacgaatttctctgcgagattgaaagacgatatacccatcattcactcgggaacccctcttgtgaggggccatgagcgcgaagtgggcagcgtggcgtggacgagcgaggggaaacttgttagtgttggtgatgattacttgatcaggtgttggagtgaacagagggagttggcgaaggacttgagaacgggtggtgagggagagggtagacgatggggctgtggttgggcggatgttggcggggattgggatgaggaggatgaagaggagtgttga

SEQ ID NO: 29141 - protein, 744 aa, Muscodor strobelii
  misc_feature: SGI Peptide ID NO. 570004
  misc_feature (327)..(368): Pfam Id: PF00400 Pfam Desc: WD domain, G-beta repeat
  misc_feature (285)..(323): Pfam Id: PF00400 Pfam Desc: WD domain, G-beta repeat
  misc_feature (668)..(705): Pfam Id: PF00400 Pfam Desc: WD domain, G-beta repeat
  misc_feature (8)..(732): NCBI GI: 171692337 Blast Desc: protein product [Podospora anserina] gi|170946117|emb|CAP72918.1| protein product [Podospora anserina]
  misc_feature (20)..(737): NCBI GI: 7635822 Blast Desc: related to lethal(2) denticleless protein [Neurospora crassa]
  misc_feature (20)..(737): NCBI GI: 164426805 Blast Desc: NCU03668 [Neurospora crassa OR74A] gi|157071485|gb|EAA32208.2| NCU03668 [Neurospora crassa OR74A]
  misc_feature (6)..(612): NCBI GI: 116206518 Blast Desc: CHGG_02552 [Chaetomium globosum CBS 148.51] gi|88183149|gb|EAQ90617.1| CHGG_02552 [Chaetomium globosum CBS 148.51]
  misc_feature (24)..(730): NCBI GI: 156058216 Blast Desc: SS1G_03119 [Sclerotinia sclerotiorum 1980] gi|154700907|gb|EDO00646.1| SS1G_03119 [Sclerotinia sclerotiorum 1980]
  misc_feature (36)..(741): NCBI GI: 67523383 Blast Desc: AN2148.2 [Aspergillus nidulans FGSC A4] gi|40745036|gb|EAA64192.1| AN2148.2 [Aspergillus nidulans FGSC A4] gi|259487527|tpe|CBF86271.1| TPA: WD repeat protein nidulans
  misc_feature (24)..(742): NCBI GI: 121716709 Blast Desc: WD domain protein [Aspergillus clavatus NRRL 1] gi|119404045|gb|EAW14462.1| WD domain protein [Aspergillus clavatus NRRL 1]
  misc_feature (24)..(741): NCBI GI: 255953029 Blast Desc: Pc21g02020 [Penicillium chrysogenum Wisconsin 54-1255] gi|211588978|emb|CAP95099.1| Pc21g02020 [Penicillium chrysogenum Wisconsin 54-1255]
  misc_feature (36)..(741): NCBI GI: 119482077 Blast Desc: WD domain protein [Neosartorya fischeri NRRL 181] gi|119409221|gb|EAW19170.1| WD domain protein [Neosartorya fischeri NRRL 181]
  misc_feature (51)..(741): NCBI GI: 154309410 Blast Desc: BC1G_07599 [Botryotinia fuckeliana B05.10] gi|150852423|gb|EDN27615.1| BC1G_07599 [Botryotinia fuckeliana B05.10]
MNSPTSINENVNPLTSPPRKRAGKERKEPSITPRKFGRFFQPRSRVPSKLSPAREALLDLGSSAVNRRYQTPAPSSPLKPLSDVDVLQDDDDDDIETDSARQNKRRKFHHTPESSPIRPFLLSTSARSLEPCLLSPIDTPSSSSHNTRTSAKKTPHTGGRSSGRRRPGLQSSPLANDTPKQPPPKRLNTLAGRGLAGQLAQRELGALPQSGRSYLAYPAADWRNETSDFQTRPDDVHWCVSHEGPGHCIPFSAATCHRNGLTAIGDEEGRIRLLDSSSNSSEPFSKIHLSFTAHTNAIIDLDFSDDDYLLATASGDQTGQVIDMMTQSPVAYLGQHTASLKQIRFQPGQANSSVLATSSRDGSVQIWDMRCSRPVEDFQHDEGRATDLRYSAPHPKTGYAVNSFYHAHARTSRQLRSSVPAGPGDTPSRREIPSRSNDVSVTALQFLPRGQEHLLLTACEADASIKLWDIRFVHSSKNKVPTPISATTPPKSHGSWRPFGISSLALGSDGSRLYAVCKDNTVYAYSTAHLILGHAPELSTTNTEPPRRRPNAVTQNGLGPLYGFRHPSFHATSFYIKCAVRPARDGRSEMLAVGSNDACAVLFPTNERYFQDELLGQMGNLSLEDSTVATTSVDNPIRRTDSVRRPLFRKNSTTNFSARLKDDIPIIHSGTPLVRGHEREVGSVAWTSEGKLVSVGDDYLIRCWSEQRELAKDLRTGGEGEGRRWGCGWADVGGDWDEEDEEEC

SEQ ID NO: 29142 - DNA, 936 bp, Muscodor strobelii
  misc_feature: SGI cDNA ID NO. 570005
  misc_feature: Encodes the peptide sequence at SEQ ID NO 29143
atggcttcttcagaagtagatcaaaagtttctaggcaaacttgcaaaacaggccggacaaactaatgaactactttcgtcgatgctctttaagattctaggattatcgaacagtctcgcagagcacacaatcaaggctagaaaacaacgacgattggataccacccgggcgacacaatcactggagctgtactttcgcataatatggctctcgagggagggtctggtaatgctagagcagtatgtgctgccgatgataggcgatcacagtgtgctcaaagtactcgtttataagctacgagcatcattctatcacatctttgtactattccacaacaatccttcagtctcatcgatgggaataaacacaccgatccccgggatcccaccgataccccgactggataagggcaaaggtgtcgatagaggagaaggcgttcctcctaatgtacgagattcagtacagcctacacatccattggaaggcggtcctgtaggtccgccaccaggatttgggcctagagcacccgaaccagtcggtggcttccttctgccatccgtcaattatatacctatggcgcaccaatgcttcaaagatgctgtggaattcgctgacgctcttctttggggatcgcattcactccggctatctgtcaaaacagaatacgcagctttcttgtacgagtgtcttcatgactatgaaggaagtcggaagcttgcaaaagatactatacaagaagtgtatgatgcctctgagggtatggacgatgatatgttcaatgacgcttgcgaacttgtcactgtactagggaagatgatgaaacgaggattgcgaccggatagagggcaaagtccggcaactcaagctacagctacatctcaagccgacagtgtagcaacggctattcctgctgctggaatggagaacccgatatga

SEQ ID NO: 29143 - protein, 311 aa, Muscodor strobelii
  misc_feature: SGI Peptide ID NO. 570005
  misc_feature (1)..(311): NCBI GI: 46126143 Blast Desc: FG07449.1 [Gibberella zeae PH-1]
  misc_feature (1)..(311): NCBI GI: 256730892 Blast Desc: [Nectria haematococca mpVI 77-13-4]
  misc_feature (1)..(287): NCBI GI: 171692329 Blast Desc: protein product [Podospora anserina] gi|170946113|emb|CAP72914.1| protein product [Podospora anserina]
  misc_feature (1)..(277): NCBI GI: 116206530 Blast Desc: CHGG_02558 [Chaetomium globosum CBS 148.51] gi|88183155|gb|EAQ90623.1| CHGG_02558 [Chaetomium globosum CBS 148.51]
  misc_feature (1)..(297): NCBI GI: 156065055 Blast Desc: SS1G_00538 [Sclerotinia sclerotiorum 1980] gi|154691397|gb|EDN91135.1| SS1G_00538 [Sclerotinia sclerotiorum 1980]
  misc_feature (1)..(276): NCBI GI: 225560067 Blast Desc: conserved [Ajellomyces capsulatus G186AR]
  misc_feature (1)..(276): NCBI GI: 240278817 Blast Desc: conserved [Ajellomyces capsulatus H143]
  misc_feature (1)..(276): NCBI GI: 212542619 Blast Desc: conserved [Penicillium marneffei ATCC 18224] gi|210066371|gb|EEA20464.1| conserved [Penicillium marneffei ATCC 18224]
  misc_feature (1)..(296): NCBI GI: 154319993 Blast Desc: BC1G_01977 [Botryotinia fuckeliana B05.10] gi|150854716|gb|EDN29908.1| BC1G_01977 [Botryotinia fuckeliana B05.10]
  misc_feature (1)..(297): NCBI GI: 258568888 Blast Desc: conserved [Uncinocarpus reesii 1704] gi|237906634|gb|EEP81035.1| conserved [Uncinocarpus reesii 1704]
MASSEVDQKFLGKLAKQAGQTNELLSSMLFKILGLSNSLAEHTIKARKQRRLDTTRATQSLELYFRIIWLSREGLVMLEQYVLPMIGDHSVLKVLVYKLRASFYHIFVLFHNNPSVSSMGINTPIPGIPPIPRLDKGKGVDRGEGVPPNVRDSVQPTHPLEGGPVGPPPGFGPRAPEPVGGFLLPSVNYIPMAHQCFKDAVEFADALLWGSHSLRLSVKTEYAAFLYECLHDYEGSRKLAKDTIQEVYDASEGMDDDMFNDACELVTVLGKMMKRGLRPDRGQSPATQATATSQADSVATAIPAAGMENPI

SEQ ID NO: 29144 - DNA, 3882 bp, Muscodor strobelii
  misc_feature: SGI EST ID NO. CUFF.68935.1
  misc_feature: Variant of the nucleotide sequence at SEQ ID NO 29142
gggctgcatgataaatggggagatctttttgcggctaggcggaaactaatttcccaatttctcattggtgtcctccctagcgttttgaagactcgactttcgagctttcttttctttggttgattgaaggctcccacctccacatctttccagctgtctcagctattttggttcagccaagcgtctcacgcttccactcattcgctacctctcagtcgctcattcaacaaagtcgatcgttttgaaggcacttaacttgtgtattgtatattgtaaaggaagtgagttacaccaatccagcgtctcatccgctgccgtcggcattccctttcggttccgagtccgcagaagctggtcaaaccccaagtggccggctctagctctcatcgtgcactgcgtgggagcccatctgaacaactcatcttgcatcgctcgcctgcatcgtcaacggcctaccattcgcttgcggctcatccaccaagcccacacgcgccacatcccgtgtcgccattcctgctttgctctcctcgtggctgtcgtcattgcttgctctagatctttttactgttgcttgtctacgtaggtagactcggcatcgaccagccatagctgtgctgttggggaaaagccccatatcattgcgtcgaactcgtggagcgcgtcgggccctgcattaagctaaactgcgtctgacccggactcggtccacaactcgcagttctctcatgcacacgacgtcgacctgcagagtcctttgcctctttttctcgcacattgccttacatatgcggccctaagacctacatacatagacatacataaacattgggtttctggtacgcctgcgccgcgtccccggacatttcacatccttccgcgtgtttccccttttccaaagcgcgttgctccgtctgcacatctgaacatggcttctaaattctcaaaaccttaacttttgactattatcgagaggagaagccccctctcacggaggatactgctttcactgctctggatcttgtacctgcacgctggagcttgtactatttgcgcgtggtccatatttggcgactccacataatctcatacccgaaaacctgtcgaccagtcctttgcgacctcacaccgccattggcttgagcttcgagtctcgctatctatcaggtgtattcccagtgcgctggcgcggctatatatacacttttcttacagtttgacaatcaattggcggctgcaagacgaccgacgccgccatgcttttcgatctcgaaagtatcacaacaccgaaacctgccctccaccgtcagcctcaaccctgccgcatttgtttgcccgaatcacctcgtctctgatttgcccacaagattaactttttagcctccccattacgttcggtcttcttgttcatgctgtatcatattgtcctcttgtaatttcgaatgtttaatgttagttgcgcttgacgtctctgtcaatctgtccggatcagtgccgcaatcttttgctcgtttagagttgctatttcacacattctgttcttgtcacatgcgcccgaatcacgccaagttccagcagcataaccatcgacacacatgtctggatacagaatacgtcacgtccgtcggatctcatactgttcagagctacggagcagtgtcttagtacatgctttcatgaacagagacccattacccgactcaatacatctgcacccataacaaatttacacacctgaaaagcacatctttaaagtgcaatccgtttttacatcgactggctggcggagggaaccatacatagagacgacgccatctgggattgcaatcgtcattcccacggaaggttcccattcggtcatcgccaccgcctttttcgatggcttcttcagaagtagatcaaaagtttctaggcaaacttgcaaaacaggccggacaaactaatgaactactttcgtcgatgctctttaagattctaggattatcgaacagtctcgcagagcacacaatcaaggctagaaaacaacgacgattggataccacccgggcgacacaatcactggagctgtactttcgcataatatggctctcgagggagggtctggtaatgctagagcagtatgtgctgccgatgataggcgatcacagtgtgctcaaagtactcgtttataagctacgagcatcattctatcacatctttgtactattccacaacaatccttcagtctcatcgatgggaataaacacaccgatccccgggatcccaccgataccccgactggataagggcaaaggtgtcgatagaggagaaggcgttcctcctaatgtacgagattcagtacagcctacacatccattggaaggcggtcctgtaggtccgccaccaggatttgggcctagagcacccgaaccagtcggtggcttccttctgccatccgtcaattatatacctatggcgcaccaatgcttcaaagatgctgtggaattcgctgacgctcttctttggggatcgcattcactccggctatctgtcaaaacagaatacgcagctttcttgtacgagtgtcttcatgactatgaaggaagtcggaagcttgcaaaagatactatacaagaagtgtatgatgcctctgagggtatggacgatgatatgttcaatgacgcttgcgaacttgtcactgtactagggaagatgatgaaacgaggattgcgaccggatagagggcaaagtccggcaactcaagctacagctacatctcaagccgacagtgtagcaacggctattcctgctgctggaatggagaacccgatatgatggacattccgcaacactcagcatgccatcgacaatttgatacgacggcaacaggtatggcaagatggtcattcaaccttatcaaaactgccgatcttccacaatgaagaaccatctggaaattctttgggctgcttccactaaggacatgtaacttggtttacgcaaataacgccataaagcatcagcctttctcgacacacaactcgacatcatcaacaccgatacatacaatgacctcacaaccttcgacattaccaccttgcatatcaggagtttagaggccacacggaatcgcatagcgcattgctttcataaggtcatgggtagaccgactggagttttcatgtccgttcaccaaaagaaataaggtacacaacattacttggccttacctcgtccgaaatccatatcccacatacctatgtaccgaccttatcaccctcaacacttgtaatatttcaccagtacattcagaagataccccacttcccaccaaacattatccgaagcagcaaaggcacgccgaaaccaaccgcagcaacagtgaagatgcgactgcccatatcaagcttaatatactcccgaggctgtctgcgtacctaaataagagactctttgtatgcactaaccactgtgtgttactaatcaatcaatcggcacagtcgctgtgccaagttcttgtacatagcttcttataaaagtttaacttgcatgcaaaaactcagtcaggatatcaccatgttatcttcagaccaataagatgaaaactctgaatccatgtttgactcgctgcttgactcgcgaactccaggcaataatgaacttattagtatctagtgctcgaagtatgaatatacaccgagtggactattgtcgcccataacagctcgctgggtagtactggttcttgctgctccgttattcagcacctggcggctcctatgtagacgacgctcatagagtctcttgtgggtgtaaatgtgtgccgacttacaatacatcgcatctagctgagtacacaaggagcgtacatgcgattaccctagtaatttgcagagtaaaggaatt

SEQ ID NO: 29145 - DNA, 1713 bp, Muscodor strobelii
  misc_feature: SGI cDNA ID NO. 570006
  misc_feature: Encodes the peptide sequence at SEQ ID NO 29146
atggctttgcaaccgacagatggattcactaccttgcctgctgagatccttgagaagatcctcaaaccggtgtcccaaaatggactcaagcagctctctcagacctccagaagactgtacaaggaggtcgatgagcggctctggaagggagttgtcattgatccacgcgacacagtcggcttcccctggccgaaattagctcatgtacagcacttacactttcggattggtgacccaaagttcgatacttgtaactcctacatgatgtccgagattgtggagtttgtctacagtcttctttcgcagctgaagaatggccagctgcagagtttcagttgggatatctcagcagccctccatgttatgatctttggccagggcagccagctgttacgccagaaatccatcaagcatttccacttgtctaactgtattaatctctcctttggacaacatggcgaccatcttgtgtgtggacaggatttattcgcgggtcgccaactgaagacgctcaagctccgagcgccccctgtgtgccatacccattcccgagaaggctacaagcccactctcattgaggctcataaatcgaccttggaggaactccatgtcgatctcgtcagttacagaagatggagtcagtggcctcatatgacgaatcgacctcctttcattgaagacctcgtgtttcttggcctcgtctccttccaacaaaacgtcgtgcggccaacacttccctcgctacgcatactttccctcacggaagtgccagctccatctgctctagcagaagctctcacgcttcaccagctaaccgcacttacactgcgtaactgtcccggagcgaggggcttcatttccgaacttcgtcacgctatcgacgtagataagcggattcgattccgaaagcttgagttccaagcaattccactatcaccagattccaggacggacctaacacagatccagagagacatgtggtcactttcagcaaacgtgttcaatgccatctggcaactcaatggcctagaagagctatatgttgatatgacaatgactttccggcagtttttcgagggctggagggcaatcgcgtcccacaagaacacactcaagagactcgttctagtggatcggcctctcgctcaccatcagtcccttttgggtctgacaccaccgctgattctcgaggcttgtgacatgcatagacaccctttggagaagcggaactgtttcccccacctcgagttcatcggtattgaatgccgacccagtcttatgctgtcgttactgccgatcgtcacggagaccgacaacctgaaagttgtgcacatacgacatcactatcgctatcttcgcgacgtcgatcacatgcttcaacagttccacttgactggcgacgctcgagtcgaccagcaactcagtcgcggtcccgaactgatcagagagctgttacccgaagctgaagctttattcaacgctctcccctcactccaatatctagcatatggcgtgttttggcgtggaggatatgcagatgagcagtttgtcatgaaacgagagtcagataacgaaaattgggtaggaactttggtccatggcacgccggagtggcatgttttcatggaagagtatggccagtccctagaagcatgcccagagtctatctatccggagctccctcgcgatcgtatcgagcacagacatttgtag

SEQ ID NO: 29146 - protein, 570 aa, Muscodor strobelii
  misc_feature: SGI Peptide ID NO. 570006
  misc_feature (243)..(553): NCBI GI: 256722729 Blast Desc: NECHADRAFT_87187 [Nectria haematococca mpVI 77-13-4]
  misc_feature (230)..(557): NCBI GI: 116206536 Blast Desc: CHGG_02561 [Chaetomium globosum CBS 148.51] gi|88183158|gb|EAQ90626.1| CHGG_02561 [Chaetomium globosum CBS 148.51]
  misc_feature (9)..(559): NCBI GI: 46117532 Blast Desc: FG04608.1 [Gibberella zeae PH-1]
  misc_feature (19)..(553): NCBI GI: 119197357 Blast Desc: CIMG_10442 [Coccidioides immitis RS]
  misc_feature (89)..(381): NCBI GI: 171683043 Blast Desc: protein product [Podospora anserina] gi|170941481|emb|CAP67132.1| protein product [Podospora anserina]
  misc_feature (76)..(553): NCBI GI: 154275748 Blast Desc: [Ajellomyces capsulatus NAm1] gi|150415165|gb|EDN10527.1| [Ajellomyces capsulatus NAm1]
  misc_feature (1)..(306): NCBI GI: 242819486 Blast Desc: TSTA_057140 [Talaromyces stipitatus ATCC 10500] gi|218713794|gb|EED13218.1| TSTA_057140 [Talaromyces stipitatus ATCC 10500]
  misc_feature (12)..(375): NCBI GI: 145229819 Blast Desc: An01g07930 [Aspergillus niger] gi|134055331|emb|CAK43885.1| protein product [Aspergillus niger]
  misc_feature (99)..(289): NCBI GI: 256725185 Blast Desc: [Nectria haematococca mpVI 77-13-4]
  misc_feature (92)..(376): NCBI GI: 116201195 Blast Desc: CHGG_08482 [Chaetomium globosum CBS 148.51] gi|88177000|gb|EAQ84468.1| CHGG_08482 [Chaetomium globosum CBS 148.51]
MALQPTDGFTTLPAEILEKILKPVSQNGLKQLSQTSRRLYKEVDERLWKGVVIDPRDTVGFPWPKLAHVQHLHFRIGDPKFDTCNSYMMSEIVEFVYSLLSQLKNGQLQSFSWDISAALHVMIFGQGSQLLRQKSIKHFHLSNCINLSFGQHGDHLVCGQDLFAGRQLKTLKLRAPPVCHTHSREGYKPTLIEAHKSTLEELHVDLVSYRRWSQWPHMTNRPPFIEDLVFLGLVSFQQNVVRPTLPSLRILSLTEVPAPSALAEALTLHQLTALTLRNCPGARGFISELRHAIDVDKRIRFRKLEFQAIPLSPDSRTDLTQIQRDMWSLSANVFNAIWQLNGLEELYVDMTMTFRQFFEGWRAIASHKNTLKRLVLVDRPLAHHQSLLGLTPPLILEACDMHRHPLEKRNCFPHLEFIGIECRPSLMLSLLPIVTETDNLKVVHIRHHYRYLRDVDHMLQQFHLTGDARVDQQLSRGPELIRELLPEAEALFNALPSLQYLAYGVFWRGGYADEQFVMKRESDNENWVGTLVHGTPEWHVFMEEYGQSLEACPESIYPELPRDRIEHRHL

SEQ ID NO: 29147 - DNA, 1395 bp, Muscodor strobelii
  misc_feature: SGI cDNA ID NO. 570007
  misc_feature: Encodes the peptide sequence at SEQ ID NO 29148
atgcctcaagccgtgcttgattcgccgttcggcaggatgctacaaccacagctgacacagatggttgatgcaagaaaagctcaacacaatggacttcttggcattcaagacacacagagtgctcaacaattatcaaatggttctgggccaagatctgcatccacagcggcttcagcaacgccagctgtattagaagtcaccaatttgccagcgttaaacacagcacttgagtttagcccacagaaatctgcaatcatcttcttcacttccgccacatgtcctccctgcaagatgctctatcccatatacaatgagcttgctacagagcacggaaaagacgtgactttgatcaaagtggatacctctcgggcgtttgacgttgcccagaaatatggcatcactgcaacaccgacattcaagacatttgttcacggccaggagcaagagagttgggctggggcagatgcgtctcgcttacgctcaaccgtaaagctcttagcacaaatggctgcgggaccgtcacatccacaccgactattgcgactcccaaatatcgcgaatccagacgcgaagtcggtcctgttcacaaagataccgccactagataagctcttgtcaaagttaggcccaggagcaaatgacaaggctattcagggcatgaagcattttatagaagccagatctacagatggtcccgccatggctaccctccccgacgtaccggcattctcacaatatcttatcacggctgtatccgatctaagcccagatctacttttcccagtcgtggacttatttcgatgtgcgcttatcgatcctcgtctcagcggctactttgctgaggagtccggtcatcagactgtcctcgccatattagaagctgtaaatagtgatgctcagtgtccctacgcactgcggctaattacactacacatggcgtgcaatctcttttcgagtcccttgttcccagagcagatcctcaaacaggctcccttgagaagtgccattactcaactcatttctactagtttcctagacgacaatcagtataaaatccgcctagtagcatctgccttgctatacaacgtagcacttgccaatagccattgcagactgcgatcccaggatgccctcccagaagatgatcagatcgaactagccgcttctgtgctagaagcaatctcgcaagaagaatcctcgggggaggctctgcatgctatgctattggcattagggctcctagcatactgcatgccaattgaccgagaattgatcgacttgctcaggacgatggacgcatcaggcactattctagcgaaaacaaaatttcccgacgaaccactgatcaaagaagttgggagtgagctgctaggaaagggtctcgcgaagcaatag

SEQ ID NO: 29148 - protein, 464 aa, Muscodor strobelii
  misc_feature: SGI Peptide ID NO. 570007
  misc_feature (186)..(456): Pfam Id: PF08324 Pfam Desc: PUL domain
  misc_feature (60)..(165): Pfam Id: PF00085 Pfam Desc: Thioredoxin
  misc_feature (93)..(165): Pfam Id: PF00085 Pfam Desc: Thioredoxin
  misc_feature (1)..(463): NCBI GI: 16944501 Blast Desc: conserved [Neurospora crassa]
  misc_feature (1)..(463): NCBI GI: 164426838 Blast Desc: NCU03714 [Neurospora crassa OR74A] gi|157071496|gb|EAA32254.2| conserved [Neurospora crassa OR74A]
  misc_feature (1)..(463): NCBI GI: 256731069 Blast Desc: [Nectria haematococca mpVI 77-13-4]
  misc_feature (1)..(464): NCBI GI: 261355677 Blast Desc: conserved [Verticillium albo-atrum VaMs.102]
  misc_feature (1)..(463): NCBI GI: 46121531 Blast Desc: FG05144.1 [Gibberella zeae PH-1]
  misc_feature (1)..(433): NCBI GI: 116206508 Blast Desc: CHGG_02547 [Chaetomium globosum CBS 148.51] gi|88183144|gb|EAQ90612.1| CHGG_02547 [Chaetomium globosum CBS 148.51]
  misc_feature (1)..(458): NCBI GI: 39946054 Blast Desc: MGG_08147 [Magnaporthe grisea 70-15] gi|145019400|gb|EDK03628.1| MGG_08147 [Magnaporthe grisea 70-15]
  misc_feature (1)..(461): NCBI GI: 154312300 Blast Desc: BC1G_06183 [Botryotinia fuckeliana B05.10] gi|150850146|gb|EDN25339.1| BC1G_06183 [Botryotinia fuckeliana B05.10]
  misc_feature (1)..(461): NCBI GI: 156064215 Blast Desc: SS1G_00115 [Sclerotinia sclerotiorum 1980] gi|154690977|gb|EDN90715.1| SS1G_00115 [Sclerotinia sclerotiorum 1980]
  misc_feature (1)..(463): NCBI GI: 171692341 Blast Desc: protein product [Podospora anserina] gi|170946119|emb|CAP72920.1| protein product [Podospora anserina]
MPQAVLDSPFGRMLQPQLTQMVDARKAQHNGLLGIQDTQSAQQLSNGSGPRSASTAASATPAVLEVTNLPALNTALEFSPQKSAIIFFTSATCPPCKMLYPIYNELATEHGKDVTLIKVDTSRAFDVAQKYGITATPTFKTFVHGQEQESWAGADASRLRSTVKLLAQMAAGPSHPHRLLRLPNIANPDAKSVLFTKIPPLDKLLSKLGPGANDKAIQGMKHFIEARSTDGPAMATLPDVPAFSQYLITAVSDLSPDLLFPVVDLFRCALIDPRLSGYFAEESGHQTVLAILEAVNSDAQCPYALRLITLHMACNLFSSPLFPEQILKQAPLRSAITQLISTSFLDDNQYKIRLVASALLYNVALANSHCRLRSQDALPEDDQIELAASVLEAISQEESSGEALHAMLLALGLLAYCMPIDRELIDLLRTMDASGTILAKTKFPDEPLIKEVGSELLGKGLAKQ

SEQ ID NO: 29149 - DNA, 1712 bp, Muscodor strobelii
  misc_feature: SGI EST ID NO. CUFF.68922.0
  misc_feature: Variant of the nucleotide sequence at SEQ ID NO 29147
catgcctcaagccgtgcttgattcgccgttcggcaggatgctacaaccacagctgacacagatggttgatgcaagaaaagctcaacacaatggacttcttggcattcaagacacacagagtgctcaacaattatcaaatggttctgggccaagatctgcatccacagcggcttcagcaacgccagctgtattagaagtcaccaatttgccagcgttaaacacagcacttgagtttagcccacagaaatctgcaatcatcttcttcacttccgccacatgtcctccctgcaagatgctctatcccatatacaatgagcttgctacagagcacggaaaagacgtgactttgatcaaagtggatacctctcgggcgtttgacgttgcccagaaatatggcatcactgcaacaccgacattcaagacatttgttcacggccaggagcaagagagttgggctggggcagatgcgtctcgcttacgctcaaccgtaaagctcttagcacaaatggctgcgggaccgtcacatccacaccgactattgcgactcccaaatatcgcgaatccagacgcgaagtcggtcctgttcacaaagataccgccactagataagctcttgtcaaagttaggcccaggagcaaatgacaaggctattcagggcatgaagcattttatagaagccagatctacagatggtcccgccatggctaccctccccgacgtaccggcattctcacaatatcttatcacggctgtatccgatctaagcccagatctacttttcccagtcgtggacttatttcgatgtgcgcttatcgatcctcgtctcagcggctactttgctgaggagtccggtcatcagactgtcctcgccatattagaagctgtaaatagtgatgctcagtgtccctacgcactgcggctaattacactacacatggcgtgcaatctcttttcgagtcccttgttcccagagcagatcctcaaacaggctcccttgagaagtgccattactcaactcatttctactagtttcctagacgacaatcagtataaaatccgcctagtagcatctgccttgctatacaacgtagcacttgccaatagccattgcagactgcgatcccaggatgccctcccagaagatgatcagatcgaactagccgcttctgtgctagaagcaatctcgcaagaagaatcctcgggggaggctctgcatgctatgctattggcattagggctcctagcatactgcatgccaattgaccgagaattgatcgacttgctcaggacgatggacgcatcaggcactattctagcgaaaacaaaatttcccgacgaaccactgatcaaagaagttgggagtgagctgctaggaaagggtctcgcgaagcaatagagaaggtataaagatttcatgaacgaacacgcttagaagtgtaagaaatagagaggcttcgatagccgatgatagtatttagctttgaatacctttcctattgccctcattcatatgacatttgtattcatagattgagtagacgcgaatttgattctgacttcaaagataataaccacgtctcaatagtcaatctcagtttgcaaatgtgaggaaatagttgtttgtgacttaaaacacgaaactacctatgccatgctatataatagcgactacacatatcgaatttattcccgcgtacgtcattcaagtgatt

SEQ ID NO: 29150 - DNA, 1908 bp, Muscodor strobelii
  misc_feature: SGI cDNA ID NO. 570008
  misc_feature: Encodes the peptide sequence at SEQ ID NO 29151
atggtctcgctcccgcgccacctattgccagagtcattaccgcaattacagcagcattccacaaacgagcagtattatattgaagacatagaggtgggagatatgcgatcctccgctattgtccgttcttcggcctcgactccttctttgcgctcccgcgatggaactctaccagcgcacatgatgagggccaatggaggtggaaatgtgaaggtcgttgtgcgggtgagggcgtttctgcccagagagttacagcgaggtgcagattgcttgattagcatggatcccatcacccagatgaccacgctgcatgttccaggcgacaccgatccagccaacagccgctcaaagactcgtaaagtcattgaagagaagtcgttcacatttgacaactccttttggagccatgacacagacgaccgccactatgcacaccaggaggatgtctacaacagtttgggagaggaatttctcgaccataatttcgagggctaccacacgtgcatcttcgcctacggacaaactggatcagggaagtcgtacacgatgatgggaacacaagagcagcccggtctgattccacgaacttgcgaagacctattccagcgcatcgagtccgcccagaacgagacacccaacatctcttatcacgtgcgagtatcctactttgaagtatacaacgagcacgttcgcgatctcctcgtacccgtcaatcctaatcaaccaccatactacctaaagattcgagagtcgcctgtcgatggaccttatgtcaaggatctgactgaagtaccagtcagaaattttaacgagattctgcgatacatgaaagccggagattctagccgaacagtagcgagcaccaagatgaacgacaccagtagtcgaagtcatgcagtcttcaccatcatgttgaagcagatccaccatgacatggagacggacgagaccaccgagagaagctcgcgcatccgattagtcgatctcgcaggcagtgagcgagctaaatctacagaggcaacaggagcgagattgcgcgagggcagcaatatcaacaagtcgttaacaacattaggccgggtcattgcagcacttgcagatcccaaggcaggtcgcccaggcaagcgaagcaaggatatcgtgccttatcgagattctattctcacatggctactcaaagactctcttggtgggaacagcaagacggcaatgattgcttgtattgcaccctcggattacgaggaaaccctgtcaacacttcgctatgcagaccaggcgaagagaatccgcacccgtgctgttgtcaaccaggatcatatcagcactgccgaacgtgatgcccagattgcggccatggctgaagagatccgtcttctgcaagcttctgtttctgattcccgccgccgattggcagagaaggagagccgtgagagtgaagagcgtctggaggagtaccagaaccgtgtggttgccatgcagcgcatgatggaggaacgcagtcttgtcgcagaaggcaagatccggagtttgcagaccgagaacgaagctctgcgcttacatctcaagctcgctctcgacagtattaagaacccgatacctaatgttgttgttcagccgcggtcggaagtcgttgaggaaacagtggattcgggcgaagtcgacgaagttctggccggaaaggaagccgaaagccgcaggacgagcctcgttgacgaggcatactacgatgaaagcgatgatgaggtggacgatgttgtggagcacgagcagaaagccaatgatatgcaggaccatatgcacgagttgctcaaggacctgtcgctattcaggcgcaagattgtggacgacaagggccgattctttgatgatggccagcgacagccgttcggtgtcaagacgaatgcctaa

SEQ ID NO: 29151 - protein, 635 aa, Muscodor strobelii
  misc_feature: SGI Peptide ID NO. 570008
  misc_feature (75)..(430): Pfam Id: PF00225 Pfam Desc: Kinesin motor domain
  misc_feature (41)..(632): NCBI GI: 29421286 Blast Desc: kinesin [Gibberella moniliformis]
  misc_feature (41)..(620): NCBI GI: 156064583 Blast Desc: SS1G_00299 [Sclerotinia sclerotiorum 1980] gi|154691161|gb|EDN90899.1| SS1G_00299 [Sclerotinia sclerotiorum 1980]
  misc_feature (45)..(634): NCBI GI: 145612205 Blast Desc: MGG_08156 [Magnaporthe grisea 70-15] gi|145019411|gb|EDK03639.1| MGG_08156 [Magnaporthe grisea 70-15]
  misc_feature (65)..(634): NCBI GI: 256730946 Blast Desc: [Nectria haematococca mpVI 77-13-4]
  misc_feature (65)..(632): NCBI GI: 46125531 Blast Desc: FG07143.1 [Gibberella zeae PH-1]
  misc_feature (42)..(634): NCBI GI: 85103307 Blast Desc: NCU03715 [Neurospora crassa OR74A] gi|16944500|emb|CAC28851.2| related to KINESIN-LIKE PROTEIN KIF1C [Neurospora crassa] gi|28923037|gb|EAA32255.1| NCU03715 crassa
  misc_feature (42)..(630): NCBI GI: 242762013 Blast Desc: kinesin family protein [Talaromyces stipitatus ATCC 10500] gi|218723489|gb|EED22906.1| kinesin family protein [Talaromyces stipitatus ATCC 10500]
  misc_feature (46)..(634): NCBI GI: 212529866 Blast Desc: kinesin family protein [Penicillium marneffei ATCC 18224] gi|210074488|gb|EEA28575.1| kinesin family protein [Penicillium marneffei ATCC 18224]
  misc_feature (37)..(620): NCBI GI: 145249804 Blast Desc: An14g06180 [Aspergillus niger] gi|134081925|emb|CAK97191.1| protein product [Aspergillus niger]
  misc_feature (35)..(634): NCBI GI: 225561678 Blast Desc: kinesin family protein [Ajellomyces capsulatus G186AR]
MVSLPRHLLPESLPQLQQHSTNEQYYIEDIEVGDMRSSAIVRSSASTPSLRSRDGTLPAHMMRANGGGNVKVVVRVRAFLPRELQRGADCLISMDPITQMTTLHVPGDTDPANSRSKTRKVIEEKSFTFDNSFWSHDTDDRHYAHQEDVYNSLGEEFLDHNFEGYHTCIFAYGQTGSGKSYTMMGTQEQPGLIPRTCEDLFQRIESAQNETPNISYHVRVSYFEVYNEHVRDLLVPVNPNQPPYYLKIRESPVDGPYVKDLTEVPVRNFNEILRYMKAGDSSRTVASTKMNDTSSRSHAVFTIMLKQIHHDMETDETTERSSRIRLVDLAGSERAKSTEATGARLREGSNINKSLTTLGRVIAALADPKAGRPGKRSKDIVPYRDSILTWLLKDSLGGNSKTAMIACIAPSDYEETLSTLRYADQAKRIRTRAVVNQDHISTAERDAQIAAMAEEIRLLQASVSDSRRRLAEKESRESEERLEEYQNRVVAMQRMMEERSLVAEGKIRSLQTENEALRLHLKLALDSIKNPIPNVVVQPRSEVVEETVDSGEVDEVLAGKEAESRRTSLVDEAYYDESDDEVDDVVEHEQKANDMQDHMHELLKDLSLFRRKIVDDKGRFFDDGQRQPFGVKTNA

SEQ ID NO: 29152 - DNA, 3731 bp, Muscodor strobelii
  misc_feature: SGI EST ID NO. CUFF.68994.0
  misc_feature: Variant of the nucleotide sequence at SEQ ID NO 29150
ccgacccacaacattgccagcgcacccccagcagagcagtgcaccctggactgtggattagatgtacggcattccgagcaatcttaataggcggcgatatcgtgaagcaattgacgacgtctgcgacaccttgactggaatggtctcgctcccgcgccacctattgccagagtcattaccgcaattacagcagcattccacaaacgagcagtattatattgaagacatagaggtgggagatatgcgatcctccgctattgtccgttcttcggcctcgactccttctttgcgctcccgcgatggaactctaccagcgcacatgatgagggccaatggaggtggaaatgtgaaggtcgttgtgcgggtgagggcgtttctgcccagagagttacagcgaggtgcagattgcttgattagcatggatcccatcacccagatgaccacgctgcatgttccaggcgacaccgatccagccaacagccgctcaaagactcgtaaagtcattgaagagaagtcgttcacatttgacaactccttttggagccatgacacagacgaccgccactatgcacaccaggaggatgtctacaacagtttgggagaggaatttctcgaccataatttcgagggctaccacacgtgcatcttcgcctacggacaaactggatcagggaagtcgtacacgatgatgggaacacaagagcagcccggtctgattccacgaacttgcgaagacctattccagcgcatcgagtccgcccagaacgagacacccaacatctcttatcacgtgcgagtatcctactttgaagtatacaacgagcacgttcgcgatctcctcgtacccgtcaatcctaatcaaccaccatactacctaaagattcgagagtcgcctgtcgatggaccttatgtcaaggatctgactgaagtaccagtcagaaattttaacgagattctgcgatacatgaaagccggagattctagccgaacagtagcgagcaccaagatgaacgacaccagtagtcgaagtcatgcagtcttcaccatcatgttgaagcagatccaccatgacatggagacggacgagaccaccgagagaagctcgcgcatccgattagtcgatctcgcaggcagtgagcgagctaaatctacagaggcaacaggagcgagattgcgcgagggcagcaatatcaacaagtcgttaacaacattaggccgggtcattgcagcacttgcagatcccaaggcaggtcgcccaggcaagcgaagcaaggatatcgtgccttatcgagattctattctcacatggctactcaaagactctcttggtgggaacagcaagacggcaatgattgcttgtattgcaccctcggattacgaggaaaccctgtcaacacttcgctatgcagaccaggcgaagagaatccgcacccgtgctgttgtcaaccaggatcatatcagcactgccgaacgtgatgcccagattgcggccatggctgaagagatccgtcttctgcaagcttctgtttctgattcccgccgccgattggcagagaaggagagccgtgagagtgaagagcgtctggaggagtaccagaaccgtgtggttgccatgcagcgcatgatggaggaacgcagtcttgtcgcagaaggcaagatccggagtttgcagaccgagaacgaagctctgcgcttacatctcaagctcgctctcgacagtattaagaacccgatacctaatgttgttgttcagccgcggtcggaagtcgttgaggaaacagtggattcgggcgaagtcgacgaagttctggccggaaaggaagccgaaagccgcaggacgagcctcgttgacgaggcatactacgatgaaagcgatgatgaggtggacgatgttgtggagcacgagcagaaagccaatgatatgcaggaccatatgcacgagttgctcaaggacctgtcgctattcaggcgcaagattgtggacgacaagggccgattctttgatgatggccagcgacagccgttcggtgtcaagacgaatgcctaagcagttgtggtcgattctttgtttgtcacgatgggaaagcctcggtgtttggagtaattgttggagtctgaactgaaatttgagtacatggatatgaaatggattgttcgtattcatggatcgcgtggctagtatcaagtaactgagcttttgcaagcttctgaaagcagatagtatacttgtatgaatgacggtacaaaatgagattttcattacaaacctttgcttgagtccctagatcgctcaattcatttactggtggatttgcacggcatgatcgaacaataggattctcatcgcttcgaaaggctcatatttcggacaaaagagcataacgagtacaatggtccgctaaattccatgtcgtaccaatagttgaccgcaacacatatgccgtccgccgaacaagactgcgacaccttgtgatacctaatgcctgattagtgactgcagcaataaatctgaagctacaggattctcaccacattgccggcagataaagcatatccccggggtcaagcgtcacgcgcatcggatctgctagatgtgaatactgagtggcgtttatttcgggttcatcaggatcccatgtcgcaaatgggactttcggcactccacgatcgtcctcattatcacactggtccaactcaagctttaaattgaccccgtcacgaatgtacgaagtagaagccaaatctctctcgttcacacagggctgaaacagcgcaggtagcaggacaaagtgtttgcggcccgcgatctggacgtagatattctcgtagttgtcacgatgtagtgccgtcacagaccgcgagttgccgatccacatgttgatagcatctggctctcgttccagtgcaatgcgggcaaagggaatgctcgtctgcacttcggagaagagtgatacatactcgtggcgtaggttatcgttttctatgggcaactagtaagtaccatacagtaccgagacagttgtgcgttttttctgtagcatttctaactcacgtggagtctgtttccaagggagatgtagcacgtacgtgtttgggcatatcgcacctcgttatcattaactgtcgagcctacttcctcctgtcgcgtgacatagtccaagaaatcgccaaacttctgattttcctcatgcggcttcgcgaagatgagatttccgccatcgtctaacgtaggtgcatcagcgttgccggccggcgtaacagctacgttcacctcgtggccatcgagggcggtccgcaaatacgccgcatcccactttcgcgtggcagtccagtcccgagcgccgccacgcaccacaaagggagtgtttcgtgagacataacgcatgaattcgagaggacttgggtcgatgtccagctcttcgattcgtgacgaattgagctcattgtatgtcgtcagtaactctgcgaccgcgtcttcgggcgcatcagcctccatttcagggagtgttgcttgagacagactaatagatggtatggcgtgagtgaggtgacaggtcacagagttcccccaccactggctcagtatttgcgctgcggatgttcccgcgaactcctccgcctctacccagactgtttactgatcggcccctcatcatcaccgcgacaatatcgacgagcgacaacagatggctcgttttgggataacctgagattattagatctcacctagg

SEQ ID NO: 29153 - DNA, 1629 bp, Muscodor strobelii
  misc_feature: SGI cDNA ID NO. 570009
  misc_feature: Encodes the peptide sequence at SEQ ID NO 29154
atggatcccatcacccagatgaccacgctgcatgttccaggcgacaccgatccagccaacagccgctcaaagactcgtaaagtcattgaagagaagtcgttcacatttgacaactccttttggagccatgacacagacgaccgccactatgcacaccaggaggatgtctacaacagtttgggagaggaatttctcgaccataatttcgagggctaccacacgtgcatcttcgcctacggacaaactggatcagggaagtcgtacacgatgatgggaacacaagagcagcccggtctgattccacgaacttgcgaagacctattccagcgcatcgagtccgcccagaacgagacacccaacatctcttatcacgtgcgagtatcctactttgaagtatacaacgagcacgttcgcgatctcctcgtacccgtcaatcctaatcaaccaccatactacctaaagattcgagagtcgcctgtcgatggaccttatgtcaaggatctgactgaagtaccagtcagaaattttaacgagattctgcgatacatgaaagccggagattctagccgaacagtagcgagcaccaagatgaacgacaccagtagtcgaagtcatgcagtcttcaccatcatgttgaagcagatccaccatgacatggagacggacgagaccaccgagagaagctcgcgcatccgattagtcgatctcgcaggcagtgagcgagctaaatctacagaggcaacaggagcgagattgcgcgagggcagcaatatcaacaagtcgttaacaacattaggccgggtcattgcagcacttgcagatcccaaggcaggtcgcccaggcaagcgaagcaaggatatcgtgccttatcgagattctattctcacatggctactcaaagactctcttggtgggaacagcaagacggcaatgattgcttgtattgcaccctcggattacgaggaaaccctgtcaacacttcgctatgcagaccaggcgaagagaatccgcacccgtgctgttgtcaaccaggatcatatcagcactgccgaacgtgatgcccagattgcggccatggctgaagagatccgtcttctgcaagcttctgtttctgattcccgccgccgattggcagagaaggagagccgtgagagtgaagagcgtctggaggagtaccagaaccgtgtggttgccatgcagcgcatgatggaggaacgcagtcttgtcgcagaaggcaagatccggagtttgcagaccgagaacgaagctctgcgcttacatctcaagctcgctctcgacagtattaagaacccgatacctaatgttgttgttcagccgcggtcggaagtcgttgaggaaacagtggattcgggcgaagtcgacgaagttctggccggaaaggaagccgaaagccgcaggacgagcctcgttgacgaggcatactacgatgaaagcgatgatgaggtggacgatgttgtggagcacgagcagaaagccaatgatatgcaggaccatatgcacgagttgctcaaggacctgtcgctattcaggcgcaagattgtggacgacaagggccgattctttgatgatggccagcgacagccgttcggtgtcaagacgaatgcctaa

SEQ ID NO: 29154 - protein, 542 aa, Muscodor strobelii
  misc_feature: SGI Peptide ID NO. 570009
  misc_feature (3)..(337): Pfam Id: PF00225 Pfam Desc: Kinesin motor domain
  misc_feature (18)..(337): Pfam Id: PF00225 Pfam Desc: Kinesin motor domain
  misc_feature (1)..(527): NCBI GI: 156064583 Blast Desc: SS1G_00299 [Sclerotinia sclerotiorum 1980] gi|154691161|gb|EDN90899.1| SS1G_00299 [Sclerotinia sclerotiorum 1980]
  misc_feature (1)..(541): NCBI GI: 145612205 Blast Desc: MGG_08156 [Magnaporthe grisea 70-15] gi|145019411|gb|EDK03639.1| MGG_08156 [Magnaporthe grisea 70-15]
  misc_feature (1)..(541): NCBI GI: 256730946 Blast Desc: [Nectria haematococca mpVI 77-13-4]
  misc_feature (1)..(539): NCBI GI: 29421286 Blast Desc: kinesin [Gibberella moniliformis]
  misc_feature (1)..(541): NCBI GI: 85103307 Blast Desc: NCU03715 [Neurospora crassa OR74A] gi|16944500|emb|CAC28851.2| related to KINESIN-LIKE PROTEIN KIF1C [Neurospora crassa] gi|28923037|gb|EAA32255.1| NCU03715 crassa
  misc_feature (1)..(539): NCBI GI: 46125531 Blast Desc: FG07143.1 [Gibberella zeae PH-1]
  misc_feature (1)..(527): NCBI GI: 261189703 Blast Desc: kinesin family protein [Ajellomyces dermatitidis SLH14081] gi|239591498|gb|EEQ74079.1| kinesin family protein [Ajellomyces dermatitidis SLH14081] gi|239612973|gb|EEQ89960.1|
  misc_feature (1)..(541): NCBI GI: 225561678 Blast Desc: kinesin family protein [Ajellomyces capsulatus G186AR]
  misc_feature (1)..(541): NCBI GI: 240275282 Blast Desc: kinesin family protein [Ajellomyces capsulatus H143]
  misc_feature (1)..(527): NCBI GI: 119478542 Blast Desc: kinesin family protein [Neosartorya fischeri NRRL 181] gi|119407540|gb|EAW17489.1| kinesin family protein [Neosartorya fischeri NRRL 181]
MDPITQMTTLHVPGDTDPANSRSKTRKVIEEKSFTFDNSFWSHDTDDRHYAHQEDVYNSLGEEFLDHNFEGYHTCIFAYGQTGSGKSYTMMGTQEQPGLIPRTCEDLFQRIESAQNETPNISYHVRVSYFEVYNEHVRDLLVPVNPNQPPYYLKIRESPVDGPYVKDLTEVPVRNFNEILRYMKAGDSSRTVASTKMNDTSSRSHAVFTIMLKQIHHDMETDETTERSSRIRLVDLAGSERAKSTEATGARLREGSNINKSLTTLGRVIAALADPKAGRPGKRSKDIVPYRDSILTWLLKDSLGGNSKTAMIACIAPSDYEETLSTLRYADQAKRIRTRAVVNQDHISTAERDAQIAAMAEEIRLLQASVSDSRRRLAEKESRESEERLEEYQNRVVAMQRMMEERSLVAEGKIRSLQTENEALRLHLKLALDSIKNPIPNVVVQPRSEVVEETVDSGEVDEVLAGKEAESRRTSLVDEAYYDESDDEVDDVVEHEQKANDMQDHMHELLKDLSLFRRKIVDDKGRFFDDGQRQPFGVKTNA

SEQ ID NO: 29155 - DNA, 3731 bp, Muscodor strobelii; identical to SEQ ID NO: 29152
  misc_feature: SGI EST ID NO. CUFF.68994.0
  misc_feature: Variant of the nucleotide sequence at SEQ ID NO 29153

SEQ ID NO: 29156 - DNA, 996 bp, Muscodor strobelii
  misc_feature: SGI cDNA ID NO. 570010
  misc_feature: Encodes the peptide sequence at SEQ ID NO 29157
atggaggctgatgcgcccgaagacgcggtcgcagagttactgacgacatacaatgagctcaattcgtcacgaatcgaagagctggacatcgacccaagtcctctcgaattcatgcgttatgtctcacgaaacactccctttgtggtgcgtggcggcgctcgggactggactgccacgcgaaagtgggatgcggcgtatttgcggaccgccctcgatggccacgaggtgaacgtagctgttacgccggccggcaacgctgatgcacctacgttagacgatggcggaaatctcatcttcgcgaagccgcatgaggaaaatcagaagtttggcgatttcttggactatgtcacgcgacaggaggaagtaggctcgacagttaatgataacgaggtgcgatatgcccaaacacaaaacgataacctacgccacgagtatgtatcactcttctccgaagtgcagacgagcattccctttgcccgcattgcactggaacgagagccagatgctatcaacatgtggatcggcaactcgcggtctgtgacggcactacatcgtgacaactacgagaatatctacgtccagatcgcgggccgcaaacactttgtcctgctacctgcgctgtttcagccctgtgtgaacgagagagatttggcttctacttcgtacattcgtgacggggtcaatttaaagcttgagttggaccagtgtgataatgaggacgatcgtggagtgccgaaagtcccatttgcgacatgggatcctgatgaacccgaaataaacgccactcagtattcacatctagcagatccgatgcgcgtgacgcttgaccccggggatatgctttatctgccggcaatgtggtatcacaaggtgtcgcagtcttgttcggcggacggcatatgtgttgcggtcaactattggtacgacatggaatttagcggaccattgtactcgttatgctcttttgtccgaaatatgagcctttcgaagcgatga

SEQ ID NO: 29157 - protein, 331 aa, Muscodor strobelii
  misc_feature: SGI Peptide ID NO. 570010
  misc_feature (1)..(329): NCBI GI: 238498086 Blast Desc: pla2g4b, [Aspergillus flavus NRRL3357] gi|220693552|gb|EED49897.1| pla2g4b, [Aspergillus flavus NRRL3357]
  misc_feature (7)..(307): NCBI GI: 46126147 Blast Desc: FG07451.1 [Gibberella zeae PH-1]
  misc_feature (26)..(328): NCBI GI: 145612169 Blast Desc: MGG_08136 [Magnaporthe grisea 70-15] gi|145019387|gb|EDK03615.1| MGG_08136 [Magnaporthe grisea 70-15]
  misc_feature (8)..(326): NCBI GI: 171692333 Blast Desc: protein product [Podospora anserina] gi|170946115|emb|CAP72916.1| protein product [Podospora anserina]
  misc_feature (9)..(307): NCBI GI: 256731265 Blast Desc: [Nectria haematococca mpVI 77-13-4]
  misc_feature (9)..(329): NCBI GI: 169768756 Blast Desc: [Aspergillus oryzae RIB40] gi|83766706|dbj|BAE56846.1| protein product [Aspergillus oryzae]
  misc_feature (8)..(305): NCBI GI: 164426807 Blast Desc: NCU03670 [Neurospora crassa OR74A] gi|157071486|gb|EAA32210.2| conserved [Neurospora crassa OR74A]
  misc_feature (8)..(288): NCBI GI: 16415987 Blast Desc: conserved [Neurospora crassa]
  misc_feature (12)..(327): NCBI GI: 169614760 Blast Desc: SNOG_10528 [Phaeosphaeria nodorum SN15] gi|111060802|gb|EAT81922.1| SNOG_10528 [Phaeosphaeria nodorum SN15]
  misc_feature (12)..(290): NCBI GI: 189207965 Blast Desc: phospholipase A2 [Pyrenophora tritici-repentis Pt-1C-BFP] gi|187976409|gb|EDU43035.1| phospholipase A2 [Pyrenophora tritici-repentis Pt-1C-BFP]
  misc_feature (61)..(308): SWISSPROT Homolog: EC 1.14.11.16 Peptide-aspartate beta-dioxygenase
MEADAPEDAVAELLTTYNELNSSRIEELDIDPSPLEFMRYVSRNTPFVVRGGARDWTATRKWDAAYLRTALDGHEVNVAVTPAGNADAPTLDDGGNLIFAKPHEENQKFGDFLDYVTRQEEVGSTVNDNEVRYAQTQNDNLRHEYVSLFSEVQTSIPFARIALEREPDAINMWIGNSRSVTALHRDNYENIYVQIAGRKHFVLLPALFQPCVNERDLASTSYIRDGVNLKLELDQCDNEDDRGVPKVPFATWDPDEPEINATQYSHLADPMRVTLDPGDMLYLPAMWYHKVSQSCSADGICVAVNYWYDMEFSGPLYSLCSFVRNMSLSKR

SEQ ID NO: 29158 - DNA, 3682 bp, Muscodor strobelii
  misc_feature: SGI EST ID NO. CUFF.68995.1
  misc_feature: Variant of the nucleotide sequence at SEQ ID NO 29156
cctaggtgagatctaataatctcaggttatcccaaaacgagccatctgttgtcgctcgtcgatattgtcgcggtgatgatgaggggccgatcagtaaacagtctgggtagaggcggaggagttcgcgggaacatccgcagcgcaaatactgagccagtggtgggggaactctgtgacctgtcacctcactcacgccataccatctattagtctgtctcaagcaacactccctgaaatggaggctgatgcgcccgaagacgcggtcgcagagttactgacgacatacaatgagctcaattcgtcacgaatcgaagagctggacatcgacccaagtcctctcgaattcatgcgttatgtctcacgaaacactccctttgtggtgcgtggcggcgctcgggactggactgccacgcgaaagtgggatgcggcgtatttgcggaccgccctcgatggccacgaggtgaacgtagctgttacgccggccggcaacgctgatgcacctacgttagacgatggcggaaatctcatcttcgcgaagccgcatgaggaaaatcagaagtttggcgatttcttggactatgtcacgcgacaggaggaagtaggctcgacagttaatgataacgaggtgcgatatgcccaaacacaaaacgataacctacgccacgagtatgtatcactcttctccgaagtgcagacgagcattccctttgcccgcattgcactggaacgagagccagatgctatcaacatgtggatcggcaactcgcggtctgtgacggcactacatcgtgacaactacgagaatatctacgtccagatcgcgggccgcaaacactttgtcctgctacctgcgctgtttcagccctgtgtgaacgagagagatttggcttctacttcgtacattcgtgacggggtcaatttaaagcttgagttggaccagtgtgataatgaggacgatcgtggagtgccgaaagtcccatttgcgacatgggatcctgatgaacccgaaataaacgccactcagtattcacatctagcagatccgatgcgcgtgacgcttgaccccggggatatgctttatctgccggcaatgtggtatcacaaggtgtcgcagtcttgttcggcggacggcatatgtgttgcggtcaactattggtacgacatggaatttagcggaccattgtactcgttatgctcttttgtccgaaatatgagcctttcgaagcgatgagaatcctattgttcgatcatgccgtgcaaatccaccagtaaatgaattgagcgatctagggactcaagcaaaggtttgtaatgaaaatctcattttgtaccgtcattcatacaagtatactatctgctttcagaagcttgcaaaagctcagttacttgatactagccacgcgatccatgaatacgaacaatccatttcatatccatgtactcaaatttcagttcagactccaacaattactccaaacaccgaggctttcccatcgtgacaaacaaagaatcgaccacaactgcttaggcattcgtcttgacaccgaacggctgtcgctggccatcatcaaagaatcggcccttgtcgtccacaatcttgcgcctgaatagcgacaggtccttgagcaactcgtgcatatggtcctgcatatcattggctttctgctcgtgctccacaacatcgtccacctcatcatcgctttcatcgtagtatgcctcgtcaacgaggctcgtcctgcggctttcggcttcctttccggccagaacttcgtcgacttcgcccgaatccactgtttcctcaacgacttccgaccgcggctgaacaacaacattaggtatcgggttcttaatactgtcgagagcgagcttgagatgtaagcgcagagcttcgttctcggtctgcaaactccggatcttgccttctgcgacaagactgcgttcctccatcatgcgctgcatggcaaccacacggttctggtactcctccagacgctcttcactctcacggctctccttctctgccaatcggcggcgggaatcagaaacagaagcttgcagaagacggatctcttcagccatggccgcaatctgggcatcacgttcggcagtgctgatatgatcctggttgacaacagcacgggtgcggattctcttcgcctggtctgcatagcgaagtgttgacagggtttcctcgtaatccgagggtgcaatacaagcaatcattgccgtcttgctgttcccaccaagagagtctttgagtagccatgtgagaatagaatctcgataaggcacgatatccttgcttcgcttgcctgggcgacctgccttgggatctgcaagtgctgcaatgacccggcctaatgttgttaacgacttgttgatattgctgccctcgcgcaatctcgctcctgttgcctctgtagatttagctcgctcactgcctgcgagatcgactaatcggatgcgcgagcttctctcggtggtctcgtccgtctccatgtcatggtggatctgcttcaacatgatggtgaagactgcatgacttcgactactggtgtcgttcatcttggtgctcgctactgttcggctagaatctccggctttcatgtatcgcagaatctcgttaaaatttctgactggtacttcagtcagatccttgacataaggtccatcgacaggcgactctcgaatctttaggtagtatggtggttgattaggattgacgggtacgaggagatcgcgaacgtgctcgttgtatacttcaaagtaggatactcgcacgtgataagagatgttgggtgtctcgttctgggcggactcgatgcgctggaataggtcttcgcaagttcgtggaatcagaccgggctgctcttgtgttcccatcatcgtgtacgacttccctgatccagtttgtccgtaggcgaagatgcacgtgtggtagccctcgaaattatggtcgagaaattcctctcccaaactgttgtagacatcctcctggtgtgcatagtggcggtcgtctgtgtcatggctccaaaaggagttgtcaaatgtgaacgacttctcttcaatgactttacgagtctttgagcggctgttggctggatcggtgtcgcctggaacatgcagcgtggtcatctgggtgatgggatccatgctaatcaagcaatctgcacctcgctgtaactctattgttgacaatgataattagccttctaacaatcgacataagacaacctttgttatcccattgagatgatcatgcaattgcatgttaaactagacaatgatagacatacctctgggcagaaacgccctcacccgcacaacgaccttcacatttccacctccattggccctcatcatgtgcgctggtagagttccatcgcgggagcgcaaagaaggagtcgaggccgaagaacggacaatagcggaggatcgcatatctcccacctctatgtcttcaatataatactgctcgtttgtggaatgctgctgtaattgcggtaatgactctggcaataggtggcgcgggagcgagaccattccagtcaaggtgtcgcagacgtcgtcaattgcttcacgatatcgccgcctattaagattgctcggaatgccgtacatctaatccacagtccagggtgcactgctctgctgggggtgcgctggcaatgttgtgggtcgg

SEQ ID NO: 29159 - DNA, 3414 bp, Muscodor strobelii
  misc_feature: SGI cDNA ID NO. 570011
  misc_feature: Reduced expression when VOC is produced
  misc_feature: Encodes the peptide sequence at SEQ ID NO 29160
atgatttggtatctactctatcctttccgaggaacgaccgaggctcccgtgctcgccccaactcatcctctgcgcaatgctttcacacgatacggcagatatgccgcgagccatgttcttagtactctgctaatatccgttgccgttgcatcgtttctaatatacccatttccatttctatatacaacggccaacttcaccgatgggacctcgagtcttcctcaccatgtctggaccgacgcccaacctctcgatgtcaagagcacgcatgaacccgacgtgatcatgcgatcgatatgggttcacgggagttacttccaggcactaaacaaggaggtcttgttaggtgccctcgagcttcaagacgagcttctaggatcaaccgtgaattttagccctcgccaggagcccggtagtctccagcttagtctgcctgcggaacctacgaacaacctcacattgcgacaacgcgactcttatcatgccatcaatggtctgacggatgagtcatggttctttcactcgccactacaatactggtcatgctcttcggacatcattaaaggagaccataatatacttgcgactgtgaacgaaaagaaaacccagccgacatctgtaaatgtcacgttgaggcattccatcgtgttcagtgggaaacgctttgaggatcgtcatctcgtggcagccgacgcccttgtcattactctgattcatcgccgtgactctcccgttggccgtatatggcaggataaggctgaagctattgcgaaccaatggacggacaagtggagagtcatccgaccccaggagggaaaagcgagccagctctttgaatttcaatttcgtctcatgtccactgtcgatgccctccttctaggattagcctattcactggttcttatctacttcgtgtttagcctgtccaagctgcgagctgttaagtcaaaggttgggctgatggtcgctgtggcggcgcagatcgctctctccatcatctcaagtttcacgatctgcgctattttcaagattgatttatcgaaaataccacgattcggttatccggtggtcatcttctccatgagtcttgagaatattttccggctgatcaacgccgtcattctcactccgtctgaagatagcactagcaacaggataggccatgcctttggagagacggctcatattgccttggcgagtgtgggccagaatctgctcattctttacggcctctccacggtcgtgtcatcaggtgtatcagcattctgtacctttgccgctattgcactagttttcgatttcttctatttatcgacattcttcttgtccgttctgagtgtcgatgtgcggcgaacggaactgagcgatgctttagcgaaagcttcgctccgaacccaccagcaaactgtcgaatcaccaccacgtcagacatgggtagacaatatgctacaaggcaagattgccatgtcgacaaggattgcgggcaccattgtgatgatcggatttgtactggttgctcagtggcatttctttgagaacgaaagcttgatgcgagtgttgcgcagacttattcggatagcaccccaataccctgacccagcaccatctcgatcctcgctgctagttgaggttcaccaagcgcgaagtccgacgtcatggcttcggatgcaagaccatgagacagctcgagaagtcattaatgtcataaaacccgatgcctatagctacacggctcgagtttttgatccttacatatttgttttgaaggggtccgatcgaatgctctcagctcacgagcgtctcttatctcctgcggtctacgacttcgccagacaccaactggctccgtttctcgtcacgattcttgtcgttatggctgctgtacgcctccttatgaactacctgctttgggacgaactcagcgagggagcggatggtaagggtgatggcgacgactcccttttgactgtcaagactcttaatggcggtcaccatctagacgttgctcttttagcgtcttcacccgccggtcatctcgtatctgtgggcttggaccgtattataagagtctggaatgtcaagcaaggcggttacagctacgtcctcggtgacgacaaagactctccccgcattcccttccccatcttagccatggccatcgaggacgagttccactggcttgctttactcactgtcgaccgagtcttactatggaatctagtcgaccttcgatggggcccctcgatcaaagtggaacctttcagacacaaaccggaagttttcttctttggaaacgacgattgcgtcaccataccccctttgatattggttcggcgcgacggtgtcataactgagctgagacccgccatgggcgaaacaagtagctacatgataggtgaggagagtgtcgttgcctctgttgacgcactcgctgaaaaagcattcccacctaaggtcatggcttcaaccagagagggacacgttcatctcgtcacccaagaaggttacgattgggtttcaagcgccatcagcgccaaccgacctcaactgaaggagcgggaattcatatccattcaagccttgccggatttgagcttcttccttatcattcgctctcagactgtggatctagttgattcacaaacgcacagagccatttacaccttcaaggtagaacccatacaacccaagagcctcaaagcttttcactctcggccgagacggatgcgatgtggctcggtagcgctgtggagctttaccattgcttacgttaacgcgtacacgcgggatctcgtggtgcagacttacagccctcagaacgaagacgagtcactgtgtttttgtgatccggaatcaccgtctagaaagacgtgttgtccgtggcgcagagccaaagagacgaggcgcgtcatcaagaaccctggtgtgtggctcgccctgccctcgggaattatggttggcgtaagacggaaaacagcagagaagacggcggtcaatggctactaccagcccctgcctaccgctcagtccagcggactccgcaaccgccgtgcccaaagtactcgcccagcggctcccgccgagcagacgtcggataattgggaagtgtggacgttctcacactttggcgggaagcaggacacgtgggagacggcgcctctgtgtacagacgtggaggacgacggccacctcttcgtgacccacctcggtccaatggccaatgtgggaggctcgagtattgctgtcgggctcagcaacgtcgtcaaggtgatcacggtcgggcaggaacgatacgacgccagcgacgaggtggaggcggggaacgtgatgccggccgtgagcagccgcaggcgtaagggacctggaggtggtcgagcccgacctccgattcccagaagctgttgtgggccctag

SEQ ID NO: 29160 - protein, 1137 aa, Muscodor strobelii
  misc_feature: SGI Peptide ID NO. 570011
  misc_feature (1)..(1127): NCBI GI: 261355664 Blast Desc: conserved [Verticillium albo-atrum VaMs.102]
  misc_feature (1)..(1123): NCBI GI: 46126145 Blast Desc: FG07450.1 [Gibberella zeae PH-1]
  misc_feature (1)..(1119): NCBI GI: 156034535 Blast Desc: SS1G_13202 [Sclerotinia sclerotiorum 1980] gi|154698606|gb|EDN98344.1| SS1G_13202 [Sclerotinia sclerotiorum 1980]
  misc_feature (96)..(1127): NCBI GI: 39946030 Blast Desc: MGG_08135 [Magnaporthe grisea 70-15] gi|145019385|gb|EDK03613.1| MGG_08135 [Magnaporthe grisea 70-15]
  misc_feature (10)..(996): NCBI GI: 171692331 Blast Desc: protein product [Podospora anserina] gi|170946114|emb|CAP72915.1| protein product [Podospora anserina]
  misc_feature (9)..(1119): NCBI GI: 16415986 Blast Desc: related to SREBP cleavage activating protein [Neurospora crassa]
  misc_feature (96)..(1119): NCBI GI: 154291760 Blast Desc: BC1G_15039 [Botryotinia fuckeliana B05.10] gi|150846618|gb|EDN21811.1| BC1G_15039 [Botryotinia fuckeliana B05.10]
  misc_feature (96)..(1119): NCBI GI: 164426809 Blast Desc: NCU03675 [Neurospora crassa OR74A] gi|157071487|gb|EAA32215.2| conserved [Neurospora crassa OR74A]
  misc_feature (1)..(816): NCBI GI: 116206522 Blast Desc: CHGG_02554 [Chaetomium globosum CBS 148.51] gi|88183151|gb|EAQ90619.1| CHGG_02554 [Chaetomium globosum CBS 148.51]
  misc_feature (1)..(1120): NCBI GI: 169608161 Blast Desc: SNOG_07149 [Phaeosphaeria nodorum SN15] gi|160701578|gb|EAT85800.2| SNOG_07149 [Phaeosphaeria nodorum SN15]
  misc_feature: Useful for introducing or modulating the production of volatile compounds
MIWYLLYPFRGTTEAPVLAPTHPLRNAFTRYGRYAASHVLSTLLISVAVASFLIYPFPFLYTTANFTDGTSSLPHHVWTDAQPLDVKSTHEPDVIMRSIWVHGSYFQALNKEVLLGALELQDELLGSTVNFSPRQEPGSLQLSLPAEPTNNLTLRQRDSYHAINGLTDESWFFHSPLQYWSCSSDIIKGDHNILATVNEKKTQPTSVNVTLRHSIVFSGKRFEDRHLVAADALVITLIHRRDSPVGRIWQDKAEAIANQWTDKWRVIRPQEGKASQLFEFQFRLMSTVDALLLGLAYSLVLIYFVFSLSKLRAVKSKVGLMVAVAAQIALSIISSFTICAIFKIDLSKIPRFGYPVVIFSMSLENIFRLINAVILTPSEDSTSNRIGHAFGETAHIALASVGQNLLILYGLSTVVSSGVSAFCTFAAIALVFDFFYLSTFFLSVLSVDVRRTELSDALAKASLRTHQQTVESPPRQTWVDNMLQGKIAMSTRIAGTIVMIGFVLVAQWHFFENESLMRVLRRLIRIAPQYPDPAPSRSSLLVEVHQARSPTSWLRMQDHETAREVINVIKPDAYSYTARVFDPYIFVLKGSDRMLSAHERLLSPAVYDFARHQLAPFLVTILVVMAAVRLLMNYLLWDELSEGADGKGDGDDSLLTVKTLNGGHHLDVALLASSPAGHLVSVGLDRIIRVWNVKQGGYSYVLGDDKDSPRIPFPILAMAIEDEFHWLALLTVDRVLLWNLVDLRWGPSIKVEPFRHKPEVFFFGNDDCVTIPPLILVRRDGVITELRPAMGETSSYMIGEESVVASVDALAEKAFPPKVMASTREGHVHLVTQEGYDWVSSAISANRPQLKEREFISIQALPDLSFFLIIRSQTVDLVDSQTHRAIYTFKVEPIQPKSLKAFHSRPRRMRCGSVALWSFTIAYVNAYTRDLVVQTYSPQNEDESLCFCDPESPSRKTCCPWRRAKETRRVIKNPGVWLALPSGIMVGVRRKTAEKTAVNGYYQPLPTAQSSGLRNRRAQSTRPAAPAEQTSDNWEVWTFSHFGGKQDTWETAPLCTDVEDDGHLFVTHLGPMANVGGSSIAVGLSNVVKVITVGQERYDASDEVEAGNVMPAVSSRRRKGPGGGRARPPIPRSCCGP

SEQ ID NO: 29161 - DNA, 6213 bp, Muscodor strobelii
  misc_feature: SGI EST ID NO. CUFF.69361.0
  misc_feature: Variant of the nucleotide sequence at SEQ ID NO 29159
gatcggctctggggtcggtaacggtcctatatagtctcttcctgttcccgtcgacctcgtcgccgtgagcatcgcctgcatacatacgatatcacgacaacctcatatcttctattgatctggttgtcgctatacctggtcgagttctttgcacgcagcagcaggcacagcatctcgcttaagcactcgtggtccaattcgtcgcccttgtgggtattaccaccattacgaagcactattaagattccgacgcaaaagcaaccagcaatgtcgctcaaaaccagttcactctctgcactacgacgggttcatgcactggatcacgatcgacacgttcctttgtattaggaacacttgtgatctgatacgcacaagaatttacgacctgtcgaaaatgcccgagacttcccttgatggtcggtagccaatgatcaataatggtggctcgcgattgtctctccaatttctgaccagtgctattggcgttgctgccggaagtgggaaacatacgagtgcaatgcatgtacaggagtccgacatccgacgcctcgctccaatctgtcaaatgaggagttctggaagactaagtgggctgcagcagaggacctatatcttactaacccggtctattgcccattggcttccagcaatcaatcacatgttaccagaaccatagccgatgcaattgtcggctactggcaatcggtatgatcgatcgaattacctgttccagatgtttgtcgccgtcacaagtgtttgacagcatccccatcgccagcgatgtgccactgggcgaacttagaagtcattgaggcactgaggtttcaacctgtactcgtaattgttgggtttggcagacaggggatgtggcagcacagtaaaaactctgcgattgagcaaaaaccccgcggccacggatcagcgggatggggccggccgagacatgtcaaaccctggcaaggtagagtcgaggccgagacgccattcgaccgaccctcactcactgttcctgttttgtgctgtcgtattctattcgtcgccagtgtcaccgcggaacatccctctttctatctgctatctccatcacacacacaccacaactacagtccgcagcgggttgaagcgttcgttagacaagctgcaacgcctctgctcctctgctcatctcggacacttcctagatcgtcgtcagctcgccgagcggctgaaccatctctcatctcttcttcgcctttacgctgcccgcttctaggtggtgcgcgtatgccccttcaggcctagctgggtgcagattatcgccaagtagcgccaacgccagcagacgtagactggcggtctctgtctggtcttgtgtccctcaccacccgtccagcgccaacgtctacaaccggctccgagcgagtgacagcggcgcagttctaggcttgactactcttcagcccatcgacttcgcatccgtggcgccatcgtctcttagcgcggcgcaacccaggacaccggatgggcgccacgcagtccacagttccacactcactcctgtctctgtccgccgtctcccatcagccaagtcggttggctttggcttcaaccgcgtcctgctccgtctctgttgtgcgagccttctcttccagcccgggattcccctgtaaccagcctgtgcagtttgacagccatcatcttgatgctcttttaatgccaaattccgtgaccaatttgcctctcggattccagtgatcccagtgcttgtcgagttcgagtgtcagttgtgcgcgggattcgccattacttttcccctctgtatggaatttaacagccgaccgtctccgccaactatatcctgaccctccacgagtggtatagcttcatgcagcctgcgacgacttggctctgctcggcgctgttgtcttgaatgggcccgctcttggctcgtaaccactcctgtgaccaccagcactctcttcgaatccagctgttcgaccatcactactgcttcgactgtgtcacaacctcaacctcctgagctgctgtcgctccttaaccgagtccacactatgcgcgatacgaattgctgttctatggccaatagcctcgctgtcgaatataatactgcaacacgctcgtctgccaggccgtgatcggagagacgagttgctgctcggtcgttgaaggatgatttggtatctactctatcctttccgagggtacgttatgcgacaacctttccgcccacaatgatcaacgtgaagtagctatattgactgttgcattcaagaacgaccgaggctcccgtgctcgccccaactcatcctctgcgcaatgctttcacacgatacggcagatatgccgcgagccatgttcttagtactctgctaatatccgttgccgttgcatcgtttctaatatacccatttccatttctatatacaacggccaacttcaccgatgggacctcgagtcttcctcaccatgtctggaccgacgcccaacctctcgatgtcaagagcacgcatgaacccgacgtgatcatgcgatcgatatgggttcacgggagttacttccaggcactaaacaaggaggtcttgttaggtgccctcgagcttcaagacgagcttctaggatcaaccgtgaattttagccctcgccaggagcccggtagtctccagcttagtctgcctgcggaacctacgaacaacctcacattgcgacaacgcgactcttatcatgccatcaatggtctgacggatgagtcatggttctttcactcgccactacaatactggtcatgctcttcggacatcattaaaggagaccataatatacttgcgactgtgaacgaaaagaaaacccagccgacatctgtaaatgtcacgttgaggcattccatcgtgttcagtgggaaacgctttgaggatcgtcatctcgtggcagccgacgcccttgtcattactctgattcatcgccgtgactctcccgttggccgtatatggcaggataaggctgaagctattgcgaaccaatggacggacaagtggagagtcatccgaccccaggagggaaaagcgagccagctctttgaatttcaatttcgtctcatgtccactgtcgatgccctccttctaggattagcctattcactggttcttatctacttcgtgtttagcctgtccaagctgcgagctgttaagtcaaaggttgggctgatggtcgctgtggcggcgcagatcgctctctccatcatctcaagtttcacgatctgcgctattttcaagattgatttatcgaaaataccacgattcggttatccggtggtcatcttctccatgagtcttgagaatattttccggctgatcaacgccgtcattctcactccgtctgaagatagcactagcaacaggataggccatgcctttggagagacggctcatattgccttggcgagtgtgggccagaatctgctcattctttacggcctctccacggtcgtgtcatcaggtgtatcagcattctgtacctttgccgctattgcactagttttcgatttcttctatttatcgacattcttcttgtccgttctgagtgtcgatgtgcggcgaacggaactgagcgatgctttagcgaaagcttcgctccgaacccaccagcaaactgtcgaatcaccaccacgtcagacatgggtagacaatatgctacaaggcaagattgccatgtcgacaaggattgcgggcaccattgtgatgatcggatttgtactggttgctcagtggcatttctttgagaacgaaagcttgatgcgagtgttgcgcagacttattcggatagcaccccaataccctgacccagcaccatctcgatcctcgctgctagttgaggttcaccaagcgcgaagtccgacgtcatggcttcggatgcaagaccatgagacagctcgagaagtcattaatgtcataaaacccgatgcctatagctacacggctcgagtttttgatccttacatatttgttttgaaggggtccgatcgaatgctctcagctcacgagcgtctcttatctcctgcggtctacgacttcgccagacaccaactggctccgtttctcgtcacgattcttgtcgttatggctgctgtacgcctccttatgaactacctgctttgggacgaactcagcgagggagcggatggtaagggtgatggcgacgactcccttttgactgtcaagactcttaatggcggtcaccatctagacgttgctcttttagcgtcttcacccgccggtcatctcgtatctgtgggcttggaccgtattataagagtctggaatgtcaagcaaggcggttacagctacgtcctcggtgacgacaaagactctccccgcattcccttccccatcttagccatggccatcgaggacgagttccactggcttgctttactcactgtcgaccgagtcttactatggaatctagtcgaccttcgatggggcccctcgatcaaagtggaacctttcagacacaaaccggaagttttcttctttggaaacgacgattgcgtcaccataccccctttgatattggttcggcgcgacggtgtcataactgagctgagacccgccatgggcgaaacaagtagctacatgataggtgaggagagtgtcgttgcctctgttgacgcactcgctgaaaaagcattcccacctaaggtcatggcttcaaccagagagggacacgttcatctcgtcacccaagaaggttacgattgggtttcaagcgccatcagcgccaaccgacctcaactgaaggagcgggaattcatatccattcaagccttgccggatttgagcttcttccttatcattcgctctcagactgtggatctagttgattcacaaacgcacagagccatttacaccttcaaggtagaacccatacaacccaagagcctcaaagcttttcactctcggccgagacggatgcgatgtggctcggtagcgctgtggagctttaccattgcttacgttaacgcgtacacgcgggatctcgtggtgcagacttacagccctcagaacgaagacgagtcactgtgtttttgtgatccggaatcaccgtctagaaagacgtgttgtccgtggcgcagagccaaagagacgaggcgcgtcatcaagaaccctggtgtgtggctcgccctgccctcgggaattatggttggcgtaagacggaaaacagcagagaagacggcggtcaatggctactaccagcccctgcctaccgctcagtccagcggactccgcaaccgccgtgcccaaagtactcgcccagcggctcccgccgagcagacgtcggataattgggaagtgtggacgttctcacactttggcgggaagcaggacacgtgggagacggcgcctctgtgtacagacgtggaggacgacggccacctcttcgtgacccacctcggtccaatggccaatgtgggaggctcgagtattgctgtcgggctcagcaacgtcgtcaaggtgatcacggtcgggcaggaacgatacgacgccagcgacgaggtggaggcggggaacgtgatgccggccgtgagcagccgcaggcgtaagggacctggaggtggtcgagcccgacctccgattcccagaagctgttgtgggccctagcccccagcactcgaagacttacgaaataatacgatcataccacaaagtacactttctctgtatatatttcctttggatgagtcatggcagatacctcggcgggcagggagacggacgtatatgagacacgacacacatacttggctacacggggctccaaagcggtcactggctacctgggggggtttatggggctcacggacggggcgatcattatacacacacatatatcatttctttgttataccacgggaacttaggcgaggggacaaggtcaaggcatatacgacgcgatgcccagatgatatacgaggacatgggaccagttcttagtgaaagggattgggacatggaaaatcttcggccggcgttgtgttctatctacatatggcaaatatgcagagagtgaaaatatcaaaaagttaattctacttaggctgtctggagtgcgactagctgtggttgtgatcttaatacgtcgtgaatcgtaatgttgtttggctaattgtagggtaactcagctggatatctgcataggtcaggcagtgttatagaaccg

SEQ ID NO: 29162 - DNA, 1641 bp, Muscodor strobelii
  misc_feature: SGI cDNA ID NO. 570012
  misc_feature: Reduced expression when VOC is produced
  misc_feature: Encodes the peptide sequence at SEQ ID NO 29163
atgaggagaacatccgtgtcgctgcctactaagcaggtccggcgtgatccccacgagaaggcgggccggtacgggaccggtcaagacgagccaggcatcctggagaaactacagcagggcgccatgaacccggcgcagcgggcgaggtggctcaagaccaccgccatcgtcgtctttgtgctcttcctcttctactacctgtcgcccaggggcgccagcctcgtatcccaccacaaccaacaaggcggccagacgccctccgactcctcctacggcaccacccagtgcaccaagtccttcgcgcgcgacaagcccatcgtccagtatgtgctgatggtcgacgccggcagcacgggctcccgcatccacgtctacaagttcaacaactgcgggcccacccccgagctcgagggcgaggagttccgcatgaccgagaagaccgtcggcggcctgagcaagtataaggacgaccctctcgccgccgccaagaccctcgaccccctcctccaagtcgccatcgacaccgtccccgacaagctcaagggctgcaccccgatcgccgtcaaggccaccgcggggctacgcatggtcggcaccgacgccgccgccgccatcctcaaggcggtgcgcgaccatctcgagaaggactaccccttccccgtcgtctccgaggccgagaacggcgtcgccatcatggacggctccgacgagggcgtctacgcctggatcaccaccaactacctcctcggcaagatcggcggccccgaccacagccccaccgctgctgtcttcgacctcggcggcggttccactcagattgtcttcgagccgacgtttaaaggactcccgtctggaggcatgcctgagaagatggccgagggcgaccacaagtacagcctctccttcggaggtcgccagttcgagctctaccagcattctcacctgggctacggtcttatggccgcacgcaactcgattcatcttgcattgctcgaggatatctacgcaaaagagaagagtctcgacttcctcaagaaacccatccagaaccacccttgcatcaacgccggccagaccgacaccatcaaggtcaagttccccgaggacagcaagctcggcgtcggcgagttggaactcaaggtctccggcccctctactccgactcccgcccaatgccgcagtctcgccgagagaatcctcttcaaagacgcgtcttgtctcctcgctccttgctcattcaacggcatccatcaaccctcgctcgccaagacgttcgagcgcgaggacatgtttatcttctctttcttctacgaccgcgtcaagcccctgggaatgccggattctttcacccttcgcgaactacatgatttgactaacaccgtctgtgggggtgagaaggcttgggatggtttcagcaatattcctgatgcgcttgacgagttgagagataggggagagtattgtctggatttgaactttatgattgggttgctgcatacggggtatgatatccctattgatagggaggttaggacggccaagaagattaaggataatgagttggggtggtgtttgggcgctagtttgccgctcttgtcgaagaactcgggttggtcctgcaaggtgaatcaggtctattag

SEQ ID NO: 29163 - protein, 546 aa, Muscodor strobelii
  misc_feature: SGI Peptide ID NO. 570012
  misc_feature (100)..(545): Pfam Id: PF01150 Pfam Desc: GDA1/CD39 (nucleoside phosphatase) family
  misc_feature (1)..(545): NCBI GI: 261355676 Blast Desc: guanosine-diphosphatase [Verticillium albo-atrum VaMs.102]
  misc_feature (3)..(545): NCBI GI: 256731465 Blast Desc: [Nectria haematococca mpVI 77-13-4]
  misc_feature (1)..(546): NCBI GI: 85103299 Blast Desc: guanosine-diphosphatase [Neurospora crassa OR74A] gi|12718292|emb|CAC28854.1| guanosine-diphosphatase [Neurospora crassa] gi|28923035|gb|EAA32253.1| guanosine-diphosphatase crassa
  misc_feature (16)..(545): NCBI GI: 46121529 Blast Desc: FG05143.1 [Gibberella zeae PH-1]
  misc_feature (1)..(546): NCBI GI: 116206510 Blast Desc: CHGG_02548 [Chaetomium globosum CBS 148.51] gi|88183145|gb|EAQ90613.1| CHGG_02548 [Chaetomium globosum CBS 148.51]
  misc_feature (1)..(546): NCBI GI: 145612185 Blast Desc: MGG_08146 [Magnaporthe grisea 70-15] gi|145019398|gb|EDK03626.1| MGG_08146 [Magnaporthe grisea 70-15]
  misc_feature (1)..(535): NCBI GI: 171692343 Blast Desc: protein product [Podospora anserina] gi|170946120|emb|CAP72921.1| protein product [Podospora anserina]
  misc_feature (42)..(545): NCBI GI: 156064213 Blast Desc: SS1G_00114 [Sclerotinia sclerotiorum 1980] gi|154690976|gb|EDN90714.1| SS1G_00114 [Sclerotinia sclerotiorum 1980]
  misc_feature (42)..(545): NCBI GI: 67517805 Blast Desc: AN1082.2 [Aspergillus nidulans FGSC A4] gi|40747044|gb|EAA66200.1| AN1082.2 [Aspergillus nidulans FGSC A4]
  misc_feature (42)..(545): NCBI GI: 154312302 Blast Desc: guanosine-diphosphatase [Botryotinia fuckeliana B05.10] gi|150850147|gb|EDN25340.1| guanosine-diphosphatase [Botryotinia fuckeliana B05.10]
  misc_feature (42)..(545): SWISSPROT Homolog: EC 3.6.1.42 Guanosine-diphosphatase
  misc_feature: Useful for introducing or modulating the production of volatile compounds
MRRTSVSLPTKQVRRDPHEKAGRYGTGQDEPGILEKLQQGAMNPAQRARWLKTTAIVVFVLFLFYYLSPRGASLVSHHNQQGGQTPSDSSYGTTQCTKSFARDKPIVQYVLMVDAGSTGSRIHVYKFNNCGPTPELEGEEFRMTEKTVGGLSKYKDDPLAAAKTLDPLLQVAIDTVPDKLKGCTPIAVKATAGLRMVGTDAAAAILKAVRDHLEKDYPFPVVSEAENGVAIMDGSDEGVYAWITTNYLLGKIGGPDHSPTAAVFDLGGGSTQIVFEPTFKGLPSGGMPEKMAEGDHKYSLSFGGRQFELYQHSHLGYGLMAARNSIHLALLEDIYAKEKSLDFLKKPIQNHPCINAGQTDTIKVKFPEDSKLGVGELELKVSGPSTPTPAQCRSLAERILFKDASCLLAPCSFNGIHQPSLAKTFEREDMFIFSFFYDRVKPLGMPDSFTLRELHDLTNTVCGGEKAWDGFSNIPDALDELRDRGEYCLDLNFMIGLLHTGYDIPIDREVRTAKKIKDNELGWCLGASLPLLSKNSGWSCKVNQVY

SEQ ID NO: 29164 - DNA, 2319 bp, Muscodor strobelii
  misc_feature: SGI EST ID NO. CUFF.68937.0
  misc_feature: Variant of the nucleotide sequence at SEQ ID NO 29162
ggcaatcttgacgaggtcgaaatttcccatgggataggaaagagtatttggacagtggccattcgttcacgttgcagatctctgaaccttggaccctcctattttcctcgtctctccctgcgcctgcaactgccaacaaccccgacgctcgtttcatttcacaggccacatcgacgacgccgaatcacgactcattcacttgactcgatctttttcgctgtcactcacctgtcgcattgtcgtgtcattgtgcttggcgtgccgcagaaagtatctggccactgaacgacacttaattacctacctcagtcatccgccatctctgaggggatgtgccggcgctgaagaaatactaccccatgaggagaacatccgtgtcgctgcctactaagcaggtccggcgtgatccccacgagaaggcgggccggtacgggaccggtcaagacgagccaggcatcctggagaaactacagcagggcgccatgaacccggcgcagcgggcgaggtggctcaagaccaccgccatcgtcgtctttgtgctcttcctcttctactacctgtcgcccaggggcgccagcctcgtatcccaccacaaccaacaaggcggccagacgccctccgactcctcctacggcaccacccagtgcaccaagtccttcgcgcgcgacaagcccatcgtccagtatgtgctgatggtcgacgccggcagcacgggctcccgcatccacgtctacaagttcaacaactgcgggcccacccccgagctcgagggcgaggagttccgcatgaccgagaagaccgtcggcggcctgagcaagtataaggacgaccctctcgccgccgccaagaccctcgaccccctcctccaagtcgccatcgacaccgtccccgacaagctcaagggctgcaccccgatcgccgtcaaggccaccgcggggctacgcatggtcggcaccgacgccgccgccgccatcctcaaggcggtgcgcgaccatctcgagaaggactaccccttccccgtcgtctccgaggccgagaacggcgtcgccatcatggacggctccgacgagggcgtctacgcctggatcaccaccaactacctcctcggcaagatcggcggccccgaccacagccccaccgctgctgtcttcgacctcggcggcggttccactcagattgtcttcgagccgacgtttaaaggactcccgtctggaggcatgcctgagaagatggccgagggcgaccacaagtacagcctctccttcggaggtcgccagttcgagctctaccagcattctcacctgggctacggtcttatggccgcacgcaactcgattcatcttgcattgctcgaggatatctacgcaaaagagaagagtctcgacttcctcaagaaacccatccagaaccacccttgcatcaacgccggccagaccgacaccatcaaggtcaagttccccgaggacagcaagctcggcgtcggcgagttggaactcaaggtctccggcccctctactccgactcccgcccaatgccgcagtctcgccgagagaatcctcttcaaagacgcgtcttgtctcctcgctccttgctcattcaacggcatccatcaaccctcgctcgccaagacgttcgagcgcgaggacatgtttatcttctctttcttctacgaccgcgtcaagcccctgggaatgccggattctttcacccttcgcgaactacatgatttgactaacaccgtctgtgggggtgagaaggcttgggatggtttcagcaatattcctgatgcgcttgacgagttgagagataggggagagtattgtctggatttgaactttatgattgggttgctgcatacggggtatgatatccctattgatagggaggttaggacggccaagaagattaaggataatgagttggggtggtgtttgggcgctagtttgccgctcttgtcgaagaactcgggttggtcctgcaaggtgaatcaggtctattagacagacttgtcaagatagaaggattcatcacgataggcctacaaagcatcattcaaggcggcatgaaaacgtatagatcatataccatgtagaaatacgcgaactaatgagggagagaatgagacagtaaatcggaggggaagaaaaatcacaccatgttgctaccgagaaaaggcgggagagagcattcatgcccctgactcctgagtgtcgggggactggcgttcgtgctgggaatttggtaattgtgcttgggttgatagatgtcatgtcatgagaatcaaattgaaaggatactacgcgtaaccgcctggttcac

SEQ ID NO: 29165 - DNA, 756 bp, Muscodor strobelii
  misc_feature: SGI cDNA ID NO. 570013
  misc_feature: Encodes the peptide sequence at SEQ ID NO 29166
atggagccatgctcgatcctcgagctgacaacgtttctgctgaaaggcgggcaggaagtatacaactttctcaaagctgtgcacaaggcgcctaccgacgttcaagactacttagttgctttagaaaatggccgcaaggtttttgtccaagttgaagactatatactggtccacgaacaatcattttatcgcaccgcggacaaggcccagcttgatgctattcgtgtagtccttgaagattgcaagctgaccttcgcgctacaactctcgcaactagaagagtacgatacccaggatgcaacccccaaattcacacaacttcgaaagaaaatgggctttgtgttcagccaagagtcgttgaagcgatacacagccaagctcgagacatcacacacactcctcactcaagcattggctgcttcgattggaatggatgctaccgtgatccgagccgaagtaggagctgtgagactagacatcacggagatcgccagaagacaacaacaacagcatcaacagattctcaataccatagaacaatacactaggactcttcaaaggagtgtttccgacctcatgaactttgcgcgaacagtcgaacttcaaagcaggacaagtttgaccaacatggaacaagacataaacactgatgctcgttcagtacacgaggagcagcatgatgttaccgtgacacttacattagaccctgccgaaaaaggtgatagcgcatcgtcactgaagcaatcgccttcttga

SEQ ID NO: 29166 - protein, 251 aa, Muscodor strobelii
  misc_feature: SGI Peptide ID NO. 570013
MEPCSILELTTFLLKGGQEVYNFLKAVHKAPTDVQDYLVALENGRKVFVQVEDYILVHEQSFYRTADKAQLDAIRVVLEDCKLTFALQLSQLEEYDTQDATPKFTQLRKKMGFVFSQESLKRYTAKLETSHTLLTQALAASIGMDATVIRAEVGAVRLDITEIARRQQQQHQQILNTIEQYTRTLQRSVSDLMNFARTVELQSRTSLTNMEQDINTDARSVHEEQHDVTVTLTLDPAEKGDSASSLKQSPS

SEQ ID NO: 29167 - DNA, 1353 bp, Muscodor strobelii
  misc_feature: SGI cDNA ID NO. 570014
  misc_feature: Encodes the peptide sequence at SEQ ID NO 29168
atgccgatcctctggaccctgaaatgccaagcaacctctcaacgtcactccaaaccccaaacctcgatagctcaacctcaaacctccaactcctacccgggtctagtacccaaagccatcgccaatggcaccttcgcccaaatggctgatgaagcactcacacaaaaggtgcaaaccctgtcggacacctccctcgccatcctcctcagcctcataaaccgggagcactgcatcctcagcacacccgcgcccgacctcgaagacctcatcacagagctgcaactcacaagcgagaaaacctttgatctctcctcaacaatcgtgtattgcacacccgaaaccacactctccgacttcgtcttcggcatccaactcgcagcactaccctcatcgcggacaccttccccgctccaaaccagaagccccgactcctacttcgggccgcggccaactgtcgctggagcagggcgcaatctctcaacatcctctgcctcccaagctcagcaaaagacgcaaatcgcaaacatagtcatagccaaaaatctggatcgtgcgccaaaggcagtgcagattcaatgtctagagttaatgcgcacgcgccgcatcttcacacggacatctgtgcaagcatgtcctaagcaattcctcgtcatcgcttgtctagcttccgagtctgccggtagagcaaaactgacgaagcatttgaatgatcgattttacatcagtcattggtgtgatcccgatgatggatttccactttatgacgaggagcaagatcaagaatatgtcgtggaatatgaagatgcagacagtataaagagtacagagagcgtcgtgaggagacggagtagtgtgagaaagacgtctatacctacaccgagtatgccatcgcgcagtcctggactgcctgctccacggtctccactgcctgatatcaaggcagagccaggtactagccctttgtttacagagacagatctctctacgctttcgacgctatcctcgcagacccatgtatccgtctctgttctgcggtacttacaaaacatcatgtcatttcttcgcatgcaccgagctgtggttccgggcagcgtatcccccaacgcgacacctcactttcgctctctagtctcgtctcttgcagcacttcacggactgccgtatgcaacccctgagatggtgcagttggcagtgcgcaagatttacatacatagactcgagatcacagcgccagagcgagaacgaagtatgcagtggggaagcgacttaagtgccgtgaaggagttgctcgagggcgtggagccggaggatgttgttgaggacgtattgggcttggtcgatgtgcctctttga

SEQ ID NO: 29168 - protein, 450 aa, Muscodor strobelii
  misc_feature: SGI Peptide ID NO. 570014
  misc_feature (48)..(450): NCBI GI: 46121527 Blast Desc: FG05142.1 [Gibberella zeae PH-1]
  misc_feature (48)..(450): NCBI GI: 256731068 Blast Desc: [Nectria haematococca mpVI 77-13-4]
  misc_feature (48)..(444): NCBI GI: 156065017 Blast Desc: SS1G_00519 [Sclerotinia sclerotiorum 1980] gi|154691378|gb|EDN91116.1| SS1G_00519 [Sclerotinia sclerotiorum 1980]
  misc_feature (48)..(444): NCBI GI: 154320051 Blast Desc: BC1G_02006 [Botryotinia fuckeliana B05.10] gi|150854745|gb|EDN29937.1| BC1G_02006 [Botryotinia fuckeliana B05.10]
  misc_feature (53)..(449): NCBI GI: 85103295 Blast Desc: NCU03712 [Neurospora crassa OR74A] gi|12718293|emb|CAC28855.1| conserved [Neurospora crassa] gi|28923034|gb|EAA32252.1| conserved [Neurospora crassa OR74A]
  misc_feature (48)..(427): NCBI GI: 116206512 Blast Desc: CHGG_02549 [Chaetomium globosum CBS 148.51] gi|88183146|gb|EAQ90614.1| CHGG_02549 [Chaetomium globosum CBS 148.51]
  misc_feature (48)..(449): NCBI GI: 171692345 Blast Desc: protein product [Podospora anserina] gi|170946121|emb|CAP72922.1| protein product [Podospora anserina]
  misc_feature (48)..(450): NCBI GI: 145612183 Blast Desc: conserved [Magnaporthe grisea 70-15] gi|145019397|gb|EDK03625.1| conserved [Magnaporthe grisea 70-15]
  misc_feature (52)..(450): NCBI GI: 239612955 Blast Desc: conserved [Ajellomyces dermatitidis ER-3]
  misc_feature (52)..(450): NCBI GI: 261189739 Blast Desc: conserved [Ajellomyces dermatitidis SLH14081] gi|239591516|gb|EEQ74097.1| conserved [Ajellomyces dermatitidis SLH14081]
MPILWTLKCQATSQRHSKPQTSIAQPQTSNSYPGLVPKAIANGTFAQMADEALTQKVQTLSDTSLAILLSLINREHCILSTPAPDLEDLITELQLTSEKTFDLSSTIVYCTPETTLSDFVFGIQLAALPSSRTPSPLQTRSPDSYFGPRPTVAGAGRNLSTSSASQAQQKTQIANIVIAKNLDRAPKAVQIQCLELMRTRRIFTRTSVQACPKQFLVIACLASESAGRAKLTKHLNDRFYISHWCDPDDGFPLYDEEQDQEYVVEYEDADSIKSTESVVRRRSSVRKTSIPTPSMPSRSPGLPAPRSPLPDIKAEPGTSPLFTETDLSTLSTLSSQTHVSVSVLRYLQNIMSFLRMHRAVVPGSVSPNATPHFRSLVSSLAALHGLPYATPEMVQLAVRKIYIHRLEITAPERERSMQWGSDLSAVKELLEGVEPEDVVEDVLGLVDVPL

SEQ ID NO: 29169 - DNA, 1554 bp, Muscodor strobelii
  misc_feature: SGI EST ID NO. CUFF.68970.0
  misc_feature: Variant of the nucleotide sequence at SEQ ID NO 29167
cccaaacctcgatagctcaacctcaaacctccaactcctacccgggtctagtacccaaagccatcgccaatggcaccttcgcccaaatggctgatgaagcactcacacaaaaggtgcaaaccctgtcggacacctccctcgccatcctcctcagcctcataaaccgggagcactgcatcctcagcacacccgcgcccgacctcgaagacctcatcacagagctgcaactcacaagcgagaaaacctttgatctctcctcaacaatcgtgtattgcacacccgaaaccacactctccgacttcgtcttcggcatccaactcgcagcactaccctcatcgcggacaccttccccgctccaaaccagaagccccgactcctacttcgggccgcggccaactgtcgctggagcagggcgcaatctctcaacatcctctgcctcccaagctcagcaaaagacgcaaatcgcaaacatagtcatagccaaaaatctggatcgtgcgccaaaggcagtgcagattcaatgtctagagttaatgcgcacgcgccgcatcttcacacggacatctgtgcaagcatgtcctaagcaattcctcgtcatcgcttgtctagcttccgagtctgccggtagagcaaaactgacgaagcatttgaatgatcgattttacatcagtcattggtgtgatcccgatgatggatttccactttatgacgaggagcaagatcaagaatatgtcgtggaatatgaagatgcagacagtataaagagtacagagagcgtcgtgaggagacggagtagtgtgagaaagacgtctatacctacaccgagtatgccatcgcgcagtcctggactgcctgctccacggtctccactgcctgatatcaaggcagagccaggtactagccctttgtttacagagacagatctctctacgctttcgacgctatcctcgcagacccatgtatccgtctctgttctgcggtacttacaaaacatcatgtcatttcttcgcatgcaccgagctgtggttccgggcagcgtatcccccaacgcgacacctcactttcgctctctagtctcgtctcttgcagcacttcacggactgccgtatgcaacccctgagatggtgcagttggcagtgcgcaagatttacatacatagactcgagatcacagcgccagagcgagaacgaagtatgcagtggggaagcgacttaagtgccgtgaaggagttgctcgagggcgtggagccggaggatgttgttgaggacgtattgggcttggtcgatgtgcctctttgatgagcaaagtttgtgcagctgtgtgcgtgagagatgatggcagagacaatgatagagtgagcggtcaaccgattctcacagcaatgaattgcgatttcggcgtcaaggataaggtgttcctgcaacaaggcttgcatttgtagagcttttcacatagatacccccaatgcattttagttttcagggaaccagtgtcacttcactgaagctgaggttagtcgcggaagattttgtattggtacccaacaaaaaggcc

SEQ ID NO: 29170 - DNA, 972 bp, Muscodor strobelii
  misc_feature: SGI cDNA ID NO. 570015
  misc_feature: Encodes the peptide sequence at SEQ ID NO 29171
atgattcaaccggtagttccagaaggcttgtcctttcgcctgctctactacaccgatcatagagctcttacctgcaagcccaatacctggcaagtggccgccgagccagagaaagaggttgccgacaatcaatggtttcaaatcagcaccaagtacgttctaccagacatgcgcgcgaaaggatacttcagtatcaggaacaatagtactggccgctatctttacgcggagcatgttctcgtcaacgagctttcccagaagacgatgctagtcgggcaggtcgatacagcacacccagatgacaagcgatgtgcattccgctttgaggagggagtaggtgaatacacaggccggtacgtgcttgtaaaccgcctgggaagtgttctcatttgtaggccgtgggacacgcctagcctgtggagcgacagcacgcccagtcgggatccaaggcagtacttcaacgtcgaagttgaggggacccaattcttgcgtatcgattaccaaaaggacaacggcaagatcacatccaatacacccgtagtcatcgcgacggagacgctacagaacgactcggactcgcagcagagtatggagtactccgttacattcagcaaaacgcacacctactcgttcgacgtcacacgcgggctgacgttcaagtcgcaaatcagcggcaaggtcgggatccctctagtagcggatggcgggatcaagtttggtgttgatgcgaaggccgagactaagactggtgaggtgaactcatcgacggagtcgcacacggtgcgcttcccggttacggcagcgccgcgaagcacaattcttgcgacgtcgactgtcaccaggagtgaatatcaagtgccgttcacggcatactacaagtctctcaagacgggacaggagtttggcgtcgcgggcacatttcggggcgtcaacacctgggacctacggcatgttacaaagaagatagcataa

SEQ ID NO: 29171 - protein, 323 aa, Muscodor strobelii
  misc_feature: SGI Peptide ID NO. 570015
  misc_feature (5)..(322): NCBI GI: 61680142 Blast Desc: A Chain A, Three Dimensional Structure Of A Novel Pore-Forming Lectin From The Mushroom Laetiporus Sulphureus gi|61680143|pdb|1W3F|A Chain A, Crystal Structure Of The Lectin
  misc_feature (5)..(318): NCBI GI: 32261218 Blast Desc: Hemolytic lectin LSLb [Laetiporus sulphureus]
  misc_feature (5)..(322): NCBI GI: 32261220 Blast Desc: Hemolytic lectin LSLc [Laetiporus sulphureus]
  misc_feature (160)..(289): NCBI GI: 169848522 Blast Desc: [Coprinopsis cinerea okayama7#130] gi|116507956|gb|EAU90851.1| [Coprinopsis cinerea okayama7#130]
  misc_feature (148)..(316): NCBI GI: 255557038 Blast Desc: conserved [Ricinus communis] gi|223541415|gb|EEF42966.1| conserved [Ricinus communis]
MIQPVVPEGLSFRLLYYTDHRALTCKPNTWQVAAEPEKEVADNQWFQISTKYVLPDMRAKGYFSIRNNSTGRYLYAEHVLVNELSQKTMLVGQVDTAHPDDKRCAFRFEEGVGEYTGRYVLVNRLGSVLICRPWDTPSLWSDSTPSRDPRQYFNVEVEGTQFLRIDYQKDNGKITSNTPVVIATETLQNDSDSQQSMEYSVTFSKTHTYSFDVTRGLTFKSQISGKVGIPLVADGGIKFGVDAKAETKTGEVNSSTESHTVRFPVTAAPRSTILATSTVTRSEYQVPFTAYYKSLKTGQEFGVAGTFRGVNTWDLRHVTKKIA

SEQ ID NO: 29172 - DNA, 1511 bp, Muscodor strobelii
  misc_feature: SGI EST ID NO. CUFF.68973.0
  misc_feature: Variant of the nucleotide sequence at SEQ ID NO 29170
tgagagctgaggataaaccctaacttcagcttttcgtgatacagtaaggctaacggtataatcgtgacgatgcctattcccgtccccaatgatgaagcgcatctgcgtagtacagctaaagaccatttagtagggatccgcattgcgcccttacgacaccttagttacggatggaactaccaaattattcgaactatcgatccgtgacccgttatgccgtccggcgtctggtctgggcctcagagacatcatggcaattgaaaattcggccttgtgggctctattagtaggtataaagtgtcggctgttctcgtcgccctcgattgcatcacgtgttctctaatcattactcaacttaaatacagccttagacctacctgtgtacaccaggagcacacaggttcgtcatgattcaaccggtagttccagaaggcttgtcctttcgcctgctctactacaccgatcatagagctcttacctgcaagcccaatacctggcaagtggccgccgagccagagaaagaggttgccgacaatcaatggtttcaaatcagcaccaagtacgttctaccagacatgcgcgcgaaaggatacttcagtatcaggaacaatagtactggccgctatctttacgcggagcatgttctcgtcaacgagctttcccagaagacgatgctagtcgggcaggtcgatacagcacacccagatgacaagcgatgtgcattccgctttgaggagggagtaggtgaatacacaggccggtacgtgcttgtaaaccgcctgggaagtgttctcatttgtaggccgtgggacacgcctagcctgtggagcgacagcacgcccagtcgggatccaaggcagtacttcaacgtcgaagttgaggggacccaattcttgcgtatcgattaccaaaaggacaacggcaagatcacatccaatacacccgtagtcatcgcgacggagacgctacagaacgactcggactcgcagcagagtatggagtactccgttacattcagcaaaacgcacacctactcgttcgacgtcacacgcgggctgacgttcaagtcgcaaatcagcggcaaggtcgggatccctctagtagcggatggcgggatcaagtttggtgttgatgcgaaggccgagactaagactggtgaggtgaactcatcgacggagtcgcacacggtgcgcttcccggttacggcagcgccgcgaagcacaattcttgcgacgtcgactgtcaccaggagtgaatatcaagtgccgttcacggcatactacaagtctctcaagacgggacaggagtttggcgtcgcgggcacatttcggggcgtcaacacctgggacctacggcatgttacaaagaagatagcataagtaattgaaatatgaaatgatatgtacgagaaacgaactgttgtgaaacagtcgcaaatggatgaagatgatgagatacatgtgatgagttgaaatgtgaaatgctggcacgtcttgtgccgcctaatctgc

SEQ ID NO: 29173 - DNA, 2385 bp, Muscodor strobelii
  misc_feature: SGI cDNA ID NO. 570016
  misc_feature: Encodes the peptide sequence at SEQ ID NO 29174
atggattcgtacgacggaaccccatcaagtcttactcttcagagtggatgtccagtttgctacccacgcctgcgctcgcagacaaagttgctcctatgcggtggctgcaaagtcgtccattattgtagtgctaatcatcagaaggatcatcgcttgaagcacaaagcagcgtgtacctctattgagaaaagcaaagcgaagcttgagagagaggaagccagccttcgagctcatccaggcgactttatgctgccgagggatgtttttgagaacggcgtgggcagattctggggcttgttggacacccgcgactatatgagggcccgattcgcagctgccaaagctcttatgcagattgatacgactaaagcagtcgagaaggctttagcccacttccaggacatgttacgactttgtcgctctgataacttgggtgtccgagacatcgtccctggtctattacttcgcttgggacgagtgcaggaatgctacgactttctgaaatggtgggctaccatccccgatgaacactatgactggggcgacatgagcctgtcatatctcgacattcgcggagcaaatgcatttgaagctgttgatgctctcgccagcagcttaagtctcagccagcttgccattctcacgcttctgaaactgcagctgcacctcgagattgaagctcacgacccgcaatacttggatttcggatccccttggccccctcgtcccacagattttatgcggccgatcagcgaagttgtccgaaagaaagtcagaacgattacaagttcagacgtacccgacctctccgagtcactgaaggctcaataccaagcttcgtttcgagtgcttcataagaacaacccatatttttgggaaatcttggcatcagaagacgagccagttttgccttcgtcatatagttccggtaccgttgaagaggctcatttgaccgcctaccggtgcaaaaaggcatggaaagagagctatgatgccgacgtaatgcttgacctagaactcagcgaggtggataaggagaaatccgggtcatcaatcgctgcattcgatggcatcgacagcggagaagcctctgaaaccccagagagacgaagaggttctggtaaggcatttccaaccaagttccgtgcatctacggcgaatacaacgcccgagcagcttttcccgcctacgcgaacaggccgagatcagacataccatttcgttcatcgtaatgattcaaagaaagctcttgcgtacaccgacggagcttgttcgaacaatggacaacaagacccggaagcagcatgggcagcgatattccgtccatctattggcgataatagtcgtccgtgcattgtgtcaggtcgattagagctgaggggtccttttgaggatgagagtgtcgcaactagcaatcgggctgagcttcgtggagctatagctgtcttacgtcgcaacgattggagagatgatgggttcactagtctcgtcatcgcgactgattcgtcttatcttgtcgatggtgctaccgaatgggtcaaaggctggatccgtaatggttggacaacgcgaaatgatagtcccgtcaagaaccaagacttatgggagctgttcctcggcgaagtagaaaagtatcaagagatgggcttggaagttgcgctttggaagatccccagagagatgaatgaacttgcagacgccgtggcgaaagcgacaattgccagaggtgaagctccaagttacttcgaaaatgtacgactcggctctccagcgactattttgggaattcaaggagactctcgtgttcattgcctatgcctagagtacgaggatatgtttaatgatctttatgcaagcctcatctccaagatcaccgccaaggccgagatggttcgagtcaacacccagaaggctgcctcagatgtgcttgcgcagaatcctccgccatcagtgatcctggttactgatgcaggtgtcgtgagccacatgaaagtttgggagcttattgccgagtgtgtttgcctaggatcgacagtggtcctcgcagcaagctttagttcgttcgtcaacttgggccagttcaatcgttgctttaacaagattggtctaccatgggaaagaggaggttattatcgaactgatgtctctctacgctcaggaattgtcgatgagagcctgaaaaggcagcttgttcagacttacagccagaaggcgctgtttgtgaagggggtggccatgtcggatgtatggtatgccggtgatcagggtgaggtggctgttgctttcacgaaagttgggaatgggaggctcggttacgtaggagacgtcaacggcgaaaatggttctgaagcggcgattctcgctatgcttgggcttctgaactga

SEQ ID NO: 29174 - protein, 794 aa, Muscodor strobelii
  misc_feature: SGI Peptide ID NO. 570016
  misc_feature (414)..(574): Pfam Id: PF00075 Pfam Desc: RNase H
  misc_feature (20)..(58): Pfam Id: PF01753 Pfam Desc: MYND finger
  misc_feature (414)..(537): Pfam Id: PF00075 Pfam Desc: RNase H
  misc_feature (17)..(794): NCBI GI: 116179140 Blast Desc: CHGG_00198 [Chaetomium globosum CBS 148.51] gi|88184495|gb|EAQ91963.1| CHGG_00198 [Chaetomium globosum CBS 148.51]
  misc_feature (106)..(794): NCBI GI: 256725157 Blast Desc: NECHADRAFT_55208 [Nectria haematococca mpVI 77-13-4]
  misc_feature (101)..(793): NCBI GI: 256730423 Blast Desc: NECHADRAFT_82905 [Nectria haematococca mpVI 77-13-4]
  misc_feature (17)..(353): NCBI GI: 145611784 Blast Desc: [Magnaporthe grisea 70-15] gi|145019032|gb|EDK03311.1| [Magnaporthe grisea 70-15]
  misc_feature (6)..(314): NCBI GI: 240277801 Blast Desc: conserved [Ajellomyces capsulatus H143]
  misc_feature (14)..(326): NCBI GI: 225554494 Blast Desc: conserved [Ajellomyces capsulatus G186AR]
  misc_feature (26)..(337): NCBI GI: 169625783 Blast Desc: SNOG_16168 [Phaeosphaeria nodorum SN15] gi|111055232|gb|EAT76352.1| SNOG_16168 [Phaeosphaeria nodorum SN15]
  misc_feature (13)..(329): NCBI GI: 256724929 Blast Desc: NECHADRAFT_77121 [Nectria haematococca mpVI 77-13-4]
  misc_feature (367)..(585): NCBI GI: 116202849 Blast Desc: CHGG_09309 [Chaetomium globosum CBS 148.51] gi|88177827|gb|EAQ85295.1| CHGG_09309 [Chaetomium globosum CBS 148.51]
  misc_feature (370)..(580): NCBI GI: 242816035 Blast Desc: ribonuclease H1, [Talaromyces stipitatus ATCC 10500] gi|218715028|gb|EED14451.1| ribonuclease H1, [Talaromyces stipitatus ATCC 10500]
MDSYDGTPSSLTLQSGCPVCYPRLRSQTKLLLCGGCKVVHYCSANHQKDHRLKHKAACTSIEKSKAKLEREEASLRAHPGDFMLPRDVFENGVGRFWGLLDTRDYMRARFAAAKALMQIDTTKAVEKALAHFQDMLRLCRSDNLGVRDIVPGLLLRLGRVQECYDFLKWWATIPDEHYDWGDMSLSYLDIRGANAFEAVDALASSLSLSQLAILTLLKLQLHLEIEAHDPQYLDFGSPWPPRPTDFMRPISEVVRKKVRTITSSDVPDLSESLKAQYQASFRVLHKNNPYFWEILASEDEPVLPSSYSSGTVEEAHLTAYRCKKAWKESYDADVMLDLELSEVDKEKSGSSIAAFDGIDSGEASETPERRRGSGKAFPTKFRASTANTTPEQLFPPTRTGRDQTYHFVHRNDSKKALAYTDGACSNNGQQDPEAAWAAIFRPSIGDNSRPCIVSGRLELRGPFEDESVATSNRAELRGAIAVLRRNDWRDDGFTSLVIATDSSYLVDGATEWVKGWIRNGWTTRNDSPVKNQDLWELFLGEVEKYQEMGLEVALWKIPREMNELADAVAKATIARGEAPSYFENVRLGSPATILGIQGDSRVHCLCLEYEDMFNDLYASLISKITAKAEMVRVNTQKAASDVLAQNPPPSVILVTDAGVVSHMKVWELIAECVCLGSTVVLAASFSSFVNLGQFNRCFNKIGLPWERGGYYRTDVSLRSGIVDESLKRQLVQTYSQKALFVKGVAMSDVWYAGDQGEVAVAFTKVGNGRLGYVGDVNGENGSEAAILAMLGLLN

SEQ ID NO: 29175 - DNA, 2519 bp, Muscodor strobelii
  misc_feature: SGI EST ID NO. CUFF.68976.0
  misc_feature: Variant of the nucleotide sequence at SEQ ID NO 29173
ctacctaagggttaagcaattcctgcgatacatgctcgccatctaaaaccaccaagtcgccatggattcgtacgacggaaccccatcaagtcttactcttcagagtggatgtccagtttgctacccacgcctgcgctcgcagacaaagttgctcctatgcggtggctgcaaagtcgtccattattgtagtgctaatcatcagaaggatcatcgcttgaagcacaaagcagcgtgtacctctattgagaaaagcaaagcgaagcttgagagagaggaagccagccttcgagctcatccaggcgactttatgctgccgagggatgtttttgagaacggcgtgggcagattctggggcttgttggacacccgcgactatatgagggcccgattcgcagctgccaaagctcttatgcagattgatacgactaaagcagtcgagaaggctttagcccacttccaggacatgttacgactttgtcgctctgataacttgggtgtccgagacatcgtccctggtctattacttcgcttgggacgagtgcaggaatgctacgactttctgaaatggtgggctaccatccccgatgaacactatgactggggcgacatgagcctgtcatatctcgacattcgcggagcaaatgcatttgaagctgttgatgctctcgccagcagcttaagtctcagccagcttgccattctcacgcttctgaaactgcagctgcacctcgagattgaagctcacgacccgcaatacttggatttcggatccccttggccccctcgtcccacagattttatgcggccgatcagcgaagttgtccgaaagaaagtcagaacgattacaagttcagacgtacccgacctctccgagtcactgaaggctcaataccaagcttcgtttcgagtgcttcataagaacaacccatatttttgggaaatcttggcatcagaagacgagccagttttgccttcgtcatatagttccggtaccgttgaagaggctcatttgaccgcctaccggtgcaaaaaggcatggaaagagagctatgatgccgacgtaatgcttgacctagaactcagcgaggtggataaggagaaatccgggtcatcaatcgctgcattcgatggcatcgacagcggagaagcctctgaaaccccagagagacgaagaggttctggtaaggcatttccaaccaagttccgtgcatctacggcgaatacaacgcccgagcagcttttcccgcctacgcgaacaggccgagatcagacataccatttcgttcatcgtaatgattcaaagaaagctcttgcgtacaccgacggagcttgttcgaacaatggacaacaagacccggaagcagcatgggcagcgatattccgtccatctattggcgataatagtcgtccgtgcattgtgtcaggtcgattagagctgaggggtccttttgaggatgagagtgtcgcaactagcaatcgggctgagcttcgtggagctatagctgtcttacgtcgcaacgattggagagatgatgggttcactagtctcgtcatcgcgactgattcgtcttatcttgtcgatggtgctaccgaatgggtcaaaggctggatccgtaatggttggacaacgcgaaatgatagtcccgtcaagaaccaagacttatgggagctgttcctcggcgaagtagaaaagtatcaagagatgggcttggaagttgcgctttggaagatccccagagagatgaatgaacttgcagacgccgtggcgaaagcgacaattgccagaggtgaagctccaagttacttcgaaaatgtacgactcggctctccagcgactattttgggaattcaaggagactctcgtgttcattgcctatgcctagagtacgaggatatgtttaatgatctttatgcaagcctcatctccaagatcaccgccaaggccgagatggttcgagtcaacacccagaaggctgcctcagatgtgcttgcgcagaatcctccgccatcagtgatcctggttactgatgcaggtgtcgtgagccacatgaaagtttgggagcttattgccgagtgtgtttgcctaggatcgacagtggtcctcgcagcaagctttagttcgttcgtcaacttgggccagttcaatcgttgctttaacaagattggtctaccatgggaaagaggaggttattatcgaactgatgtctctctacgctcaggaattgtcgatgagagcctgaaaaggcagcttgttcagacttacagccagaaggcgctgtttgtgaagggggtggccatgtcggatgtatggtatgccggtgatcagggtgaggtggctgttgctttcacgaaagttgggaatgggaggctcggttacgtaggagacgtcaacggcgaaaatggttctgaagcggcgattctcgctatgcttgggcttctgaactgaaagccgatcgcgaagattgagaaaatttgacagataaagaaaataatgcagactaaatgactgatacctgtga

SEQ ID NO: 29176 - DNA, 1314 bp, Muscodor strobelii
  misc_feature: SGI cDNA ID NO. 570017
  misc_feature: Encodes the peptide sequence at SEQ ID NO 29177
atgaccgagcagcactggggtagctctctgccgcctcaagatgtggtttgggtaggcctgaatcagcgctccaggagtactggcgcttgggcacccccatcttcatccagcacctcggtcctcaatggctggggcctattcccagaaccctcgcaaaatacgattaatgctcctaagacacatcttccgaaccaagacgtggaaaatattgattatgcagctttcgcaaagtcttcgcttctaccgcctattctagaccaacaccaagacagtacttttccacgcagcagtatcccaccaagtcttgacgatggcctacccgcgactcggaatgaagctgttgatgattctgtgccgcagcaatcagcacgaaaaccgagagcagcaaatcctagcgacgcagtgtggcaacgaaacaagcctcacattgaaaaactatatatgagagatagaatgaagcttcctcaagtcaaagcgattatggaacgtgaccataactttttcgctaccgaaaagatgtacaaaacgaaattcaagatttggcgatggtccaagaatctaccgcttgaaaaggcgaattggatgagacagaagcttctcgagcgagggactgtcaagcaaactgtgttctattggaacgatcaggagtggacagcagagagattgatacagattgatggcaagccattgcagtctcaagatcggaatgttatatgtgcatcgacgccagcggatatttcttacaatacgccccgtgcaaatattcagaccccttcggctcgagaatcgccactgtatcccgatagaggccagcaatcagaacaagactggctctatctagatagtgcgccagtgaatttagatcttaatcagacatcgataggtgatctccaaaggttgctcgacgacgcttcgaaagccgcatcggaagggaagatcgacgacgccaatgccgattttcgagacgccgtctcagggtttcgctgtctcctgtccccaaacagcgaagggactattcgagcgggatatctttacgcgagtttctatgtcaagtgcggtcaggtcgacaaagcagaagcggtgccagcgtggatgttccggcatcacctgcaagagtatggacccgagcatgagaagacgaaactacatcggggtcgtgtggaagagctctaccggtcctggggctttcaagaccgtgcagaatctttcctccagtccagtgcgctcttgcaggcttacatagcgctaccggctgcgttccagagatgcgagaagctctcctacgtgcgagggtatcccttggtctatgcttaa

SEQ ID NO: 29177 - protein, 437 aa, Muscodor strobelii
  misc_feature: SGI Peptide ID NO. 570017
  misc_feature (115)..(404): NCBI GI: 46110607 Blast Desc: FG02185.1 [Gibberella zeae PH-1]
  misc_feature (14)..(405): NCBI GI: 240110385 Blast Desc: CPC735_064170 [Coccidioides posadasii C735 delta SOWgp]
  misc_feature (136)..(251): NCBI GI: 115491217 Blast Desc: [Aspergillus terreus NIH2624] gi|114197096|gb|EAU38796.1| [Aspergillus terreus NIH2624]
  misc_feature (136)..(267): NCBI GI: 255945625 Blast Desc: Pc20g10910 [Penicillium chrysogenum Wisconsin 54-1255] gi|211588315|emb|CAP86420.1| Pc20g10910 [Penicillium chrysogenum Wisconsin 54-1255]
  misc_feature (136)..(300): NCBI GI: 195972729 Blast Desc: [Aspergillus oryzae]
  misc_feature (136)..(300): NCBI GI: 238483115 Blast Desc: conserved [Aspergillus flavus NRRL3357] gi|220700846|gb|EED57184.1| conserved [Aspergillus flavus NRRL3357]
  misc_feature (136)..(225): NCBI GI: 121719850 Blast Desc: ACLA_058590 [Aspergillus clavatus NRRL 1] gi|119404835|gb|EAW15197.1| ACLA_058590 [Aspergillus clavatus NRRL 1]
  misc_feature (127)..(191): NCBI GI: 39977455 Blast Desc: [Magnaporthe grisea 70-15] gi|145015922|gb|EDK00412.1| [Magnaporthe grisea 70-15]
  misc_feature (138)..(251): NCBI GI: 85109709 Blast Desc: NCU05687 [Neurospora crassa OR74A] gi|28924699|gb|EAA33813.1| [Neurospora crassa OR74A]
  misc_feature (131)..(258): NCBI GI: 116201027 Blast Desc: CHGG_08398 [Chaetomium globosum CBS 148.51] gi|88176916|gb|EAQ84384.1| CHGG_08398 [Chaetomium globosum CBS 148.51]
MTEQHWGSSLPPQDVVWVGLNQRSRSTGAWAPPSSSSTSVLNGWGLFPEPSQNTINAPKTHLPNQDVENIDYAAFAKSSLLPPILDQHQDSTFPRSSIPPSLDDGLPATRNEAVDDSVPQQSARKPRAANPSDAVWQRNKPHIEKLYMRDRMKLPQVKAIMERDHNFFATEKMYKTKFKIWRWSKNLPLEKANWMRQKLLERGTVKQTVFYWNDQEWTAERLIQIDGKPLQSQDRNVICASTPADISYNTPRANIQTPSARESPLYPDRGQQSEQDWLYLDSAPVNLDLNQTSIGDLQRLLDDASKAASEGKIDDANADFRDAVSGFRCLLSPNSEGTIRAGYLYASFYVKCGQVDKAEAVPAWMFRHHLQEYGPEHEKTKLHRGRVEELYRSWGFQDRAESFLQSSALLQAYIALPAAFQRCEKLSYVRGYPLVYA

SEQ ID NO: 29178 - DNA, 2073 bp, Muscodor strobelii
  misc_feature: SGI EST ID NO. CUFF.69020.1
  misc_feature: Variant of the nucleotide sequence at SEQ ID NO 29176
aagctgttgatgattctgtgccgcagcaatcagcacgaaaaccgagagcagcaaatcctagcgacgcagtgtggcaacgaaacaagcctcacattgaaaaactatatatgagagatagaatgaagcttcctcaagtcaaagcgattatggaacgtgaccataactttttcgctaccgaaaagatgtacaaaacgaaattcaagatttggcgatggtccaagaatctaccgcttgaaaaggcgaattggatgagacagaagcttctcgagcgagggactgtcaagcaaactgtgttctattggaacgatcaggagtggacagcagagagattgatacagattgatggcaagccattgcagtctcaagatcggaatgttatatgtgcatcgacgccagcggatatttcttacaatacgccccgtgcaaatattcagaccccttcggctcgagaatcgccactgtatcccgatagaggccagcaatcagaacaagactggctctatctagatagtgcgccagtgaatttagatcttaatcagacatcgataggtgatctccaaaggttgctcgacgacgcttcgaaagccgcatcggaagggaagatcgacgacgccaatgccgattttcgagacgccgtctcagggtttcgctgtctcctgtccccaaacagcgaagggactattcgagcgggatatctttacgcgagtttctatgtcaagtgcggtcaggtcgacaaagcagaagcggtgccagcgtggatgttccggcatcacctgcaagagtatggacccgagcatgagaagacgaaactacatcggggtcgtgtggaagagctctaccggtcctggggctttcaagaccgtgcagaatctttcctccgtaagtttgtgggctgtgcccatgatgatggcgctgagtcatcgatgggaacaagcaagacgaggtcgggacttctccaaccacgaaatcaagcgggcataagttcgctgtctctcctcgaggcacacgacattggtagttctacagatcgagacaacgcaaatctctcaaacgcccatatgtccttacaatcatgtagagtccagtgcgctcttgcaggcttacatagcgctaccggctgcgttccagagatgcgagaagctctcctacgtgcgagggtatcccttggtctatgcttaacattgggcaagcagccgatatcgcataccgcagttgagacagcacgagagctcgctttcatgttccacacagctaacgatacgcattcgtgtaatagccttctcgacgaagtcatcgccgtacttgatagacaactatgtagctatatcactcgagacaacaatgataagatagcattggttgaattcgttcagtcggtcgctttccaattccatgaaaaccgcagctatgatcaatgtcggttctgggtggagcggggtctcggcctcgccataaggctatttggaccacgatcaatgcaggccaaaaggttcgaggaagttttacagaaagatgacttcgacatgaggtcgcctatggacatcgatcaattaatgagatacacaatatattgaagtcgcccttaagctgccgagagcatacattgtgggattgcagttctatctgtgagaaaaaacaattatggtccttgacatgtcagagatgaatgcatagtaatatagacttgttcaaatattccatcccagcccactataacacatcaacttggaatctcaacaatccgtttgtctctggccttaagctgattcctgcgctaatggcacttagtttatataagcttgacatcccggtcatgaaccccgagatcttctgcttccccatgcataaagccgtgaacataagcttccccgaacaaacgataagtggtctctgcaccattgcctgaagcccttagcacatgagcagtagaagctcctctgaagacacaagtcacgtctccgtgttcaatagagctagagccaaaccctaccctcccggacgctgttctaaatagccttctgtgatgcaaacatatccataatgggcccagaaacatcatcaaatctgtctgag

SEQ ID NO: 29179 - DNA, 1944 bp, Muscodor strobelii
  misc_feature: SGI cDNA ID NO. 570018
  misc_feature: Encodes the peptide sequence at SEQ ID NO 29180
atgcaatcagatgtcccaatggatcctttcacttgggtttggcccccacccgttcaagcgctcaatcccttccaactagaaggagccgggatgatttgtgaaacgaagcgttttgacaagtttcacaattcccaaggggatccaattgtactcccagcgggacagaaatacaaagacaagcacaaggatcggggccatgagagcgcattgacggtaattactcgatgggactctgatcagaaagtgcagggcactgagcttgtcatctggtctccccatatgaaagcggctattaaggccattcgtcaagagctgggggcttatgggaatcgactccagcaacaagctgacaatggcgacaatgtggaagcagtactgcacatacagcatctcatctcatatatgttggatgtcttcttcatggaaatcgcgtcttattctttgatagatatattcgttgatggtgagcctgagctggagtacgagaacctctggatggactttcgccctggagacatcgtctacgtccaggaggctggcaaggtcgaaagagctttcaagtttacgagtatgaaacttttagaatcttggtggcggctcacaggctattgcattcagtacgatggcgagttcttcgggtatgcttccgacgaagccaccataatgcgatatgacggcgtgaagagactgcgagaactcaacgctgtcaatctgaaccgattgacggacaaaaagcgccaaagggttaagaagaatcttttagaaagcggcaaaaggttcctcagatgccacaggtttacatatcttcaattcgatccaagtttctcaggtgatgtaatgaccaccgagaggaagactcgaatcgtggttgatcgcagagcgagcgatgattggggtccaaccactcgtcccaggctgctacctaccgaaaggagattcactcccgaagaagcggagaagcaaatgacagacactgaacacatgatatgttccaatatcattacagggtactctttgaatgataacaaatggggcagctaccacgtcagtcacacacgtgccatcagctttaactcagaagcttataataatcttttgctccccgataatcaaaaacagcagattctttcactagttagcgtgcatgaaaatgataaaagcgctgttccggatttcatctcagaaaagggcaaaggattgacgtttctactgtacggagagcccggcatcggcaagactttaacagctgtattcctccggatgcttgagtactataacggaatagtattcctcacaacaaatcgaatctctgctttcgatagggcgttcgtttcacgaatccaccttgcaatccactatgaacccttgactatgcaagttcgacgtcaattgtggcaatcattcctcgagaaaatctctaggagcacagcagcggcgctagaccatgatggcgtgcttgagagacttgctaaagcgccactaaacggccgacagatcaggaatgctattcgaacggcgtatgcactcgctctcaacgatgcggatggtatcaccgacgaaacgcatttgcagcaatctgtgcagccggtgatgactttcatggaacatgcagagaaagaatttgcggggggaaataattcgctagcattcagcgagaggattatgaagcaagctcatgcggacgcgaaagattactcggaaagcggcgaggaggatatcttatacggaaacgagagtgatgaagacgagggatcggaagacgaggacctagaggacgatgagcccgacgaagaggagctgggatacgaaaagtcgatttccaacatggattcaaattcggaggtggacgatgactcggatattgaggatgactccgataacgtggacgatgttgataacgaactcgaagatgcacaaaggccgaacaaacgcatgcggctctag

SEQ ID NO: 29180 - protein, 647 aa, Muscodor strobelii
  misc_feature: SGI Peptide ID NO. 570018
  misc_feature (4)..(539): NCBI GI: 46110609 Blast Desc: FG02186.1 [Gibberella zeae PH-1]
  misc_feature (16)..(416): NCBI GI: 240110384 Blast Desc: ATPase, AAA family protein [Coccidioides posadasii C735 delta SOWgp]
  misc_feature (31)..(514): NCBI GI: 116182798 Blast Desc: CHGG_02027 [Chaetomium globosum CBS 148.51] gi|88186324|gb|EAQ93792.1| CHGG_02027 [Chaetomium globosum CBS 148.51]
  misc_feature (77)..(510): NCBI GI: 116192721 Blast Desc: CHGG_06078 [Chaetomium globosum CBS 148.51] gi|88181991|gb|EAQ89459.1| CHGG_06078 [Chaetomium globosum CBS 148.51]
  misc_feature (296)..(533): NCBI GI: 189205344 Blast Desc: conserved [Pyrenophora tritici-repentis Pt-1C-BFP] gi|187986106|gb|EDU51594.1| conserved [Pyrenophora tritici-repentis Pt-1C-BFP]
  misc_feature (104)..(499): NCBI GI: 154280076 Blast Desc: [Ajellomyces capsulatus NAm1] gi|150412794|gb|EDN08181.1| [Ajellomyces capsulatus NAm1]
  misc_feature (104)..(510): NCBI GI: 116199449 Blast Desc: CHGG_07880 [Chaetomium globosum CBS 148.51] gi|88179159|gb|EAQ86627.1| CHGG_07880 [Chaetomium globosum CBS 148.51]
  misc_feature (29)..(517): NCBI GI: 145607209 Blast Desc: MGG_04085 [Magnaporthe grisea 70-15] gi|145014809|gb|EDJ99377.1| MGG_04085 [Magnaporthe grisea 70-15]
  misc_feature (159)..(528): NCBI GI: 256731079 Blast Desc: NECHADRAFT_48916 [Nectria haematococca mpVI 77-13-4]
  misc_feature (159)..(510): NCBI GI: 169617988 Blast Desc: SNOG_12178 [Phaeosphaeria nodorum SN15] gi|111059470|gb|EAT80590.1| SNOG_12178 [Phaeosphaeria nodorum SN15]
MQSDVPMDPFTWVWPPPVQALNPFQLEGAGMICETKRFDKFHNSQGDPIVLPAGQKYKDKHKDRGHESALTVITRWDSDQKVQGTELVIWSPHMKAAIKAIRQELGAYGNRLQQQADNGDNVEAVLHIQHLISYMLDVFFMEIASYSLIDIFVDGEPELEYENLWMDFRPGDIVYVQEAGKVERAFKFTSMKLLESWWRLTGYCIQYDGEFFGYASDEATIMRYDGVKRLRELNAVNLNRLTDKKRQRVKKNLLESGKRFLRCHRFTYLQFDPSFSGDVMTTERKTRIVVDRRASDDWGPTTRPRLLPTERRFTPEEAEKQMTDTEHMICSNIITGYSLNDNKWGSYHVSHTRAISFNSEAYNNLLLPDNQKQQILSLVSVHENDKSAVPDFISEKGKGLTFLLYGEPGIGKTLTAVFLRMLEYYNGIVFLTTNRISAFDRAFVSRIHLAIHYEPLTMQVRRQLWQSFLEKISRSTAAALDHDGVLERLAKAPLNGRQIRNAIRTAYALALNDADGITDETHLQQSVQPVMTFMEHAEKEFAGGNNSLAFSERIMKQAHADAKDYSESGEEDILYGNESDEDEGSEDEDLEDDEPDEEELGYEKSISNMDSNSEVDDDSDIEDDSDNVDDVDNELEDAQRPNKRMRL

SEQ ID NO: 29181 - DNA, 894 bp, Muscodor strobelii
  misc_feature: SGI cDNA ID NO. 570019
  misc_feature: Encodes the peptide sequence at SEQ ID NO 29182
atgcaatcagatgtcccaatggatcctttcacttgggtttggcccccacccgttcaagcgctcaatcccttccaactagaaggagccgggatgatttgtgaaacgaagcgttttgacaagtttcacaattcccaaggggatccaattgtactcccagcgggacagaaatacaaagacaagcacaaggatcggggccatgagagcgcattgacggtaattactcgatgggactctgatcagaaagtgcagggcactgagcttgtcatctggtctccccatatgaaagcggctattaaggccattcgtcaagagctgggggcttatgggaatcgactccagcaacaagctgacaatggcgacaatgtggaagcagtactgcacatacagcatctcatctcatatatgttggatgtcttcttcatggaaatcgcgtcttattctttgatagatatattcgttgatggtgagcctgagctggagtacgagaacctctggatggactttcgccctggagacatcgtctacgtccaggaggctggcaaggtcgaaagagctttcaagtttacgagtatgaaacttttagaatcttggtggcggctcacaggctattgcattcagtacgatggcgagttcttcgggtatgcttccgacgaagccaccataatgcgatatgacggcgtgaagagactgcgagaactcaacgctgtcaatctgaaccgattgacggacaaaaagcgccaaagggttaagaagaatcttttagaaagcggcaaaagaggaagactcgaatcgtggttgatcgcagagcgagcgatgattggggtccaaccactcgtcccaggctgctacctaccgaaaggagattcactcccgaagaagcggagaagcaaatga

SEQ ID NO: 29182 - protein, 297 aa, Muscodor strobelii
  misc_feature: SGI Peptide ID NO. 570019
  misc_feature (4)..(259): NCBI GI: 46110609 Blast Desc: FG02186.1 [Gibberella zeae PH-1]
  misc_feature (16)..(233): NCBI GI: 240110384 Blast Desc: ATPase, AAA family protein [Coccidioides posadasii C735 delta SOWgp]
  misc_feature (79)..(236): NCBI GI: 156033037 Blast Desc: SS1G_13594 [Sclerotinia sclerotiorum 1980] gi|154698997|gb|EDN98735.1| SS1G_13594 [Sclerotinia sclerotiorum 1980]
  misc_feature (73)..(259): NCBI GI: 171688134 Blast Desc: protein product [Podospora anserina] gi|170944029|emb|CAP70139.1| protein product [Podospora anserina]
  misc_feature (121)..(259): NCBI GI: 115399896 Blast Desc: conserved [Aspergillus terreus NIH2624] gi|114191203|gb|EAU32903.1| conserved [Aspergillus terreus NIH2624]
  misc_feature (31)..(259): NCBI GI: 116182798 Blast Desc: CHGG_02027 [Chaetomium globosum CBS 148.51] gi|88186324|gb|EAQ93792.1| CHGG_02027 [Chaetomium globosum CBS 148.51]
  misc_feature (110)..(261): NCBI GI: 225562056 Blast Desc: conserved [Ajellomyces capsulatus G186AR]
  misc_feature (127)..(259): NCBI GI: 145237308 Blast Desc: An07g02150 [Aspergillus niger] gi|134075769|emb|CAK39306.1| protein product [Aspergillus niger]
  misc_feature (104)..(261): NCBI GI: 240278254 Blast Desc: AAA family ATPase [Ajellomyces capsulatus H143]
  misc_feature (103)..(259): NCBI GI: 238482701 Blast Desc: AAA family ATPase, [Aspergillus flavus NRRL3357] gi|220700639|gb|EED56977.1| AAA family ATPase, [Aspergillus flavus NRRL3357]
MQSDVPMDPFTWVWPPPVQALNPFQLEGAGMICETKRFDKFHNSQGDPIVLPAGQKYKDKHKDRGHESALTVITRWDSDQKVQGTELVIWSPHMKAAIKAIRQELGAYGNRLQQQADNGDNVEAVLHIQHLISYMLDVFFMEIASYSLIDIFVDGEPELEYENLWMDFRPGDIVYVQEAGKVERAFKFTSMKLLESWWRLTGYCIQYDGEFFGYASDEATIMRYDGVKRLRELNAVNLNRLTDKKRQRVKKNLLESGKRGRLESWLIAERAMIGVQPLVPGCYLPKGDSLPKKRRSK

SEQ ID NO: 29183 - DNA, 1311 bp, Muscodor strobelii
  misc_feature: SGI cDNA ID NO. 570020
  misc_feature: Elevated expression when VOC is produced
  misc_feature: Encodes the peptide sequence at SEQ ID NO 29184
atgaagttctcccaagcaagcaatcttctcgcactggccggactcgctcacgcgtgtctattgcccgaggagcgtgctggtggctcgatccgcaaactcagccgccgccagcaggacaatcacggcaaagctattgggaagggagaccgcttcaatggcggcaaatcgttcccccgcggtatcggcagtggtgatgcaactgacatgagcactatcctcaacgtgaaggaggttgacagcggtttggctggtctctcggccgagtacaacagccagatcttcgagacaccgttcaagacctacgagggtcgaacaatctccggaggcagggtcggaggcaagggatgtggcaaggacatctaccatgtctatctgaacggtgcaatccacgctcgtgagcgtggctctcatgattccgtcttgtatttcatctcagacctcctctatgcgcaaaagcacaagactggtctagtctatggcaataagaactacacttacgatgatgtcgagaaggccttggccgccggtattgtcttcactccgctaattaatcccgacggtgtcactcacgatcaggagttcaacgattgctggcgcaagaaccgtaacccggagagttctaatagcgatgaggaggccatcggaattgatcttaaccgcaactttgacttcgtctgggacttgaatggctgggctcccgaggtcgccaatgaggtggcatcggaagatcctacgtccgaagtcttccacggcaccgcgcccttctcggagccggagactgccaacatgaagtgggttctggacacattcaaaaaggtgcgctggtttattgacctgcactcgttcaccggcgacgttttgtacagctggggcagcgatacaaaccaggagacgcaaccatacaaaagcttcctcaattcgacctacgacgacatccgcggcctcgtggaggacgacccggagactcaatacggcgagtttatcactgctgaggatcatgacaacgcaaagggtgctgccgatcgtatggctgctgccatgacttcctctaccgaccgcgagtatctcacactgcaggccgcagctttctacccgacttcgggcgcaagtgacgactattcattctcccgccattttgccgacccgtcactcaacaaggtctacggctacaccgtcgagttcggtttcggcaacgaagaggcctcgtgccccttttacccgactgaagaacagtatattctaaacctgcaggagactaatgcggggttcatggagttcctactggcagcctcagacatcggtctagagtaa

SEQ ID NO: 29184 - protein, 436 aa, Muscodor strobelii
  misc_feature: SGI Peptide ID NO. 570020
  misc_feature (78)..(422): Pfam Id: PF00246 Pfam Desc: Zinc carboxypeptidase
  misc_feature (1)..(435): NCBI GI: 39940786 Blast Desc: MGG_04847 [Magnaporthe grisea 70-15] gi|145010929|gb|EDJ95585.1| MGG_04847 [Magnaporthe grisea 70-15]
  misc_feature (9)..(435): NCBI GI: 39972819 Blast Desc: MGG_07704 [Magnaporthe grisea 70-15] gi|145012471|gb|EDJ97125.1| MGG_07704 [Magnaporthe grisea 70-15]
  misc_feature (3)..(435): NCBI GI: 261360491 Blast Desc: peptidase M14 [Verticillium albo-atrum VaMs.102]
  misc_feature (105)..(435): NCBI GI: 156047733 Blast Desc: SS1G_09556 [Sclerotinia sclerotiorum 1980] gi|154693951|gb|EDN93689.1| SS1G_09556 [Sclerotinia sclerotiorum 1980]
  misc_feature (30)..(436): NCBI GI: 189190712 Blast Desc: zinc carboxypeptidase A 1 precursor [Pyrenophora tritici-repentis Pt-1C-BFP] gi|187973301|gb|EDU40800.1| zinc carboxypeptidase A 1 precursor [Pyrenophora tritici-repentis
  misc_feature (29)..(436): NCBI GI: 169597327 Blast Desc: SNOG_01449 [Phaeosphaeria nodorum SN15] gi|160707498|gb|EAT91098.2| SNOG_01449 [Phaeosphaeria nodorum SN15]
  misc_feature (1)..(435): NCBI GI: 154293729 Blast Desc: BC1G_14101 [Botryotinia fuckeliana B05.10] gi|150845257|gb|EDN20450.1| BC1G_14101 [Botryotinia fuckeliana B05.10]
  misc_feature (8)..(432): NCBI GI: 256724540 Blast Desc: NECHADRAFT_98018 [Nectria haematococca mpVI 77-13-4]
  misc_feature (9)..(436): NCBI GI: 46126977 Blast Desc: FG07866.1 [Gibberella zeae PH-1]
  misc_feature (32)..(436): NCBI GI: 169602243 Blast Desc: SNOG_04117 [Phaeosphaeria nodorum SN15] gi|111066757|gb|EAT87877.1| SNOG_04117 [Phaeosphaeria nodorum SN15]
  misc_feature (68)..(291): SWISSPROT Homolog: EC 3.4.17.2 Carboxypeptidase B
  misc_feature: Useful for introducing or modulating the production of volatile compounds
MKFSQASNLLALAGLAHACLLPEERAGGSIRKLSRRQQDNHGKAIGKGDRFNGGKSFPRGIGSGDATDMSTILNVKEVDSGLAGLSAEYNSQIFETPFKTYEGRTISGGRVGGKGCGKDIYHVYLNGAIHARERGSHDSVLYFISDLLYAQKHKTGLVYGNKNYTYDDVEKALAAGIVFTPLINPDGVTHDQEFNDCWRKNRNPESSNSDEEAIGIDLNRNFDFVWDLNGWAPEVANEVASEDPTSEVFHGTAPFSEPETANMKWVLDTFKKVRWFIDLHSFTGDVLYSWGSDTNQETQPYKSFLNSTYDDIRGLVEDDPETQYGEFITAEDHDNAKGAADRMAAAMTSSTDREYLTLQAAAFYPTSGASDDYSFSRHFADPSLNKVYGYTVEFGFGNEEASCPFYPTEEQYILNLQETNAGFMEFLLAASDIGLE

SEQ ID NO: 29185 - DNA, 2666 bp, Muscodor strobelii
  misc_feature: SGI EST ID NO. CUFF.69105.0
  misc_feature: Variant of the nucleotide sequence at SEQ ID NO 29183
caagaagatgctgagcttctagtctctgggcaccgtaatctttggacttgacgacggggatcaatctcatggtttccggggtcgtcgctctgagggaataactcaaaaagccgttaagatgcgtacttaacaaacgttatcgcgccatagtcgctggagccttcattctctcgctgcgcccggtcacttgtttgtttcaacttatttacacactcgctcgacaccacgcgacgaccatgaagttctcccaagcaagcaatcttctcgcactggccggactcgctcacgcgtgtctattgcccgaggagcgtgctggtggctcgatccgcaaactcagccgccgccagcaggacaatcacggcaaagctattgggaagggagaccgcttcaatggcggcaaatcgttcccccgcggtatcggcagtggtgatgcaactgacatgagcactatcctcaacgtgaaggaggttgacagcggtttggctggtctctcggccgagtacaacagccagatcttcgagacaccgttcaagacctacgagggtcgaacaatctccggaggcagggtcggaggcaagggatgtggcaaggacatctaccatgtctatctgaacggtgcaatccacgctcgtgagcgtggctctcatgattccgtcttgtatttcatctcagacctcctctatgcgcaaaagcacaagactggtctagtctatggcaataagaactacacttacgatgatgtcgagaaggccttggccgccggtattgtcttcactccgctaattaatcccgacggtgtcactcacgatcaggagttcaacgattgctggcgcaagaaccgtaacccggagagttctaatagcgatgaggaggccatcggaattgatcttaaccgcaactttgacttcgtctgggacttgaatggctgggctcccgaggtcgccaatgaggtggcatcggaagatcctacgtccgaagtcttccacggcaccgcgcccttctcggagccggagactgccaacatgaagtgggttctggacacattcaaaaaggtgcgctggtttattgacctgcactcgttcaccggcgacgttttgtacagctggggcagcgatacaaaccaggagacgcaaccatacaaaagcttcctcaattcgacctacgacgacatccgcggcctcgtggaggacgacccggagactcaatacggcgagtttatcactgctgaggatcatgacaacgcaaagggtgctgccgatcgtatggctgctgccatgacttcctctaccgaccgcgagtatctcacactgcaggccgcagctttctacccgacttcgggcgcaagtgacgactattcattctcccgccattttgccgacccgtcactcaacaaggtctacggctacaccgtcgagttcggtttcggcaacgaagaggcctcgtgccccttttacccgactgaagaacagtatattctaaacctgcaggagactaatgcggggttcatggagttcctactggcagcctcagacatcggtctagagtaagaagtgacgacaatggtggtggtggtgatgatgataaggctagatttcttgtgtacgtactccgcgttcacgcggacatgaaacagttccataatcattaatacataatcagccaagatcttttcaagttagcgccagatatccagctgttctctatcattgccaaacccttgcggtgaaaattgcgaggttgtcgacggtgagccgttcctctaacggtttcccactttattcggcggtccggcatttgattgatgccgtcgtagatcaaggcatgattgaaagtaatttctaatgaagactggcgcacttctctttcggacctttcgaaatttttagaaaggacgtcaatagcccgtgtgaaatgatagcagtctgactgcagcggcctttcttctatacatcatgtatgactcaatttcttgcctccggttgtaagaatagcctatgatcttgttctgtgccaggccaagcgttgctgagacgatattgagtgctatttactctcacactcccccaacgtgtgggccaaacagaaacctcaatcatctgtaggtgccctttctcgtcgggttgccaggcattcagaggaaatgtcatcactgtcttcctcttgaaatacttgttaaagatcattaaagggactataccaatgacggtcataaaaacacagaaaccaagtacgtaatgctttgcatttcgttcttcgttatgtgagctttctgagtaaggcaccataattccctgctgcactacagcaaagcctccgaattggcggcgaacgatttgaccccctggtcctctattggtgatgtttccagatcctcgaaaccacctcggcgaggcggcgagtagaccccattcacctctatcgaggtgatacccgccatacactttaggtttctgcgcagacttcccggggccatcggttggcatcttccaggcgaagagagtttcatcggttgatttggagagcagcgcatactgaaggcgtaaaaacgcattctccgctccttctccgtaacttggtaccatgttgataccaagaagacccagcatactgtatgcgacatcttataatacgatcagagttagtgaatacttatttctcgggcttta

SEQ ID NO: 29186 - DNA, 918 bp, Muscodor strobelii
  misc_feature: SGI cDNA ID NO. 570021
  misc_feature: Elevated expression when VOC is produced
  misc_feature: Encodes the peptide sequence at SEQ ID NO 29187
atgcgattaatcaacacatcgacgttcgatatttccacggagaatctcagattttttgtcgatagaggctacgctattctttctcatcgatggacaggcgccgagattgaataccgggacttttcacattacaaagccgagctccgaagaaataaagattccccatgcctgctccagccgatcgggctcaataagatcagcgatgcatgtcgtattgcacgtcgcaaggagatacaatggatatggattgatacttgttgcatcgacaagtccaatgctgttgaatacaatgagtcaatcaactctatgttccaatggtacgccagcgcgaagatttgcattgcataccttaacgatgtgaaactggacccgaatagtcaaggagtgaatatcttccgctcgagccaatataaaaattatccgttgccttcaatctggttcaccagaggttggacgctacaggagctattagcccccgttgacgtggaattctacgatacgaattgggagctcatcggcacgcgcaaaagccttgcaccagcgctcgaacagattacaagaatcaatagagattacttgtctggggcaagaagattgaaagaggcttccattgccgccaagatgagctggatggctggtcgcgtgacagagaagccagaagatgtcgcatacagtatgctgggtcttcttggtatcaacatggtaccaagttacggagaaggagcggagaatgcgtttttacgccttcagtatgcgctgctctccaaatcaaccgatgaaactctcttcgcctggaagatgccaaccgatggccccgggaagtctgcgcagaaacctaaagtgtatggcgggtatcacctcgatagagaggaccagggggtcaaatcgttcgccgccaattcggaggctttgctgtag

SEQ ID NO: 29187 - protein, 305 aa, Muscodor strobelii
  misc_feature: SGI Peptide ID NO. 570021
  misc_feature (24)..(155): Pfam Id: PF06985 Pfam Desc: Heterokaryon incompatibility protein (HET)
  misc_feature (1)..(275): NCBI GI: 46119876 Blast Desc: FG04807.1 [Gibberella zeae PH-1]
  misc_feature (1)..(282): NCBI GI: 7981344 Blast Desc: related to beta transducin-like protein [Neurospora crassa]
  misc_feature (17)..(266): NCBI GI: 171677823 Blast Desc: protein product [Podospora anserina] gi|170936980|emb|CAP61638.1| protein product [Podospora anserina]
  misc_feature (1)..(283): NCBI GI: 238493477 Blast Desc: conserved [Aspergillus flavus NRRL3357] gi|220696469|gb|EED52811.1| conserved [Aspergillus flavus NRRL3357]
  misc_feature (1)..(280): NCBI GI: 256733553 Blast Desc: [Nectria haematococca mpVI 77-13-4]
  misc_feature (1)..(265): NCBI GI: 71001840 Blast Desc: HET domain protein [Aspergillus fumigatus Af293] gi|66853239|gb|EAL93563.1| HET domain protein [Aspergillus fumigatus Af293] gi|159129660|gb|EDP54774.1| HET domain protein
  misc_feature (1)..(268): NCBI GI: 46128083 Blast Desc: FG08419.1 [Gibberella zeae PH-1]
  misc_feature (1)..(265): NCBI GI: 46139697 Blast Desc: FG11363.1 [Gibberella zeae PH-1]
  misc_feature (1)..(282): NCBI GI: 154318644 Blast Desc: BC1G_02711 [Botryotinia fuckeliana B05.10] gi|150857841|gb|EDN33033.1| BC1G_02711 [Botryotinia fuckeliana B05.10]
  misc_feature (1)..(273): NCBI GI: 256723740 Blast Desc: NECHADRAFT_52245 [Nectria haematococca mpVI 77-13-4]
  misc_feature: Useful for introducing or modulating the production of volatile compounds
MRLINTSTFDISTENLRFFVDRGYAILSHRWTGAEIEYRDFSHYKAELRRNKDSPCLLQPIGLNKISDACRIARRKEIQWIWIDTCCIDKSNAVEYNESINSMFQWYASAKICIAYLNDVKLDPNSQGVNIFRSSQYKNYPLPSIWFTRGWTLQELLAPVDVEFYDTNWELIGTRKSLAPALEQITRINRDYLSGARRLKEASIAAKMSWMAGRVTEKPEDVAYSMLGLLGINMVPSYGEGAENAFLRLQYALLSKSTDETLFAWKMPTDGPGKSAQKPKVYGGYHLDREDQGVKSFAANSEALL

SEQ ID NO: 29188 - DNA, 5536 bp, Muscodor strobelii
  misc_feature: SGI EST ID NO. CUFF.69106.1
  misc_feature: Variant of the nucleotide sequence at SEQ ID NO 29186
catcattgaatcgagattcgttgaatctcaattcgtagcaaaacattaaaagtgattgcaaccaacaggtttatttactttacttctatgcacactcataccaacctccagtaaagcactaatatcagattcgtattgccttcattaatcctcaatcctcatcaccgacagcaaatagatattacaagatggccctccgtttcagcaccgctctaagagcaacgcgctcacgagcattccaaggtcagcgaacattcatcgccgcctctcgcctgcaagcgcaccaaggctatggcgacggcaaaggcaaccccatcagcgagaatcctcagaagcagcccagttccaaaggcacacaggaagcatccgagcatcctggtcccctctcctccagacgtcggcaaaggatctgccaactcatacagcaaatccgccatgtccgatagcatgaaagaagcatccggcgagaaatcacccgaagatgccagcgcgcaatcaggcggctcgagatccaaggaagcgagcgagactggctcaagtcccaccggtggcgagatcgctaacagcaaaggcgggagggactcaagggaccgcagggtgagggtgctccccagccgaagttgtttaatcagagcatgcctggcgtcaagtcagggttgacggatgagcagaaggcggaggtggagagacataataaggagtttgacgagaagcatgataaagctgataaagctgaagacgacaaggttgataagaagttctggagcgggacgtgagttttgccttctccattgatcctatgttgtgttgttgtctgttttccctcaactcgaaatgtatgcgcatccgaccctcctctcgtatacagttggcgattatacatttcagccagttggtgttatacagctctgcaccctatgttgtgctgtcagtgggagcttcaggaataattactgactcggcgtgagcagtggtggagttgaaggtgcccgcggccgcactggcggtgaaacagattggaacgcctaagtgccttagtgcacggaggatagttaagtcgttatggaagacttgaggctgtaatcatgaatgttggccccagaaacatctaggttttgagttccaccagcgtagttagcgacgtttacgcaacactgccggcaaacgattctgtcctttagcctataggtacgaaagcagaaagccggtctgatcattatcacctcgacaagaaaagcatcatagtgtaaaattacagttgtacaattttctagatcggaacgatagtgtgcagccttgggtattctagatgatactcactatgatcttccatacacttgtctcaagtcatacccaagccctatttaccaacagacagtttctcgaacgtgatgcgcaccgccccatccccaattatcttagtaatatgatcccattcttccaaacactgcaaactcagcgaaatctccaaatcacgcctcttggtattctctccgtggaccaagtgcggaggtatcgactcgaaatcccagatcttgggcctatgtgatgtaagcccagcaaaagtcagacccgggacatgcaagtcctgcacttcgtttggtgcccgtagcttcaccactaacttgttctcatcattcgacccaacgaccgctctggccgcctttgccagctgtaaatttcgattccctttcgtaagtatgtgaaagcgcgccatacctagagcaccgcagcggtgcgtcgtgttctctttcgtgagtggtactctccattcccggggcgtgatgtcctcgcaccagaatggcacagatcccctctccgtaccctcggggaatgtgacttgccacttgatctctttcccgtccgtttcccggcccccggcgtgcggttcaccatatcctatgcccgtctccgagtctgccattctcttcttcagcgcttcgtggtcgagcggttcatcaggttttgtggttagtgcgaaatcgacaactccgtatggcttatcccaccagtgacccttccgcttctcggggtcatcgttgatgaacgcgatgaactctagatatgttccatcttgaaacaacacaagtttattctccgtcttgttatctgcatgtctaccaccggggctgagcgtgaagttgtctgtgatccatgcaggtgggttaatgagcatgtcgtagggtatgaggaccacgacatggtctagatatgctttaatcggagacatttcgacctttctgaccttaggccatccacggggagttttttccggagttctattgggagatcgtgaacctatagtgagctgacattagctttgttgtacctgatattgtagttggggttctagactcggattgagaatcgcgtcatacttcttccccgcctatactgcctcgcggccccagcgttaccgcagcgtgtcatgtcgaaatcaattaggtaggagcagatcgattatcaaagttcaacttaggatactaaatggtaaagtagattatgagagatatagttccatggttcatgttgatatacttagcaggccctgcttgataatttgcttgcacgcgtagcatctaggcaatcagttcgctggcaaattttgtggcagattgcagtgtcaccatgttttcacacattatgatcattttaacgtttagaaatgacttgtatatagcttggtatagtatttagtttgttgaaattgtatatcatgttctgaagaccattacaggactaaacttggttgcgcttcatgactcacatgatgagtcggtgattgtttgccctcatcagtgactattgggctaggagaggattctgttgactatctgtttgttgcttcacccaaatattcttatgtgaaattttgaaggatccgtgagtttgagagaggggcttgatttatgagatgcatcatggtgggctgcgccatcctactccgcctctaatggcacgcattagtaagtaggcaaggtagatttcatcccgagtggcattgatctctcttatgcggcagaaagtctatatttcattgcgtgtctagtcctgaatcttgccgtttttacaattgtcacggcaacccagccaaaggcacgatgggaacgtttctctgaccaaaacccccactaattgtacgttcgaaatgttttcatagtgaacaccgccactatgcgattaatcaacacatcgacgttcgatatttccacggagaatctcagattttttgtcgatagaggctacgctattctttctcatcgatggacaggcgccgagattgaataccgggacttttcacattacaaagccgagctccgaagaaataaagattccccatgcctgctccagccgatcgggctcaataagatcagcgatgcatgtcgtattgcacgtcgcaaggagatacaatggatatggattgatacttgttgcatcgacaagtccaatgctgttgaatacaatgagtcaatcaactctatgttccaatggtacgccagcgcgaagatttgcattgcataccttaacgatgtgaaactggacccgaatagtcaaggagtgaatatcttccgctcgagccaatataaaaattatccgttgccttcaatctggttcaccagaggttggacgctacaggagctattagcccccgttgacgtggaattctacgatacgaattgggagctcatcggcacgcgcaaaagccttgcaccagcgctcgaacagattacaagaatcaatagagattacttgtctggggcaagaagattgaaagaggcttccattgccgccaagatgagctggatggctggtcgcgtgacagagaagccagaagatgtcgcatacagtatgctgggtcttcttggtatcaacatggtaccaagttacggagaaggagcggagaatgcgtttttacgccttcagtatgcgctgctctccaaatcaaccgatgaaactctcttcgcctggaagatgccaaccgatggccccgggaagtctgcgcagaaacctaaagtgtatggcgggtatcacctcgatagaggtgaatggggtctactcgccgcctcgccgaggtggtttcgaggatctggaaacatcaccaatagaggaccagggggtcaaatcgttcgccgccaattcggaggctttgctgtagtgcagcagggaattatggtgccttactcagaaagctcacataacgaagaacgaaatgcaaagcattacgtacttggtttctgtgtttttatgaccgtcattggtatagtccctttaatgatctttaacaagtatttcaagaggaagacagtgatgacatttcctctgaatgcctggcaacccgacgagaaagggcacctacagatgattgaggtttctgtttggcccacacgttgggggagtgtgagagtaaatagcactcaatatcgtctcagcaacgcttggcctggcacagaacaagatcataggctattcttacaaccggaggcaagaaattgagtcatacatgatgtatagaagaaaggccgctgcagtcagactgctatcatttcacacgggctattgacgtcctttctaaaaatttcgaaaggtccgaaagagaagtgcgccagtcttcattagaaattactttcaatcatgccttgatctacgacggcatcaatcaaatgccggaccgccgaataaagtgggaaaccgttagaggaacggctcaccgtcgacaacctcgcaattttcaccgcaagggtttggcaatgatagagaacagctggatatctggcgctaacttgaaaagatcttggctgattatgtattaatgattatggaactgtttcatgtccgcgtgaacgcggagtacgtacacaagaaatctagccttatcatcatcaccaccaccaccattgtcgtcacttcttactctagaccgatgtctgaggctgccagtaggaactccactacaaatcaccatcagtacaatagccaaaggccacaacaaaagatggtggtaagacttactgaaccccgcattagtctcctgcaggtttagaatatactgttcttcagtcgggtaaaaggggcacgaggcctcttcgttgccgaaaccgaactcgacggtgtagccgtagaccttgttgagtgacgggtcggcaaaatggcgggagaatgaatagtcgtcacttgcgcccgaagtcgggtagaaagctgcggcctgcagtgtgagatactcgcggtcggtagaggaagtcatggcagcagccatacgatcggcagcaccctttgcgttgtcatgatcctcagcagtgataaactcgccgtattgagtctccgggtcgtcctccacgaggccgcggatgtcgtcgtaggtcgaattgaggaagcttttgtatggttgcgtctcctggtttgtatcgctgccccagctgtacaaaacgtcgccggtgaacgagtgcaggtcaataaaccagcgcacctttttgaatgtgtccagaacccacttcatgttggcagtctccggctccgagaagggcgcggtgccgtggaa

SEQ ID NO: 29189 - DNA, 870 bp, Muscodor strobelii
  misc_feature: SGI cDNA ID NO. 570022
  misc_feature: Encodes the peptide sequence at SEQ ID NO 29190
atgtctccgattaaagcatatctagaccatgtcgtggtcctcataccctacgacatgctcattaacccacctgcatggatcacagacaacttcacgctcagccccggtggtagacatgcagataacaagacggagaataaacttgtgttgtttcaagatggaacatatctagagttcatcgcgttcatcaacgatgaccccgagaagcggaagggtcactggtgggataagccatacggagttgtcgatttcgcactaaccacaaaacctgatgaaccgctcgaccacgaagcgctgaagaagagaatggcagactcggagacgggcataggatatggtgaaccgcacgccgggggccgggaaacggacgggaaagagatcaagtggcaagtcacattccccgagggtacggagaggggatctgtgccattctggtgcgaggacatcacgccccgggaatggagagtaccactcacgaaagagaacacgacgcaccgctgcggtgctctaggtatggcgcgctttcacatacttacgaaagggaatcgaaatttacagctggcaaaggcggccagagcggtcgttgggtcgaatgatgagaacaagttagtggtgaagctacgggcaccaaacgaagtgcaggacttgcatgtcccgggtctgacttttgctgggcttacatcacataggcccaagatctgggatttcgagtcgatacctccgcacttggtccacggagagaataccaagaggcgtgatttggagatttcgctgagtttgcagtgtttggaagaatgggatcatattactaagataattggggatggggcggtgcgcatcacgttcgagaaactgtctgttggtaaatag

SEQ ID NO: 29190 - protein, 289 aa, Muscodor strobelii
  misc_feature: SGI Peptide ID NO. 570022
  misc_feature (8)..(191): NCBI GI: 169606462 Blast Desc: SNOG_06273 [Phaeosphaeria nodorum SN15] gi|111064984|gb|EAT86104.1| SNOG_06273 [Phaeosphaeria nodorum SN15]
  misc_feature (8)..(177): NCBI GI: 169767568 Blast Desc: [Aspergillus oryzae RIB40] gi|238484471|ref|XP_002373474.1| conserved [Aspergillus flavus NRRL3357] gi|83766110|dbj|BAE56253.1| protein product oryzae]
  misc_feature (3)..(189): NCBI GI: 39966368 Blast Desc: MGG_10035 [Magnaporthe grisea 70-15] gi|145015333|gb|EDJ99869.1| MGG_10035 [Magnaporthe grisea 70-15]
  misc_feature (2)..(177): NCBI GI: 256723644 Blast Desc: NECHADRAFT_52249 [Nectria haematococca mpVI 77-13-4]
  misc_feature (8)..(179): NCBI GI: 189191302 Blast Desc: conserved [Pyrenophora tritici-repentis Pt-1C-BFP] gi|187973596|gb|EDU41095.1| conserved [Pyrenophora tritici-repentis Pt-1C-BFP]
  misc_feature (4)..(197): NCBI GI: 46114492 Blast Desc: FG03088.1 [Gibberella zeae PH-1]
  misc_feature (1)..(213): NCBI GI: 145229521 Blast Desc: An01g06440 [Aspergillus niger] gi|134055177|emb|CAK43764.1| protein product [Aspergillus niger]
  misc_feature (1)..(211): NCBI GI: 67516193 Blast Desc: AN0378.2 [Aspergillus nidulans FGSC A4] gi|40747321|gb|EAA66477.1| AN0378.2 [Aspergillus nidulans FGSC A4] gi|259489379|tpe|CBF89602.1| TPA: conserved [Aspergillus FGSC
  misc_feature (8)..(197): NCBI GI: 156740542 Blast Desc: Rcas_0523 [Roseiflexus castenholzii DSM 13941] gi|156231870|gb|ABU56653.1| conserved [Roseiflexus castenholzii DSM 13941]
  misc_feature (8)..(180): NCBI GI: 148654399 Blast Desc: RoseRS_0218 [Roseiflexus sp. RS-1] gi|148566509|gb|ABQ88654.1| RoseRS_0218 [Roseiflexus sp. RS-1]
MSPIKAYLDHVVVLIPYDMLINPPAWITDNFTLSPGGRHADNKTENKLVLFQDGTYLEFIAFINDDPEKRKGHWWDKPYGVVDFALTTKPDEPLDHEALKKRMADSETGIGYGEPHAGGRETDGKEIKWQVTFPEGTERGSVPFWCEDITPREWRVPLTKENTTHRCGALGMARFHILTKGNRNLQLAKAARAVVGSNDENKLVVKLRAPNEVQDLHVPGLTFAGLTSHRPKIWDFESIPPHLVHGENTKRRDLEISLSLQCLEEWDHITKIIGDGAVRITFEKLSVGK

SEQ ID NO: 29191 - DNA, 486 bp, Muscodor strobelii
  misc_feature: SGI cDNA ID NO. 570023
  misc_feature: Reduced expression when VOC is produced
  misc_feature: Encodes the peptide sequence at SEQ ID NO 29192
atggcgacggcaaaggcaaccccatcagcgagaatcctcagaagcagcccagttccaaaggcacacaggaagcatccgagcatcctggtcccctctcctccagacgtcggcaaaggatctgccaactcatacagcaaatccgccatgtccgatagcatgaaagaagcatccggcgagaaatcacccgaagatgccagcgcgcaatcaggcggctcgagatccaaggaagcgagcgagactggctcaagtcccaccggtggcgagatcgctaacagcaaaggcgggagggactcaagggaccgcaggtcagggttgacggatgagcagaaggcggaggtggagagacataataaggagtttgacgagaagcatgataaagctgataaagctgaagacgacaaggttgataagaagttctggagcgggactggtggagttgaaggtgcccgcggccgcactggcggtgaaacagattggaacgcctaa

SEQ ID NO: 29192 - protein, 161 aa, Muscodor strobelii
  misc_feature: SGI Peptide ID NO. 570023
  misc_feature (41)..(144): NCBI GI: 116197002 Blast Desc: CHGG_05099 [Chaetomium globosum CBS 148.51] gi|88181012|gb|EAQ88480.1| CHGG_05099 [Chaetomium globosum CBS 148.51]
  misc_feature (58)..(129): NCBI GI: 156053193 Blast Desc: SS1G_06764 [Sclerotinia sclerotiorum 1980] gi|154704542|gb|EDO04281.1| SS1G_06764 [Sclerotinia sclerotiorum 1980]
  misc_feature (58)..(126): NCBI GI: 154318217 Blast Desc: BC1G_03276 [Botryotinia fuckeliana B05.10] gi|150842799|gb|EDN17992.1| BC1G_03276 [Botryotinia fuckeliana B05.10]
  misc_feature (64)..(142): NCBI GI: 256726746 Blast Desc: NECHADRAFT_99099 [Nectria haematococca mpVI 77-13-4]
  misc_feature (64)..(144): NCBI GI: 145616232 Blast Desc: MGG_03469 [Magnaporthe grisea 70-15] gi|145009981|gb|EDJ94637.1| MGG_03469 [Magnaporthe grisea 70-15]
  misc_feature (64)..(142): NCBI GI: 46122697 Blast Desc: FG05726.1 [Gibberella zeae PH-1]
  misc_feature (9)..(149): NCBI GI: 171688216 Blast Desc: protein product [Podospora anserina] gi|170944070|emb|CAP70180.1| protein product [Podospora anserina]
  misc_feature (54)..(89): NCBI GI: 46119425 Blast Desc: FG04771.1 [Gibberella zeae PH-1]
  misc_feature: Useful for introducing or modulating the production of volatile compounds
MATAKATPSARILRSSPVPKAHRKHPSILVPSPPDVGKGSANSYSKSAMSDSMKEASGEKSPEDASAQSGGSRSKEASETGSSPTGGEIANSKGGRDSRDRRSGLTDEQKAEVERHNKEFDEKHDKADKAEDDKVDKKFWSGTGGVEGARGRTGGETDWNA

SEQ ID NO: 29193 - DNA, 5337 bp, Muscodor strobelii
  misc_feature: SGI EST ID NO. CUFF.69106.2
  misc_feature: Variant of the nucleotide sequence at SEQ ID NO 29191
catcattgaatcgagattcgttgaatctcaattcgtagcaaaacattaaaagtgattgcaaccaacaggtttatttactttacttctatgcacactcataccaacctccagtaaagcactaatatcagattcgtattgccttcattaatcctcaatcctcatcaccgacagcaaatagatattacaagatggccctccgtttcagcaccgctctaagagcaacgcgctcacgagcattccaaggtcagcgaacattcatcgccgcctctcgcctgcaagcgcaccaaggctatggcgacggcaaaggcaaccccatcagcgagaatcctcagaagcagcccagttccaaaggcacacaggaagcatccgagcatcctggtcccctctcctccagacgtcggcaaaggatctgccaactcatacagcaaatccgccatgtccgatagcatgaaagaagcatccggcgagaaatcacccgaagatgccagcgcgcaatcaggcggctcgagatccaaggaagcgagcgagactggctcaagtcccaccggtggcgagatcgctaacagcaaaggcgggagggactcaagggaccgcagggtgagggtgctccccagccgaagttgtttaatcagagcatgcctggcgtcaagtcagggttgacggatgagcagaaggcggaggtggagagacataataaggagtttgacgagaagcatgataaagctgataaagctgaagacgacaaggttgataagaagttctggagcgggactggtggagttgaaggtgcccgcggccgcactggcggtgaaacagattggaacgcctaagtgccttagtgcacggaggatagttaagtcgttatggaagacttgaggctgtaatcatgaatgttggccccagaaacatctaggttttgagttccaccagcgtagttagcgacgtttacgcaacactgccggcaaacgattctgtcctttagcctataggtacgaaagcagaaagccggtctgatcattatcacctcgacaagaaaagcatcatagtgtaaaattacagttgtacaattttctagatcggaacgatagtgtgcagccttgggtattctagatgatactcactatgatcttccatacacttgtctcaagtcatacccaagccctatttaccaacagacagtttctcgaacgtgatgcgcaccgccccatccccaattatcttagtaatatgatcccattcttccaaacactgcaaactcagcgaaatctccaaatcacgcctcttggtattctctccgtggaccaagtgcggaggtatcgactcgaaatcccagatcttgggcctatgtgatgtaagcccagcaaaagtcagacccgggacatgcaagtcctgcacttcgtttggtgcccgtagcttcaccactaacttgttctcatcattcgacccaacgaccgctctggccgcctttgccagctgtaaatttcgattccctttcgtaagtatgtgaaagcgcgccatacctagagcaccgcagcggtgcgtcgtgttctctttcgtgagtggtactctccattcccggggcgtgatgtcctcgcaccagaatggcacagatcccctctccgtaccctcggggaatgtgacttgccacttgatctctttcccgtccgtttcccggcccccggcgtgcggttcaccatatcctatgcccgtctccgagtctgccattctcttcttcagcgcttcgtggtcgagcggttcatcaggttttgtggttagtgcgaaatcgacaactccgtatggcttatcccaccagtgacccttccgcttctcggggtcatcgttgatgaacgcgatgaactctagatatgttccatcttgaaacaacacaagtttattctccgtcttgttatctgcatgtctaccaccggggctgagcgtgaagttgtctgtgatccatgcaggtgggttaatgagcatgtcgtagggtatgaggaccacgacatggtctagatatgctttaatcggagacatttcgacctttctgaccttaggccatccacggggagttttttccggagttctattgggagatcgtgaacctatagtgagctgacattagctttgttgtacctgatattgtagttggggttctagactcggattgagaatcgcgtcatacttcttccccgcctatactgcctcgcggccccagcgttaccgcagcgtgtcatgtcgaaatcaattaggtaggagcagatcgattatcaaagttcaacttaggatactaaatggtaaagtagattatgagagatatagttccatggttcatgttgatatacttagcaggccctgcttgataatttgcttgcacgcgtagcatctaggcaatcagttcgctggcaaattttgtggcagattgcagtgtcaccatgttttcacacattatgatcattttaacgtttagaaatgacttgtatatagcttggtatagtatttagtttgttgaaattgtatatcatgttctgaagaccattacaggactaaacttggttgcgcttcatgactcacatgatgagtcggtgattgtttgccctcatcagtgactattgggctaggagaggattctgttgactatctgtttgttgcttcacccaaatattcttatgtgaaattttgaaggatccgtgagtttgagagaggggcttgatttatgagatgcatcatggtgggctgcgccatcctactccgcctctaatggcacgcattagtaagtaggcaaggtagatttcatcccgagtggcattgatctctcttatgcggcagaaagtctatatttcattgcgtgtctagtcctgaatcttgccgtttttacaattgtcacggcaacccagccaaaggcacgatgggaacgtttctctgaccaaaacccccactaattgtacgttcgaaatgttttcatagtgaacaccgccactatgcgattaatcaacacatcgacgttcgatatttccacggagaatctcagattttttgtcgatagaggctacgctattctttctcatcgatggacaggcgccgagattgaataccgggacttttcacattacaaagccgagctccgaagaaataaagattccccatgcctgctccagccgatcgggctcaataagatcagcgatgcatgtcgtattgcacgtcgcaaggagatacaatggatatggattgatacttgttgcatcgacaagtccaatgctgttgaatacaatgagtcaatcaactctatgttccaatggtacgccagcgcgaagatttgcattgcataccttaacgatgtgaaactggacccgaatagtcaaggagtgaatatcttccgctcgagccaatataaaaattatccgttgccttcaatctggttcaccagaggttggacgctacaggagctattagcccccgttgacgtggaattctacgatacgaattgggagctcatcggcacgcgcaaaagccttgcaccagcgctcgaacagattacaagaatcaatagagattacttgtctggggcaagaagattgaaagaggcttccattgccgccaagatgagctggatggctggtcgcgtgacagagaagccagaagatgtcgcatacagtatgctgggtcttcttggtatcaacatggtaccaagttacggagaaggagcggagaatgcgtttttacgccttcagtatgcgctgctctccaaatcaaccgatgaaactctcttcgcctggaagatgccaaccgatggccccgggaagtctgcgcagaaacctaaagtgtatggcgggtatcacctcgatagaggtgaatggggtctactcgccgcctcgccgaggtggtttcgaggatctggaaacatcaccaatagaggaccagggggtcaaatcgttcgccgccaattcggaggctttgctgtagtgcagcagggaattatggtgccttactcagaaagctcacataacgaagaacgaaatgcaaagcattacgtacttggtttctgtgtttttatgaccgtcattggtatagtccctttaatgatctttaacaagtatttcaagaggaagacagtgatgacatttcctctgaatgcctggcaacccgacgagaaagggcacctacagatgattgaggtttctgtttggcccacacgttgggggagtgtgagagtaaatagcactcaatatcgtctcagcaacgcttggcctggcacagaacaagatcataggctattcttacaaccggaggcaagaaattgagtcatacatgatgtatagaagaaaggccgctgcagtcagactgctatcatttcacacgggctattgacgtcctttctaaaaatttcgaaaggtccgaaagagaagtgcgccagtcttcattagaaattactttcaatcatgccttgatctacgacggcatcaatcaaatgccggaccgccgaataaagtgggaaaccgttagaggaacggctcaccgtcgacaacctcgcaattttcaccgcaagggtttggcaatgatagagaacagctggatatctggcgctaacttgaaaagatcttggctgattatgtattaatgattatggaactgtttcatgtccgcgtgaacgcggagtacgtacacaagaaatctagccttatcatcatcaccaccaccaccattgtcgtcacttcttactctagaccgatgtctgaggctgccagtaggaactccactacaaatcaccatcagtacaatagccaaaggccacaacaaaagatggtggtaagacttactgaaccccgcattagtctcctgcaggtttagaatatactgttcttcagtcgggtaaaaggggcacgaggcctcttcgttgccgaaaccgaactcgacggtgtagccgtagaccttgttgagtgacgggtcggcaaaatggcgggagaatgaatagtcgtcacttgcgcccgaagtcgggtagaaagctgcggcctgcagtgtgagatactcgcggtcggtagaggaagtcatggcagcagccatacgatcggcagcaccctttgcgttgtcatgatcctcagcagtgataaactcgccgtattgagtctccgggtcgtcctccacgaggccgcggatgtcgtcgtaggtcgaattgaggaagcttttgtatggttgcgtctcctggtttgtatcgctgccccagctgtacaaaacgtcgccggtgaacgagtgcaggtcaataaaccagcgcacctttttgaatgtgtccagaacccacttcatgttggcagtctccggctccgagaagggcgcggtgccgtggaa

SEQ ID NO: 29194 - DNA, 615 bp, Muscodor strobelii
  misc_feature: SGI cDNA ID NO. 570024
  misc_feature: Encodes the peptide sequence at SEQ ID NO 29195
atggcttcacgaaagaaggtccttctgaaggtcatcatccttggtgacagcggtgtcggcaagacgagcttgatgaaccaatatgtcaacaagaagttcagcgcaagctacaaagccaccatcggtgccgatttcctcacgcgcgaggtcctggttgacgacagacaagtgacgatgcagctctgggacactgctggacaagagcgcttccagtccctgggcgttgctttctaccgtggtgctgactgctgtgtgctggtatatgatgtcaacaattctaagagcttcgacgctttggacagctggagggacgagttcctcatccaggcttcaccacgagaccccgataacttcccctttgtggtacttggcaacaagattgacgtagaggagagcaagcgagtcatatccagtaagagggcggccactttctgtcactccaagggtgacatcccctactttgagaccagtgccaaggaagccatcaatgtcgagcaggccttcgaggtcatcgcacggaacgcacttgctcaggaggagtcagaggaatttagtggagacttccaagaccccattaacatccacattgagaacgagcgtggtggatgctgttga

SEQ ID NO: 29195 - protein, 204 aa, Muscodor strobelii
  misc_feature: SGI Peptide ID NO. 570024
  misc_feature (10)..(128): Pfam Id: PF08477 Pfam Desc: Miro-like protein
  misc_feature (10)..(177): Pfam Id: PF00071 Pfam Desc: Ras family
  misc_feature (1)..(203): NCBI GI: 171692347 Blast Desc: protein product [Podospora anserina] gi|170946122|emb|CAP72923.1| protein product [Podospora anserina]
  misc_feature (1)..(203): NCBI GI: 85103291 Blast Desc: GTP-binding protein YPTC5 [Neurospora crassa OR74A] gi|30580489|sp|Q9C2L8.1|RAB7_NEUCR RecName: Full= Ras-related protein Rab7 gi|12718294|emb|CAC28856.1| GTPase Rab7 protein
  misc_feature (1)..(203): NCBI GI: 59802950 Blast Desc: ras-related protein-like protein [Magnaporthe grisea]
  misc_feature (1)..(203): NCBI GI: 116206514 Blast Desc: CHGG_02550 [Chaetomium globosum CBS 148.51] gi|88183147|gb|EAQ90615.1| CHGG_02550 [Chaetomium globosum CBS 148.51]
  misc_feature (1)..(203): NCBI GI: 261355674 Blast Desc: GTP-binding protein ypt7 [Verticillium albo-atrum VaMs.102]
  misc_feature (1)..(203): NCBI GI: 46121525 Blast Desc: RAB7_NEUCR Ras-related protein Rab7 [Gibberella zeae PH-1] gi|256731464|gb|EEU44814.1| [Nectria haematococca mpVI 77-13-4]
  misc_feature (1)..(203): NCBI GI: 154309394 Blast Desc: GTPase Rab7 [Botryotinia fuckeliana B05.10] gi|156058234|ref|XP_001595040.1| SS1G_03128 [Sclerotinia sclerotiorum 1980] gi|150852415|gb|EDN27607.1| GTPase Rab7 1980]
  misc_feature (1)..(203): NCBI GI: 169779179 Blast Desc: [Aspergillus oryzae RIB40] gi|46403855|gb|AAS92973.1| vacuolar biogenesis protein [Aspergillus parasiticus] gi|46403857|gb|AAS92974.1| vacuolar biogenesis protein protein
  misc_feature (1)..(203): NCBI GI: 238914583 Blast Desc: Rab7-like GTPase [Beauveria bassiana]
  misc_feature (1)..(203): NCBI GI: 121713784 Blast Desc: Rab small monomeric GTPase Rab7, [Aspergillus clavatus NRRL 1] gi|119402656|gb|EAW13077.1| Rab small monomeric GTPase Rab7, [Aspergillus clavatus NRRL 1]
  misc_feature (9)..(149): SWISSPROT Homolog: EC 2.7.11.1 Non-specific serine/threonine protein kinase
MASRKKVLLKVIILGDSGVGKTSLMNQYVNKKFSASYKATIGADFLTREVLVDDRQVTMQLWDTAGQERFQSLGVAFYRGADCCVLVYDVNNSKSFDALDSWRDEFLIQASPRDPDNFPFVVLGNKIDVEESKRVISSKRAATFCHSKGDIPYFETSAKEAINVEQAFEVIARNALAQEESEEFSGDFQDPINIHIENERGGCC

SEQ ID NO: 29196 - DNA, 1295 bp, Muscodor strobelii
  misc_feature: SGI EST ID NO. CUFF.69047.0
  misc_feature: Variant of the nucleotide sequence at SEQ ID NO 29194
gctgtacctaaggcaccttatctcatctccaactgcaagtgcgactccgaccgccgccgttactgcatcaacaacaacacaccctccgaacctgtcgacgacctttctccgtcaccacatacctaacatcgacgtccccaaatctgcctgctctgttattggctgcgacacacagcttcttggatcgccaccaacagcgaggtgccctcctccacctctaccgcccggtacctttcccatccacgtcgagcttcctgacctttgactgctcgacaccatggcttcacgaaagaaggtccttctgaaggtcatcatccttggtgacagcggtgtcggcaagacgagcttgatgaaccaatatgtcaacaagaagttcagcgcaagctacaaagccaccatcggtgccgatttcctcacgcgcgaggtcctggttgacgacagacaagtgacgatgcagctctgggacactgctggacaagagcgcttccagtccctgggcgttgctttctaccgtggtgctgactgctgtgtgctggtatatgatgtcaacaattctaagagcttcgacgctttggacagctggagggacgagttcctcatccaggcttcaccacgagaccccgataacttcccctttgtggtacttggcaacaagattgacgtagaggagagcaagcgagtcatatccagtaagagggcggccactttctgtcactccaagggtgacatcccctactttgagaccagtgccaaggaagccatcaatgtcgagcaggccttcgaggtcatcgcacggaacgcacttgctcaggaggagtcagaggaatttagtggagacttccaagaccccattaacatccacattgagaacgagcgtggtggatgctgttgagcacggcgagatgggatatacccagagaattttcacgcctccatgcgcacagcttcattcctacctgtatctaagccgcaggtagatgtgatgctagactggctcgttgtccacgatgaagggagtgccaagacagacaatggccgccagcaagacagagcagcaggtcgtacctaagacggtcttcatagagaacacggagtttggcgggttgtaatgctattcattattcatcttcaatttgcaaactctgatgcggaaaggagtgtctttgtctaacagcccgccacatattgtcatgagggcattgttatcacatatttcacaatgttggggacacatgcaatgacttgtgcacactaatttgataccaagcggcattctttcatcgatacagattttt

SEQ ID NO: 29197 - DNA, 1329 bp, Muscodor strobelii
  misc_feature: SGI cDNA ID NO. 570025
  misc_feature: Elevated expression when VOC is produced
  misc_feature: Encodes the peptide sequence at SEQ ID NO 29198
atgggcgcccaagagtcaaggtcagcgtccatgagcgacgcatctatcagagcacttggaaagcaagttgcctctatatctgaacagatcaacgagtatctagagagaacctcatcccctcagcccacattcgaggcaaatgggggagatgtcccagagaatcctgaatacgagacattaagagcttcactgaatgatgccgcgctcgacttgctttccttggtcaatggcccaaagacgacgctccgtcaaatggtcttctcacattatgaccttgccgctatgcaagttgcgatcgatcgcggattctttaagcatatacccctctattctagctcaatcaatgcgactgagaaagcacaaggtgccaagatgagcgtcggcgagattgcgaataagtcaggcatggacgaagaccgcacacaggcgctgttgaagctgcttgcgacacatcgcattttcgagcaggtaaactcagcagaaggcgaagatgaatacttcaaacatactgctatttctgcatccttagctaaatggccggaatggcatgccttggcggacatgaaaatggatgatatgtttaaggcatcgtccgagctatcgtctctcatcactcgctcgccccacgcctcaggtgcacaccaatcggcttttcattatcggtttgggatgcccgtgtatgagtatcatgagaagttcccgggcaaggggatccgctttggtcaggccatgagcgcttggtcaaaagttaatgagagagataacgagcttcgagacaacttctcttgggcatccttagggagtggcaaagtcgttgatgttggtggtggcagtggacatatctcaattaagcttgcaagagagtttccttcgttacgtttcgtagttcaagacaattctccggttcagctgagccaggatcaacaagatgttgcagggcgggtgagctttgagcgccacgacttcttcaagccccagccaatccatgatgcatcggctttcttcttgaggcagattctgcataactacaacgatgaggactgcgtgaagatcatccgcgcgttaattccagccttggaagcttgtaagcctgacacatgcgtcttgatcaacgatattgtattgccagaaagcggtactgtaacgagatttgaagagcacctttcaagacagatagatatttccatgctggtattgttcggagctaaacaaagaagccaaagagattgggcgaaactgttcaaggacgcggatccccgattccagattacgagggtacatagaaacccgcttggtgttggtctagtccaagttcatcttagatattaa

SEQ ID NO: 29198 - protein, 442 aa, Muscodor strobelii
  misc_feature: SGI Peptide ID NO. 570025
  misc_feature (161)..(415): Pfam Id: PF00891 Pfam Desc: O-methyltransferase
  misc_feature (215)..(415): Pfam Id: PF00891 Pfam Desc: O-methyltransferase
  misc_feature (14)..(423): NCBI GI: 121711970 Blast Desc: O-methyltransferase, [Aspergillus clavatus NRRL 1] gi|119401752|gb|EAW12174.1| O-methyltransferase, [Aspergillus clavatus NRRL 1]
  misc_feature (12)..(441): NCBI GI: 169605449 Blast Desc: SNOG_05749 [Phaeosphaeria nodorum SN15] gi|111065693|gb|EAT86813.1| SNOG_05749 [Phaeosphaeria nodorum SN15]
  misc_feature (14)..(427): NCBI GI: 189201597 Blast Desc: sterigmatocystin 8-O-methyltransferase precursor [Pyrenophora tritici-repentis Pt-1C-BFP] gi|187984234|gb|EDU49722.1| sterigmatocystin precursor Pt-1C-BFP]
  misc_feature (8)..(441): NCBI GI: 171681656 Blast Desc: protein product [Podospora anserina] gi|170940787|emb|CAP66436.1| protein product [Podospora anserina]
  misc_feature (27)..(441): NCBI GI: 242812077 Blast Desc: O-methyltransferase, [Talaromyces stipitatus ATCC 10500] gi|218714223|gb|EED13646.1| O-methyltransferase, [Talaromyces stipitatus ATCC 10500]
  misc_feature (15)..(441): NCBI GI: 85089912 Blast Desc: NCU09637 [Neurospora crassa OR74A] gi|28919500|gb|EAA28932.1| [Neurospora crassa OR74A]
  misc_feature (9)..(440): NCBI GI: 116205525 Blast Desc: CHGG_10646 [Chaetomium globosum CBS 148.51] gi|88176774|gb|EAQ84242.1| CHGG_10646 [Chaetomium globosum CBS 148.51]
  misc_feature (9)..(441): NCBI GI: 170940312 Blast Desc: protein product [Podospora anserina]
  misc_feature (16)..(422): NCBI GI: 116192635 Blast Desc: CHGG_06035 [Chaetomium globosum CBS 148.51] gi|88181948|gb|EAQ89416.1| CHGG_06035 [Chaetomium globosum CBS 148.51]
  misc_feature (19)..(440): NCBI GI: 116191605 Blast Desc: CHGG_05521 [Chaetomium globosum CBS 148.51] gi|88181433|gb|EAQ88901.1| CHGG_05521 [Chaetomium globosum CBS 148.51]
  misc_feature (75)..(426): SWISSPROT Homolog: EC 2.1.1.110 Sterigmatocystin 8-O-methyltransferase
  misc_feature: Useful for introducing or modulating the production of volatile compounds
MGAQESRSASMSDASIRALGKQVASISEQINEYLERTSSPQPTFEANGGDVPENPEYETLRASLNDAALDLLSLVNGPKTTLRQMVFSHYDLAAMQVAIDRGFFKHIPLYSSSINATEKAQGAKMSVGEIANKSGMDEDRTQALLKLLATHRIFEQVNSAEGEDEYFKHTAISASLAKWPEWHALADMKMDDMFKASSELSSLITRSPHASGAHQSAFHYRFGMPVYEYHEKFPGKGIRFGQAMSAWSKVNERDNELRDNFSWASLGSGKVVDVGGGSGHISIKLAREFPSLRFVVQDNSPVQLSQDQQDVAGRVSFERHDFFKPQPIHDASAFFLRQILHNYNDEDCVKIIRALIPALEACKPDTCVLINDIVLPESGTVTRFEEHLSRQIDISMLVLFGAKQRSQRDWAKLFKDADPRFQITRVHRNPLGVGLVQVHLRY

SEQ ID NO: 29199 - DNA, 1627 bp, Muscodor strobelii
  misc_feature: SGI EST ID NO. CUFF.69042.0
  misc_feature: Variant of the nucleotide sequence at SEQ ID NO 29197
cgagagctatcatgacttatcagaaagttaatgtaagtaagagggcatgctgctgaagaaacatgccgtaaggattcctatgcaacatttgtacaccttgtttgtcgactttttgatcttctcgacttgactgaaactgtattgctgcttcgttatgggcgcccaagagtcaaggtcagcgtccatgagcgacgcatctatcagagcacttggaaagcaagttgcctctatatctgaacagatcaacgagtatctagagagaacctcatcccctcagcccacattcgaggcaaatgggggagatgtcccagagaatcctgaatacgagacattaagagcttcactgaatgatgccgcgctcgacttgctttccttggtcaatggcccaaagacgacgctccgtcaaatggtcttctcacattatgaccttgccgctatgcaagttgcgatcgatcgcggattctttaagcatatacccctctattctagctcaatcaatgcgactgagaaagcacaaggtgccaagatgagcgtcggcgagattgcgaataagtcaggcatggacgaagaccgcacacaggcgctgttgaagctgcttgcgacacatcgcattttcgagcaggtaaactcagcagaaggcgaagatgaatacttcaaacatactgctatttctgcatccttagctaaatggccggaatggcatgccttggcggacatgaaaatggatgatatgtttaaggcatcgtccgagctatcgtctctcatcactcgctcgccccacgcctcaggtgcacaccaatcggcttttcattatcggtttgggatgcccgtgtatgagtatcatgagaagttcccgggcaaggggatccgctttggtcaggccatgagcgcttggtcaaaagttaatgagagagataacgagcttcgagacaacttctcttgggcatccttagggagtggcaaagtcgttgatgttggtggtggcagtggacatatctcaattaagcttgcaagagagtttccttcgttacgtttcgtagttcaagacaattctccggttcagctgagccaggatcaacaagatgttgcagggcgggtgagctttgagcgccacgacttcttcaagccccagccaatccatgatgcatcggctttcttcttgaggcagattctgcataactacaacgatgaggactgcgtgaagatcatccgcgcgttaattccagccttggaagcttgtaagcctgacacatgcgtcttgatcaacgatattgtattgccagaaagcggtactgtaacgagatttgaagagcacctttcaagacagatagatatttccatgctggtattgttcggagctaaacaaagaagccaaagagattgggcgaaactgttcaaggacgcggatccccgattccagattacgagggtacatagaaacccgcttggtgttggtctagtccaagttcatcttagatattaagagttagaaaggttttagacatcatgttgctcctcacccgcgctctctacgctttttgtgtagtatcagtagctggaagaaccttctagtatgagcgctggggcggcataatatagcattcaatggactgccatataatccgac

SEQ ID NO: 29200 - DNA, 939 bp, Muscodor strobelii
  misc_feature: SGI cDNA ID NO. 570026
  misc_feature: Encodes the peptide sequence at SEQ ID NO 29201
atgcgtttcgtgaagttcctggcattcgtgattgtcgccgcgaacgccacacctctgctgtcagaccgagcgtcttcgttccaacagttgttcaacttcacaacattcgtcgacatagaaaatagctatcttcggtctgaaacctcgctgctcctcacgacattcgcgaacggctccttatacgagatcaatcctcttgccgaaaatcctgaggcaaagctcatcgcgcagctgcctggagctacagcgttaacgggcattgttgaagttggcacggacaagttctccgttacaggtggtgtacgaggtaatctcatgtatacgaatgaaacagtttatctcgtcgacttctccaagagcaatggcacttctggcggccccactatttcaatcgcagctaccctgcccgacgccgttttcctaaatggcgccgcatctcttccctcgcaccccgagactgtcatactcgcggattcgaatctcggagctctgtggcgcgtgaacacaagttcgagagctgccgacaagattgcgactgacgcggcgttcgagttctctgctaacgcaactacacgtatcggaatcaacgggctcaagatccgcggccagtatctctacttcaccaatactgctcaagctatcttcggtcgcgcccgcatagcatctacgggtgaactcgctggcggcgtcgagactttgttgagcagtccaggcgtctcttgggacgatttcgatgtagccgccgatggaacagcgtacctctgccaagctcctggtgttgttcttcgcgtgacacccgatagcctgactgactaccttgtgaacagcactcagctgctgggacccacgtccatccagatctctcgggatggagatttgtacgtcacaacacgcggcgcgacaccgctcagcggacaagttttgactgttcggccttag

SEQ ID NO: 29201 - protein, 312 aa, Muscodor strobelii
  misc_feature: SGI Peptide ID NO. 570026
  misc_feature (1)..(311): NCBI GI: 238497319 Blast Desc: conserved [Aspergillus flavus NRRL3357] gi|220694775|gb|EED51119.1| conserved [Aspergillus flavus NRRL3357]
  misc_feature (1)..(291): NCBI GI: 256725862 Blast Desc: NECHADRAFT_82000 [Nectria haematococca mpVI 77-13-4]
  misc_feature (7)..(311): NCBI GI: 256724976 Blast Desc: NECHADRAFT_76997 [Nectria haematococca mpVI 77-13-4]
  misc_feature (27)..(299): NCBI GI: 171681253 Blast Desc: protein product [Podospora anserina] gi|170940585|emb|CAP65813.1| protein product [Podospora anserina]
  misc_feature (135)..(311): NCBI GI: 169774181 Blast Desc: [Aspergillus oryzae RIB40] gi|83769421|dbj|BAE59556.1| protein product [Aspergillus oryzae]
  misc_feature (25)..(308): NCBI GI: 119482818 Blast Desc: NFIA_026140 [Neosartorya fischeri NRRL 181] gi|119409592|gb|EAW19540.1| conserved [Neosartorya fischeri NRRL 181]
  misc_feature (15)..(299): NCBI GI: 255939348 Blast Desc: Pc16g00180 [Penicillium chrysogenum Wisconsin 54-1255] gi|211585066|emb|CAP92688.1| Pc16g00180 [Penicillium chrysogenum Wisconsin 54-1255]
  misc_feature (140)..(308): NCBI GI: 145250877 Blast Desc: An15g04170 [Aspergillus niger] gi|134082477|emb|CAK97284.1| [Aspergillus niger]
  misc_feature (3)..(304): NCBI GI: 115397413 Blast Desc: [Aspergillus terreus NIH2624] gi|114192489|gb|EAU34189.1| [Aspergillus terreus NIH2624]
  misc_feature (6)..(301): NCBI GI: 255955199 Blast Desc: Pc21g13340 [Penicillium chrysogenum Wisconsin 54-1255] gi|211590063|emb|CAP96231.1| Pc21g13340 [Penicillium chrysogenum Wisconsin 54-1255]
MRFVKFLAFVIVAANATPLLSDRASSFQQLFNFTTFVDIENSYLRSETSLLLTTFANGSLYEINPLAENPEAKLIAQLPGATALTGIVEVGTDKFSVTGGVRGNLMYTNETVYLVDFSKSNGTSGGPTISIAATLPDAVFLNGAASLPSHPETVILADSNLGALWRVNTSSRAADKIATDAAFEFSANATTRIGINGLKIRGQYLYFTNTAQAIFGRARIASTGELAGGVETLLSSPGVSWDDFDVAADGTAYLCQAPGVVLRVTPDSLTDYLVNSTQLLGPTSIQISRDGDLYVTTRGATPLSGQVLTVRP

SEQ ID NO: 29202 - DNA, 1435 bp, Muscodor strobelii
  misc_feature: SGI EST ID NO. CUFF.69044.0
  misc_feature: Variant of the nucleotide sequence at SEQ ID NO 29200
gctgtagttcgccggtcatgcgtttcgtgaagttcctggcattcgtgattgtcgccgcgaacgccacacctctgctgtcagaccgagcgtcttcgttccaacagttgttcaacttcacaacattcgtcgacatagaaaatagctatcttcggtctgaaacctcgctgctcctcacgacattcgcgaacggctccttatacgagatcaatcctcttgccgaaaatcctgaggcaaagctcatcgcgcagctgcctggagctacagcgttaacgggcattgttgaagttggcacggacaagttctccgttacaggtggtgtacgaggtaatctcatgtatacgaatgaaacagtttatctcgtcgacttctccaagagcaatggcacttctggcggccccactatttcaatcgcagctaccctgcccgacgccgttttcctaaatggcgccgcatctcttccctcgcaccccgagactgtcatactcgcggattcgaatctcggagctctgtggcgcgtgaacacaagttcgagagctgccgacaagattgcgactgacgcggcgttcgagttctctgctaacgcaactacacgtatcggaatcaacgggctcaagatccgcggccagtatctctacttcaccaatactgctcaagctatcttcggtcgcgcccgcatagcatctacgggtgaactcgctggcggcgtcgagactttgttgagcagtccaggcgtctcttgggacgatttcgatgtagccgccgatggaacagcgtacctctgccaagctcctggtgttgttcttcgcgtgacacccgatagcctgactgactaccttgtgaacagcactcagctgctgggacccacgtccatccagatctctcgggatggagatttgtacgtcacaacacgcggcgcgacaccgctcagcggacaagttttgactgttcggccttagcctttagagcaagcgataagtcttccagctattgatttgcgcagttggacattggatatgtagctctcattctctttgctagtatatatattgtaaatcatcgccgagtatatatccctatcgattggcaggttgaagttgagtgcaaatgaaatttgaaacatcaccacgtagcagggcctgtggcgcgtcaagctagtacctattgttacaagccacagctcactccacttcttcagtgacaaacttctctaaatcgttacgcttacagttttaccccgagttctatcgtgcaaccaagggtatagaaatgttttaagatctagccaacttaatcttacacagacaagagtatagtctatcatgcattcatgaatacagtgcctacgatttgctgtatgagacgctgtcggtcggtcgccttcagcgacattcttcagacgtcggaggctcggccgagacccgagaccgttttcctc

SEQ ID NO: 29203 - DNA, 1587 bp, Muscodor strobelii
  misc_feature: SGI cDNA ID NO. 570027
  misc_feature: Elevated expression when VOC is produced
  misc_feature: Encodes the peptide sequence at SEQ ID NO 29204
atggctgacttcaacctgtccctctggggcatggtcctggccggtggtgtggcatatatgctctacggggcattttggcgtctttacttgagccctattgctcacattcctggcccacgactcgctgccatgacccttctatacgagatgtattacgatacatggcttgggggaaaatacgaattcaagattatcgaaatgcataagaaatatgggccaattattcgaatctccccttgggaactgcacatttccgatcccgacttttatgacaccatctatgttggccactccgctccccgccgctcagagaagtactataacctcgtgagatattttgggctcgatctatgtgtcttctcaacgattgatcatgacctccatcggatgcgccgtaatgccctcaaccccttcttcagtacgactgcggtcaggtccctgcagcctgttatgcaggaaagaaacgatgtgatccaaatgcgaatgaaggagttcatgaacagtggcaaggtactgaacgccagcaatatgcttgccgccttcacaaatgacattgtcgagacgtattgtttcgcgcgatgccagcatcgtatagagcatccagactttgaccctcggtcacgcgctgcagcttttgaaggcgccacttcggtgcatatcatgaaacatatctggtgggtgtacgatatcatgaactacttcccaaccgccgttgtcaagtcgctccatcagggcgcgggactatacctagagcagaagagggagtctcgagccgccgtcgagaaaatcatccatggagaaaacaatgactggcgcgaacgcgatcagcccacgatcttccgcgctgctcttgaggcgaaagtccccgatcacgagaagtcagtagagagactatcggacgacgcacagatggctgtaatggccggaaccttgacaacggcaatgacgttggagaccatcgtctactggctattggcccagccggacacgctgcgtaaactcaaggaggagttgaagagcgcgatgcccagtgttagtgatgttggttctgttccgctcgcagtactagagaatctaccatatttgcaggcggttgtcaaggaaggtctacggttgagctatggctcgtcaatgcggctacaacgcattgatcctgacaacaccatcctgtttacagacaagaacacaggtaaggaatgggtcatcccagccaagacaccggtcgggatgtcggctgttggtattcaccatgacgagagcattttcgaggatagcaaagccttccgacctgagcgctggcttggccccgacggcaagcgtcgagagaagtaccttgtgagctttagtaggggtagccgcaattgtctcggcatgaatctctcatattccgagcttgcgctgttctcggccaatatgtggaggacttggacaagcaaagaagttgagcccacaggtggcgaagctggtgtacttgagctgtatcaaacaacggttcgcgacgtcgagatcgagggtgactattacattcccgtcgcgcaaaaaggatccaagggtattcagcttatggtgcatcccttcaaagcataa

SEQ ID NO: 29204 - protein, 528 aa, Muscodor strobelii
  misc_feature: SGI Peptide ID NO. 570027
  misc_feature (36)..(498): Pfam Id: PF00067 Pfam Desc: Cytochrome P450
  misc_feature (307)..(468): Pfam Id: PF00067 Pfam Desc: Cytochrome P450
  misc_feature (6)..(523): NCBI GI: 145234316 Blast Desc: An02g13980 [Aspergillus niger] gi|134057475|emb|CAK48829.1| protein product [Aspergillus niger]
  misc_feature (13)..(524): NCBI GI: 116208594 Blast Desc: CHGG_03590 [Chaetomium globosum CBS 148.51] gi|88184187|gb|EAQ91655.1| CHGG_03590 [Chaetomium globosum CBS 148.51]
  misc_feature (1)..(523): NCBI GI: 169765436 Blast Desc: [Aspergillus oryzae RIB40] gi|83765044|dbj|BAE55187.1| protein product [Aspergillus oryzae]
  misc_feature (10)..(521): NCBI GI: 46129248 Blast Desc: FG08809.1 [Gibberella zeae PH-1]
  misc_feature (10)..(526): NCBI GI: 256734151 Blast Desc: [Nectria haematococca mpVI 77-13-4]
  misc_feature (12)..(523): NCBI GI: 119178512 Blast Desc: CIMG_08088 [Coccidioides immitis RS]
  misc_feature (12)..(523): NCBI GI: 258572987 Blast Desc: conserved [Uncinocarpus reesii 1704] gi|237900941|gb|EEP75342.1| conserved [Uncinocarpus reesii 1704]
  misc_feature (13)..(523): NCBI GI: 119499275 Blast Desc: cytochrome P450, [Neosartorya fischeri NRRL 181] gi|119414559|gb|EAW24498.1| cytochrome P450, [Neosartorya fischeri NRRL 181]
  misc_feature (16)..(523): NCBI GI: 255938474 Blast Desc: Pc14g00120 [Penicillium chrysogenum Wisconsin 54-1255] gi|211584628|emb|CAP74153.1| Pc14g00120 [Penicillium chrysogenum Wisconsin 54-1255]
  misc_feature (13)..(523): NCBI GI: 70985400 Blast Desc: cytochrome P450 [Aspergillus fumigatus Af293] gi|66845834|gb|EAL86168.1| cytochrome P450, [Aspergillus fumigatus Af293] gi|159125869|gb|EDP50985.1| cytochrome P450,
  misc_feature (1)..(484): SWISSPROT Homolog: EC 1.14.13.94 Lithocholate 6-beta-hydroxylase
  misc_feature: Useful for introducing or modulating the production of volatile compounds
MADFNLSLWGMVLAGGVAYMLYGAFWRLYLSPIAHIPGPRLAAMTLLYEMYYDTWLGGKYEFKIIEMHKKYGPIIRISPWELHISDPDFYDTIYVGHSAPRRSEKYYNLVRYFGLDLCVFSTIDHDLHRMRRNALNPFFSTTAVRSLQPVMQERNDVIQMRMKEFMNSGKVLNASNMLAAFTNDIVETYCFARCQHRIEHPDFDPRSRAAAFEGATSVHIMKHIWWVYDIMNYFPTAVVKSLHQGAGLYLEQKRESRAAVEKIIHGENNDWRERDQPTIFRAALEAKVPDHEKSVERLSDDAQMAVMAGTLTTAMTLETIVYWLLAQPDTLRKLKEELKSAMPSVSDVGSVPLAVLENLPYLQAVVKEGLRLSYGSSMRLQRIDPDNTILFTDKNTGKEWVIPAKTPVGMSAVGIHHDESIFEDSKAFRPERWLGPDGKRREKYLVSFSRGSRNCLGMNLSYSELALFSANMWRTWTSKEVEPTGGEAGVLELYQTTVRDVEIEGDYYIPVAQKGSKGIQLMVHPFKA

SEQ ID NO: 29205 - DNA, 2101 bp, Muscodor strobelii
  misc_feature: SGI EST ID NO. CUFF.69054.0
  misc_feature: Variant of the nucleotide sequence at SEQ ID NO 29203
ccgtaaagcacgatattcttaatttctttatttaggtcttaaaaaacgcctcatcatcgtcctatcatgcttgataatcaggtcaagatggctgacttcaacctgtccctctggggcatggtcctggccggtggtgtggcatatatgctctacggggcattttggcgtctttacttgagccctattgctcacattcctggcccacgactcgctgccatgacccttctatacgagatgtattacgatacatggcttgggggaaaatacgaattcaagattatcgaaatgcataagaaatatgggccaattattcgaatctccccttgggaactgcacatttccgatcccgacttttatgacaccatctatgttggccactccgctccccgccgctcagagaagtactataacctcgtgagatattttgggctcgatctatgtgtcttctcaacgattgatcatgacctccatcggatgcgccgtaatgccctcaaccccttcttcagtacgactgcggtcaggtccctgcagcctgttatgcaggaaagaaacgatgtgatccaaatgcgaatgaaggagttcatgaacagtggcaaggtactgaacgccagcaatatgcttgccgccttcacaaatgacattgtcgagacgtattgtttcgcgcgatgccagcatcgtatagagcatccagactttgaccctcggtcacgcgctgcagcttttgaaggcgccacttcggtgcatatcatgaaacatatctggtgggtgtacgatatcatgaactacttcccaaccgccgttgtcaagtcgctccatcagggcgcgggactatacctagagcagaagagggagtctcgagccgccgtcgagaaaatcatccatggagaaaacaatgactggcgcgaacgcgatcagcccacgatcttccgcgctgctcttgaggcgaaagtccccgatcacgagaagtcagtagagagactatcggacgacgcacagatggctgtaatggccggaaccttgacaacggcaatgacgttggagaccatcgtctactggctattggcccagccggacacgctgcgtaaactcaaggaggagttgaagagcgcgatgcccagtgttagtgatgttggttctgttccgctcgcagtactagagaatctaccatatttgcaggcggttgtcaaggaaggtctacggttgagctatggctcgtcaatgcggctacaacgcattgatcctgacaacaccatcctgtttacagacaagaacacaggtaaggaatgggtcatcccagccaagacaccggtcgggatgtcggctgttggtattcaccatgacgagagcattttcgaggatagcaaagccttccgacctgagcgctggcttggccccgacggcaagcgtcgagagaagtaccttgtgagctttagtaggggtagccgcaattgtctcggcatgaatctctcatattccgagcttgcgctgttctcggccaatatgtggaggacttggacaagcaaagaagttgagcccacaggtggcgaagctggtgtacttgagctgtatcaaacaacggttcgcgacgtcgagatcgagggtgactattacattcccgtcgcgcaaaaaggatccaagggtattcagcttatggtgcatcccttcaaagcataaggtcgattccgtcgcgacgcgccccattctcttcacatgagttccgtgtcaataccatacttgtgtgcttgtcattcattgcgatacacgcggttgatggtgactgtgtgaggggcgcgtcttttttctaaggccacgacagggcgaactactattctgctagcttcactccttgcagggggctggtagctcaatgaaatagttgctgagctcgaagaccagaaggacaacatatgaggttagcaatcaagcccatcttcaaggaaatgtctacttcagtcgatgtcgctagctcattactattgaatgtaattactatgtcccaatttcttttcgccgtaattgctaccgccagccctgctggttacagtgtggttgtagaaatctccaaattccaagtccccgtctaacactccccgcattcttc

SEQ ID NO: 29206 - DNA, 1608 bp, Muscodor strobelii
  misc_feature: SGI cDNA ID NO. 570028
  misc_feature: Encodes the peptide sequence at SEQ ID NO 29207
atgcttgataatcaggtcaagatggctgacttcaacctgtccctctggggcatggtcctggccggtggtgtggcatatatgctctacggggcattttggcgtctttacttgagccctattgctcacattcctggcccacgactcgctgccatgacccttctatacgagatgtattacgatacatggcttgggggaaaatacgaattcaagattatcgaaatgcataagaaatatgggccaattattcgaatctccccttgggaactgcacatttccgatcccgacttttatgacaccatctatgttggccactccgctccccgccgctcagagaagtactataacctcgtgagatattttgggctcgatctatgtgtcttctcaacgattgatcatgacctccatcggatgcgccgtaatgccctcaaccccttcttcagtacgactgcggtcaggtccctgcagcctgttatgcaggaaagaaacgatgtgatccaaatgcgaatgaaggagttcatgaacagtggcaaggtactgaacgccagcaatatgcttgccgccttcacaaatgacattgtcgagacgtattgtttcgcgcgatgccagcatcgtatagagcatccagactttgaccctcggtcacgcgctgcagcttttgaaggcgccacttcggtgcatatcatgaaacatatctggtgggtgtacgatatcatgaactacttcccaaccgccgttgtcaagtcgctccatcagggcgcgggactatacctagagcagaagagggagtctcgagccgccgtcgagaaaatcatccatggagaaaacaatgactggcgcgaacgcgatcagcccacgatcttccgcgctgctcttgaggcgaaagtccccgatcacgagaagtcagtagagagactatcggacgacgcacagatggctgtaatggccggaaccttgacaacggcaatgacgttggagaccatcgtctactggctattggcccagccggacacgctgcgtaaactcaaggaggagttgaagagcgcgatgcccagtgttagtgatgttggttctgttccgctcgcagtactagagaatctaccatatttgcaggcggttgtcaaggaaggtctacggttgagctatggctcgtcaatgcggctacaacgcattgatcctgacaacaccatcctgtttacagacaagaacacaggtaaggaatgggtcatcccagccaagacaccggtcgggatgtcggctgttggtattcaccatgacgagagcattttcgaggatagcaaagccttccgacctgagcgctggcttggccccgacggcaagcgtcgagagaagtaccttgtgagctttagtaggggtagccgcaattgtctcggcatgaatctctcatattccgagcttgcgctgttctcggccaatatgtggaggacttggacaagcaaagaagttgagcccacaggtggcgaagctggtgtacttgagctgtatcaaacaacggttcgcgacgtcgagatcgagggtgactattacattcccgtcgcgcaaaaaggatccaagggtattcagcttatggtgcatcccttcaaagcataa

SEQ ID NO: 29207 - protein, 535 aa, Muscodor strobelii
  misc_feature: SGI Peptide ID NO. 570028
  misc_feature (43)..(505): Pfam Id: PF00067 Pfam Desc: Cytochrome P450
  misc_feature (314)..(475): Pfam Id: PF00067 Pfam Desc: Cytochrome P450
  misc_feature (13)..(530): NCBI GI: 145234316 Blast Desc: An02g13980 [Aspergillus niger] gi|134057475|emb|CAK48829.1| protein product [Aspergillus niger]
  misc_feature (20)..(531): NCBI GI: 116208594 Blast Desc: CHGG_03590 [Chaetomium globosum CBS 148.51] gi|88184187|gb|EAQ91655.1| CHGG_03590 [Chaetomium globosum CBS 148.51]
  misc_feature (8)..(530): NCBI GI: 169765436 Blast Desc: [Aspergillus oryzae RIB40] gi|83765044|dbj|BAE55187.1| protein product [Aspergillus oryzae]
  misc_feature (5)..(528): NCBI GI: 46129248 Blast Desc: FG08809.1 [Gibberella zeae PH-1]
  misc_feature (17)..(533): NCBI GI: 256734151 Blast Desc: [Nectria haematococca mpVI 77-13-4]
  misc_feature (19)..(530): NCBI GI: 119178512 Blast Desc: CIMG_08088 [Coccidioides immitis RS]
  misc_feature (19)..(530): NCBI GI: 258572987 Blast Desc: conserved [Uncinocarpus reesii 1704] gi|237900941|gb|EEP75342.1| conserved [Uncinocarpus reesii 1704]
  misc_feature (20)..(530): NCBI GI: 119499275 Blast Desc: cytochrome P450, [Neosartorya fischeri NRRL 181] gi|119414559|gb|EAW24498.1| cytochrome P450, [Neosartorya fischeri NRRL 181]
  misc_feature (23)..(530): NCBI GI: 255938474 Blast Desc: Pc14g00120 [Penicillium chrysogenum Wisconsin 54-1255] gi|211584628|emb|CAP74153.1| Pc14g00120 [Penicillium chrysogenum Wisconsin 54-1255]
  misc_feature (20)..(530): NCBI GI: 70985400 Blast Desc: cytochrome P450 [Aspergillus fumigatus Af293] gi|66845834|gb|EAL86168.1| cytochrome P450, [Aspergillus fumigatus Af293] gi|159125869|gb|EDP50985.1| cytochrome P450,
  misc_feature (8)..(491): SWISSPROT Homolog: EC 1.14.13.94 Lithocholate 6-beta-hydroxylase
MLDNQVKMADFNLSLWGMVLAGGVAYMLYGAFWRLYLSPIAHIPGPRLAAMTLLYEMYYDTWLGGKYEFKIIEMHKKYGPIIRISPWELHISDPDFYDTIYVGHSAPRRSEKYYNLVRYFGLDLCVFSTIDHDLHRMRRNALNPFFSTTAVRSLQPVMQERNDVIQMRMKEFMNSGKVLNASNMLAAFTNDIVETYCFARCQHRIEHPDFDPRSRAAAFEGATSVHIMKHIWWVYDIMNYFPTAVVKSLHQGAGLYLEQKRESRAAVEKIIHGENNDWRERDQPTIFRAALEAKVPDHEKSVERLSDDAQMAVMAGTLTTAMTLETIVYWLLAQPDTLRKLKEELKSAMPSVSDVGSVPLAVLENLPYLQAVVKEGLRLSYGSSMRLQRIDPDNTILFTDKNTGKEWVIPAKTPVGMSAVGIHHDESIFEDSKAFRPERWLGPDGKRREKYLVSFSRGSRNCLGMNLSYSELALFSANMWRTWTSKEVEPTGGEAGVLELYQTTVRDVEIEGDYYIPVAQKGSKGIQLMVHPFKA

SEQ ID NO: 29208 - DNA, 2101 bp, Muscodor strobelii; identical to SEQ ID NO: 29205
  misc_feature: SGI EST ID NO. CUFF.69054.0
  misc_feature: Variant of the nucleotide sequence at SEQ ID NO 29206

SEQ ID NO: 29209 - DNA, 7587 bp, Muscodor strobelii
  misc_feature: SGI cDNA ID NO. 570029
  misc_feature: Elevated expression when VOC is produced
  misc_feature: Encodes the peptide sequence at SEQ ID NO 29210
atgacatctgcttcggatcttccttccctactcgtctttggatcacacactaagcttcctccagcagagatactagaggagcttagacaagacctcgagaccacacagcaattatcagctctcaaagaagctgtgagagacttgcctcgattttggagtgctctgagcgaatccgacccggaactgagagatgttcccggggcgagaaatttcagtgaagtatcacattggctcgaaaatggtggcacattccctcatagtcaaagcgatgccccaaatcatatcactctcgcagtcactctcctactacacataagccagtattctcggtatctacatagtctgggcaaagacgctcactccagattactctgcagtatacatgccggcggtgtccaggggctctgctcggggttcctgagcagcgttgcagtggccagcgcagaaactgaaaaagacctgggatctactgcggctgtggccctacgtttagctgtatgcattggtgcgtatgtcgaccgcgatggaatttactcacagagccccgagaagtactcgtgcgtagcaatacgatggaaagaggcgaataccggtagtcgggatgagattgataacatagtgcagtctttaccatctgcatatatctcaagtttcaatgacgatacatgtgtgacgataacactcagaacaagtgatgttgatcgtttgaaccagctggctcacgcctctagtcttcgttcaatgccagtgtctgtacatggccgattccatactcgaaaccatacgaaagcagcgcacagacttgctcagttcatttcacagtcaccggatctcacattactagcagccgaaaagctctttgcccctgtgagatcagccgtaaatggcacaattctcgacagcggctcccttgcccagcacatcattgacaacacactcctagaagtagccgactggaattcgacaatccgcgcaggtgtgaaccagcttccaacacatagccgcaagttcgcagcattcgcagggtttggaaatcacattccccaaactctggtacaggccacatcgctcgaggtcctcatgctcagtaaactgggcacgaagaatgcaagcatgcaaccccggccggagtaccctgcccattccattgccatcgttggcatggctggaagattcccgggtgcggatacggttgatgaactctgggatttgctgatagaaggcaagtcaactgtcgaacctgcgcccgttgagcgactgggtctgtcgcaaactgatgaatttgccaacacgaaatggtggggtaacttcattagagatcctgatgcattcgatcataaattcttcaagaagtcttcccgagaagctctagcctgggaccctcaacagagaatacttcttgaggtgatatataccgctctcgaagcatccggatacttcggcccttcgtcgtcaaagcggccaaaagattatggctgttatattggagcctgtattagtaattactatgacaacgtgtcgtgccatgctcctacagcttatgctaccatgggaacaacgcgaggcttcatctcaggatgcatgagtcactattttgggtggactggtcccgccctaaccatcgacaccgcctgttccagctcattggtggcaatcaacactgcgtgtcgagcaatctggtctggcgaatgttctcgagcggtcgctgggggcacgaatgtgatttccagtcccttcgattatcacaacctatcagcggcaggatttcttagcccagatggtcagtgtaagagtttcgatgtgaacgctaatggctattgccgtggcgaaggcgttgccgtcgtcgtgctgaagagactcagtgacgctattaaagatggcgatgacatcttgggtgtcattgccggctccgctgcgaaccaaaatcacaatgaaagtcttatcaccgtgcctcattcgggctcgcaaactgcactatataaggatgtgctcaacctcagtggtcttccctcggagaccatttcatacgtggaagcgcatggtactgggactggtgttggcgatcctgttgaggtgcgcagtattcgtgaggtgtttggtggcccacagagagattcgcttcttcactttgcatcaataaaggggaacattgggcatacagagggcacagctggtgttgctggcctcattaaagtcttgctcatgatgagacataatcgcataccggttcaagcaagtcacaatatgcttaacccgaaaatcccgtctcttgagccagacttgatggcaataccaaaggaaatcacctcatgggaggcgccattcaaggcagcttgcgtcaacagctatggtgcggccggatctaactcggctctgatgatcctcgagaaaccagtaatattgagcaaagctcctcagggaaccgccggtacttcaaagtggccactattcatttctgcgaattctgcgaacagtcttgcgatgtatagtaagaagctactagaactcgttcgtggcggcggggcagaggttgggccggacatggttgcgtctttgacttttaaccttgcttcccgggccaaccatgctttgcctcacatactcgctacaacagttgggagtgtagcggaattgacggcgaagcttgaaaacgggtcatcctcaattcagtctatcgccgtagagagcaggaagcctgtgatccttgtgtttggaggacaagagagcgacttcattggcctctcaaaagatgtctaccagtcatctagactatttcgtcatcatttagatgcttgtaatgctctcgttgttacccaaggtctggagagtttcctctctgcgatatttgatcgtactccaatgcaaaacttggtcactttgcatacggcactttttgcggttcaatatgcatcggccaaagcgtggattgactccgggctgcttgttgacgcagtcgtcggccatagcttcggccaactcacggctttgtgtctttctggagtgttatcgctctcagatgcgatcgctttgattgcaggccgggcaaagctaatgacgaagcactggggcgatgagtctggaagcatggttttcttgcaaacaagtcgcgaaacagttgagcgagctctccaaacgttgagagccaaagacggaggattttacgcggaaatagcgtgctacaatggcccccaaagtcatgtcgtggtcggctccgcgagctcaatttccgctgtggagcaccatttcgccagcgggcaggtcacagtccgcaccaagagactccaagtgacacatgggtttcactctaaattcactgagcccatgctcaatcacctagactctctagctcagaaactgtctttccaacgccctgtaatccatctagaaccgtgcgatatcgatgaacgagtagatgacatcgactttcgcgctatcgcagaccacacgagaaatgctgtgttcttccagtcggcgatcgaaagactcgctaagcgcttcccccaaggagccacctggatagaagctggtcgtgggtcatcggtagtcaatttggcgaagggctgtttgcctgacgcgcatgcgcacacgttcttgtcgccgcagctcacgacatccgacgcgcaagggtcgctcataaatgcgactctagacttatggagatccggttattctgtgcagtactggccattccacagacgtcagaagtttgactatgggcctctatatctgccgccgtatcagttcgagaagactcggcattggctgccgtttacagggaatcgcacggataagagggaagcaacgcctgtgcctgtgattgtctcggacaaacatgaaatcttgtcttttatgcgcttcaatgacaaggcacaaaatgggaggcggatatttagaatcgatcccgtcgctgatcgcttcaaggtcatgctgggtgggcatgtcatggcaggtcaaggactatgcccggcttcgttatactacgagctcgtctcaagagcagccatgtttcttgagcgaggagcaaatgtttcgactcatgtgccagccgtttatgatctcatcatgaagtcaccaattggcggcgatacacatgtcaatatcatcctcaatctgaagcgtctcgatcatagtcagcatccctcgtggagcttttccatcacaacagagtctatcaacaccggtcgcaaaacgcatccgttcgaggtgtcaactggcacagtttgtctgaagaggagagatgatgcgcagactatgaaggagtttaagaggttcgagtctctcacgggggctcgtcgggtcgaggaggttctttcgcatcccgatgccgaaatgatgcagggaaagcacatctaccgcgcattcaccaccgtcgtttactatgggccaccgttccatggtgtcaagcagattgctagtttaggaatggaagccgccggaaaggtgaccatcacccctgacgatggaccagacgaccagcgcctctgcgatacaccgatgaccgatagcttcatgcagcttgcgggctttttggtcaattacttcaacaacgccagtaccgaggatgtttttgtctgcggtcatatcgaacatatcgaacttgggggcagcttcgatccggatgcaaggaattggatcgtgtacgcaacaatggaacagagcggagagactatcatgaccgctgatgcttacgtatttgaagctacgagcaagaagatggttatggctatctttggcttgaaattcaatagaatgccacaggccgcgctcgggagaatgctacaaagtgttaataagcctagaatcgcagcacctgtgccctcccaggctcttgcagcgcacatcccgtctattgcggaagagcaatctatgtcggctcccgttcgagcctcgtcagacaaggctcagtgccggaccaacagcaagcgcactgaattgctcaaactactgtccgaaatcactgatgtttcgctgcaagatatcaacacagaatcaagcctggaggatcttggcatcgactcgctcatggctaccgaggttctgaataatattcgatcagctctgggggttactattgatctgacaacatttactttcttccctgatgttgaagccctaatagccaacgtggatgagcagctcggtctacgtgataatgatgatgacaaagatgaaagctcggacacatcgcccacgccagccgtgtcatgggacatggtgtcgactgggtctgcgagctcagatccgaccagctacggcgcgactacgcctgacaagacaacatcagtgtcagccgcgacttcgcaattaccttctctaataggaggtagcatagaaacttcctcgacgagtacgcaacgaccaacgctgatatctgcagcggaaacattccaagatattagacttcgatatgatcagctcgccgaaggtatcggcggtctaggattctggtcgcaagcgtaccctcaccagtctcgccttgttctggcatatgttctggaagcatttgcagaactgggctgcgatttgcgaaagatttcggcaggagatgaaattccccaagtacaaggagtgctagaacgacatacgcgcctcattcaacaactactacgtgttgtcgagcagggcaagctcatcttcaagtctacagatcaatcttttgcgcgaacagaaacacctgttgaccatacgagcgcacagactatttaccaacagattattgacctctatccacaacatgcaaatgttaacaaacttgtgcgcattgtcggttcgaacttggcagcttgcttgaccggtaagacagatggtatacagaccgtgtttgggaacaaggaagccaagaaaatactcgaagacatatatgccttttggccccttttcaggacgcccacactggtactaggtgatttcttgactagagcaatgacaaatgcgaccgggggtggtaagtttaggattttggaggtaggcgctggaacaggtggcaccactggatatttagtcaaccttctaagaaaccacggtatccccttcgaatatgtcttcactgatatttcgtcgtcacttgtggcagctggccgacagaagtttaaggggattgagggcatggcttttgaagtactagacattgagcaggcgccaaaggtggagcatcgccaggcattccactgcatcctcgcgagcaacacgatacacgcaactcgcgatctagatatttcacttcgtcatttgcggacaatgctccgcgcggatggtgccttgacacttatcgaaattacaagacaggttttctggcttgatctggtcttcggtcaatttgaaggatggtggctgtttgaagatggccgagcgcacgcattgatgaacgaagaggactgggagagccgaatgcgagcagctggctttggccaggtcttatggtctgacggtccttcaccggagtcgaagacagttcgtactatcgcagcctttccgtcctcgtcccctgatagtatacctttagctatcaagtcctctagccggaaggctgtgaagagtcccgccagcactgtcaaggttgcattggagacagttgtatacaagcgagtaggagatctcgaaatacacgccgacgtatactatcctgttggcggaaagctaccgaagaggaaaatgccagttgcattgatgattcacgggggcagccatattatgtttactagaaaggatgtgcgcccgccacagacgcggctccttatagagagaggatttctgccagttgccttagaccaccggctctgccctgaaatttcgctcctcgatggtccaatgacagatgtctgcgacgcactcgagtgggcccgcaatactctgcccaccctcaagctgaaaagagccggattaccaatcaatggcgagaaagtggttgttattggatggtcttcaggtggccagctcgcgatgtcaaccgcatggcaagctccacgacgcggtctacggccgcccgaggcgatcctcgcgatgtactgtccaaccaactacgaagatgagtggtggcggaatccaatccagcctgttggagcggaagacacgggaatgaaatacgacgtactcgaagccgtccaggaagccccaataacgagctacggcatcttgggcgcgtgggagcccctctcagaccctcgcctcttgaccgatgctcgcgctcgaattgtgcttcatatcaattggaaagctcaaacactgccaattatcataggagggctgccgaccaggaagacggcggatgcgacgactcttgatggcagagactggaacgctcttccccagccgtcgctggaggcaatcagagccgtgagccccatggcgcaaatccgtgccggtaattatagcacacccactttcttgattcacggcactgccgacgacctgattccctggcagcagagccaaggcacctatgaagaaatggtcgctaggggcatccccgtcgaattggccctggtcgaaggagcaccgcatatcacagacctgagcagtgatcccgactcggaaggttggcaagcagcgcttcagggatacgacttcatttgttcttacgtattctga

SEQ ID NO: 29210 - protein, 2528 aa, Muscodor strobelii
  misc_feature: SGI Peptide ID NO. 570029
  misc_feature (901)..(1225): Pfam Id: PF00698 Pfam Desc: Acyl transferase domain
  misc_feature (381)..(623): Pfam Id: PF00109 Pfam Desc: Beta-ketoacyl synthase, N-terminal domain
  misc_feature (631)..(748): Pfam Id: PF02801 Pfam Desc: Beta-ketoacyl synthase, C-terminal domain
  misc_feature (1987)..(2089): Pfam Id: PF08241 Pfam Desc: Methyltransferase domain
  misc_feature (1987)..(2087): Pfam Id: PF08242 Pfam Desc: Methyltransferase domain
  misc_feature (1643)..(1709): Pfam Id: PF00550 Pfam Desc: Phosphopantetheine attachment site
  misc_feature (963)..(1019): Pfam Id: PF00698 Pfam Desc: Acyl transferase domain
  misc_feature (534)..(572): Pfam Id: PF00108 Pfam Desc: Thiolase, N-terminal domain
  misc_feature (542)..(2527): NCBI GI: 121711976 Blast Desc: polyketide synthase, [Aspergillus clavatus NRRL 1] gi|119401755|gb|EAW12177.1| polyketide synthase, [Aspergillus clavatus NRRL 1]
  misc_feature (8)..(2523): NCBI GI: 67540556 Blast Desc: AN6448.2 [Aspergillus nidulans FGSC A4] gi|40739280|gb|EAA58470.1| AN6448.2 [Aspergillus nidulans FGSC A4] gi|259479323|tpe|CBF69451.1| TPA: polyketide synthase, (JCVI)
  misc_feature (8)..(2523): NCBI GI: 116204489 Blast Desc: CHGG_10128 [Chaetomium globosum CBS 148.51] gi|88176256|gb|EAQ83724.1| CHGG_10128 [Chaetomium globosum CBS 148.51]
  misc_feature (10)..(2160): NCBI GI: 242821846 Blast Desc: polyketide synthase, [Talaromyces stipitatus ATCC 10500] gi|218712685|gb|EED12110.1| polyketide synthase, [Talaromyces stipitatus ATCC 10500]
  misc_feature (11)..(2527): NCBI GI: 67902792 Blast Desc: AN8383.2 [Aspergillus nidulans FGSC A4] gi|40747849|gb|EAA67005.1| AN8383.2 [Aspergillus nidulans FGSC A4] gi|259484315|tpe|CBF80428.1| TPA: polyketide synthase, (JCVI)
  misc_feature (134)..(2519): NCBI GI: 115385671 Blast Desc: ATEG_10080 [Aspergillus terreus NIH2624] gi|114187829|gb|EAU29529.1| ATEG_10080 [Aspergillus terreus NIH2624]
  misc_feature (23)..(2526): NCBI GI: 171683708 Blast Desc: protein product [Podospora anserina] gi|170941814|emb|CAP67467.1| protein product [Podospora anserina]
  misc_feature (8)..(2161): NCBI GI: 240109915 Blast Desc: polyketide synthase, [Coccidioides posadasii C735 delta SOWgp]
  misc_feature (1)..(2159): NCBI GI: 238841419 Blast Desc: polyketide synthase [Microsporum canis CBS 113480]
  misc_feature (10)..(2189): NCBI GI: 242821914 Blast Desc: polyketide synthase, [Talaromyces stipitatus ATCC 10500] gi|218712699|gb|EED12124.1| polyketide synthase, [Talaromyces stipitatus ATCC 10500]
  misc_feature: Useful for fungicidal and/or biocontrol applications
  misc_feature: Useful for introducing or modulating the production of volatile compounds
MTSASDLPSLLVFGSHTKLPPAEILEELRQDLETTQQLSALKEAVRDLPRFWSALSESDPELRDVPGARNFSEVSHWLENGGTFPHSQSDAPNHITLAVTLLLHISQYSRYLHSLGKDAHSRLLCSIHAGGVQGLCSGFLSSVAVASAETEKDLGSTAAVALRLAVCIGAYVDRDGIYSQSPEKYSCVAIRWKEANTGSRDEIDNIVQSLPSAYISSFNDDTCVTITLRTSDVDRLNQLAHASSLRSMPVSVHGRFHTRNHTKAAHRLAQFISQSPDLTLLAAEKLFAPVRSAVNGTILDSGSLAQHIIDNTLLEVADWNSTIRAGVNQLPTHSRKFAAFAGFGNHIPQTLVQATSLEVLMLSKLGTKNASMQPRPEYPAHSIAIVGMAGRFPGADTVDELWDLLIEGKSTVEPAPVERLGLSQTDEFANTKWWGNFIRDPDAFDHKFFKKSSREALAWDPQQRILLEVIYTALEASGYFGPSSSKRPKDYGCYIGACISNYYDNVSCHAPTAYATMGTTRGFISGCMSHYFGWTGPALTIDTACSSSLVAINTACRAIWSGECSRAVAGGTNVISSPFDYHNLSAAGFLSPDGQCKSFDVNANGYCRGEGVAVVVLKRLSDAIKDGDDILGVIAGSAANQNHNESLITVPHSGSQTALYKDVLNLSGLPSETISYVEAHGTGTGVGDPVEVRSIREVFGGPQRDSLLHFASIKGNIGHTEGTAGVAGLIKVLLMMRHNRIPVQASHNMLNPKIPSLEPDLMAIPKEITSWEAPFKAACVNSYGAAGSNSALMILEKPVILSKAPQGTAGTSKWPLFISANSANSLAMYSKKLLELVRGGGAEVGPDMVASLTFNLASRANHALPHILATTVGSVAELTAKLENGSSSIQSIAVESRKPVILVFGGQESDFIGLSKDVYQSSRLFRHHLDACNALVVTQGLESFLSAIFDRTPMQNLVTLHTALFAVQYASAKAWIDSGLLVDAVVGHSFGQLTALCLSGVLSLSDAIALIAGRAKLMTKHWGDESGSMVFLQTSRETVERALQTLRAKDGGFYAEIACYNGPQSHVVVGSASSISAVEHHFASGQVTVRTKRLQVTHGFHSKFTEPMLNHLDSLAQKLSFQRPVIHLEPCDIDERVDDIDFRAIADHTRNAVFFQSAIERLAKRFPQGATWIEAGRGSSVVNLAKGCLPDAHAHTFLSPQLTTSDAQGSLINATLDLWRSGYSVQYWPFHRRQKFDYGPLYLPPYQFEKTRHWLPFTGNRTDKREATPVPVIVSDKHEILSFMRFNDKAQNGRRIFRIDPVADRFKVMLGGHVMAGQGLCPASLYYELVSRAAMFLERGANVSTHVPAVYDLIMKSPIGGDTHVNIILNLKRLDHSQHPSWSFSITTESINTGRKTHPFEVSTGTVCLKRRDDAQTMKEFKRFESLTGARRVEEVLSHPDAEMMQGKHIYRAFTTVVYYGPPFHGVKQIASLGMEAAGKVTITPDDGPDDQRLCDTPMTDSFMQLAGFLVNYFNNASTEDVFVCGHIEHIELGGSFDPDARNWIVYATMEQSGETIMTADAYVFEATSKKMVMAIFGLKFNRMPQAALGRMLQSVNKPRIAAPVPSQALAAHIPSIAEEQSMSAPVRASSDKAQCRTNSKRTELLKLLSEITDVSLQDINTESSLEDLGIDSLMATEVLNNIRSALGVTIDLTTFTFFPDVEALIANVDEQLGLRDNDDDKDESSDTSPTPAVSWDMVSTGSASSDPTSYGATTPDKTTSVSAATSQLPSLIGGSIETSSTSTQRPTLISAAETFQDIRLRYDQLAEGIGGLGFWSQAYPHQSRLVLAYVLEAFAELGCDLRKISAGDEIPQVQGVLERHTRLIQQLLRVVEQGKLIFKSTDQSFARTETPVDHTSAQTIYQQIIDLYPQHANVNKLVRIVGSNLAACLTGKTDGIQTVFGNKEAKKILEDIYAFWPLFRTPTLVLGDFLTRAMTNATGGGKFRILEVGAGTGGTTGYLVNLLRNHGIPFEYVFTDISSSLVAAGRQKFKGIEGMAFEVLDIEQAPKVEHRQAFHCILASNTIHATRDLDISLRHLRTMLRADGALTLIEITRQVFWLDLVFGQFEGWWLFEDGRAHALMNEEDWESRMRAAGFGQVLWSDGPSPESKTVRTIAAFPSSSPDSIPLAIKSSSRKAVKSPASTVKVALETVVYKRVGDLEIHADVYYPVGGKLPKRKMPVALMIHGGSHIMFTRKDVRPPQTRLLIERGFLPVALDHRLCPEISLLDGPMTDVCDALEWARNTLPTLKLKRAGLPINGEKVVVIGWSSGGQLAMSTAWQAPRRGLRPPEAILAMYCPTNYEDEWWRNPIQPVGAEDTGMKYDVLEAVQEAPITSYGILGAWEPLSDPRLLTDARARIVLHINWKAQTLPIIIGGLPTRKTADATTLDGRDWNALPQPSLEAIRAVSPMAQIRAGNYSTPTFLIHGTADDLIPWQQSQGTYEEMVARGIPVELALVEGAPHITDLSSDPDSEGWQAALQGYDFICSYVF

SEQ ID NO: 29211 - DNA, 8149 bp, Muscodor strobelii
  misc_feature: SGI EST ID NO. CUFF.69153.0
  misc_feature: Variant of the nucleotide sequence at SEQ ID NO 29209
gtttgcgacgagctttgcaatatagctgcattattctacctgttccgaataacggtacaatttgaagtctatcctatgtcttcatgaacttcttcaacaagatcttgtgatccgtatagaccttagtcaattccaagaaacatgacatctgcttcggatcttccttccctactcgtctttggatcacacactaagcttcctccagcagagatactagaggagcttagacaagacctcgagaccacacagcaattatcagctctcaaagaagctgtgagagacttgcctcgattttggagtgctctgagcgaatccgacccggaactgagagatgttcccggggcgagaaatttcagtgaagtatcacattggctcgaaaatggtggcacattccctcatagtcaaagcgatgccccaaatcatatcactctcgcagtcactctcctactacacataagccagtattctcggtatctacatagtctgggcaaagacgctcactccagattactctgcagtatacatgccggcggtgtccaggggctctgctcggggttcctgagcagcgttgcagtggccagcgcagaaactgaaaaagacctgggatctactgcggctgtggccctacgtttagctgtatgcattggtgcgtatgtcgaccgcgatggaatttactcacagagccccgagaagtactcgtgcgtagcaatacgatggaaagaggcgaataccggtagtcgggatgagattgataacatagtgcagtctttaccatctgcatatatctcaagtttcaatgacgatacatgtgtgacgataacactcagaacaagtgatgttgatcgtttgaaccagctggctcacgcctctagtcttcgttcaatgccagtgtctgtacatggccgattccatactcgaaaccatacgaaagcagcgcacagacttgctcagttcatttcacagtcaccggatctcacattactagcagccgaaaagctctttgcccctgtgagatcagccgtaaatggcacaattctcgacagcggctcccttgcccagcacatcattgacaacacactcctagaagtagccgactggaattcgacaatccgcgcaggtgtgaaccagcttccaacacatagccgcaagttcgcagcattcgcagggtttggaaatcacattccccaaactctggtacaggccacatcgctcgaggtcctcatgctcagtaaactgggcacgaagaatgcaagcatgcaaccccggccggagtaccctgcccattccattgccatcgttggcatggctggaagattcccgggtgcggatacggttgatgaactctgggatttgctgatagaaggcaagtcaactgtcgaacctgcgcccgttgagcgactgggtctgtcgcaaactgatgaatttgccaacacgaaatggtggggtaacttcattagagatcctgatgcattcgatcataaattcttcaagaagtcttcccgagaagctctagcctgggaccctcaacagagaatacttcttgaggtgatatataccgctctcgaagcatccggatacttcggcccttcgtcgtcaaagcggccaaaagattatggctgttatattggagcctgtattagtaattactatgacaacgtgtcgtgccatgctcctacagcttatgctaccatgggaacaacgcgaggcttcatctcaggatgcatgagtcactattttgggtggactggtcccgccctaaccatcgacaccgcctgttccagctcattggtggcaatcaacactgcgtgtcgagcaatctggtctggcgaatgttctcgagcggtcgctgggggcacgaatgtgatttccagtcccttcgattatcacaacctatcagcggcaggatttcttagcccagatggtcagtgtaagagtttcgatgtgaacgctaatggctattgccgtggcgaaggcgttgccgtcgtcgtgctgaagagactcagtgacgctattaaagatggcgatgacatcttgggtgtcattgccggctccgctgcgaaccaaaatcacaatgaaagtcttatcaccgtgcctcattcgggctcgcaaactgcactatataaggatgtgctcaacctcagtggtcttccctcggagaccatttcatacgtggaagcgcatggtactgggactggtgttggcgatcctgttgaggtgcgcagtattcgtgaggtgtttggtggcccacagagagattcgcttcttcactttgcatcaataaaggggaacattgggcatacagagggcacagctggtgttgctggcctcattaaagtcttgctcatgatgagacataatcgcataccggttcaagcaagtcacaatatgcttaacccgaaaatcccgtctcttgagccagacttgatggcaataccaaaggaaatcacctcatgggaggcgccattcaaggcagcttgcgtcaacagctatggtgcggccggatctaactcggctctgatgatcctcgagaaaccagtaatattgagcaaagctcctcagggaaccgccggtacttcaaagtggccactattcatttctgcgaattctgcgaacagtcttgcgatgtatagtaagaagctactagaactcgttcgtggcggcggggcagaggttgggccggacatggttgcgtctttgacttttaaccttgcttcccgggccaaccatgctttgcctcacatactcgctacaacagttgggagtgtagcggaattgacggcgaagcttgaaaacgggtcatcctcaattcagtctatcgccgtagagagcaggaagcctgtgatccttgtgtttggaggacaagagagcgacttcattggcctctcaaaagatgtctaccagtcatctagactatttcgtcatcatttagatgcttgtaatgctctcgttgttacccaaggtctggagagtttcctctctgcgatatttgatcgtactccaatgcaaaacttggtcactttgcatacggcactttttgcggttcaatatgcatcggccaaagcgtggattgactccgggctgcttgttgacgcagtcgtcggccatagcttcggccaactcacggctttgtgtctttctggagtgttatcgctctcagatgcgatcgctttgattgcaggccgggcaaagctaatgacgaagcactggggcgatgagtctggaagcatggttttcttgcaaacaagtcgcgaaacagttgagcgagctctccaaacgttgagagccaaagacggaggattttacgcggaaatagcgtgctacaatggcccccaaagtcatgtcgtggtcggctccgcgagctcaatttccgctgtggagcaccatttcgccagcgggcaggtcacagtccgcaccaagagactccaagtgacacatgggtttcactctaaattcactgagcccatgctcaatcacctagactctctagctcagaaactgtctttccaacgccctgtaatccatctagaaccgtgcgatatcgatgaacgagtagatgacatcgactttcgcgctatcgcagaccacacgagaaatgctgtgttcttccagtcggcgatcgaaagactcgctaagcgcttcccccaaggagccacctggatagaagctggtcgtgggtcatcggtagtcaatttggcgaagggctgtttgcctgacgcgcatgcgcacacgttcttgtcgccgcagctcacgacatccgacgcgcaagggtcgctcataaatgcgactctagacttatggagatccggttattctgtgcagtactggccattccacagacgtcagaagtttgactatgggcctctatatctgccgccgtatcagttcgagaagactcggcattggctgccgtttacagggaatcgcacggataagagggaagcaacgcctgtgcctgtgattgtctcggacaaacatgaaatcttgtcttttatgcgcttcaatgacaaggcacaaaatgggaggcggatatttagaatcgatcccgtcgctgatcgcttcaaggtcatgctgggtgggcatgtcatggcaggtcaaggactatgcccggcttcgttatactacgagctcgtctcaagagcagccatgtttcttgagcgaggagcaaatgtttcgactcatgtgccagccgtttatgatctcatcatgaagtcaccaattggcggcgatacacatgtcaatatcatcctcaatctgaagcgtctcgatcatagtcagcatccctcgtggagcttttccatcacaacagagtctatcaacaccggtcgcaaaacgcatccgttcgaggtgtcaactggcacagtttgtctgaagaggagagatgatgcgcagactatgaaggagtttaagaggttcgagtctctcacgggggctcgtcgggtcgaggaggttctttcgcatcccgatgccgaaatgatgcagggaaagcacatctaccgcgcattcaccaccgtcgtttactatgggccaccgttccatggtgtcaagcagattgctagtttaggaatggaagccgccggaaaggtgaccatcacccctgacgatggaccagacgaccagcgcctctgcgatacaccgatgaccgatagcttcatgcagcttgcgggctttttggtcaattacttcaacaacgccagtaccgaggatgtttttgtctgcggtcatatcgaacatatcgaacttgggggcagcttcgatccggatgcaaggaattggatcgtgtacgcaacaatggaacagagcggagagactatcatgaccgctgatgcttacgtatttgaagctacgagcaagaagatggttatggctatctttggcttgaaattcaatagaatgccacaggccgcgctcgggagaatgctacaaagtgttaataagcctagaatcgcagcacctgtgccctcccaggctcttgcagcgcacatcccgtctattgcggaagagcaatctatgtcggctcccgttcgagcctcgtcagacaaggctcagtgccggaccaacagcaagcgcactgaattgctcaaactactgtccgaaatcactgatgtttcgctgcaagatatcaacacagaatcaagcctggaggatcttggcatcgactcgctcatggctaccgaggttctgaataatattcgatcagctctgggggttactattgatctgacaacatttactttcttccctgatgttgaagccctaatagccaacgtggatgagcagctcggtctacgtgataatgatgatgacaaagatgaaagctcggacacatcgcccacgccagccgtgtcatgggacatggtgtcgactgggtctgcgagctcagatccgaccagctacggcgcgactacgcctgacaagacaacatcagtgtcagccgcgacttcgcaattaccttctctaataggaggtagcatagaaacttcctcgacgagtacgcaacgaccaacgctgatatctgcagcggaaacattccaagatattagacttcgatatgatcagctcgccgaaggtatcggcggtctaggattctggtcgcaagcgtaccctcaccagtctcgccttgttctggcatatgttctggaagcatttgcagaactgggctgcgatttgcgaaagatttcggcaggagatgaaattccccaagtacaaggagtgctagaacgacatacgcgcctcattcaacaactactacgtgttgtcgagcagggcaagctcatcttcaagtctacagatcaatcttttgcgcgaacagaaacacctgttgaccatacgagcgcacagactatttaccaacagattattgacctctatccacaacatgcaaatgttaacaaacttgtgcgcattgtcggttcgaacttggcagcttgcttgaccggtaagacagatggtatacagaccgtgtttgggaacaaggaagccaagaaaatactcgaagacatatatgccttttggccccttttcaggacgcccacactggtactaggtgatttcttgactagagcaatgacaaatgcgaccgggggtggtaagtttaggattttggaggtaggcgctggaacaggtggcaccactggatatttagtcaaccttctaagaaaccacggtatccccttcgaatatgtcttcactgatatttcgtcgtcacttgtggcagctggccgacagaagtttaaggggattgagggcatggcttttgaagtactagacattgagcaggcgccaaaggtggagcatcgccaggcattccactgcatcctcgcgagcaacacgatacacgcaactcgcgatctagatatttcacttcgtcatttgcggacaatgctccgcgcggatggtgccttgacacttatcgaaattacaagacaggttttctggcttgatctggtcttcggtcaatttgaaggatggtggctgtttgaagatggccgagcgcacgcattgatgaacgaagaggactgggagagccgaatgcgagcagctggctttggccaggtcttatggtctgacggtccttcaccggagtcgaagacagttcgtactatcgcagcctttccgtcctcgtcccctgatagtatacctttagctatcaagtcctctagccggaaggctgtgaagagtcccgccagcactgtcaaggttgcattggagacagttgtatacaagcgagtaggagatctcgaaatacacgccgacgtatactatcctgttggcggaaagctaccgaagaggaaaatgccagttggtaggtttagcccattttctaaccttcccgtccatatcaccaaaaagggactcaacactgactctacgattagcattgatgattcacgggggcagccatattatgtttactagaaaggatgtgcgcccgccacagacgcggctccttatagagagaggatttctgccagttgccttagaccaccggctctgccctgaaatttcgctcctcgatggtccaatgacagatgtctgcgacgcactcgagtgggcccgcaatactctgcccaccctcaagctgaaaagagccggattaccaatcaatggcgagaaagtggttgttattggatggtcttcaggtggccagctcgcgatgtcaaccgcatggcaagctccacgacgcggtctacggccgcccgaggcgatcctcgcgatgtactgtccaaccaactacgaagatgagtggtggcggaatccaatccagcctgttggagcggaagacacgggaatgaaatacgacgtactcgaagccgtccaggaagccccaataacgagctacggcatcttgggcgcgtgggagcccctctcagaccctcgcctcttgaccgatgctcgcgctcgaattgtgcttcatatcaattggaaagctcaaacactgccaattatcataggagggctgccgaccaggaagacggcggatgcgacgactcttgatggcagagactggaacgctcttccccagccgtcgctggaggcaatcagagccgtgagccccatggcgcaaatccgtgccggtaattatagcacacccactttcttgattcacggcactgccgacgacctgattccctggcagcagagccaaggcacctatgaagaaatggtcgctaggggcatccccgtcgaattggccctggtcgaaggagcaccgcatatcacagacctgagcagtgatcccgactcggaaggttggcaagcagcgcttcagggatacgacttcatttgttcttacgtattctgatcatgtcgctgataaattgccgacaagtcttctaacaggtgcgtaggtgtcagcatctgcaccagagctgcaccaagtcaccgctcagagctcagaaccgctcaaagccgtcggacgggagcgggcattcctttattacaagggtaatcgaaccgtgccgtgagctgcatcgctgataattacctgtaacgagcctgtagatgtgtaaataaagtgcgggggctgcgggggtatatgcttacatacatagttcttatctttcttattcttcctcattgaataagcattcgcttatcttgatataattgctgtgcagctttaagattaattcatgctattgacgtgcct

SEQ ID NO: 29212 - DNA, 7599 bp, Muscodor strobelii
  misc_feature: SGI cDNA ID NO. 570030
  misc_feature: Elevated expression when VOC is produced
  misc_feature: Encodes the peptide sequence at SEQ ID NO 29213
atgacatctgcttcggatcttccttccctactcgtctttggatcacacactaagcttcctccagcagagatactagaggagcttagacaagacctcgagaccacacagcaattatcagctctcaaagaagctgtgagagacttgcctcgattttggagtgctctgagcgaatccgacccggaactgagagatgttcccggggcgagaaatttcagtgaagtatcacattggctcgaaaatggtggcacattccctcatagtcaaagcgatgccccaaatcatatcactctcgcagtcactctcctactacacataagccagtattctcggtatctacatagtctgggcaaagacgctcactccagattactctgcagtatacatgccggcggtgtccaggggctctgctcggggttcctgagcagcgttgcagtggccagcgcagaaactgaaaaagacctgggatctactgcggctgtggccctacgtttagctgtatgcattggtgcgtatgtcgaccgcgatggaatttactcacagagccccgagaagtactcgtgcgtagcaatacgatggaaagaggcgaataccggtagtcgggatgagattgataacatagtgcagtctttaccatctgcatatatctcaagtttcaatgacgatacatgtgtgacgataacactcagaacaagtgatgttgatcgtttgaaccagctggctcacgcctctagtcttcgttcaatgccagtgtctgtacatggccgattccatactcgaaaccatacgaaagcagcgcacagacttgctcagttcatttcacagtcaccggatctcacattactagcagccgaaaagctctttgcccctgtgagatcagccgtaaatggcacaattctcgacagcggctcccttgcccagcacatcattgacaacacactcctagaagtagccgactggaattcgacaatccgcgcaggtgtgaaccagcttccaacacatagccgcaagttcgcagcattcgcagggtttggaaatcacattccccaaactctggtacaggccacatcgctcgaggtcctcatgctcagtaaactgggcacgaagaatgcaagcatgcaaccccggccggagtaccctgcccattccattgccatcgttggcatggctggaagattcccgggtgcggatacggttgatgaactctgggatttgctgatagaaggcaagtcaactgtcgaacctgcgcccgttgagcgactgggtctgtcgcaaactgatgaatttgccaacacgaaatggtggggtaacttcattagagatcctgatgcattcgatcataaattcttcaagaagtcttcccgagaagctctagcctgggaccctcaacagagatatgcacatagaatacttcttgaggtgatatataccgctctcgaagcatccggatacttcggcccttcgtcgtcaaagcggccaaaagattatggctgttatattggagcctgtattagtaattactatgacaacgtgtcgtgccatgctcctacagcttatgctaccatgggaacaacgcgaggcttcatctcaggatgcatgagtcactattttgggtggactggtcccgccctaaccatcgacaccgcctgttccagctcattggtggcaatcaacactgcgtgtcgagcaatctggtctggcgaatgttctcgagcggtcgctgggggcacgaatgtgatttccagtcccttcgattatcacaacctatcagcggcaggatttcttagcccagatggtcagtgtaagagtttcgatgtgaacgctaatggctattgccgtggcgaaggcgttgccgtcgtcgtgctgaagagactcagtgacgctattaaagatggcgatgacatcttgggtgtcattgccggctccgctgcgaaccaaaatcacaatgaaagtcttatcaccgtgcctcattcgggctcgcaaactgcactatataaggatgtgctcaacctcagtggtcttccctcggagaccatttcatacgtggaagcgcatggtactgggactggtgttggcgatcctgttgaggtgcgcagtattcgtgaggtgtttggtggcccacagagagattcgcttcttcactttgcatcaataaaggggaacattgggcatacagagggcacagctggtgttgctggcctcattaaagtcttgctcatgatgagacataatcgcataccggttcaagcaagtcacaatatgcttaacccgaaaatcccgtctcttgagccagacttgatggcaataccaaaggaaatcacctcatgggaggcgccattcaaggcagcttgcgtcaacagctatggtgcggccggatctaactcggctctgatgatcctcgagaaaccagtaatattgagcaaagctcctcagggaaccgccggtacttcaaagtggccactattcatttctgcgaattctgcgaacagtcttgcgatgtatagtaagaagctactagaactcgttcgtggcggcggggcagaggttgggccggacatggttgcgtctttgacttttaaccttgcttcccgggccaaccatgctttgcctcacatactcgctacaacagttgggagtgtagcggaattgacggcgaagcttgaaaacgggtcatcctcaattcagtctatcgccgtagagagcaggaagcctgtgatccttgtgtttggaggacaagagagcgacttcattggcctctcaaaagatgtctaccagtcatctagactatttcgtcatcatttagatgcttgtaatgctctcgttgttacccaaggtctggagagtttcctctctgcgatatttgatcgtactccaatgcaaaacttggtcactttgcatacggcactttttgcggttcaatatgcatcggccaaagcgtggattgactccgggctgcttgttgacgcagtcgtcggccatagcttcggccaactcacggctttgtgtctttctggagtgttatcgctctcagatgcgatcgctttgattgcaggccgggcaaagctaatgacgaagcactggggcgatgagtctggaagcatggttttcttgcaaacaagtcgcgaaacagttgagcgagctctccaaacgttgagagccaaagacggaggattttacgcggaaatagcgtgctacaatggcccccaaagtcatgtcgtggtcggctccgcgagctcaatttccgctgtggagcaccatttcgccagcgggcaggtcacagtccgcaccaagagactccaagtgacacatgggtttcactctaaattcactgagcccatgctcaatcacctagactctctagctcagaaactgtctttccaacgccctgtaatccatctagaaccgtgcgatatcgatgaacgagtagatgacatcgactttcgcgctatcgcagaccacacgagaaatgctgtgttcttccagtcggcgatcgaaagactcgctaagcgcttcccccaaggagccacctggatagaagctggtcgtgggtcatcggtagtcaatttggcgaagggctgtttgcctgacgcgcatgcgcacacgttcttgtcgccgcagctcacgacatccgacgcgcaagggtcgctcataaatgcgactctagacttatggagatccggttattctgtgcagtactggccattccacagacgtcagaagtttgactatgggcctctatatctgccgccgtatcagttcgagaagactcggcattggctgccgtttacagggaatcgcacggataagagggaagcaacgcctgtgcctgtgattgtctcggacaaacatgaaatcttgtcttttatgcgcttcaatgacaaggcacaaaatgggaggcggatatttagaatcgatcccgtcgctgatcgcttcaaggtcatgctgggtgggcatgtcatggcaggtcaaggactatgcccggcttcgttatactacgagctcgtctcaagagcagccatgtttcttgagcgaggagcaaatgtttcgactcatgtgccagccgtttatgatctcatcatgaagtcaccaattggcggcgatacacatgtcaatatcatcctcaatctgaagcgtctcgatcatagtcagcatccctcgtggagcttttccatcacaacagagtctatcaacaccggtcgcaaaacgcatccgttcgaggtgtcaactggcacagtttgtctgaagaggagagatgatgcgcagactatgaaggagtttaagaggttcgagtctctcacgggggctcgtcgggtcgaggaggttctttcgcatcccgatgccgaaatgatgcagggaaagcacatctaccgcgcattcaccaccgtcgtttactatgggccaccgttccatggtgtcaagcagattgctagtttaggaatggaagccgccggaaaggtgaccatcacccctgacgatggaccagacgaccagcgcctctgcgatacaccgatgaccgatagcttcatgcagcttgcgggctttttggtcaattacttcaacaacgccagtaccgaggatgtttttgtctgcggtcatatcgaacatatcgaacttgggggcagcttcgatccggatgcaaggaattggatcgtgtacgcaacaatggaacagagcggagagactatcatgaccgctgatgcttacgtatttgaagctacgagcaagaagatggttatggctatctttggcttgaaattcaatagaatgccacaggccgcgctcgggagaatgctacaaagtgttaataagcctagaatcgcagcacctgtgccctcccaggctcttgcagcgcacatcccgtctattgcggaagagcaatctatgtcggctcccgttcgagcctcgtcagacaaggctcagtgccggaccaacagcaagcgcactgaattgctcaaactactgtccgaaatcactgatgtttcgctgcaagatatcaacacagaatcaagcctggaggatcttggcatcgactcgctcatggctaccgaggttctgaataatattcgatcagctctgggggttactattgatctgacaacatttactttcttccctgatgttgaagccctaatagccaacgtggatgagcagctcggtctacgtgataatgatgatgacaaagatgaaagctcggacacatcgcccacgccagccgtgtcatgggacatggtgtcgactgggtctgcgagctcagatccgaccagctacggcgcgactacgcctgacaagacaacatcagtgtcagccgcgacttcgcaattaccttctctaataggaggtagcatagaaacttcctcgacgagtacgcaacgaccaacgctgatatctgcagcggaaacattccaagatattagacttcgatatgatcagctcgccgaaggtatcggcggtctaggattctggtcgcaagcgtaccctcaccagtctcgccttgttctggcatatgttctggaagcatttgcagaactgggctgcgatttgcgaaagatttcggcaggagatgaaattccccaagtacaaggagtgctagaacgacatacgcgcctcattcaacaactactacgtgttgtcgagcagggcaagctcatcttcaagtctacagatcaatcttttgcgcgaacagaaacacctgttgaccatacgagcgcacagactatttaccaacagattattgacctctatccacaacatgcaaatgttaacaaacttgtgcgcattgtcggttcgaacttggcagcttgcttgaccggtaagacagatggtatacagaccgtgtttgggaacaaggaagccaagaaaatactcgaagacatatatgccttttggccccttttcaggacgcccacactggtactaggtgatttcttgactagagcaatgacaaatgcgaccgggggtggtaagtttaggattttggaggtaggcgctggaacaggtggcaccactggatatttagtcaaccttctaagaaaccacggtatccccttcgaatatgtcttcactgatatttcgtcgtcacttgtggcagctggccgacagaagtttaaggggattgagggcatggcttttgaagtactagacattgagcaggcgccaaaggtggagcatcgccaggcattccactgcatcctcgcgagcaacacgatacacgcaactcgcgatctagatatttcacttcgtcatttgcggacaatgctccgcgcggatggtgccttgacacttatcgaaattacaagacaggttttctggcttgatctggtcttcggtcaatttgaaggatggtggctgtttgaagatggccgagcgcacgcattgatgaacgaagaggactgggagagccgaatgcgagcagctggctttggccaggtcttatggtctgacggtccttcaccggagtcgaagacagttcgtactatcgcagcctttccgtcctcgtcccctgatagtatacctttagctatcaagtcctctagccggaaggctgtgaagagtcccgccagcactgtcaaggttgcattggagacagttgtatacaagcgagtaggagatctcgaaatacacgccgacgtatactatcctgttggcggaaagctaccgaagaggaaaatgccagttgcattgatgattcacgggggcagccatattatgtttactagaaaggatgtgcgcccgccacagacgcggctccttatagagagaggatttctgccagttgccttagaccaccggctctgccctgaaatttcgctcctcgatggtccaatgacagatgtctgcgacgcactcgagtgggcccgcaatactctgcccaccctcaagctgaaaagagccggattaccaatcaatggcgagaaagtggttgttattggatggtcttcaggtggccagctcgcgatgtcaaccgcatggcaagctccacgacgcggtctacggccgcccgaggcgatcctcgcgatgtactgtccaaccaactacgaagatgagtggtggcggaatccaatccagcctgttggagcggaagacacgggaatgaaatacgacgtactcgaagccgtccaggaagccccaataacgagctacggcatcttgggcgcgtgggagcccctctcagaccctcgcctcttgaccgatgctcgcgctcgaattgtgcttcatatcaattggaaagctcaaacactgccaattatcataggagggctgccgaccaggaagacggcggatgcgacgactcttgatggcagagactggaacgctcttccccagccgtcgctggaggcaatcagagccgtgagccccatggcgcaaatccgtgccggtaattatagcacacccactttcttgattcacggcactgccgacgacctgattccctggcagcagagccaaggcacctatgaagaaatggtcgctaggggcatccccgtcgaattggccctggtcgaaggagcaccgcatatcacagacctgagcagtgatcccgactcggaaggttggcaagcagcgcttcagggatacgacttcatttgttcttacgtattctga

SEQ ID NO: 29213 - protein, 2532 aa, Muscodor strobelii
  misc_feature: SGI Peptide ID NO. 570030
  misc_feature (905)..(1229): Pfam Id: PF00698 Pfam Desc: Acyl transferase domain
  misc_feature (381)..(627): Pfam Id: PF00109 Pfam Desc: Beta-ketoacyl synthase, N-terminal domain
  misc_feature (635)..(752): Pfam Id: PF02801 Pfam Desc: Beta-ketoacyl synthase, C-terminal domain
  misc_feature (1991)..(2093): Pfam Id: PF08241 Pfam Desc: Methyltransferase domain
  misc_feature (1991)..(2091): Pfam Id: PF08242 Pfam Desc: Methyltransferase domain
  misc_feature (1647)..(1713): Pfam Id: PF00550 Pfam Desc: Phosphopantetheine attachment site
  misc_feature (967)..(1023): Pfam Id: PF00698 Pfam Desc: Acyl transferase domain
  misc_feature (538)..(576): Pfam Id: PF00108 Pfam Desc: Thiolase, N-terminal domain
  misc_feature (546)..(2531): NCBI GI: 121711976 Blast Desc: polyketide synthase, [Aspergillus clavatus NRRL 1] gi|119401755|gb|EAW12177.1| polyketide synthase, [Aspergillus clavatus NRRL 1]
  misc_feature (8)..(2527): NCBI GI: 67540556 Blast Desc: AN6448.2 [Aspergillus nidulans FGSC A4] gi|40739280|gb|EAA58470.1| AN6448.2 [Aspergillus nidulans FGSC A4] gi|259479323|tpe|CBF69451.1| TPA: polyketide synthase, (JCVI)
  misc_feature (8)..(2527): NCBI GI: 116204489 Blast Desc: CHGG_10128 [Chaetomium globosum CBS 148.51] gi|88176256|gb|EAQ83724.1| CHGG_10128 [Chaetomium globosum CBS 148.51]
  misc_feature (10)..(2164): NCBI GI: 242821846 Blast Desc: polyketide synthase, [Talaromyces stipitatus ATCC 10500] gi|218712685|gb|EED12110.1| polyketide synthase, [Talaromyces stipitatus ATCC 10500]
  misc_feature (11)..(2531): NCBI GI: 67902792 Blast Desc: AN8383.2 [Aspergillus nidulans FGSC A4] gi|40747849|gb|EAA67005.1| AN8383.2 [Aspergillus nidulans FGSC A4] gi|259484315|tpe|CBF80428.1| TPA: polyketide synthase, (JCVI)
  misc_feature (134)..(2523): NCBI GI: 115385671 Blast Desc: ATEG_10080 [Aspergillus terreus NIH2624] gi|114187829|gb|EAU29529.1| ATEG_10080 [Aspergillus terreus NIH2624]
  misc_feature (23)..(2530): NCBI GI: 171683708 Blast Desc: protein product [Podospora anserina] gi|170941814|emb|CAP67467.1| protein product [Podospora anserina]
  misc_feature (8)..(2165): NCBI GI: 240109915 Blast Desc: polyketide synthase, [Coccidioides posadasii C735 delta SOWgp]
  misc_feature (1)..(2163): NCBI GI: 238841419 Blast Desc: polyketide synthase [Microsporum canis CBS 113480]
  misc_feature (10)..(2193): NCBI GI: 242821914 Blast Desc: polyketide synthase, [Talaromyces stipitatus ATCC 10500] gi|218712699|gb|EED12124.1| polyketide synthase, [Talaromyces stipitatus ATCC 10500]
  misc_feature: Useful for fungicidal and/or biocontrol applications
  misc_feature: Useful for introducing or modulating the production of volatile compounds
MTSASDLPSLLVFGSHTKLPPAEILEELRQDLETTQQLSALKEAVRDLPRFWSALSESDPELRDVPGARNFSEVSHWLENGGTFPHSQSDAPNHITLAVTLLLHISQYSRYLHSLGKDAHSRLLCSIHAGGVQGLCSGFLSSVAVASAETEKDLGSTAAVALRLAVCIGAYVDRDGIYSQSPEKYSCVAIRWKEANTGSRDEIDNIVQSLPSAYISSFNDDTCVTITLRTSDVDRLNQLAHASSLRSMPVSVHGRFHTRNHTKAAHRLAQFISQSPDLTLLAAEKLFAPVRSAVNGTILDSGSLAQHIIDNTLLEVADWNSTIRAGVNQLPTHSRKFAAFAGFGNHIPQTLVQATSLEVLMLSKLGTKNASMQPRPEYPAHSIAIVGMAGRFPGADTVDELWDLLIEGKSTVEPAPVERLGLSQTDEFANTKWWGNFIRDPDAFDHKFFKKSSREALAWDPQQRYAHRILLEVIYTALEASGYFGPSSSKRPKDYGCYIGACISNYYDNVSCHAPTAYATMGTTRGFISGCMSHYFGWTGPALTIDTACSSSLVAINTACRAIWSGECSRAVAGGTNVISSPFDYHNLSAAGFLSPDGQCKSFDVNANGYCRGEGVAVVVLKRLSDAIKDGDDILGVIAGSAANQNHNESLITVPHSGSQTALYKDVLNLSGLPSETISYVEAHGTGTGVGDPVEVRSIREVFGGPQRDSLLHFASIKGNIGHTEGTAGVAGLIKVLLMMRHNRIPVQASHNMLNPKIPSLEPDLMAIPKEITSWEAPFKAACVNSYGAAGSNSALMILEKPVILSKAPQGTAGTSKWPLFISANSANSLAMYSKKLLELVRGGGAEVGPDMVASLTFNLASRANHALPHILATTVGSVAELTAKLENGSSSIQSIAVESRKPVILVFGGQESDFIGLSKDVYQSSRLFRHHLDACNALVVTQGLESFLSAIFDRTPMQNLVTLHTALFAVQYASAKAWIDSGLLVDAVVGHSFGQLTALCLSGVLSLSDAIALIAGRAKLMTKHWGDESGSMVFLQTSRETVERALQTLRAKDGGFYAEIACYNGPQSHVVVGSASSISAVEHHFASGQVTVRTKRLQVTHGFHSKFTEPMLNHLDSLAQKLSFQRPVIHLEPCDIDERVDDIDFRAIADHTRNAVFFQSAIERLAKRFPQGATWIEAGRGSSVVNLAKGCLPDAHAHTFLSPQLTTSDAQGSLINATLDLWRSGYSVQYWPFHRRQKFDYGPLYLPPYQFEKTRHWLPFTGNRTDKREATPVPVIVSDKHEILSFMRFNDKAQNGRRIFRIDPVADRFKVMLGGHVMAGQGLCPASLYYELVSRAAMFLERGANVSTHVPAVYDLIMKSPIGGDTHVNIILNLKRLDHSQHPSWSFSITTESINTGRKTHPFEVSTGTVCLKRRDDAQTMKEFKRFESLTGARRVEEVLSHPDAEMMQGKHIYRAFTTVVYYGPPFHGVKQIASLGMEAAGKVTITPDDGPDDQRLCDTPMTDSFMQLAGFLVNYFNNASTEDVFVCGHIEHIELGGSFDPDARNWIVYATMEQSGETIMTADAYVFEATSKKMVMAIFGLKFNRMPQAALGRMLQSVNKPRIAAPVPSQALAAHIPSIAEEQSMSAPVRASSDKAQCRTNSKRTELLKLLSEITDVSLQDINTESSLEDLGIDSLMATEVLNNIRSALGVTIDLTTFTFFPDVEALIANVDEQLGLRDNDDDKDESSDTSPTPAVSWDMVSTGSASSDPTSYGATTPDKTTSVSAATSQLPSLIGGSIETSSTSTQRPTLISAAETFQDIRLRYDQLAEGIGGLGFWSQAYPHQSRLVLAYVLEAFAELGCDLRKISAGDEIPQVQGVLERHTRLIQQLLRVVEQGKLIFKSTDQSFARTETPVDHTSAQTIYQQIIDLYPQHANVNKLVRIVGSNLAACLTGKTDGIQTVFGNKEAKKILEDIYAFWPLFRTPTLVLGDFLTRAMTNATGGGKFRILEVGAGTGGTTGYLVNLLRNHGIPFEYVFTDISSSLVAAGRQKFKGIEGMAFEVLDIEQAPKVEHRQAFHCILASNTIHATRDLDISLRHLRTMLRADGALTLIEITRQVFWLDLVFGQFEGWWLFEDGRAHALMNEEDWESRMRAAGFGQVLWSDGPSPESKTVRTIAAFPSSSPDSIPLAIKSSSRKAVKSPASTVKVALETVVYKRVGDLEIHADVYYPVGGKLPKRKMPVALMIHGGSHIMFTRKDVRPPQTRLLIERGFLPVALDHRLCPEISLLDGPMTDVCDALEWARNTLPTLKLKRAGLPINGEKVVVIGWSSGGQLAMSTAWQAPRRGLRPPEAILAMYCPTNYEDEWWRNPIQPVGAEDTGMKYDVLEAVQEAPITSYGILGAWEPLSDPRLLTDARARIVLHINWKAQTLPIIIGGLPTRKTADATTLDGRDWNALPQPSLEAIRAVSPMAQIRAGNYSTPTFLIHGTADDLIPWQQSQGTYEEMVARGIPVELALVEGAPHITDLSSDPDSEGWQAALQGYDFICSYVF

SEQ ID NO: 29214 - DNA, 8149 bp, Muscodor strobelii; identical to SEQ ID NO: 29211
  misc_feature: SGI EST ID NO. CUFF.69153.0
  misc_feature: Variant of the nucleotide sequence at SEQ ID NO 29212

SEQ ID NO: 29215 - DNA, 954 bp, Muscodor strobelii
  misc_feature: SGI cDNA ID NO. 570031
  misc_feature: Elevated expression when VOC is produced
  misc_feature: Encodes the peptide sequence at SEQ ID NO 29216
atgtcacggctttccgctcttatatccgttctaagacacgaggtatctgggttggaaaagcaacacagcttggatgaggatgagctggcacagcgtagagtggtatccctgatcagcttttccatcaaattccaagagatttgtctgactcgagatacttgttggagcccaactcaagagcctccagcttcgaatatcagcgatgggattgattttgaacgcctcaagatcgatctcctcacccactcgcgacctatttcagaggacgagccgtttggtgttttatgtgtcgcattaagaattgctgtcgacgcaaaacatcacgagcggcggactgctgcagtcctaagcggcattgaagtgccatcattcaacttctgccgcgatcacgaacgcattgagacgcgaattggcgctattgtgacaaagtggcttgcgtccacacctccttccgcactctcttcgacacctcattgcgaactacgagtcttggcagtgctcattactctcggcacgaggattcagctattcaaaaccgcatcgcatcacagcgacaagtccaaattcttcggtgtcctcgcgcacgaatgtcgagaagaaagcgttgccagtgctttcgacatgtgtgacttgttgcgagtcgctgaagtgcgccgttccgataacattgccatatatcgcgaggcaagtttctacttaatgcccgctttgttcttggctaccgaggctctgatcgccgctatcgaagctagcgggcaggagaccccgagaggaatatcacacagatacgttgagatccgccaaggtgctagtatgatacttgatatcatggatgcatgcaaaaatgaagcaggatcatatacagattccattctgaagttccgtctctctctagaatcattcgaggataaacctaccttgcatacagccttctcagcaagcagatactcttga

SEQ ID NO: 29216 - protein, 317 aa, Muscodor strobelii
  misc_feature: SGI Peptide ID NO. 570031
  misc_feature (92)..(291): NCBI GI: 212529768 Blast Desc: PMAA_033330 [Penicillium marneffei ATCC 18224] gi|210074439|gb|EEA28526.1| PMAA_033330 [Penicillium marneffei ATCC 18224]
  misc_feature (185)..(302): NCBI GI: 238844399 Blast Desc: conserved [Microsporum canis CBS 113480]
  misc_feature: Useful for introducing or modulating the production of volatile compounds
MSRLSALISVLRHEVSGLEKQHSLDEDELAQRRVVSLISFSIKFQEICLTRDTCWSPTQEPPASNISDGIDFERLKIDLLTHSRPISEDEPFGVLCVALRIAVDAKHHERRTAAVLSGIEVPSFNFCRDHERIETRIGAIVTKWLASTPPSALSSTPHCELRVLAVLITLGTRIQLFKTASHHSDKSKFFGVLAHECREESVASAFDMCDLLRVAEVRRSDNIAIYREASFYLMPALFLATEALIAAIEASGQETPRGISHRYVEIRQGASMILDIMDACKNEAGSYTDSILKFRLSLESFEDKPTLHTAFSASRYS

SEQ ID NO: 29217 - DNA, 2633 bp, Muscodor strobelii
  misc_feature: SGI EST ID NO. CUFF.69059.0
  misc_feature: Variant of the nucleotide sequence at SEQ ID NO 29215
cgacgtcactgcgtgcttcataacattcctctatactataaacttagagaaccggacttgactccgatcctagagcttcaggaattcacacatttgtttcattacgtcacgggaacactgactaccatgcgaccatgcgaactgcacagacacacagacaaggttcaaatccctataatcacggcacgcgcaacatgggtcctgatctgttttggcgaggaatcaaatttgactggaaacctcgaacaagtgtttttagtaagaagcttggggctttctgtctaaagataataccgacaatggctatggagccgagtttcttaagacgatgatcttgaactacttacatctcccccctgtattagtcgtatcttacaacattcgatttaattccggtctcgcctgtgggtatgtgtaggactggcctgcaggacaacgaccgccttgatatcttagctgcattatcacacgcttcttggcaattggtcacatctaaatcatgatacccggtacttccgtatctgggtgtgcctgctgaatcatttcaaaccgatggacgactattatctcacttccgcggcggtctaatacggaacattgagcccgccttctggcccaattactgctcctcaatattccgccttattgcaccatggccacggcatataatcgggctatacaaaactcacaggaacccgcagtgtcaagtgtctccattaactcgctagccagctcgctcagacgcacgacatgtgatgtctgtcgtgaaagaaaagtcaggtgcgaccgtacaaagccagagtgcttgagatgtaagaggttcggtagcgtctgcacatattcggcattagacaccgatgcagcgagaatccagaaagctttgaatagcctgtctaaaagactcgaggaagccgagagtagacttcagtcgcaacaatctgtggtgcaatgtgtgtcgccaccatctcaagggcccgtgccagaattgaatgcttctaaagcgccatcattgcactattcaactggcaatgatgtgggttacgaatggaattgtggaaaccagcccacaatcgactttatactaccagacgggatgatctttggccatgattttcctacaagcattgaatcggaacatacgtcgggcacaatcactgttgcaggggaacccagccttcagctacagattggtcatgagcctatcacaacaaagacgacagacaatggggcaagtctctcaagcaattgtcctggaacttacccaatatcaagcgaggaatctgataggatgttcgagagttacttcactgtggttcaaaggcacttgccgctcgtggataaagaggctttcttgcggagtttgcaacaatcttcagcaacgcatcagatcttagccttgaaatacgctatttgcatgtctggggcacaagcaactctgtcagatatctgtacaaaagaacaatattacacagcagcgcggcatcatctggaagaagcagagttagggtcggataaatcaactttctggagtattgaagccgcgcaggctctcgtgttagtaacacgctttgaatttgagcatttcaccagtgcccgcgctcttgttagcatgtcacggctttccgctcttatatccgttctaagacacgaggtatctgggttggaaaagcaacacagcttggatgaggatgagctggcacagcgtagagtggtatccctgatcagcttttccatcaaattccaagagatttgtctgactcgagatacttgttggagcccaactcaagagcctccagcttcgaatatcagcgatgggattgattttgaacgcctcaagatcgatctcctcacccactcgcgacctatttcagaggacgagccgtttggtgttttatgtgtcgcattaagaattgctgtcgacgcaaaacatcacgagcggcggactgctgcagtcctaagcggcattgaagtgccatcattcaacttctgccgcgatcacgaacgcattgagacgcgaattggcgctattgtgacaaagtggcttgcgtccacacctccttccgcactctcttcgacacctcattgcgaactacgagtcttggcagtgctcattactctcggcacgaggattcagctattcaaaaccgcatcgcatcacagcgacaagtccaaattcttcggtgtcctcgcgcacgaatgtcgagaagaaagcgttgccagtgctttcgacatgtgtgacttgttgcgagtcgctgaagtgcgccgttccgataacattgccatatatcgcgaggcaagtttctacttaatgcccgctttgttcttggctaccgaggctctgatcgccgctatcgaagctagcgggcaggagaccccgagaggaatatcacacagatacgttgagatccgccaaggtgctagtatgatacttgatatcatggatgcatgcaaaaatgaagcaggatcatatacagattccattctgaagttccgtctctctctagaatcattcgaggataaacctaccttgcatacagccttctcagcaagcagatactcttgagagctatgccaacttcgacaaatagtaaaatgctaaataataaagacttgatgacacaagtttcccgcgc

SEQ ID NO: 29218 - DNA, 915 bp, Muscodor strobelii
  misc_feature: SGI cDNA ID NO. 570032
  misc_feature: Elevated expression when VOC is produced
  misc_feature: Encodes the peptide sequence at SEQ ID NO 29219
atggctacctccaagatgcccgtgaagactagagaggtacacaatcagtttcaggattcgaccatctggaatgacttcaagtacaggccagatgatgtcgtcatcgctacgcattcgaaatcaggcacaacatggatgcaacagatagtttcacagttgatacaccagggtgccccgactgtctcacctgcggccatatctccctgggttgagtttcgtgcagcaccgcgcgaaatgacatatcaactattagaagcccaaggtcatcgacgcttcatcaaaacgcatttgccagcggacgcaatagcctggagtacagaagcgaaatatatctttgtggcacgtgacacacgtgatgctgtatggagcatgcataatcacttcttcacagtcaaagacgcatactatgacatgatcaatggcatgcgaggtgacgtgggacccgccgttgagcgaccaacagaaaaccctcgcgacatgtttatggaactcgtcaatgacgatattcctgcgagaatgacctggccctattggaacctcatgcgctcttggtgggagcggcgcgatcagcccaacgtgctcttcgtccacttcaacgatctcaagaaagacctcgacggcgagatgcgcagagtggcaaaattccttgaggtacccgagttgtctgacgataaatgggctgatgctgttgagcactgtacttttgattggatgaaggcccacgcagacctctccgcgccgaaggtgtcgagcatcatcttcaaagaaggagcaacgaacttctttaacaaaggcacaaatggccgatggaccgacgtcctgtctaaggaggacattcagcgatatgaggaaaagtctcaaaaggaacttggagaagagtgtactcgatggcttgagaatggtcgattgcaatga

SEQ ID NO: 29219 - protein, 304 aa, Muscodor strobelii
  misc_feature: SGI Peptide ID NO. 570032
  misc_feature (30)..(294): Pfam Id: PF00685 Pfam Desc: Sulfotransferase domain
  misc_feature (5)..(301): NCBI GI: 46112771 Blast Desc: FG02887.1 [Gibberella zeae PH-1]
  misc_feature (1)..(303): NCBI GI: 119945521 Blast Desc: sulfotransferase [Psychromonas ingrahamii 37] gi|119864125|gb|ABM03602.1| sulfotransferase [Psychromonas ingrahamii 37]
  misc_feature (7)..(301): NCBI GI: 154252751 Blast Desc: sulfotransferase [Parvibaculum lavamentivorans DS-1] gi|154156701|gb|ABS63918.1| sulfotransferase [Parvibaculum lavamentivorans DS-1]
  misc_feature (7)..(298): NCBI GI: 255062256 Blast Desc: sulfotransferase [Nitrosomonas sp. AL212] gi|254981964|gb|EET33073.1| sulfotransferase [Nitrosomonas sp. AL212]
  misc_feature (1)..(304): NCBI GI: 77163623 Blast Desc: sulfotransferase [Nitrosococcus oceani ATCC 19707] gi|254436255|ref|ZP_05049762.1| Sulfotransferase domain superfamily [Nitrosococcus oceani AFC27] Sulfotransferase oceani
  misc_feature (7)..(302): NCBI GI: 159479122 Blast Desc: CHLREDRAFT_151050 [Chlamydomonas reinhardtii] gi|158274257|gb|EDP00041.1| [Chlamydomonas reinhardtii]
  misc_feature (2)..(303): NCBI GI: 262198266 Blast Desc: sulfotransferase [Haliangium ochraceum DSM 14365] gi|262081613|gb|ACY17582.1| sulfotransferase [Haliangium ochraceum DSM 14365]
  misc_feature (8)..(301): NCBI GI: 116057677 Blast Desc: Sulfotransferase (ISS) [Ostreococcus tauri]
  misc_feature (8)..(301): NCBI GI: 255073451 Blast Desc: [Micromonas sp. RCC299] gi|226515663|gb|ACO61658.1| [Micromonas sp. RCC299]
  misc_feature (5)..(301): NCBI GI: 285019552 Blast Desc: sulfotransferase protein [Xanthomonas albilineans] gi|283474770|emb|CBA17269.1| sulfotransferase protein [Xanthomonas albilineans]
  misc_feature (26)..(297): SWISSPROT Homolog: EC 2.8.2.4 Estrone sulfotransferase
  misc_feature: Useful for introducing or modulating the production of volatile compounds
MATSKMPVKTREVHNQFQDSTIWNDFKYRPDDVVIATHSKSGTTWMQQIVSQLIHQGAPTVSPAAISPWVEFRAAPREMTYQLLEAQGHRRFIKTHLPADAIAWSTEAKYIFVARDTRDAVWSMHNHFFTVKDAYYDMINGMRGDVGPAVERPTENPRDMFMELVNDDIPARMTWPYWNLMRSWWERRDQPNVLFVHFNDLKKDLDGEMRRVAKFLEVPELSDDKWADAVEHCTFDWMKAHADLSAPKVSSIIFKEGATNFFNKGTNGRWTDVLSKEDIQRYEEKSQKELGEECTRWLENGRLQ

SEQ ID NO: 29220 - DNA, 2411 bp, Muscodor strobelii
  misc_feature: SGI EST ID NO. CUFF.69118.0
  misc_feature: Variant of the nucleotide sequence at SEQ ID NO 29218
cgattcctatcgccgctgcaatttcatcgacacatcctaagtttctctaatctcgctgcacgatcacgtgtcttccattggcttagcatgactagatatgaacatgatctctacttgcaagagagatatccatgcttcgaaattcaagtttcgccgaagacatccaattatattattgatcagataagctctatcgccattacatactttacacatcatctctaactaacgtcccgaatttttcaaactcaacgaggtctttggctcaaatcgagctgtcacgatcttcttgcatattattgtccccgttgcaaggtccccgtctcgggggtggtgtatgctggcgtcgcttccatctcacttttcacgaatcattcctcactgtacgcgccttgacctgctgtcttgttctacaactgcttataagtataccttcctacatcaaagcctggcactgctatgtgaagtccagcatgaagcgaagatgctgtcgtgatattcagtgtgcagtgcagttggcagccagctggtatcgtcctggcacataaagagacgtctgattggtatgatgtatctgctcgggtagtttccgagcaccacccgaaagaccttgatgcagcttctcgggcgcagaaccgagcgcgaccgtattcgtcggtagaatttccgtgttttcgtcctcgggcagcgatatcaatatacagactgcggtggatggcaactgtaaacattcgacatcctgcacgactatgctgcttcgggatcgtccgcaccgatagggaagaagtgcacggaggcatgacactatgttttctgtctagaatggaatcggtatatgattaaaatagacgtaactaaagcatcccttccatgttttggacgctacattatactggttcatctttcacgttatgtgcaacaatagatgagcgatctcatcttctctgacaacccctaactttaaatcttctgactaatctgcattgtgagaattgggtctaaaaatggctacctccaagatgcccgtgaagactagagaggtacacaatcagtttcaggattcgaccatctggaatgacttcaagtacaggccagatgatgtcgtcatcgctacgcattcgaaatcaggcacaacatggatgcaacagatagtttcacagttgatacaccagggtgccccgactgtctcacctgcggccatatctccctgggttgagtttcgtgcagcaccgcgcgaaatgacatatcaactattagaagcccaaggtcatcgacgcttcatcaaaacgcatttgccagcggacgcaatagcctggagtacagaagcgaaatatatctttgtggcacgtgacacacgtgatgctgtatggagcatgcataatcacttcttcacagtcaaagacgcatactatgacatgatcaatggcatgcgaggtgacgtgggacccgccgttgagcgaccaacagaaaaccctcgcgacatgtttatggaactcgtcaatgacgatattcctgcgagaatgacctggccctattggaacctcatgcgctcttggtgggagcggcgcgatcagcccaacgtgctcttcgtccacttcaacgatctcaagaaagacctcgacggcgagatgcgcagagtggcaaaattccttgaggtacccgagttgtctgacgataaatgggctgatgctgttgagcactgtacttttgattggatgaaggcccacgcagacctctccgcgccgaaggtgtcgagcatcatcttcaaagaaggagcaacgaacttctttaacaaaggcacaaatggccgatggaccgacgtcctgtctaaggaggacattcagcgatatgaggaaaagtctcaaaaggaacttggagaagagtgtactcgatggcttgagaatggtcgattgcaatgattctgctcaagctgttgtttgaagatttggtacgatgcctttacacaatttgcgtttcattcccaacccttccgatagacaccgagtacaattgacgaacttcgtgatgagtgtaaacacatgaccacgtctatcgttattctgtctagtagatggtatcaaatcggactcaggttaaacgataagctccatggtataataatacgcctatggcaaacgtctatcctcagaatagcctgtacagtagtagcgacatcttgctagctttctgattctatgacatgcgtattgctcctgatttactcattgccatcttcccacacttctccagtctagtcgttcctctcacagcctcgcactatcagaaccgatgaccggcccacccatgataatgggcttcgcatcagtgaaattcggcacgtctgcaaagatggcagctcctccaggagacgtcgttccctcggtacacttctcggcgctctcccatttcag

SEQ ID NO: 29221 - DNA, 321 bp, Muscodor strobelii
  misc_feature: SGI cDNA ID NO. 570033
  misc_feature: Encodes the peptide sequence at SEQ ID NO 29222
atggcaccctatgttttgacagtcatgtacccgaccggggccaagttcgacaccgactactacctgtctacgcatatgccccttgtcaaaaaaacatggacccctttcggccttttgggttacgaggttacccagtaccagagcgaaggcgctgtgtataacgtacgagccgatctgaaatgggagagcgccgagaagtgtaccgagggaacgacgtctcctggaggagctgccatctttgcagacgtgccgaatttcactgatgcgaagcccattatcatgggtgggccggtcatcggttctgatagtgcgaggctgtga

SEQ ID NO: 29222 - protein, 106 aa, Muscodor strobelii
  misc_feature: SGI Peptide ID NO. 570033
  misc_feature (1)..(101): Pfam Id: PF07110 Pfam Desc: EthD protein
  misc_feature (1)..(88): Pfam Id: PF07110 Pfam Desc: EthD protein
  misc_feature (6)..(103): NCBI GI: 46114568 Blast Desc: FG03126.1 [Gibberella zeae PH-1]
  misc_feature (6)..(103): NCBI GI: 256723280 Blast Desc: NECHADRAFT_51984 [Nectria haematococca mpVI 77-13-4]
  misc_feature (4)..(96): NCBI GI: 255954115 Blast Desc: Pc21g07700 [Penicillium chrysogenum Wisconsin 54-1255] gi|211589521|emb|CAP95667.1| Pc21g07700 [Penicillium chrysogenum Wisconsin 54-1255]
  misc_feature (7)..(94): NCBI GI: 145240575 Blast Desc: An08g08200 [Aspergillus niger] gi|134077457|emb|CAK40022.1| protein product [Aspergillus niger]
  misc_feature (1)..(98): NCBI GI: 261352864 Blast Desc: VDBG_01401 [Verticillium albo-atrum VaMs.102]
  misc_feature (6)..(101): NCBI GI: 256724477 Blast Desc: NECHADRAFT_54660 [Nectria haematococca mpVI 77-13-4]
  misc_feature (4)..(99): NCBI GI: 156063824 Blast Desc: [Sclerotinia sclerotiorum 1980] gi|154697364|gb|EDN97102.1| [Sclerotinia sclerotiorum 1980]
  misc_feature (4)..(105): NCBI GI: 145249142 Blast Desc: An14g02850 [Aspergillus niger] gi|134081587|emb|CAK41996.1| protein product [Aspergillus niger]
  misc_feature (8)..(100): NCBI GI: 189203573 Blast Desc: conserved [Pyrenophora tritici-repentis Pt-1C-BFP] gi|187985221|gb|EDU50709.1| conserved [Pyrenophora tritici-repentis Pt-1C-BFP]
  misc_feature (5)..(93): NCBI GI: 188582009 Blast Desc: Ethyl tert-butyl ether degradation EthD [Methylobacterium populi BJ001] gi|179345507|gb|ACB80919.1| Ethyl tert-butyl ether degradation EthD [Methylobacterium populi BJ001]
MAPYVLTVMYPTGAKFDTDYYLSTHMPLVKKTWTPFGLLGYEVTQYQSEGAVYNVRADLKWESAEKCTEGTTSPGGAAIFADVPNFTDAKPIIMGGPVIGSDSARL

SEQ ID NO: 29223 - DNA, 1841 bp, Muscodor strobelii
  misc_feature: SGI EST ID NO. CUFF.69119.2
  misc_feature: Variant of the nucleotide sequence at SEQ ID NO 29221
gttgtcctgtgcccatgggtgacaaatcaatgcaaccaggtcttaacgccggccaaatggcgttacaggcacagaaagctagcctcgagatattcggatgtctctgaataacaaaatttaactcgtgcaatgaccattgttgtacactatggagtatgcctcggtaatgacgttgcaggagcggggacgagaatatgggtcttgcctatggtttataagagggactcgctgcacgacaggatagttcctctttacaggaatagtcgagcgtagaatctgttcgaacgtcgaagcatacataaacagcaccattatggcaccctatgttttgacagtcatgtacccgaccggggccaagttcgacaccgactactacctgtctacgcatatgccccttgtcaaaaaaacatggacccctttcggccttttgggttacgaggttacccagtaccagagcgaaggcgctgtgtataacgtacgagccgatctgaaatgggagagcgccgagaagtgtaccgagggaacgacgtctcctggaggagctgccatctttgcagacgtgccgaatttcactgatgcgaagcccattatcatgggtgggccggtcatcggttctgatagtgcgaggctgtgagaggaacgactagactggagaagtgtgggaagatggcaatgagtaaatcaggagcaatacgcatgtcatagaatcagaaagctagcaagatgtcgctactactgtacaggctattctgaggatagacgtttgccataggcgtattattataccatggagcttatcgtttaacctgagtccgatttgataccatctactagacagaataacgatagacgtggtcatgtgtttacactcatcacgaagttcgtcaattgtactcggtgtctatcggaagggttgggaatgaaacgcaaattgtgtaaaggcatcgtaccaaatcttcaaacaacagcttgagcagaatcattgcaatcgaccattctcaagccatcgagtacactcttctccaagttccttttgagacttttcctcatatcgctgaatgtcctccttagacaggacgtcggtccatcggccatttgtgcctttgttaactatgggaagtttagcaacgatttcttacacatggcatatcataccaagtcaaatttaggatactagaatcgcttacagaagttcgttgctccttctttgaagatgatgctcgacaccttcggcgcggagaggtctgcgtgggccttcatccaatcaaaagtacagtgctcaacagcatcagcccatttatcgtcagacaactcgggtacctcaaggaattttgccactctgcgcatctcgccgtcgaggtctttcttgagatcgttgaagtggacgaagagcacgttgggctgatcgcgccgctcccaccaagagcgcatgaggttccaatagggccaggtcattctcgcaggaatatcgtcattgacgagttccataaacatgtcgcgagggttttctgttggtcgctcaacggcgggtcccacgtcacctcgcatgccattgatcatgtcatagtatgcgtctttgactgtgaagaagtgattatgcatgctccatacagcatcacgtgtgtcacgtgccacaaagatatatttcgcttctgtactccaggctattgcgtccgctggcaaatgcgttttgatgaagcgtcgatgaccttgggcttctaatagttgatatgtcatttcgcgcggtgctgcacgaaactcaacccagggagatatggccgcaggtgagacagtcggggcaccctggtgtatcaactgtgaaactatctgttgcatccact

SEQ ID NO: 29224 - DNA, 1749 bp, Muscodor strobelii
  misc_feature: SGI cDNA ID NO. 570034
  misc_feature: Encodes the peptide sequence at SEQ ID NO 29225
atggttcttggagtctatcgcgcagtcgacccttcgatatatagcgatgtgtatccggaagaccccggtccgcgcatccgcgagatcgcagacctagtgattgagtggtatcagctgctaattgacatgcgatacatcgacgcagagatggtcgagttcgcacctcacaagcataatcccatcaacctccaaaaagtcgcagaactcggcttgaccaaagacgcagtagatctgtatcaaatgatcccttatcatgttcagggcattgactactttccggggcatgatcacacaaactggaacttcggttcagatggcggagaattcctcatgtggggtgaatcgttggaagatatgaggaaatctgatgcggattggtggcggactgctgttgatcccttttacaatctggaagatctcagtccttggcacaatcctaacactcgggctcctgacgccgctactcggggttgggacgacgagaatggcccatacatgcgaccatggtatgtgacactcaccgaagttgggaatcatggtagtgtcatgatcctagataccaagacatttgagatgtggttgatcaaccagatgggaggcacggctgatccagctcttgcgggagttccaggaaagaagataaagaccgcaaatgagaatgacctcaatctcaccgccagtcgccctgcagccgaatttctacgtgatatgatatcacgatttcgcacattgagatggatacctggcgggctgtacaataacgattctggaaacaccgctgcgaatgacaggaacgacgacaacgacgcctgggacccctctgatgatgccggagaggcgacgaacgaggaggctgaggatgatggcatgagttccgaccgtcaatattacaaatactacaagcagctgtatgagcagtgcgggtggccagacaagtttaaccctgtgcttttcgatgaaaagcgacaagaaggcgggaaactttacagctattggaacagccgcccaaagccgtcggagaaagaacaggagtatagaccattaaagcatctgtacgatcacagcatggttcatgccagggagcgtgtgcagcagcagatccatcttgcggatgcgacatatcggctccaacacaagatgttcaacgataaacacgaagagcaaaggatcctgtcgcagaaactcaatgctgagtcttacttgatccctccattcgacgaaggtaaaattggacttacgaaagaggcagagttccggaaagcggatcttgaagccatgcgcacgcgctctggtcgctttgcggggccaggatgggctgggatctcggacgaggaacttgaaaagatatacaagaaagcgcaagaagacaccagactcgcgacagtggaagcgcagttacaggatgcaactatcagtgatcgaatcgaacgagagtatcgcgaagccaaagtcgccgctggtgcagttccaccggctgcatgggacgccatggcagcagactatgccacttgggagaatgacagttgggccgatcgctggtccatcctgggcagcgggacaacacttgttgatgtaaggactgtccttgatgaagacctgagcatggagcagctcgaagctcgaattgtgcacgaactcgaaaagaaggaggacagatcttggaggggaaagcgcatttggcggaatgacgacggaaaagtcgctaaagtccttgagcctccttcaaagaggacgagcataacttcttaa

SEQ ID NO: 29225 - protein, 582 aa, Muscodor strobelii
  misc_feature: SGI Peptide ID NO. 570034
  misc_feature (16)..(314): NCBI GI: 119483834 Blast Desc: NFIA_095430 [Neosartorya fischeri NRRL 181] gi|119409976|gb|EAW19923.1| NFIA_095430 [Neosartorya fischeri NRRL 181]
  misc_feature (43)..(319): NCBI GI: 154291198 Blast Desc: [Botryotinia fuckeliana B05.10] gi|150847038|gb|EDN22231.1| [Botryotinia fuckeliana B05.10]
  misc_feature (27)..(319): NCBI GI: 156056258 Blast Desc: [Sclerotinia sclerotiorum 1980] gi|154703265|gb|EDO03004.1| [Sclerotinia sclerotiorum 1980]
  misc_feature (26)..(322): NCBI GI: 238494978 Blast Desc: conserved [Aspergillus flavus NRRL3357] gi|220695375|gb|EED51718.1| conserved [Aspergillus flavus NRRL3357]
  misc_feature (25)..(219): NCBI GI: 116198935 Blast Desc: CHGG_07623 [Chaetomium globosum CBS 148.51] gi|88178902|gb|EAQ86370.1| CHGG_07623 [Chaetomium globosum CBS 148.51]
MVLGVYRAVDPSIYSDVYPEDPGPRIREIADLVIEWYQLLIDMRYIDAEMVEFAPHKHNPINLQKVAELGLTKDAVDLYQMIPYHVQGIDYFPGHDHTNWNFGSDGGEFLMWGESLEDMRKSDADWWRTAVDPFYNLEDLSPWHNPNTRAPDAATRGWDDENGPYMRPWYVTLTEVGNHGSVMILDTKTFEMWLINQMGGTADPALAGVPGKKIKTANENDLNLTASRPAAEFLRDMISRFRTLRWIPGGLYNNDSGNTAANDRNDDNDAWDPSDDAGEATNEEAEDDGMSSDRQYYKYYKQLYEQCGWPDKFNPVLFDEKRQEGGKLYSYWNSRPKPSEKEQEYRPLKHLYDHSMVHARERVQQQIHLADATYRLQHKMFNDKHEEQRILSQKLNAESYLIPPFDEGKIGLTKEAEFRKADLEAMRTRSGRFAGPGWAGISDEELEKIYKKAQEDTRLATVEAQLQDATISDRIEREYREAKVAAGAVPPAAWDAMAADYATWENDSWADRWSILGSGTTLVDVRTVLDEDLSMEQLEARIVHELEKKEDRSWRGKRIWRNDDGKVAKVLEPPSKRTSITS

SEQ ID NO: 29226 - DNA, 2607 bp, Muscodor strobelii
  misc_feature: SGI EST ID NO. CUFF.69087.0
  misc_feature: Variant of the nucleotide sequence at SEQ ID NO 29224
ctacgaaatacgaaatgccgtacagcatataaagaaatcatttactatgatttttttttaagctcgttcacagacgccgggtacagatagctcccactaggcagtggccatcggtgcctggcctgtggggcttcccgtggtaaaatctcagtgatgtttcagcattgccaggcccagaacgagtctccccgaaccacttgggaagatgagtatcagtagcattccgactacgtgcccaatcttatcatattctcagtgtgctctcatcgcggaaaacatggttcttggagtctatcgcgcagtcgacccttcgatatatagcgatgtgtatccggaagaccccggtccgcgcatccgcgagatcgcagacctagtgattgagtggtatcagctgctaattgacatgcgatacatcgacgcagagatggtcgagttcgcacctcacaagcataatcccatcaacctccaaaaagtcgcagaactcggcttgaccaaagacgcagtagatctgtatcaaatgatcccttatcatgttcagggcattgactactttccggggcatgatcacacaaactggaacttcggttcagatggcggagaattcctcatgtggggtgaatcgttggaagatatgaggaaatctgatgcggattggtggcggactgctgttgatcccttttacaatctggaagatctcagtccttggcacaatcctaacactcgggctcctgacgccgctactcggggttgggacgacgagaatggcccatacatgcgaccatggtatgtgacactcaccgaagttgggaatcatggtagtgtcatgatcctagataccaagacatttgagatgtggttgatcaaccagatgggaggcacggctgatccagctcttgcgggagttccaggaaagaagataaagaccgcaaatgagaatgacctcaatctcaccgccagtcgccctgcagccgaatttctacgtgatatgatatcacgatttcgcacattgagatggatacctggcgggctgtacaataacgattctggaaacaccgctgcgaatgacaggaacgacgacaacgacgcctgggacccctctgatgatgccggagaggcgacgaacgaggaggctgaggatgatggcatgagttccgaccgtcaatattacaaatactacaagcagctgtatgagcagtgcgggtggccagacaagtttaaccctgtgcttttcgatgaaaagcgacaagaaggcgggaaactttacagctattggaacagccgcccaaagccgtcggagaaagaacaggagtatagaccattaaagcatctgtacgatcacagcatggttcatgccagggagcgtgtgcagcagcagatccatcttgcggatgcgacatatcggctccaacacaagatgttcaacgataaacacgaagagcaaaggatcctgtcgcagaaactcaatgctgagtcttacttgatccctccattcgacgaaggtaaaattggacttacgaaagaggcagagttccggaaagcggatcttgaagccatgcgcacgcgctctggtcgctttgcggggccaggatgggctgggatctcggacgaggaacttgaaaagatatacaagaaagcgcaagaagacaccagactcgcgacagtggaagcgcagttacaggatgcaactatcagtgatcgaatcgaacgagagtatcgcgaagccaaagtcgccgctggtgcagttccaccggctgcatgggacgccatggcagcagactatgccacttgggagaatgacagttgggccgatcgctggtccatcctgggcagcgggacaacacttgttgatgtaaggactgtccttgatgaagacctgagcatggagcagctcgaagctcgaattgtgcacgaactcgaaaagaaggaggacagatcttggaggggaaagcgcatttggcggaatgacgacggaaaagtcgctaaagtccttgagcctccttcaaagaggacgagcataacttcttaacgactgattgaggacgacagcgtgtggtgatatatcagcaatgatacacttggatagaggtttgagcagatctactgggagcctctgcccattacatatacgcatgtactatcgccctacctccacgtatgcaccattgtatgcactcacggatcctcaggtgcaggcattacggccagaacaaaacgttctgcggacctcacgcttcttgacggccaaagttggtagaactaaactattgccgcattccgcataacttatcttattagacataattaaatccgatatctagaatattcctcttatatattatacacttcctatgcagccgttttcgcgccgagccctcaggtgttacagtacaggcactcgttaaagagccaacgcggccagcacagcgccgccgataacaccaattcccggataaaacgaaattccgtcattctgctcctgatggccggtcgtgtcggtgacatcaactgttgctcttgtctttgttgaggaggttgatgttgacctcgttgattctgttgaaccggtgaaacttgttgatcccttgagactcgtggagcctgtgaggc

SEQ ID NO: 29227 - DNA, 654 bp, Muscodor strobelii
  misc_feature: SGI cDNA ID NO. 570035
  misc_feature: Encodes the peptide sequence at SEQ ID NO 29228
atgcggacgcagaccctcattgcagccctcatcggcgctgtcactgccgatttggtatcgaatattcagcaagtcccctcatgtgcattcaattgctattgggccatcacggcaaacctcgaatgcggcgtgtcagatttcgtttgcgcattggccctctctttgactgccgatgtctgcaatgacgttagcaacaatccttcgaacgaacagtattctgcggcatctggagttatcacagctgccgtagggcagactggcaactctacgttcagctactcggtcacaagcggatcgcctaccaccattgcagctacgacgctcacgtacagcaacacgacgacctcaatttcgtcacttgtgatcaaccaggccgccgaaaccaacaccgctgcaacaaacacttccctgtcatcaaattcgacagcattcacggggtcaacgagcctcacaggctccacgagtctcaagggatcaacaagtttcaccggttcaacagaatcaacgaggtcaacatcaacctcctcaacaaagacaagagcaacagttgatgtcaccgacacgaccggccatcaggagcagaatgacggaatttcgttttatccgggaattggtgttatcggcggcgctgtgctggccgcgttggctctttaa

SEQ ID NO: 29228 - protein, 217 aa, Muscodor strobelii
  misc_feature: SGI Peptide ID NO. 570035
MRTQTLIAALIGAVTADLVSNIQQVPSCAFNCYWAITANLECGVSDFVCALALSLTADVCNDVSNNPSNEQYSAASGVITAAVGQTGNSTFSYSVTSGSPTTIAATTLTYSNTTTSISSLVINQAAETNTAATNTSLSSNSTAFTGSTSLTGSTSLKGSTSFTGSTESTRSTSTSSTKTRATVDVTDTTGHQEQNDGISFYPGIGVIGGAVLAALAL

SEQ ID NO: 29229 - DNA, 1347 bp, Muscodor strobelii
  misc_feature: SGI cDNA ID NO. 570036
  misc_feature: Elevated expression when VOC is produced
  misc_feature: Encodes the peptide sequence at SEQ ID NO 29230
atgggttccatcgacccttttactttctccatgtctgaatctaaaccccttgacctaacggtcttgggcatgaattcggggacgtcaatggacggtatcgattgcgcattgtgccgcttcagacaagcttctccggaagctccaatgcactttgaactgctgaaatacgacgaagtacctcttgagcagacgatcaagaaaagagtgatgaacatgattcttttcaacaagactacacctgaggaactttcagaggtgaacgtcatcctcggcgaagtattctcagctgctgctttgacgttctgtaaaaataacagtgtcgcaatcgactcgatagatgccattggatcacatggtcagactatatggctgttgagtatgccagaaaaggggcaagtgagatcagctcttacaatggctgagggatgtttcattgcttctcgaacaggcatcacaactgtcacggacttcagagtttcggatcaggccgctggtagacaaggtgcgcctctaatcgcattcttcgactcgctgatcctgcatcatcctaccaagtttcgtgcgtgtcagaatattggagggatcgccaatgtgtgcttcattcctccggacgttgatgggactctgaacgtcgagtttttcgacttcgatactggccctgggaatgtctttatagacgctgctgttcgatatttcaccaatggtgagcaggagtacgacaaagacggcaagatgggtcgagccggtagggtggatcaggatatcgtcgatgaatttctacgcacatttccctacttctcacttgacccacctaagacaacgggtcgcgaggtgtttcgtgatactgtcgcgcacgatcttattagaaaggggttggaaaaggggttatctccgaacgatgtcgttgcaacgatgacgcgtatcgcggcacaagctattgtggaacactacgaacgatatatgcccacgcagtatggaccactggcagagatttatatgtgtggtggtggggcaaagaaccccaatattactacgttcatgcaggcttcgttccctaacacacgcatcgtcatgctagacgaagctggcataccagcagatgcgaaagaagctgtgacattcgcgtggcaggggatggaggcaattgtggggagaagtatacctgttcctgatcgtgtggaggatagggctgagtatattttgggaaaaatcagtccaggtagaaattatcgcaaggttatgaggaagggggcggactttggcggcgatgcggagtggttaccacctgtgggcgagctggtgaactatgtagatgggaaagtgtttgataacaggtcgtcagcttaa

SEQ ID NO: 29230 - protein, 448 aa, Muscodor strobelii
  misc_feature: SGI Peptide ID NO. 570036
  misc_feature (19)..(407): Pfam Id: PF03702 Pfam Desc: Uncharacterised protein family (UPF0075)
  misc_feature (21)..(376): Pfam Id: PF03702 Pfam Desc: Uncharacterised protein family (UPF0075)
  misc_feature (8)..(445): NCBI GI: 70993050 Blast Desc: UPF0075 domain protein [Aspergillus fumigatus Af293] gi|66849007|gb|EAL89335.1| UPF0075 domain protein [Aspergillus fumigatus Af293]
  misc_feature (17)..(444): NCBI GI: 190610225 Blast Desc: levoglucosan kinase [Lipomyces starkeyi]
  misc_feature (4)..(445): NCBI GI: 242807317 Blast Desc: UPF0075 domain protein [Talaromyces stipitatus ATCC 10500] gi|218715555|gb|EED14977.1| UPF0075 domain protein [Talaromyces stipitatus ATCC 10500]
  misc_feature (12)..(445): NCBI GI: 119499666 Blast Desc: UPF0075 domain protein [Neosartorya fischeri NRRL 181] gi|119414755|gb|EAW24693.1| UPF0075 domain protein [Neosartorya fischeri NRRL 181]
  misc_feature (8)..(445): NCBI GI: 159125727 Blast Desc: UPF0075 domain protein [Aspergillus fumigatus A1163]
  misc_feature (13)..(445): NCBI GI: 67526083 Blast Desc: AN3499.2 [Aspergillus nidulans FGSC A4] gi|40739870|gb|EAA59060.1| AN3499.2 [Aspergillus nidulans FGSC A4] gi|259481989|tpe|CBF76030.1| TPA: UPF0075 domain protein FGSC
  misc_feature (12)..(445): NCBI GI: 145236340 Blast Desc: protein product [Aspergillus niger] gi|134075270|emb|CAK44911.1| protein product [Aspergillus niger]
  misc_feature (12)..(445): NCBI GI: 169784768 Blast Desc: [Aspergillus oryzae RIB40] gi|83775592|dbj|BAE65712.1| protein product [Aspergillus oryzae]
  misc_feature (10)..(444): NCBI GI: 115400719 Blast Desc: conserved [Aspergillus terreus NIH2624] gi|114191614|gb|EAU33314.1| conserved [Aspergillus terreus NIH2624]
  misc_feature (12)..(445): NCBI GI: 255932291 Blast Desc: Pc12g08720 [Penicillium chrysogenum Wisconsin 54-1255] gi|211582321|emb|CAP80499.1| Pc12g08720 [Penicillium chrysogenum Wisconsin 54-1255]
  misc_feature: Useful for introducing or modulating the production of volatile compounds
MGSIDPFTFSMSESKPLDLTVLGMNSGTSMDGIDCALCRFRQASPEAPMHFELLKYDEVPLEQTIKKRVMNMILFNKTTPEELSEVNVILGEVFSAAALTFCKNNSVAIDSIDAIGSHGQTIWLLSMPEKGQVRSALTMAEGCFIASRTGITTVTDFRVSDQAAGRQGAPLIAFFDSLILHHPTKFRACQNIGGIANVCFIPPDVDGTLNVEFFDFDTGPGNVFIDAAVRYFTNGEQEYDKDGKMGRAGRVDQDIVDEFLRTFPYFSLDPPKTTGREVFRDTVAHDLIRKGLEKGLSPNDVVATMTRIAAQAIVEHYERYMPTQYGPLAEIYMCGGGAKNPNITTFMQASFPNTRIVMLDEAGIPADAKEAVTFAWQGMEAIVGRSIPVPDRVEDRAEYILGKISPGRNYRKVMRKGADFGGDAEWLPPVGELVNYVDGKVFDNRSSA

SEQ ID NO: 29231 - DNA, 1820 bp, Muscodor strobelii
  misc_feature: SGI EST ID NO. CUFF.69099.0
  misc_feature: Variant of the nucleotide sequence at SEQ ID NO 29229
gcaatttccagacgcggctgcctgcacggaagtgcataggtcattgccaccgggttgggaaattgtttcgcatctccaaatacgacccaaatgcgcactgcaccgaaagtacgacgctgccctcttcgctggcagtgttgccacccgtgtgctcttgtcctaaaactcttgtgaggcatccgttttctcgggaagacatttcgtgtcctgaagcatcagatctctcgttttcaaacgccaattcttgctactcaaaatgggttccatcgacccttttactttctccatgtctgaatctaaaccccttgacctaacggtcttgggcatgaattcggggacgtcaatggacggtatcgattgcgcattgtgccgcttcagacaagcttctccggaagctccaatgcactttgaactgctgaaatacgacgaagtacctcttgagcagacgatcaagaaaagagtgatgaacatgattcttttcaacaagactacacctgaggaactttcagaggtgaacgtcatcctcggcgaagtattctcagctgctgctttgacgttctgtaaaaataacagtgtcgcaatcgactcgatagatgccattggatcacatggtcagactatatggctgttgagtatgccagaaaaggggcaagtgagatcagctcttacaatggctgagggatgtttcattgcttctcgaacaggcatcacaactgtcacggacttcagagtttcggatcaggccgctggtagacaaggtgcgcctctaatcgcattcttcgactcgctgatcctgcatcatcctaccaagtttcgtgcgtgtcagaatattggagggatcgccaatgtgtgcttcattcctccggacgttgatgggactctgaacgtcgagtttttcgacttcgatactggccctgggaatgtctttatagacgctgctgttcgatatttcaccaatggtgagcaggagtacgacaaagacggcaagatgggtcgagccggtagggtggatcaggatatcgtcgatgaatttctacgcacatttccctacttctcacttgacccacctaagacaacgggtcgcgaggtgtttcgtgatactgtcgcgcacgatcttattagaaaggggttggaaaaggggttatctccgaacgatgtcgttgcaacgatgacgcgtatcgcggcacaagctattgtggaacactacgaacgatatatgcccacgcagtatggaccactggcagagatttatatgtgtggtggtggggcaaagaaccccaatattactacgttcatgcaggcttcgttccctaacacacgcatcgtcatgctagacgaagctggcataccagcagatgcgaaagaagctgtgacattcgcgtggcaggggatggaggcaattgtggggagaagtatacctgttcctgatcgtgtggaggatagggctgagtatattttgggaaaaatcagtccaggtagaaattatcgcaaggttatgaggaagggggcggactttggcggcgatgcggagtggttaccacctgtgggcgagctggtgaactatgtagatgggaaagtgtttgataacaggtcgtcagcttaagcgcgtaggtaatacccccaggtgaaagagaagtctgtttatgatcttggacatatgtatacttggaccgctggaaatgtgctccgcattttccaaatatgagagtatcaagccctttgtttaatccataagatgatgttacgcaaaagcttttcttgttcactggacaggcggaagggtctaacaagataacggtctctagtaatgtcaacccagt

SEQ ID NO: 29232 - DNA, 1635 bp, Muscodor strobelii
  misc_feature: SGI cDNA ID NO. 570037
  misc_feature: Elevated expression when VOC is produced
  misc_feature: Encodes the peptide sequence at SEQ ID NO 29233
atggcaggcttccaagcatggcgccatgtaccaggcaaagtcctgctattcctggtgaacgtcgtcgctgcgaccgctctgatctttgaaggctttaatcaaggcgtcttcggtaccgtcagcacaacgccaggcttcatagacatggcccagatcggacacgacggtatcgtaaccgatacgacgaagcagggaggtcttgcagctgcttattacttcggcggcatgtggggatgcttcattggaggctgggtcggcgaccgcataggacgcaaacgcggcgttctaattggcaccatcttcggacttctgggggcagctcttatggcctcttccaaaaacagcaacacattcatcgtagcacgtgtaatagccggcctagggataggcttcataaatgccataatcccaccctgggtctccgaactctcacaagcccacgaccggggttcttccttctccttagtattcgttgccaactatctcggaatcgtaatagcatactggatcaacttcgggctccgcggctacacctcgtccttccgatggcgattccccttagcatggatgaccatcccgctcctcatcgtagacgccacagtcccgtttttgccggaaagccccaggtggttgatcgcaaatgggaagcgcgaagatgcgatcggtatcttgtgcaagctacgtggtgatctagagccaggacatgaaatgattgtgaaggaggtcgagcaactcgacgcaattgtcgaagcttcacatcacgcgcgtaatgatctcttgaatatcgtcctagggggtcggtactcaggccccctacacctagggcgacgcgcagtgatgggtttcgcgctacagcttattcaacaatggacaggcatcctggccattgccggttgggcaacgacacttttcgcgctcgcggggttcgactcgtataaatccgcctggctcggcgggttagtcaacaccttcggcgtgccaggtacggcggctgccgcgctcgtcgtggaccgaatagggagaattaagtctctagtgatatcgttcataacgcagggtattgcgttgttcatcgtcgcagcacttatcaagtcctcacaagatgctgcggcggcgggcaatgcggataaagcgtcgcaacttgggacgggggccgcggcttttgtgtttgtttatatttggttcttcaccatgttcaacatcatcccatcttggatctacggcacggagatatggcctcaagagattcgggcaaagggttacagcttcaccatcttcgggtgggctgtcggctccggagtgacccaatttgtgattcccatcctccttaatcgcctagggtgggcaaccttcgtgttctttagcgcattgaacatcgttgcgatgcccatcatctacttcttttacccagaagtcgcgaagcgctcactggaagaagtcaatcttctcttcacaagcgacagcctcttcgtcaagcccaacatgcaggagtacgatcgtcgcatccaagaagcaggtggcagcatacctgtcgccgcgcgaaagctcctttctgaagtcgacggcaccctcagcccgtcacatcatgatagtgtcgatgtcgagaaaaggggtgaacctcatacggaagaatag

SEQ ID NO: 29233 - protein, 544 aa, Muscodor strobelii
  misc_feature: SGI Peptide ID NO. 570037
  misc_feature (19)..(436): Pfam Id: PF07690 Pfam Desc: Major Facilitator Superfamily
  misc_feature (19)..(484): Pfam Id: PF00083 Pfam Desc: Sugar (and other) transporter
  misc_feature (65)..(436): Pfam Id: PF07690 Pfam Desc: Major Facilitator Superfamily
  misc_feature (1)..(535): NCBI GI: 46114482 Blast Desc: FG03083.1 [Gibberella zeae PH-1]
  misc_feature (13)..(534): NCBI GI: 212536292 Blast Desc: MFS monosaccharide transporter, [Penicillium marneffei ATCC 18224] gi|210070701|gb|EEA24791.1| MFS monosaccharide transporter, [Penicillium marneffei ATCC 18224]
  misc_feature (1)..(510): NCBI GI: 256723711 Blast Desc: [Nectria haematococca mpVI 77-13-4]
  misc_feature (8)..(530): NCBI GI: 238493069 Blast Desc: MFS monosaccharide transporter, [Aspergillus flavus NRRL3357] gi|220696265|gb|EED52607.1| MFS monosaccharide transporter, [Aspergillus flavus NRRL3357]
  misc_feature (13)..(534): NCBI GI: 212536294 Blast Desc: MFS monosaccharide transporter, [Penicillium marneffei ATCC 18224] gi|210070702|gb|EEA24792.1| MFS monosaccharide transporter, [Penicillium marneffei ATCC 18224]
  misc_feature (8)..(530): NCBI GI: 169783302 Blast Desc: [Aspergillus oryzae RIB40] gi|83774857|dbj|BAE64980.1| protein product [Aspergillus oryzae]
  misc_feature (1)..(542): NCBI GI: 145616581 Blast Desc: MGG_10707 [Magnaporthe grisea 70-15] gi|145009402|gb|EDJ94102.1| MGG_10707 [Magnaporthe grisea 70-15]
  misc_feature (13)..(535): NCBI GI: 119498039 Blast Desc: MFS monosaccharide transporter, [Neosartorya fischeri NRRL 181] gi|119413941|gb|EAW23880.1| MFS monosaccharide transporter, [Neosartorya fischeri NRRL 181]
  misc_feature (8)..(488): NCBI GI: 240107424 Blast Desc: Sugar transporter family protein [Coccidioides posadasii C735 delta SOWgp]
  misc_feature (13)..(488): NCBI GI: 119191079 Blast Desc: CIMG_05587 [Coccidioides immitis RS]
  misc_feature: Useful for introducing or modulating the production of volatile compounds
MAGFQAWRHVPGKVLLFLVNVVAATALIFEGFNQGVFGTVSTTPGFIDMAQIGHDGIVTDTTKQGGLAAAYYFGGMWGCFIGGWVGDRIGRKRGVLIGTIFGLLGAALMASSKNSNTFIVARVIAGLGIGFINAIIPPWVSELSQAHDRGSSFSLVFVANYLGIVIAYWINFGLRGYTSSFRWRFPLAWMTIPLLIVDATVPFLPESPRWLIANGKREDAIGILCKLRGDLEPGHEMIVKEVEQLDAIVEASHHARNDLLNIVLGGRYSGPLHLGRRAVMGFALQLIQQWTGILAIAGWATTLFALAGFDSYKSAWLGGLVNTFGVPGTAAAALVVDRIGRIKSLVISFITQGIALFIVAALIKSSQDAAAAGNADKASQLGTGAAAFVFVYIWFFTMFNIIPSWIYGTEIWPQEIRAKGYSFTIFGWAVGSGVTQFVIPILLNRLGWATFVFFSALNIVAMPIIYFFYPEVAKRSLEEVNLLFTSDSLFVKPNMQEYDRRIQEAGGSIPVAARKLLSEVDGTLSPSHHDSVDVEKRGEPHTEE

SEQ ID NO: 29234 - DNA, 4696 bp, Muscodor strobelii
  misc_feature: SGI EST ID NO. CUFF.69125.1
  misc_feature: Variant of the nucleotide sequence at SEQ ID NO 29232
gctagatccggtgccaattcgcccacaattcgtgcccgcaacccgtcaccccagaaaagaacctccaccagtatgccggttcgcttgttgcagaatcgttaccgacgggtcctctcgcgtggttctctcatcccacctagctcatctttaaatctccgagcactagggctgttgctgggtagactagacttagttgaggtcaatcctacccgaatcgtatatcctgctattatatcggcagtcgttagggaaagagtcaatagaacgtcgagaagattgtagggagagaagcaacgatcgaccgggtgacgccatccgaggaggatccttcctgacagctcggatcagatctccgaagaccatatataataggaatcatctcgaaggacgacagacgataagatggcaggcttccaagcatggcgccatgtaccaggcaaagtcctgctattcctggtgaacgtcgtcgctgcgaccgctctgatctttgaaggctttaatcaaggcgtcttcggtaccgtcagcacaacgccaggcttcatagacatggcccagatcggacacgacggtatcgtaaccgatacgacgaagcagggaggtcttgcagctgcttattacttcggcggcatgtggggatgcttcattggaggctgggtcggcgaccgcataggacgcaaacgcggcgttctaattggcaccatcttcggacttctgggggcagctcttatggcctcttccaaaaacagcaacacattcatcgtagcacgtgtaatagccggcctagggataggcttcataaatgccataatcccaccctgggtctccgaactctcacaagcccacgaccggggttcttccttctccttagtattcgttgccaactatctcggaatcgtaatagcatactggatcaacttcgggctccgcggctacacctcgtccttccgatggcgattccccttagcatggatgaccatcccgctcctcatcgtagacgccacagtcccgtttttgccggaaagccccaggtggttgatcgcaaatgggaagcgcgaagatgcgatcggtatcttgtgcaagctacgtggtgatctagagccaggacatgaaatgattgtgaaggaggtcgagcaactcgacgcaattgtcgaagcttcacatcacgcgcgtaatgatctcttgaatatcgtcctagggggtcggtactcaggccccctacacctagggcgacgcgcagtgatgggtttcgcgctacagcttattcaacaatggacaggcatcctggccattgccggttgggcaacgacacttttcgcgctcgcggggttcgactcgtataaatccgcctggctcggcgggttagtcaacaccttcggcgtgccaggtacggcggctgccgcgctcgtcgtggaccgaatagggagaattaagtctctagtgatatcgttcataacgcagggtattgcgttgttcatcgtcgcagcacttatcaagtcctcacaagatgctgcggcggcgggcaatgcggataaagcgtcgcaacttgggacgggggccgcggcttttgtgtttgtttatatttggtatgtagtattatgtagtgatcataacgtcgtgagctatgtgctgattatcgtaccaggttcttcaccatgttcaacatcatcccatcttggatctacggcacggagatatggcctcaagagattcgggcaaagggttacagcttcaccatcttcgggtgggctgtcggctccggagtgtaagcccctgttctcaactccgagataccctgaatgtaaatgctaaagcctgccaggacccaatttgtgattcccatcctccttaatcgcctagggtgggcaaccttcgtgttctttagcgcattgaacatcgttgcgatgcccatcatctacttcttttacccagaagtcgcgaagcgctcactggaagaagtcaatcttctcttcacaagcgacagcctcttcgtcaagcccaacatgcaggagtacgatcgtcgcatccaagaagcaggtggcagcatacctgtcgccgcgcgaaagctcctttctgaagtcgacggcaccctcagcccgtcacatcatgatagtgtcgatgtcgagaaaaggggtgaacctcatacggaagaatagaggatatactgcatggcattggattgctcatttcgcgcttgcaggatagcagcgcacgcataaccagcgtttacgatgtatgatcatgataatgataacgaggatagtctgtttcccaattattattttcatcccatgtcgaagttccagtttagttcggataacagatccgcaggtattgtgaaggaccaattcggattcaattcgtgaggtatctgcccgttatatggaggtccgcgatgagctggagcggacatgatggaacgtgtctggactagagcgttttgcggaacactctgtaatgtttgcctttgcgcggccatatattcatcgatccgctgtacttgggttcgcaatttctcgctgactcttgcgccgtgatggatcagctctagattatcaagtaactgggccatggagagcatgatggtcttgacttggctatattcgtcttcgcctaatggctcttcaagaacggcaccgaggatttggccgatccctccaagatgatgcagcaatggggtgctaatggccagcagatacccaacaggaatattcataaaggcggtgatgacttcgctagcgactcgacaacggtcctgaatactcgcgccgtctgcagtaaacaagacaatgcgaagcaattgaagactagcggtgatattcgcggcttgaaagccgaagaggtcttttctcgaatcatacgtcatctgcggggtgagcttgaaagcttcaggtagattgacgtacatctgcacgacgctgtcgcgtaccgagttcgccgtgactttcgtctggtcttggaagatgtctgtgagaaaggccgcgctgcgtctcgatcggtattggtttccgcggaatcgcgtcagtgcgtgttccagcacacggtacaagtcggtgataaaattccatccgaataaccagcagtctgttcggcttctcgacgaatcgctgaaggatggacttgcgccattgatactcggggtcgcgttgtataagctggggcttggatgtgaaatacccgtatcatatataaactcgtcgtccacttcaaccgggtatgcgacattagcctgttgttctctggaccgaatcgtcccgcaccagacgacactttgaaacacgtctaatgtgtatatagaccagaactagatacgcaatctgtcagtagtatatcagtctcattaaagctaaggttacgacatacgactcgtcttcgttcttccctctcgattaacccaatgcccacgggccaatttgcctcgtcgtgaaggccgtacatgtccactaacatgtggtagataccaagatgcttatgcagatccctaattcggccattctgaatagcagcaattgccaaaagtgcatgcgcccgtacaatatggatatcgaattggtcacccgctgcctcaagctgccgttgggtctcattgaagaagacatccggatccagtccttggagcgacacaagatcccatctcggattcgtcaccgatccatctcgaactcggccagcgaccaatgaacaaactaccatagtcgatatgaacaatggcctattggatgtgtattcacccctcgacacacgtctcactagagacggtttatggaacagggggaaaatagggtagacaatctcaaagtaaagctcaacaaaatcgactatagtagcctgcgacgcaattgaaggtgccatccatcgtttctggaattcttctgcaaccgccgacacgccattttcgacaatttgaccattctggccgtcttgcacatcaaaatgcgcgccaatgctacgcgtaacagcagcgcgcacctgaacaccccgcttgcgcggctggcgattgaaagtacagggctgactgaaatccttacaattctggcaagcactctcgacggcgctcttctgacacttgatcgcgcgtttatggcagaagtcgcaagcctgcgtcacacgcctcctcttgggtttcctctgatgggagaggagcgcagcatcggccatgctgctctcgtgctgttagagcttgacgcacatcgctcgagagtagctgtacgtaactagcgctgctggatgggtgaggagtggagtagcatcaaggaggaatgtgggctggaagcgtgtgccccacgggtcgataaagagtggatgcggagctaatgtgaggagcaagagagggaaaggccggttgagttgcagtggtgatgctggtagtgatgatgcgacgcattgaggggctgctcttcctattcagtcctcgccaagagatgatgagagtttttgatttcacactgacgtccagagagttgagcgtaaagtgaaatgagattgcgctggaacgtttagaaaccgccgcacgcgcgtgatctcccgactggtccggatttaacgacagccacactatttgctttttgtcgtcgatttgtggtctgtgcgcccgaaagctgaatctcgggtttgccgtctggattctgctggacctcattcggcgcgagtcgtcagcttcactcatgctgaccaaccgagcaacggaggagaatggccg

SEQ ID NO: 29235 - DNA, 1815 bp, Muscodor strobelii
  misc_feature: SGI cDNA ID NO. 570038
  misc_feature: Encodes the peptide sequence at SEQ ID NO 29236
atggccgatgctgcgctcctctcccatcagaggaaacccaagaggaggcgtgtgacgcaggcttgcgacttctgccataaacgcgcgatcaagtgtcagaagagcgccgtcgagagtgcttgccagaattgtaaggatttcagtcagccctgtactttcaatcgccagccgcgcaagcggggtgttcaggtgcgcgctgctgttacgcgtagcattggcgcgcattttgatgtgcaagacggccagaatggtcaaattgtcgaaaatggcgtgtcggcggttgcagaagaattccagaaacgatggatggcaccttcaattgcgtcgcaggctactatagtcgattttgttgagctttactttgagattgtctaccctattttccccctgttccataaaccgtctctagtgagacgtgtgtcgaggggtgaatacacatccaataggccattgttcatatcgactatggtagtttgttcattggtcgctggccgagttcgagatggatcggtgacgaatccgagatgggatcttgtgtcgctccaaggactggatccggatgtcttcttcaatgagacccaacggcagcttgaggcagcgggtgaccaattcgatatccatattgtacgggcgcatgcacttttggcaattgctgctattcagaatggccgaattagggatctgcataagcatcttggtatctaccacatgttagtggacatgtacggccttcacgacgaggcaaattggcccgtgggcattgggttaatcgagagggaagaacgaagacgagtcttctggtctatatacacattagacgtgtttcaaagtgtcgtctggtgcgggacgattcggtccagagaacaacaggctaatgtcgcatacccggttgaagtggacgacgagtttatatatgatacgggtatttcacatccaagccccagcttatacaacgcgaccccgagtatcaatggcgcaagtccatccttcagcgattcgtcgagaagccgaacagactgctggttattcggatggaattttatcaccgacttgtaccgtgtgctggaacacgcactgacgcgattccgcggaaaccaataccgatcgagacgcagcgcggcctttctcacagacatcttccaagaccagacgaaagtcacggcgaactcggtacgcgacagcgtcgtgcagatgtacgtcaatctacctgaagctttcaagctcaccccgcagatgacgtatgattcgagaaaagacctcttcggctttcaagccgcgaatatcaccgctagtcttcaattgcttcgcattgtcttgtttactgcagacggcgcgagtattcaggaccgttgtcgagtcgctagcgaagtcatcaccgcctttatgaatattcctgttgggtatctgctggccattagcaccccattgctgcatcatcttggagggatcggccaaatcctcggtgccgttcttgaagagccattaggcgaagacgaatatagccaagtcaagaccatcatgctctccatggcccagttacttgataatctagagctgatccatcacggcgcaagagtcagcgagaaattgcgaacccaagtacagcggatcgatgaatatatggccgcgcaaaggcaaacattacagagtgttccgcaaaacgctctagtccagacacgttccatcatgtccgctccagctcatcgcggacctccatataacgggcagatacctcacgaattgaatccgaattggtccttcacaatacctgcggatctgttatccgaactaaactggaacttcgacatgggatga

SEQ ID NO: 29236 - protein, 604 aa, Muscodor strobelii
  misc_feature: SGI Peptide ID NO. 570038
  misc_feature (20)..(61): Pfam Id: PF00172 Pfam Desc: Fungal Zn(2)-Cys(6) binuclear cluster domain
  misc_feature (205)..(302): Pfam Id: PF04082 Pfam Desc: Fungal specific transcription factor domain
  misc_feature (243)..(302): Pfam Id: PF04082 Pfam Desc: Fungal specific transcription factor domain
  misc_feature (21)..(602): NCBI GI: 255940582 Blast Desc: Pc16g07320 [Penicillium chrysogenum Wisconsin 54-1255] gi|211585683|emb|CAP93402.1| Pc16g07320 [Penicillium chrysogenum Wisconsin 54-1255]
  misc_feature (10)..(602): NCBI GI: 255932287 Blast Desc: Pc12g08700 [Penicillium chrysogenum Wisconsin 54-1255] gi|211582319|emb|CAP80497.1| Pc12g08700 [Penicillium chrysogenum Wisconsin 54-1255]
  misc_feature (10)..(602): NCBI GI: 70993052 Blast Desc: C6 transcription factor [Aspergillus fumigatus Af293] gi|66849008|gb|EAL89336.1| C6 transcription factor, [Aspergillus fumigatus Af293]
  misc_feature (10)..(602): NCBI GI: 159125726 Blast Desc: C6 transcription factor, [Aspergillus fumigatus A1163]
  misc_feature (10)..(604): NCBI GI: 259481987 Blast Desc: TPA: Zn(II)2Cys6 transcription factor (Eurofung) [Aspergillus nidulans FGSC A4]
  misc_feature (1)..(604): NCBI GI: 67526087 Blast Desc: AN3501.2 [Aspergillus nidulans FGSC A4] gi|40739872|gb|EAA59062.1| AN3501.2 [Aspergillus nidulans FGSC A4]
  misc_feature (10)..(604): NCBI GI: 145236338 Blast Desc: protein product [Aspergillus niger CBS 513.88] gi|134075269|emb|CAK44910.1| protein product [Aspergillus niger]
  misc_feature (7)..(603): NCBI GI: 261360482 Blast Desc: conserved [Verticillium albo-atrum VaMs.102]
  misc_feature (3)..(568): NCBI GI: 58264404 Blast Desc: nucleus protein [Cryptococcus neoformans var. neoformans JEC21] gi|134110115|ref|XP_776268.1| CNBC6570 [Cryptococcus neoformans var. neoformans B-3501A] CNBC6570 var.
  misc_feature (156)..(602): NCBI GI: 119499668 Blast Desc: fungal specific transcription factor, [Neosartorya fischeri NRRL 181] gi|119414756|gb|EAW24694.1| fungal specific transcription factor, [Neosartorya fischeri NRRL 181]
MADAALLSHQRKPKRRRVTQACDFCHKRAIKCQKSAVESACQNCKDFSQPCTFNRQPRKRGVQVRAAVTRSIGAHFDVQDGQNGQIVENGVSAVAEEFQKRWMAPSIASQATIVDFVELYFEIVYPIFPLFHKPSLVRRVSRGEYTSNRPLFISTMVVCSLVAGRVRDGSVTNPRWDLVSLQGLDPDVFFNETQRQLEAAGDQFDIHIVRAHALLAIAAIQNGRIRDLHKHLGIYHMLVDMYGLHDEANWPVGIGLIEREERRRVFWSIYTLDVFQSVVWCGTIRSREQQANVAYPVEVDDEFIYDTGISHPSPSLYNATPSINGASPSFSDSSRSRTDCWLFGWNFITDLYRVLEHALTRFRGNQYRSRRSAAFLTDIFQDQTKVTANSVRDSVVQMYVNLPEAFKLTPQMTYDSRKDLFGFQAANITASLQLLRIVLFTADGASIQDRCRVASEVITAFMNIPVGYLLAISTPLLHHLGGIGQILGAVLEEPLGEDEYSQVKTIMLSMAQLLDNLELIHHGARVSEKLRTQVQRIDEYMAAQRQTLQSVPQNALVQTRSIMSAPAHRGPPYNGQIPHELNPNWSFTIPADLLSELNWNFDMG

SEQ ID NO: 29237 - DNA, 5088 bp, Muscodor strobelii
  misc_feature: SGI EST ID NO. CUFF.69126.2
  misc_feature: Variant of the nucleotide sequence at SEQ ID NO 29235
cggccattctcctccgttgctcggttggtcagcatgagtgaagctgacgactcgcgccgaatgaggtccagcagaatccagacggcaaacccgagattcagctttcgggcgcacagaccacaaatcgacgacaaaaagcaaatagtgtggctgtcgttaaatccggaccagtcgggagatcacgcgcgtgcggcggtttctaaacgttccagcgcaatctcatttcactttacgctcaactctctggacgtcagtgtgaaatcaaaaactctcatcatctcttggcgaggactgaataggaagagcagcccctcaatgcgtcgcatcatcactaccagcatcaccactgcaactcaaccggcctttccctctcttgctcctcacattagctccgcatccactctttatcgacccgtggggcacacgcttccagcccacattcctccttgatgctactccactcctcacccatccagcagcgctagttacgtacagctactctcgagcgatgtgcgtcaagctctaacagcacgagagcagcatggccgatgctgcgctcctctcccatcagaggaaacccaagaggaggcgtgtgacgcaggcttgcgacttctgccataaacgcgcgatcaagtgtcagaagagcgccgtcgagagtgcttgccagaattgtaaggatttcagtcagccctgtactttcaatcgccagccgcgcaagcggggtgttcaggtgcgcgctgctgttacgcgtagcattggcgcgcattttgatgtgcaagacggccagaatggtcaaattgtcgaaaatggcgtgtcggcggttgcagaagaattccagaaacgatggatggcaccttcaattgcgtcgcaggctactatagtcgattttgttgagctttactttgagattgtctaccctattttccccctgttccataaaccgtctctagtgagacgtgtgtcgaggggtgaatacacatccaataggccattgttcatatcgactatggtagtttgttcattggtcgctggccgagttcgagatggatcggtgacgaatccgagatgggatcttgtgtcgctccaaggactggatccggatgtcttcttcaatgagacccaacggcagcttgaggcagcgggtgaccaattcgatatccatattgtacgggcgcatgcacttttggcaattgctgctattcagaatggccgaattagggatctgcataagcatcttggtatctaccacatgttagtggacatgtacggccttcacgacgaggcaaattggcccgtgggcattgggttaatcgagagggaagaacgaagacgagtcttctggtctatatacacattagacgtgtttcaaagtgtcgtctggtgcgggacgattcggtccagagaacaacaggctaatgtcgcatacccggttgaagtggacgacgagtttatatatgatacgggtatttcacatccaagccccagcttatacaacgcgaccccgagtatcaatggcgcaagtccatccttcagcgattcgtcgagaagccgaacagactgctggttattcggatggaattttatcaccgacttgtaccgtgtgctggaacacgcactgacgcgattccgcggaaaccaataccgatcgagacgcagcgcggcctttctcacagacatcttccaagaccagacgaaagtcacggcgaactcggtacgcgacagcgtcgtgcagatgtacgtcaatctacctgaagctttcaagctcaccccgcagatgacgtatgattcgagaaaagacctcttcggctttcaagccgcgaatatcaccgctagtcttcaattgcttcgcattgtcttgtttactgcagacggcgcgagtattcaggaccgttgtcgagtcgctagcgaagtcatcaccgcctttatgaatattcctgttgggtatctgctggccattagcaccccattgctgcatcatcttggagggatcggccaaatcctcggtgccgttcttgaagagccattaggcgaagacgaatatagccaagtcaagaccatcatgctctccatggcccagttacttgataatctagagctgatccatcacggcgcaagagtcagcgagaaattgcgaacccaagtacagcggatcgatgaatatatggccgcgcaaaggcaaacattacagagtgttccgcaaaacgctctagtccagacacgttccatcatgtccgctccagctcatcgcggacctccatataacgggcagatacctcacgaattgaatccgaattggtccttcacaatacctgcggatctgttatccgaactaaactggaacttcgacatgggatgaaaataataattgggaaacagactatcctcgttatcattatcatgatcatacatcgtaaacgctggttatgcgtgcgctgctatcctgcaagcgcgaaatgagcaatccaatgccatgcagtatatcctctattcttccgtatgaggttcaccccttttctcgacatcgacactatcatgatgtgacgggctgagggtgccgtcgacttcagaaaggagctttcgcgcggcgacaggtatgctgccacctgcttcttggatgcgacgatcgtactcctgcatgttgggcttgacgaagaggctgtcgcttgtgaagagaagattgacttcttccagtgagcgcttcgcgacttctgggtaaaagaagtagatgatgggcatcgcaacgatgttcaatgcgctaaagaacacgaaggttgcccaccctaggcgattaaggaggatgggaatcacaaattgggtcctggcaggctttagcatttacattcagggtatctcggagttgagaacaggggcttacactccggagccgacagcccacccgaagatggtgaagctgtaaccctttgcccgaatctcttgaggccatatctccgtgccgtagatccaagatgggatgatgttgaacatggtgaagaacctggtacgataatcagcacatagctcacgacgttatgatcactacataatactacataccaaatataaacaaacacaaaagccgcggcccccgtcccaagttgcgacgctttatccgcattgcccgccgccgcagcatcttgtgaggacttgataagtgctgcgacgatgaacaacgcaataccctgcgttatgaacgatatcactagagacttaattctccctattcggtccacgacgagcgcggcagccgccgtacctggcacgccgaaggtgttgactaacccgccgagccaggcggatttatacgagtcgaaccccgcgagcgcgaaaagtgtcgttgcccaaccggcaatggccaggatgcctgtccattgttgaataagctgtagcgcgaaacccatcactgcgcgtcgccctaggtgtagggggcctgagtaccgaccccctaggacgatattcaagagatcattacgcgcgtgatgtgaagcttcgacaattgcgtcgagttgctcgacctccttcacaatcatttcatgtcctggctctagatcaccacgtagcttgcacaagataccgatcgcatcttcgcgcttcccatttgcgatcaaccacctggggctttccggcaaaaacgggactgtggcgtctacgatgaggagcgggatggtcatccatgctaaggggaatcgccatcggaaggacgaggtgtagccgcggagcccgaagttgatccagtatgctattacgattccgagatagttggcaacgaatactaaggagaaggaagaaccccggtcgtgggcttgtgagagttcggagacccagggtgggattatggcatttatgaagcctatccctaggccggctattacacgtgctacctggtgagtgttaataaaactcaaagatgaggtattttttgttgtgagagaggcttgtagaaggagcttacgatgaatgtgttgctgtttttggaagaggccataagagctgcccccagaagtccgaagatggtgccaattagaacgccgcgtttgcgtcctatgcggtcgccgacccagcctgggttgtttgttagttgtactgaataaccagataaataaggagcagaaaaggaggcgaagggtcacgaagtggaccacttatacgaagtcagggttgtgaggtaatacgccatgctcggtggcatctgatacgggggttcaggagtgtgtatatacggtgattatccgcaagtcaattcggtaacgaaggagggaagaagagggaggaggtgagcatgagattataaaggggggaatgtggagaagaagagaaagggatgaaaatgacgaggggataggtgagatattcgtgaatatcatatacctccaatgaagcatccccacatgccgccgaagtaataagcagctgcaagacctccctgcttcgtcgtatcggttacgataccgtcgtgtccgatctgggccatgtctatgaagcctggcgttgtgctgacggtaccgaagacgccttgattaaagcctgggaggtagtcagtgaggtgatattaggccactgctgcccttgttatagggagagactgtacagtgtcataccttcaaagatcagagcggtcgcagcgacgacgttcaccaggaatagcaggactttgcctggtacatggcgccatgcttggaagcctgccatcttatcgtctgtcgtccttcgagatgattcctattatatatggtcttcggagatctgatccgagctgtcaggaaggatcctcctcggatggcgtcacccggtcgatcgttgcttctctccctacaatcttctcgacgttctattgactctttccctaacgactgccgatataatagcaggatatacgattcgggtaggattgacctcaactaagtctagtctacccagcaacagccctagtgctcggagatttaaagatgagctaggtgggatgagagaaccacgcgagaggacccgtcggtaacgattctgcaacaagcgaaccggcatactggtggaggttcttttctggggtgacgggttgcgggcacgaattgtgggcgaattggcaccggatctagc

SEQ ID NO: 29238 - DNA, 1332 bp, Muscodor strobelii
  misc_feature: SGI cDNA ID NO. 570039
  misc_feature: Encodes the peptide sequence at SEQ ID NO 29239
atggcttcaacgccgcccgccgccgtcaccaccgacgaggatgtcccccagagcgacggctccaagctcaagacgttcttgtctatcctccgaaagttcatgggcgtctccgacctcgccgccgtccgcttctcgctcccctcccagctgctcgagcccacgcccaacctcgagtactggaactacctcgacaaccccagcgccttcgccgccatcggcacctcggacgagcccctcgaccgcatgctcgaggtgctgcgcttctggttcaccaaggacctcaagtacgtcaagggcaagccctgcaagccctacaactcgtgcctcggcgagttcttccgctgcaactgggaggccgaggacaacgccccgcgcatcgagaccaagagcatcctcaccaacggcaccggcaccggcaccggcaccgccagcggcatcagcagcgccgcctcttccatccgctccctcaagatcgatccccgctccgcctcgagcgtctccgtcacccagacgcccccgaaccccaccggccccaccgttaggatatcctacctcaccgagcagacctcccaccaccctccagtctctgccttctacgtcagctgccccgagaagggcctccacgccaggggctacgaccagatcagcgccaagttcacgggcaccgccatcaaggtctccccgggcgagcacaacctcggcatcttcatcaccctcgagcgccgcgacaacgagacctaccagctgacacaccccgctgcccatctcggcggcctgctgcgaggtgccctcagcgtcaccgtcggcgacgtcgcctacatcacttgcaccaagaccaagctcaaggcaatactgcactacgtcgaggacggttggctcggccgtgcccagaacaaggtagacggtgtcatcttcagatacgacccggacaaggacgacaagggatcgtttttcactctggggccaaagccagtctcgtctcattcgcccgacaagcagatcaccatcatcgacctcaaccccctggccgttgcccccaagtccgtcccgcccatagagaaacaggccgagaacgagtccctcaatctctggaacggcgtcacgcaggccattcactcgaagcagttttcaaaggccacgaatatcaaagtagaattagaagaacggcagagggaaaaggccaggcaacgggagaagaacgagacacccttcgtgccccagttcttcgtgcaagtcacagacaaaggcggcaagccagatctcacggacaagggtcggttactactagagcgggcgcagaagggggattggaatctcgagggtatcatatag

SEQ ID NO: 29239 - protein, 443 aa, Muscodor strobelii
  misc_feature: SGI Peptide ID NO. 570039
  misc_feature (1)..(441): Pfam Id: PF01237 Pfam Desc: Oxysterol-binding protein
  misc_feature (184)..(415): Pfam Id: PF01237 Pfam Desc: Oxysterol-binding protein
  misc_feature (1)..(443): NCBI GI: 58257399 Blast Desc: oxysterol binding protein-like protein [Magnaporthe grisea]
  misc_feature (1)..(443): NCBI GI: 145610869 Blast Desc: conserved [Magnaporthe grisea 70-15] gi|145018206|gb|EDK02485.1| conserved [Magnaporthe grisea 70-15]
  misc_feature (2)..(443): NCBI GI: 171679463 Blast Desc: protein product [Podospora anserina] gi|170939357|emb|CAP64585.1| protein product [Podospora anserina]
  misc_feature (3)..(443): NCBI GI: 164425661 Blast Desc: NCU10715 [Neurospora crassa OR74A] gi|157071013|gb|EDO65164.1| NCU10715 [Neurospora crassa OR74A]
  misc_feature (16)..(443): NCBI GI: 256732600 Blast Desc: NECHADRAFT_60041 [Nectria haematococca mpVI 77-13-4]
  misc_feature (1)..(443): NCBI GI: 46125325 Blast Desc: FG07040.1 [Gibberella zeae PH-1]
  misc_feature (2)..(443): NCBI GI: 116203683 Blast Desc: CHGG_09725 [Chaetomium globosum CBS 148.51] gi|88175853|gb|EAQ83321.1| CHGG_09725 [Chaetomium globosum CBS 148.51]
  misc_feature (2)..(440): NCBI GI: 156042462 Blast Desc: SS1G_11028 [Sclerotinia sclerotiorum 1980] gi|154695415|gb|EDN95153.1| SS1G_11028 [Sclerotinia sclerotiorum 1980]
  misc_feature (7)..(440): NCBI GI: 121704626 Blast Desc: oxysterol-binding protein, [Aspergillus clavatus NRRL 1] gi|119398722|gb|EAW09150.1| oxysterol-binding protein, [Aspergillus clavatus NRRL 1]
  misc_feature (6)..(439): NCBI GI: 119493406 Blast Desc: oxysterol-binding protein, [Neosartorya fischeri NRRL 181] gi|119412053|gb|EAW21996.1| oxysterol-binding protein, [Neosartorya fischeri NRRL 181]
MASTPPAAVTTDEDVPQSDGSKLKTFLSILRKFMGVSDLAAVRFSLPSQLLEPTPNLEYWNYLDNPSAFAAIGTSDEPLDRMLEVLRFWFTKDLKYVKGKPCKPYNSCLGEFFRCNWEAEDNAPRIETKSILTNGTGTGTGTASGISSAASSIRSLKIDPRSASSVSVTQTPPNPTGPTVRISYLTEQTSHHPPVSAFYVSCPEKGLHARGYDQISAKFTGTAIKVSPGEHNLGIFITLERRDNETYQLTHPAAHLGGLLRGALSVTVGDVAYITCTKTKLKAILHYVEDGWLGRAQNKVDGVIFRYDPDKDDKGSFFTLGPKPVSSHSPDKQITIIDLNPLAVAPKSVPPIEKQAENESLNLWNGVTQAIHSKQFSKATNIKVELEERQREKARQREKNETPFVPQFFVQVTDKGGKPDLTDKGRLLLERAQKGDWNLEGII

SEQ ID NO: 29240 - DNA, 2233 bp, Muscodor strobelii
  misc_feature: SGI EST ID NO. CUFF.69329.0
  misc_feature: Variant of the nucleotide sequence at SEQ ID NO 29238
taggaccctctgcgcctcttatcgcgccctttcctcctctaatgtgcatgcatcccacttacacttggaccagaaactggcacttatcgaccgttcactctgaattatctctgtctctatctctatcaatctagcgactggcgtcattcgcctcttccatggtgccccctttcctccgtttcacctatctaattttctcgaaacatacggaaacaacgcctttgttgagtactgtagcttctctttgacacgtcgaagccatacgcggcgcatatccaccaagctgctggtcaccatcaccactgctaccatctccaaccgtcgacccctggaccatcaaacagaccgccgccgtcatggcttcaacgccgcccgccgccgtcaccaccgacgaggatgtcccccagagcgacggctccaagctcaagacgttcttgtctatcctccgaaagttcatgggcgtctccgacctcgccgccgtccgcttctcgctcccctcccagctgctcgagcccacgcccaacctcgagtactggaactacctcgacaaccccagcgccttcgccgccatcggcacctcggacgagcccctcgaccgcatgctcgaggtgctgcgcttctggttcaccaaggacctcaagtacgtcaagggcaagccctgcaagccctacaactcgtgcctcggcgagttcttccgctgcaactgggaggccgaggacaacgccccgcgcatcgagaccaagagcatcctcaccaacggcaccggcaccggcaccggcaccgccagcggcatcagcagcgccgcctcttccatccgctccctcaagatcgatccccgctccgcctcgagcgtctccgtcacccagacgcccccgaaccccaccggccccaccgttaggatatcctacctcaccgagcagacctcccaccaccctccagtctctgccttctacgtcagctgccccgagaagggcctccacgccaggggctacgaccagatcagcgccaagttcacgggcaccgccatcaaggtctccccgggcgagcacaacctcggcatcttcatcaccctcgagcgccgcgacaacgagacctaccagctgacacaccccgctgcccatctcggcggcctgctgcgaggtgccctcagcgtcaccgtcggcgacgtcgcctacatcacttgcaccaagaccaagctcaaggcaatactgcactacgtcgaggacggttggctcggccgtgcccagaacaaggtagacggtgtcatcttcagatacgacccggacaaggacgacaaggtgcgcatcgccgatgtgcccgaggcagatgtcatcgccaggctgggcggtggctggagggacagggatcgtttttcactctggggccaaagccagtcgtaagtcacgccagtcttctcatctgatagaatgtgactaatgtactcttgccagtcgtctcattcgcccgacaagcagatcaccatcatcgacctcaaccccctggccgttgcccccaagtccgtcccgcccatagagaaacaggccgagaacgagtccctcaatctctggaacggcgtcacgcaggccattcactcgaagcagttttcaaaggccacgaatatcaaagtagaattagaagaacggcagagggaaaaggccaggcaacgggagaagaacgagacacccttcgtgccccagttcttcgtgcaagtcacagacaaaggcggcaagccagatctcacggacaagggtcggttactactagagcgggcgcagaagggggattggaatctcgagggtatcatatagggttcgataccgaaggtttgccgagggcttgttgcgagtgtgttgtgttgacgagtcagagatggaagagatacctatacctgttttgcttggtcatctatcgggggttacatttttctgtccgacatcttttttactcttatcacttgttagacagacacagcatcctgtgctgctggccaaatgtgaactccagtcaggtatgccagtattttcattgctgttttcaggatgggaatggggttgggtgacaaagaatggcctgcataactgcatatatacgtgcatgcatacatatatacatttttaacattggacgactggattcaatgacttcgatttcacagcctatatgttgttcagatgtctgcggtgtgctctggagacacgtccagcgaaatcgttctagctatatttagcttcag

SEQ ID NO: 29241 - DNA, 2208 bp, Muscodor strobelii
  misc_feature: SGI cDNA ID NO. 570040
  misc_feature: Reduced expression when VOC is produced
  misc_feature: Encodes the peptide sequence at SEQ ID NO 29242
atgtcggcgaccacttcctctgcaccaccccaccagaagcccgcgaagacgctcgcgtgcgttcactgccagtatcgaaaaatcaagtgcgatcgccagtttccatgcgcaaactgtaccaaggcaagagtagagtgtaaaccaagtacaccagctccaccacataagcgacgtcgtcctaatcaggacctccttgaacgattggcacgatgcgagaagctgttgaagcagtacgccgatggcggtggccagcctgctgcagacgctgcggtggcagctgcccctatctcggatccgttactcgctgctaaatacccggctctggggcagggcaataaggctgcgaccgacatcaagacgcctccgagcttcggattggtcgtcgaagaggatggtaatatgcgcttcatggataactatatccgcataagctttcacgatgagatacaagctatgcgatctatcattgacgttgatgaattcggatcagaatcagagaacagcccgacggccgctctctcgccggataaccatggcgaccttttcatgggcattgaagagacgcaaactgatcttcgagaactacaaccggatttggtcagcgtcttcaggttatggcagatgttcattgatcgcgtcaatcccctgaccaaggtcatccacgttcccacggtacagcaatacgttgtcgacgccgccaccgacataacaaaagtaccactcaattaccaagcactcatcttctccatctacgccgcagccacactatctctcacctcccaagaagccatacaacacttgaacatgactcaagatgaagccttgactcgatttaccaaggccacaaagctcgctttgattcgaatgaactttatgaagaaccacaacatggcagctcttcaagcaatatgtctgtatatggtcgttataaacggtcggtatgatcgccattctacatggatatttggcggcaccgtcgtccgcatcgcccagaaaatgggctaccaccgagatggtgaacttctgggcctcactcccttcgaaaccgaaatgcgcaggcgcatatggtggcatataatagcttcagacggcaagcaagccatgatgtcaggtcttagtcatgccttcgcaccttcacactgggacaccaaactcccactcaacctcaacgacgccgatctctcaccaacctctgtcgagcctctagtcgccaaggaaggcccgacagacatggttttcgtactcctcatttacatcttccaaaaattcgtgcacgcaacttatacgcagctcgaagccgcatggctcgctctccgcagcgaaggaaaagccccagagtacagagaacctatcgataattaccgcaaactaattggaggcctcgacgttgagatggcggaattcgagcgaaagaacgtcgagcccggtctcggcggcgtgcatgaggctgcttcaatgatgagaccaatgttcattgagaagatgaaggaatcaatggtcgccatgaaggatcagcccgagtacggaaccgagatattcgaccccgtcgactcgatatttaaatccttcgtcatatcacacgaacggaatagcacgtctttcaagcgcatgaagtactcgggcttcctctggttcatgaaaatggggtttcagatcgatgcgttcatggtcatgttgtccaaactgtataaacatcccactggggtcttggcgacgagaacgtggaacgtgattgagtcactacacggcatgcacgaagagttgttcgacacgtcggaaaagaagtacgcgattaccgcctccctcacgctcaaagcttggggcgccagggaaaaggcgctagagcagagcggaatccgaattgatgtgcccgagtacatccagcgattgcgcaacgttgtgtcgagtcctagagagagcatgccgacgaccgatccgagtattagtccgaattcaacggcggcgatgtggacggcgcaggccgccggggcgtatccacagatgagtagagacttaatggacacgaacagcttcttgaatacgaacgccgatgttgcgacactgggtattgatatgtgggggaatctgctcgtggacaacgatgccgtgcagcttgagcagcagcagagcgtactgccgtatggggggtttgactttgggaagattaattttggggatatggactttgctaatggattccctacctga

SEQ ID NO: 29242 - protein, 735 aa, Muscodor strobelii
  misc_feature: SGI Peptide ID NO. 570040
  misc_feature (18)..(56): Pfam Id: PF00172 Pfam Desc: Fungal Zn(2)-Cys(6) binuclear cluster domain
  misc_feature (296)..(392): Pfam Id: PF04082 Pfam Desc: Fungal specific transcription factor domain
  misc_feature (4)..(723): NCBI GI: 256728042 Blast Desc: NECHADRAFT_62595 [Nectria haematococca mpVI 77-13-4]
  misc_feature (1)..(695): NCBI GI: 171693007 Blast Desc: protein product [Podospora anserina] gi|170946452|emb|CAP73253.1| protein product [Podospora anserina]
  misc_feature (11)..(698): NCBI GI: 261358003 Blast Desc: C6 zinc finger domain-containing protein [Verticillium albo-atrum VaMs.102]
  misc_feature (94)..(722): NCBI GI: 46132954 Blast Desc: FG09014.1 [Gibberella zeae PH-1]
  misc_feature (29)..(634): NCBI GI: 39940794 Blast Desc: MGG_04843 [Magnaporthe grisea 70-15] gi|145010933|gb|EDJ95589.1| MGG_04843 [Magnaporthe grisea 70-15]
  misc_feature (12)..(631): NCBI GI: 46114900 Blast Desc: FG03292.1 [Gibberella zeae PH-1]
  misc_feature (120)..(613): NCBI GI: 256728626 Blast Desc: NECHADRAFT_22695 [Nectria haematococca mpVI 77-13-4]
  misc_feature (80)..(650): NCBI GI: 116198843 Blast Desc: CHGG_07577 [Chaetomium globosum CBS 148.51] gi|88178856|gb|EAQ86324.1| CHGG_07577 [Chaetomium globosum CBS 148.51]
  misc_feature (135)..(636): NCBI GI: 256724594 Blast Desc: NECHADRAFT_13089 [Nectria haematococca mpVI 77-13-4]
  misc_feature (20)..(635): NCBI GI: 256727246 Blast Desc: NECHADRAFT_75919 [Nectria haematococca mpVI 77-13-4]
  misc_feature: Useful for introducing or modulating the production of volatile compounds
MSATTSSAPPHQKPAKTLACVHCQYRKIKCDRQFPCANCTKARVECKPSTPAPPHKRRRPNQDLLERLARCEKLLKQYADGGGQPAADAAVAAAPISDPLLAAKYPALGQGNKAATDIKTPPSFGLVVEEDGNMRFMDNYIRISFHDEIQAMRSIIDVDEFGSESENSPTAALSPDNHGDLFMGIEETQTDLRELQPDLVSVFRLWQMFIDRVNPLTKVIHVPTVQQYVVDAATDITKVPLNYQALIFSIYAAATLSLTSQEAIQHLNMTQDEALTRFTKATKLALIRMNFMKNHNMAALQAICLYMVVINGRYDRHSTWIFGGTVVRIAQKMGYHRDGELLGLTPFETEMRRRIWWHIIASDGKQAMMSGLSHAFAPSHWDTKLPLNLNDADLSPTSVEPLVAKEGPTDMVFVLLIYIFQKFVHATYTQLEAAWLALRSEGKAPEYREPIDNYRKLIGGLDVEMAEFERKNVEPGLGGVHEAASMMRPMFIEKMKESMVAMKDQPEYGTEIFDPVDSIFKSFVISHERNSTSFKRMKYSGFLWFMKMGFQIDAFMVMLSKLYKHPTGVLATRTWNVIESLHGMHEELFDTSEKKYAITASLTLKAWGAREKALEQSGIRIDVPEYIQRLRNVVSSPRESMPTTDPSISPNSTAAMWTAQAAGAYPQMSRDLMDTNSFLNTNADVATLGIDMWGNLLVDNDAVQLEQQQSVLPYGGFDFGKINFGDMDFANGFPT

SEQ ID NO: 29243 - DNA, 3280 bp, Muscodor strobelii
  misc_feature: SGI EST ID NO. CUFF.69285.0
  misc_feature: Variant of the nucleotide sequence at SEQ ID NO 29241
gacatgttgtctattcagcagagtcataatactttacagcaagattccacatcatactgaagtgttttctttcttaaatcgttgaaatcgcgataagcgccacatctctgcgtgtatcttggacttttgtaggaatgttgttgatgatcggtggatgaagatcaaaactccgactcggatttcagacaagtccggacttagttgggccagaagctgttggtgctgccgcgaagggaaaaatcatatgagatggacccttgggagatcagatccttgtacattctgagagctgcccaggcgccagggctgcgcccccagggggttccgtcatctacattgctcatgcgcagaccttctttctacttttgtctatgagcatccagctagccttttgaccttacttgcttgtactcgtcaacattccttacatatcaggcgacatccctctggaagttaaacgacgtgtcgttgctactttgacatccaaactgctatgtaagaaggtcgcacccgaccatcgggaataaatgaaaaatgtcggcgaccacttcctctgcaccaccccaccagaagcccgcgaagacgctcgcgtgcgttcactgccagtatcgaaaaatcaagtgcgatcgccagtttccatgcgcaaactgtaccaaggtatgagaatgaaggatcgatatctcaagattttaggttcacctattttatgacttccactcaccatatcatgtcacatctcatcgcaatcgcaatctcagtctccatttttcatcacgaccccgccatgtgtcctttgaagacattcgtacagccttgctcacatagccaccataggcaagagtagagtgtaaaccaagtacaccagctccaccacataagcgacgtcgtcctaatcaggacctccttgaacgattggcacgatgcgagaagctgttgaagcagtacgccgatggcggtggccagcctgctgcagacgctgcggtggcagctgcccctatctcggatccgttactcgctgctaaatacccggctctggggcagggcaataaggctgcgaccgacatcaagacgcctccgagcttcggattggtcgtcgaagaggatggtaatatgcgcttcatggataactatatccgcataagctttcacgatgagatacaagctatgcgatctatcattgacgttgatgaattcggatcagaatcagagaacagcccgacggccgctctctcgccggataaccatggcgaccttttcatgggcattgaagagacgcaaactgatcttcgagaactacaaccggatttggtcagcgtcttcaggttatggcagatgttcattgatcgcgtcaatcccctgaccaaggtcatccacgttcccacggtacagcaatacgttgtcgacgccgccaccgacataacaaaagtaccactcaattaccaagcactcatcttctccatctacgccgcagccacactatctctcacctcccaagaagccatacaacacttgaacatgactcaagatgaagccttgactcgatttaccaaggccacaaagctcgctttgattcgaatgaactttatgaagaaccacaacatggcagctcttcaagcaatatgtctgtatatggtcgttataaacggtcggtatgatcgccattctacatggatatttggcggcaccgtcgtccgcatcgcccagaaaatgggctaccaccgagatggtgaacttctgggcctcactcccttcgaaaccgaaatgcgcaggcgcatatggtggcatataatagcttcagacggcaagcaagccatgatgtcaggtcttagtcatgccttcgcaccttcacactgggacaccaaactcccactcaacctcaacgacgccgatctctcaccaacctctgtcgagcctctagtcgccaaggaaggcccgacagacatggttttcgtactcctcatttacatcttccaaaaattcgtgcacgcaacttatacgcagctcgaagccgcatggctcgctctccgcagcgaaggaaaagccccagagtacagagaacctatcgataattaccgcaaactaattggaggcctcgacgttgagatggcggaattcgagcgaaagaacgtcgagcccggtctcggcggcgtgcatgaggctgcttcaatgatgagaccaatgttcattgagaagatgaaggaatcaatggtcgccatgaaggatcagcccgagtacggaaccgagatattcgaccccgtcgactcgatatttaaatccttcgtcatatcacacgaacggaatagcacgtctttcaagcgcatgaagtactcgggcttcctctggttcatgaaaatggggtttcagatcgatgcgttcatggtcatgttgtccaaactgtataaacatcccactggggtcttggcgacgagaacgtggaacgtgattgagtcactacacggcatgcacgaagagttgttcgacacgtcggaaaagaagtacgcgattaccgcctccctcacgctcaaagcttggggcgccagggaaaaggcgctagagcagagcggaatccgaattgatgtgcccgagtacatccagcgattgcgcaacgttgtgtcgagtcctagagagagcatgccgacgaccgatccgagtattagtccgaattcaacggcggcgatgtggacggcgcaggccgccggggcgtatccacagatgagtagagacttaatggacacgaacagcttcttgaatacgaacgccgatgttgcgacactgggtattgatatgtgggggaatctgctcgtggacaacgatgccgtgcagcttgagcagcagcagagcgtactgccgtatggggggtttgactttgggaagattaattttggggatatggactttgctaatggattccctacctgattgcaccattacaaaatgggatgggaaacctacatgggccggtgcaacactaggcgtaatgcgatctgacgaacatacgatacacgaaaggccgataatagagacaggccctctatgtaatgtgcggtataaaagtggctggagtttttgaggcaataccttgtatactagtgggattctgtcgcaactcatcattggcttctggataggccatgggacattggatatatcgtggggttgataaccattggctacaatacaccacttatcatgacgttattctcgctcttaaatgctctgtgtcgctcgtctgatgtgtcatttatgccgatgacaccgtcacgccgtggactgtatgccg

SEQ ID NO: 29244 - DNA, 1152 bp, Muscodor strobelii
  misc_feature: SGI cDNA ID NO. 570041
  misc_feature: Encodes the peptide sequence at SEQ ID NO 29245
atgtatgagacgaactgcaaacggctcagggccctatccctagctgcgactgagccgatagaagagacctctaacatggatggtcttgttactccacgaaccgtccctactcgagtcgtgttggacgaatggctccctgcaaacctccaaaggctggcgaaagagacgctcacttgcatgcttctccctgatggaaagaagatgtacattttaagtgaacatgtacaagcgttatacccagagactgagaaactcataccgcactcattcctgcggtactcggacacgacttctttacccctggcgacatacagcgatctaccaaaggaacttgagcttatgatctggcaatttgctatgcgtccgacccgaccaagggcgctgcagctgatgttcggaaaagattcttcggggcaattttacttcccgcgagaccgagccaaggactcttggctgacagcatttcagtcgttcaagtcgtcgtgcagcgacctcggacgcgttgccctagtcagcaaagaggcatattacgaattttcgcaccggatgttcaaaactggcaaagcaaatcaatggctcaaggagatccctgagatacatgcacagactttatctgaagctgaaaatgtgtacatggactatactgtgtttccatctttctccttctatttgcgagagggcgcaatggtaatgccgaggctgcgcaacgtctatatcccctggattcctgacgaccaatacaccgacatcgaccagactagccttgcacagcataccagaggacatggctctgtggcttccgattttccatggcttctgggactctggagtcgacagatcgaggactacatacaaaagactgcccaagaatctcctgttcttgtcgaaaagctgctgaagaactcgataaggatcgattatttcagcgagcaatacggcttgggccatttcgctgacgcaaacttcgttgagtcttggaatgctctcacgaagtggaacgcctcttcgcggaacaaaattgcgtgcactttgatcattgggagaagtccaaggtggtataggggcaacgatccgctggacgacccatgcttagtccgggtttctaggggctgggcgtttacaaacgaagaaagtatgggtattaatgtctag

SEQ ID NO: 29245 - protein, 383 aa, Muscodor strobelii
  misc_feature: SGI Peptide ID NO. 570041
MYETNCKRLRALSLAATEPIEETSNMDGLVTPRTVPTRVVLDEWLPANLQRLAKETLTCMLLPDGKKMYILSEHVQALYPETEKLIPHSFLRYSDTTSLPLATYSDLPKELELMIWQFAMRPTRPRALQLMFGKDSSGQFYFPRDRAKDSWLTAFQSFKSSCSDLGRVALVSKEAYYEFSHRMFKTGKANQWLKEIPEIHAQTLSEAENVYMDYTVFPSFSFYLREGAMVMPRLRNVYIPWIPDDQYTDIDQTSLAQHTRGHGSVASDFPWLLGLWSRQIEDYIQKTAQESPVLVEKLLKNSIRIDYFSEQYGLGHFADANFVESWNALTKWNASSRNKIACTLIIGRSPRWYRGNDPLDDPCLVRVSRGWAFTNEESMGINV

SEQ ID NO: 29246 - DNA, 723 bp, Muscodor strobelii
  misc_feature: SGI cDNA ID NO. 570042
  misc_feature: Encodes the peptide sequence at SEQ ID NO 29247
atggcccatgagtcttcccagccttcagatcttccggaagttcgagggggcagagaggaatattggagcggtttgccagataaaccagagcttgagacgacggcgaatatcgcggaagcagcttctttgcagccagacgcgcggttcttccgtgcagctggtggctatactcatcaagctggtagtatgcatggcccacaagagttagcgagcgatactgagcgaccacgatctccgcaagagcttgctacatatttcaatcgagcacactcaccgcaggagtcgcaggctagcccgtcagccaaccaccagagacaagagcagggctattatggaccaccgagagagctctcaggcacaccgttttctgaacaaccaacgcagtactcggtaggtgcatatgcggctcatcaacactctggcccactagaacaaggccaattcgacgagaatctcaactcaggaaaggcagcacggtggcatgctcctactggaagtctcgagcatcgacaagtatctacatcagccacgccggccatgatagcatcatggacagctgcagccgaagcggaccaaggggatcgcgaggagatgattaggagattagaagaagaggaacgagaactagacgcagcgatagaggagggcgaacggatacaacgattgaaggagcaacgtcaggccataagacagcaactaaatgaagccaggggcgcgaagtga

SEQ ID NO: 29247 - protein, 240 aa, Muscodor strobelii
  misc_feature: SGI Peptide ID NO. 570042
MAHESSQPSDLPEVRGGREEYWSGLPDKPELETTANIAEAASLQPDARFFRAAGGYTHQAGSMHGPQELASDTERPRSPQELATYFNRAHSPQESQASPSANHQRQEQGYYGPPRELSGTPFSEQPTQYSVGAYAAHQHSGPLEQGQFDENLNSGKAARWHAPTGSLEHRQVSTSATPAMIASWTAAAEADQGDREEMIRRLEEEERELDAAIEEGERIQRLKEQRQAIRQQLNEARGAK

SEQ ID NO: 29248 - DNA, 494 bp, Muscodor strobelii
  misc_feature: SGI EST ID NO. CUFF.69141.0
  misc_feature: Variant of the nucleotide sequence at SEQ ID NO 29246
gagcagggctattatggaccaccgagagagctctcaggcacaccgttttctgaacaaccaacgcagtactcggtaggtgcatatgcggctcatcaacactctggcccactagaacaaggccaattcgacgagaatctcaactcaggaaaggcagcacggtggcatgctcctactggaagtctcgagcatcgacaagtatctacatcagccacgccggccatgatagcatcatggacagctgcagccgaagcggaccaaggggatcgcgaggagatgattaggagattagaagaagaggaacgagaactagacgcagcgatagaggagggcgaacggatacaacgattgaaggagcaacgtcaggccataagacagcaactaaatgaagccaggggcgcgaagtgatcaagcaactatttgcagcgttaccgcttgatactcgcggaagtctgatacatgaagtatctggtcagaccatcaatggatagtagccc

SEQ ID NO: 29249 - DNA, 1758 bp, Muscodor strobelii
  misc_feature: SGI cDNA ID NO. 570043
  misc_feature: Encodes the peptide sequence at SEQ ID NO 29250
atgacaggtactccccagtctccggcattgtcaggcactccgctgtctgagcaatctcgccatgaggttgatgtgatcacggagcatctaccggcgggctatactgctgacttcttagcttctagtcatgtaccagaagcttcctcgtctgcgcctaatctcacggagcctcctagtgaggactccttgaagctacaaggcggcgatattcaccgagacttgttcaaagcagcgacgagggcgagcatgcataaaaggtctaacacatttcatcatccggtgataaatcacgatgacgacgatgatctggagcctttgtccgtcaatgcccaactggctcccggcgggtttcgaagggcattcttggcacagaaacagaccagcgacatctgggctgcgaggataccagtgacgcggaacttcgtcgagtttctcgatctctacgggagctttgccggtgaagatcttgccgattcggacgatgaggcaatcgacgatgagcctgaagaggaagacgagccaccaaccgagaccagacctcttctgggacggaggaaaagctcacgaggcctgaggaggacagctacggccagcaccagcaagacgttcttcacgttgctgaaggcttttattggtactggaatcatgtttcttcccaaggcttttgataatggcggcatgttgttctcatctatcaccatgctcgtcgtctcctgtgtcaccatgcttgcttttcaccttctgctaatatgcaaagccaaggttggaggtggttatggtgatattggtgaagctatcgctggaccccgtatgagaagcttgatcttggcttccatcacgttgtcgcagctgggattcgtttgctcgggaacggtgttcgtggcagagaatctcacgtctttcttcgaggctgtcactcatggccatagtccattctctgccaccactctcatactcgtccaggtcgtcgtgcttataccattatcattcatccgaaacattgcaaagctaggccctgttgccttgtttgccgatgtctttattctcattggtgttagctacatctactactacgatatcgcacatcttgctaccgagggactaaaccagacggtcgtcctcttcaaccccgccaaatacacgctcatgatcggatccgcaatcttcaccttcgagggtatcggcctcattttacccattcaagactccatggcgaaaccccagcggtttgagtggcttctcggtgtcgtcatgattctcattaccatcgtattcacggctgtcggtatcctttgttatgcgacattcggcaaagacacctcgattgaaatcatcaacaactacccgcagacaagcaagttcgtgaacgcagtacaatttctctattcccttgctgtccttggtgggaatcccgtccaattgttcccggccctcagaattcttgagggcaggattttcggttcacgatccggcaagaaaagcatgagaacgaagtggaagaagaacgccttccgggcctttcttgtcgccatttgcggtggtatatcgatcctcggcgccggcaaccttgataagcttgtggcccttatcggatctttcgcttgtgtaccacttgtatacatctaccccgcgtatctgcactacaagggcgttgcgacatcgaaatgggcgaagacgggcgaccttgtgttcatgatagtgggtcttgttgcttgcgttttcacgactgtagtcacgattgttactagcttcatgtaa

SEQ ID NO: 29250 - protein, 585 aa, Muscodor strobelii
  misc_feature: SGI Peptide ID NO. 570043
  misc_feature (195)..(581): Pfam Id: PF01490 Pfam Desc: Transmembrane amino acid transporter protein
  misc_feature (1)..(580): NCBI GI: 169606530 Blast Desc: SNOG_06308 [Phaeosphaeria nodorum SN15] gi|160707017|gb|EAT86139.2| SNOG_06308 [Phaeosphaeria nodorum SN15]
  misc_feature (13)..(569): NCBI GI: 164425475 Blast Desc: NCU05775 [Neurospora crassa OR74A] gi|157070940|gb|EAA30799.2| NCU05775 [Neurospora crassa OR74A]
  misc_feature (22)..(585): NCBI GI: 171677286 Blast Desc: protein product [Podospora anserina] gi|170936711|emb|CAP61369.1| protein product [Podospora anserina]
  misc_feature (11)..(585): NCBI GI: 261354649 Blast Desc: vacuolar amino acid transporter 3 [Verticillium albo-atrum VaMs.102]
  misc_feature (1)..(580): NCBI GI: 189193265 Blast Desc: conserved [Pyrenophora tritici-repentis Pt-1C-BFP] gi|187978535|gb|EDU45161.1| conserved [Pyrenophora tritici-repentis Pt-1C-BFP]
  misc_feature (1)..(582): NCBI GI: 149211203 Blast Desc: MGCH7_ch7g1062 [Magnaporthe grisea 70-15] gi|86197017|gb|EAQ71655.1| MGCH7_ch7g1062 [Magnaporthe grisea 70-15]
  misc_feature (3)..(580): NCBI GI: 46109000 Blast Desc: FG01382.1 [Gibberella zeae PH-1]
  misc_feature (17)..(580): NCBI GI: 115433789 Blast Desc: conserved [Aspergillus terreus NIH2624] gi|114189883|gb|EAU31583.1| conserved [Aspergillus terreus NIH2624]
  misc_feature (8)..(579): NCBI GI: 119497647 Blast Desc: amino acid transporter, [Neosartorya fischeri NRRL 181] gi|119413745|gb|EAW23684.1| amino acid transporter, [Neosartorya fischeri NRRL 181]
  misc_feature (14)..(579): NCBI GI: 159128582 Blast Desc: amino acid transporter, [Aspergillus fumigatus A1163]
MTGTPQSPALSGTPLSEQSRHEVDVITEHLPAGYTADFLASSHVPEASSSAPNLTEPPSEDSLKLQGGDIHRDLFKAATRASMHKRSNTFHHPVINHDDDDDLEPLSVNAQLAPGGFRRAFLAQKQTSDIWAARIPVTRNFVEFLDLYGSFAGEDLADSDDEAIDDEPEEEDEPPTETRPLLGRRKSSRGLRRTATASTSKTFFTLLKAFIGTGIMFLPKAFDNGGMLFSSITMLVVSCVTMLAFHLLLICKAKVGGGYGDIGEAIAGPRMRSLILASITLSQLGFVCSGTVFVAENLTSFFEAVTHGHSPFSATTLILVQVVVLIPLSFIRNIAKLGPVALFADVFILIGVSYIYYYDIAHLATEGLNQTVVLFNPAKYTLMIGSAIFTFEGIGLILPIQDSMAKPQRFEWLLGVVMILITIVFTAVGILCYATFGKDTSIEIINNYPQTSKFVNAVQFLYSLAVLGGNPVQLFPALRILEGRIFGSRSGKKSMRTKWKKNAFRAFLVAICGGISILGAGNLDKLVALIGSFACVPLVYIYPAYLHYKGVATSKWAKTGDLVFMIVGLVACVFTTVVTIVTSFM

SEQ ID NO: 29251 - DNA, 2436 bp, Muscodor strobelii
  misc_feature: SGI EST ID NO. CUFF.69175.0
  misc_feature: Variant of the nucleotide sequence at SEQ ID NO 29249
cttcaagacttctccaagctctcgacgagtccatcttcatcaattcattcgtgatagtagcgaacattgctggtgcggcaatcgccagtatatctttttaccagtaaggaccttttgctgatactggatacatcttctcaacaccgaccgtatggcttcgcggtgccagactgttgcgctatcgaggtcaggttgatttcgggttgctaggtcaaacattattaccctcatcttccacgttcgcctggtctcgagtctttgtcgtcaaaatgacaggtactccccagtctccggcattgtcaggcactccgctgtctgagcaatctcgccatgaggttgatgtgatcacggagcatctaccggcgggctatactgctgacttcttagcttctagtcatgtaccagaagcttcctcgtctgcgcctaatctcacggagcctcctagtgaggactccttgaagctacaaggcggcgatattcaccgagacttgttcaaagcagcgacgagggcgagcatgcataaaaggtctaacacatttcatcatccggtgataaatcacgatgacgacgatgatctggagcctttgtccgtcaatgcccaactggctcccggcgggtttcgaagggcattcttggcacagaaacagaccagcgacatctgggctgcgaggataccagtgacgcggaacttcgtcgagtttctcgatctctacgggagctttgccggtgaagatcttgccgattcggacgatgaggcaatcgacgatgagcctgaagaggaagacgagccaccaaccgagaccagacctcttctgggacggaggaaaagctcacgaggcctgaggaggacagctacggccagcaccagcaagacgttcttcacgttgctgaaggcttttattggtactggaatcatgtttcttcccaaggcttttgataatggcggcatgttgttctcatctatcaccatgctcgtcgtctcctgtgtcaccatgcttgcttttcaccttctgctaatatgcaaagccaaggttggaggtggttatggtgatattggtgaagctatcgctggaccccgtatgagaagcttgatcttggcttccatcacgttgtcgcagctgggattcgtttgctcgggaacggtgttcgtggcagagaatctcacgtctttcttcgaggctgtcactcatggccatagtccattctctgccaccactctcatactcgtccaggtcgtcgtgcttataccattatcattcatccgaaacattgcaaagctaggccctgttgccttgtttgccgatgtctttattctcattggtgttagctacatctactactacgatatcgcacatcttgctaccgagggactaaaccagacggtcgtcctcttcaaccccgccaaatacacgctcatgatcggatccgcaatcttcaccttcgagggtatcggcctcattttacccattcaagactccatggcgaaaccccagcggtttgagtggcttctcggtgtcgtcatgattctcattaccatcgtattcacggctgtcggtatcctttgttatgcgacattcggcaaagacacctcgattgaaatcatcaacaactacccgcagacaagcaagttcgtgaacgcagtacaatttctctattcccttgctgtccttggtgggaatcccgtccaattgttcccggccctcagaattcttgagggcaggattttcggttcacgatccggcaagaaaagcatgagaacgaagtggaagaagaacgccttccgggcctttcttgtcgccatttgcggtggtatatcgatcctcggcgccggcaaccttgataagcttgtggcccttatcggatctttcgcttgtgtaccacttgtatacatctaccccgcgtatctgcactacaagggcgttgcgacatcgaaatgggcgaagacgggcgaccttgtgttcatgatagtgggtcttgttgcttgcgttttcacgactgtagtcacgattgttactagcttcatgtaactgaacagagttgacctgaaaattggttgtttggctcgggtgtacacgagcatgatatatgataaagcgggagagaatgatttggaaacatcaacgatcattcgaacggatgatatacactcgattgatataatatcttattagagtagaaaaagcgtattgagaactcaattgaatgagacgagtagatttcggacacgttctcatgtcttgaaacacgaagaagctcccaaaatctgcaattcagcgcgattacttgctcatctttagacgataagtatgtgaacgacaagtctgtaatacgcgaaggccacagcttatgcgcctcgccacacgtatgtaacacgaatgaaataatttcatgaggcttcacttgtgtaggagttgagatttttggcctgttggcgtt

SEQ ID NO: 29252 - DNA, 1668 bp, Muscodor strobelii
  misc_feature: SGI cDNA ID NO. 570044
  misc_feature: Encodes the peptide sequence at SEQ ID NO 29253
atggcggcggtacttgaaggaaagaacgccgatagtggcaccaacgagaagtcctcgtctaacgatgggtctatccagttcgaagaatcccatgaccagcttcagcgtcatctggggaaccgtcagatccaattgcttgctatcggcggcaccattggaacaggtctcttcgttagtatcggcggcggtcttgccaaaggaggccctgccaatctgcttctcgggtactcactccatgccgcaatggtctgtctcatcaacaatcatcttgcggaaatgacttgttacatgcccgtctccggctcctttattcgatttgctggtcgttgggtcgacgaatcgctcggctttcttgctggctggaacttttttctctacgaagctatcttgattcctttcgagattacagcgctcaacctagttctcaccttttggacggacaaaatccccccggcagcgatcattgtcgtcgtaataatattatacgccctgatcaacattttagcagtgaaatactacggtgaagctgagttttatctggctttcggcaaactactgctcattggaattgtcttttccttcaccttcattacggctgttggtggcaacccccagcacgaaccattcgggttccggtactggtacactccaggtgctttccacgagtatatgtccagtggtgcgctcggtcgcttcgagggttttttgggatcactcttctctgcttgcttcactgttgtcgggcctgagtacattgctatggttgctggagaggctgagcgtccccgcgtctacttgaaaaatggcttcaaaacggtctatgttcgattcttcatctttttcgttctcggagccttggctgttggtgttcttgttccttacgacaatgaaagcctcaacgaccccagcggcactgccaaggcctcgccatacgtcattgctatgcagcttatgggcgtttctgttctgcctcatatcatcaacgccctccttattacaagtatcttcagtgccggcaatgcctatgtctattgtggcatgcggtccctctacggcttggcttgcgatggtcatgcgcccatgattttcaagaagaccatgaagaacggtattcctatctatgcctttggcgtcactatgctattcccctttttatcgttcctgcaggttggcagcagcacaggaagcgccgtctcaattctacaatccgttacggagggtgccaccatgattacatacatcatcatgagtctgacgtacattttcttctaccgagctctcaaggcgcaaggtattgaccgcaacactcttccatacaaaggttggctccagccatatagtgcctatgtcaccctcgtgtacatgactctcatcgagggcatctttggatacgtcgttttcaagcctggccaatgggatctcgagggtttcttcgctccctataccatggccttcgtcgccatcatactctacttcggctggaaactctggcaccgtaccaagttcatttcgcctctcgaggccgacctagtgtgggagaagccgcaaatcgatgcgtacgaggccagctttaccgagccaccgacccgattccgggatgaactttgggcctacattacaggcaagaacaagaagaacgaaaatcacatgggtgaggatatcagctga

SEQ ID NO: 29253 - protein, 555 aa, Muscodor strobelii
  misc_feature: SGI Peptide ID NO. 570044
  misc_feature (42)..(507): Pfam Id: PF00324 Pfam Desc: Amino acid permease
  misc_feature (12)..(549): NCBI GI: 256720148 Blast Desc: NECHADRAFT_56408 [Nectria haematococca mpVI 77-13-4]
  misc_feature (6)..(535): NCBI GI: 156030993 Blast Desc: SS1G_14277 [Sclerotinia sclerotiorum 1980] gi|154700668|gb|EDO00407.1| SS1G_14277 [Sclerotinia sclerotiorum 1980]
  misc_feature (11)..(555): NCBI GI: 212544061 Blast Desc: general amino acid permease, [Penicillium marneffei ATCC 18224] gi|210067092|gb|EEA21185.1| general amino acid permease, [Penicillium marneffei ATCC 18224]
  misc_feature (6)..(544): NCBI GI: 46116680 Blast Desc: FG04182.1 [Gibberella zeae PH-1]
  misc_feature (6)..(535): NCBI GI: 189198225 Blast Desc: histidine permease [Pyrenophora tritici-repentis Pt-1C-BFP] gi|187981398|gb|EDU48024.1| histidine permease [Pyrenophora tritici-repentis Pt-1C-BFP]
  misc_feature (7)..(553): NCBI GI: 169768888 Blast Desc: [Aspergillus oryzae RIB40] gi|83766772|dbj|BAE56912.1| protein product [Aspergillus oryzae]
  misc_feature (7)..(553): NCBI GI: 238501312 Blast Desc: arginine permease, [Aspergillus flavus NRRL3357] gi|220692127|gb|EED48474.1| arginine permease, [Aspergillus flavus NRRL3357]
  misc_feature (16)..(535): NCBI GI: 169605949 Blast Desc: SNOG_06007 [Phaeosphaeria nodorum SN15] gi|111065951|gb|EAT87071.1| SNOG_06007 [Phaeosphaeria nodorum SN15]
  misc_feature (28)..(545): NCBI GI: 256725607 Blast Desc: [Nectria haematococca mpVI 77-13-4]
  misc_feature (4)..(535): NCBI GI: 115401114 Blast Desc: conserved [Aspergillus terreus NIH2624] gi|114190086|gb|EAU31786.1| conserved [Aspergillus terreus NIH2624]
MAAVLEGKNADSGTNEKSSSNDGSIQFEESHDQLQRHLGNRQIQLLAIGGTIGTGLFVSIGGGLAKGGPANLLLGYSLHAAMVCLINNHLAEMTCYMPVSGSFIRFAGRWVDESLGFLAGWNFFLYEAILIPFEITALNLVLTFWTDKIPPAAIIVVVIILYALINILAVKYYGEAEFYLAFGKLLLIGIVFSFTFITAVGGNPQHEPFGFRYWYTPGAFHEYMSSGALGRFEGFLGSLFSACFTVVGPEYIAMVAGEAERPRVYLKNGFKTVYVRFFIFFVLGALAVGVLVPYDNESLNDPSGTAKASPYVIAMQLMGVSVLPHIINALLITSIFSAGNAYVYCGMRSLYGLACDGHAPMIFKKTMKNGIPIYAFGVTMLFPFLSFLQVGSSTGSAVSILQSVTEGATMITYIIMSLTYIFFYRALKAQGIDRNTLPYKGWLQPYSAYVTLVYMTLIEGIFGYVVFKPGQWDLEGFFAPYTMAFVAIILYFGWKLWHRTKFISPLEADLVWEKPQIDAYEASFTEPPTRFRDELWAYITGKNKKNENHMGEDIS

SEQ ID NO: 29254 - DNA, 5304 bp, Muscodor strobelii
  misc_feature: SGI EST ID NO. CUFF.69226.0
  misc_feature: Variant of the nucleotide sequence at SEQ ID NO 29252
cacaattgtagattgttgtttctcaactgggtgcgggattgaatactcttactgcccagagcctgctcttctcttgttatcaaggctgtcctgtacagtactgtattttctgttgtggggcctagatcccggaacctactatacaaaaccccatccccgttccgtcctccgttacagttttctcccggtcttgattttttgttcattttttattcactctatcgtgaccattctttgcttcgaagggctgacttacctcgtcgcctttcttcatacccatagtggtttggaatatttaacccaattctttcaactgcgcccttgcgaaccagagtaatgcaaacggggttccagagcttctactcagcctatacaccctccaacattccgctcgatcagcggagtaacctctctagttggcattatggcggcggtacttgaaggaaagaacgccgatagtggcaccaacgagaagtcctcgtctaacgatgggtctatccagttcgaagaatcccatgaccagcttcagcgtcatctggggaaccgtcagatccaattgcttgctatcggcggcaccattggaacaggtctcttcgttagtatcggcggcggtcttgccaaaggaggccctgccaatctgcttctcgggtactcactccatgccgcaatggtctgtctcatcaacaatcatcttgcggaaatgacttgttacatgcccgtctccggctcctttattcgatttgctggtcgttgggtcgacgaatcgctcggctttcttgctggctggaacttttttctctacgaagctatcttgattcctttcgagattacagcgctcaacctagttctcaccttttggacggacaaaatccccccggcagcgatcattgtcgtcgtaataatattatacgccctgatcaacattttagcagtgaaatactacggtgaagctgagttttatctggctttcggcaaactactgctcattggaattgtcttttccttcaccttcattacggctgttggtggcaacccccagcacgaaccattcgggttccggtactggtacactccaggtgctttccacgagtatatgtccagtggtgcgctcggtcgcttcgagggttttttgggatcactcttctctgcttgcttcactgttgtcgggcctgagtacattgctatggttgctggagaggctgagcgtccccgcgtctacttgaaaaatggcttcaaaacggtctatgttcgattcttcatctttttcgttctcggagccttggctgttggtgttcttgttccttacgacaatgaaagcctcaacgaccccagcggcactgccaaggcctcgccatacgtcattgctatgcagcttatgggcgtttctgttctgcctcatatcatcaacgccctccttattacaagtatcttcagtgccggcaatgcctatgtctattgtggcatgcggtccctctacggcttggcttgcgatggtcatgcgcccatgattttcaagaagaccatgaagaacggtattcctatctatgcctttggcgtcactatgctattcccctttttatcgttcctgcaggttggcagcagcacaggaagcgccgtctcaattctacaatccgttacggagggtgccaccatgattacatacatcatcatgagtctgacgtacattttcttctaccgagctctcaaggcgcaaggtattgaccgcaacactcttccatacaaaggttggctccagccatatagtgcctatgtcaccctcgtgtacatgactctcatcgagggcatctttggatacgtcgttttcaagcctggccaatgggatctcgagggtttcttcgctccctataccatggccttcgtcgccatcatactctacttcggctggaaactctggcaccgtaccaagttcatttcgcctctcgaggccgacctagtgtgggagaagccgcaaatcgatgcgtacgaggccagctttaccgagccaccgacccgattccgggatgaactttgggcctacattacaggcaagaacaagaagaacgaaaatcacatgggtgaggatatcagctgaacatgagtaccccagtgatcggtgagcgagcgtatctggaaatgatacgctcacaaaccgagtctcaattctgcaggacaatactttgttttccacttgtatatacgcttcagtaattttcctcaacataatataccccagtcagctttttcttagcttatctcaaagtcatttcctcgtcatttccgtcatttccgtctatttgacttattgaccccgcgatcctagcgggcggtgaacgcaggcaggacaaagtatgaaggagaagaacgcgtagatctctagaggacatcgtcctgtcaatgagttacgtggaagactatctacacagtacaacactagtctcatcggctttacaccatctccgtctttccatcctaccatagctaacatttggtccaattacggcagtggcaagacacgattccccattcgcgtcaagatgtcgattctactgctgcacattcaacatacatcaattggacagcagcagtctagtatgatatttcaggtgccgtcaagctctcaacaacacacgtctgccaatgtcggaaaacgctgtacacaacaattcattcttttgctaggatgtacatcctttgctgtggccttttcaggatttgatatgagtgccgcaagtctcgaatctctctttggcttatcttcagaggatgatgctcacagcgatttccctatacgacagatccgagacgcgaggtcttatcgcactgcctcggatcatcaccgacgtgttcagatggattgactttccatctgtgattttcgtactcgtacagaactatgattcataagacggacaccgcgtgcgaaaaggctcattcatgctcgatgattgcgtacaatccaaatagatgaccgcacccagctcgagaaggattcagcttgttggtcagctcagatctcgtcatgatatgatgcaccactgatcgatgtaggcggcaccagctctgttgttttcgagcgcttgcaatttgcatcgattgcattagctgctcctgcgagatctcgaaatgtcgaacaacgaacgatttgtcatgtttacttcggggttgatgggtccggtgatagatccggtaatgaactcgtcttgttgccgacgacgggaggcgggcttgtcgggtttcatcgcattgtcctgcacaacagccgtgctgtttgccttggtatcggtagtttcgtctcgctggcagtcctgtggcttgcgtttcttgcttggtctgtaagtgcgctcgttgacgcacccggttcctgctgaagctatctgacgcatctcctccttgttgacatcatactccaccccaatacccgcttgcgtgcgaatagtgtctatccatccattggaaatgtcgacgtgaccattagagatgaagttcaagacttcggaaggattcgctttatccagttctttacaccccttgaggatgaagatcttcatgatccgggagtcgcaagtcgtgactggagcaagccagaaatcccaaatgccgagtccaagggccatgatgtggataggatcggggtatagcattcctttgaagccgtattgctgagctttctcaaggtcaatcccaagctgttcgtacttgtccaccgagaggtacgtcttcgtggccggatgcgtagtgacgactgtgccgcatgctactgctaacttggaggctggacgaagggagaccactctatcactcctttcaatttctttctatattccactattagtcggctactccaccatctgacgagactacggagagatctgggaaacttacacacgtatgtgggaaagatatggcagcctccttgtcatgtcgaatctttttcatctggagtaggttccagacactaggtatctcgaatctgaagatatttctattctgtggatcacagaaagtccggagcgagcggacgcagcggtcaagccagagcttgcagcgtttacactgctcaaaatggtcaaggaccttggcacaagggtctgcgagaaacttcgcttgttgtgactgaggcatagggacatagcctgcgtggggaagaactcttccaacaccaacccaacggttgaagctcatgctgatgtcaggattgtaaggaggtgtggtgtaagtcgcaaggtcatcgatgtcgaaagtgacgggggtattagcgttaccatcgagattctctcccgcgttcgcagctttggaggtattggggatgacagggtccgatggacataccagggaactttcaactggaacacacttgggagtaagaatgttgctacatcctccagccacatcttcgaccatcttgtcagagagtatagactcgaaggcggcatggctgtcgctgattggctctgccataggtttcattgtggttttgatgagatgggtctcggctgcggaaatctctgaccactgtgagtctgatgtagactcgaccgtgctggagtatgagagatccccgaagtcttcgactacactgtcagccgcatgttcacatgtaccctcaacagtttcggtaacaccgcgatcgacatgattgcgcgccaagtctaacattggtgttgaggcggcgggttgtaccttctggccatcagaaactccagatagttcttcagggcttgtggttgtaacccattcttcgcgttttgacaacatttcgatcaatccatagcaggatatttatgctctttttggagtacaccgttcgtgctagggatgatcatttgcctcgcaggatgacaatagaatgaagtctcgagtcaatggacacccgcgagagacggagcaatctgtgtttgtggcaccgaagtcccagaggatggaagaacaaacgactgttgggtcggtgtgaaaaagaattgcgtgagagacgtggtagtttcgttacatgaacctcgccaagtgagagcagtgttcgggccgatgatgatatgtatgggtagtaaacattgaatcacaggcgagccacaaaggatgaagaagtagcaccgacaggtacgaagtacaatggcccaggcaagtgctttcttgaatactgcgccggagcaacaggctttggccccacgaccctgtcgtcgttaaggccattgtcgagtgtcctgggtggccagataaatgtgcaattagagcagcaacaagcttgacaagaggagcaaccagcgagttacatgtcatgaaccagaataagatgcacatttgtgcata

SEQ ID NO: 29255 - DNA, 1590 bp, Muscodor strobelii
  misc_feature: SGI cDNA ID NO. 570045
  misc_feature: Reduced expression when VOC is produced
  misc_feature: Encodes the peptide sequence at SEQ ID NO 29256
atgttgtcaaaacgcgaagaatgggttacaaccacaagccctgaagaactatctggagtttctgatggccagaaggtacaacccgccgcctcaacaccaatgttagacttggcgcgcaatcatgtcgatcgcggtgttaccgaaactgttgagggtacatgtgaacatgcggctgacagtgtagtcgaagacttcggggatctctcatactccagcacggtcgagtctacatcagactcacagtggtcagagatttccgcagccgagacccatctcatcaaaaccacaatgaaacctatggcagagccaatcagcgacagccatgccgccttcgagtctatactctctgacaagatggtcgaagatgtggctggaggatgtagcaacattcttactcccaagtgtgttccagttgaaagttccctggtatgtccatcggaccctgtcatccccaatacctccaaagctgcgaacgcgggagagaatctcgatggtaacgctaatacccccgtcactttcgacatcgatgaccttgcgacttacaccacacctccttacaatcctgacatcagcatgagcttcaaccgttgggttggtgttggaagagttcttccccacgcaggctatgtccctatgcctcagtcacaacaagcgaagtttctcgcagacccttgtgccaaggtccttgaccattttgagcagtgtaaacgctgcaagctctggcttgaccgctgcgtccgctcgctccggactttctgtgatccacagaatagaaatatcttcagattcgagatacctagtgtctggaacctactccagatgaaaaagattcgacatgacaaggaggctgccatatctttcccacatacgtgtaaagaaattgaaaggagtgatagagtggtctcccttcgtccagcctccaagttagcagtagcatgcggcacagtcgtcactacgcatccggccacgaagacgtacctctcggtggacaagtacgaacagcttgggattgaccttgagaaagctcagcaatacggcttcaaaggaatgctataccccgatcctatccacatcatggcccttggactcggcatttgggatttctggcttgctccagtcacgacttgcgactcccggatcatgaagatcttcatcctcaaggggtgtaaagaactggataaagcgaatccttccgaagtcttgaacttcatctctaatggtcacgtcgacatttccaatggatggatagacactattcgcacgcaagcgggtattggggtggagtatgatgtcaacaaggaggagatgcgtcagatagcttcagcaggaaccgggtgcgtcaacgagcgcacttacagaccaagcaagaaacgcaagccacaggactgccagcgagacgaaactaccgataccaaggcaaacagcacggctgttgtgcaggacaatgcgatgaaacccgacaagcccgcctcccgtcgtcggcaacaagacgagttcattaccggatctatcaccggacccatcaaccccgaagtaaacatgacaaatcgttcgttgttcgacatttcgagatctcgcaggagcagctaa

SEQ ID NO: 29256 - protein, 529 aa, Muscodor strobelii
  misc_feature: SGI Peptide ID NO. 570045
  misc_feature: Useful for introducing or modulating the production of volatile compounds
MLSKREEWVTTTSPEELSGVSDGQKVQPAASTPMLDLARNHVDRGVTETVEGTCEHAADSVVEDFGDLSYSSTVESTSDSQWSEISAAETHLIKTTMKPMAEPISDSHAAFESILSDKMVEDVAGGCSNILTPKCVPVESSLVCPSDPVIPNTSKAANAGENLDGNANTPVTFDIDDLATYTTPPYNPDISMSFNRWVGVGRVLPHAGYVPMPQSQQAKFLADPCAKVLDHFEQCKRCKLWLDRCVRSLRTFCDPQNRNIFRFEIPSVWNLLQMKKIRHDKEAAISFPHTCKEIERSDRVVSLRPASKLAVACGTVVTTHPATKTYLSVDKYEQLGIDLEKAQQYGFKGMLYPDPIHIMALGLGIWDFWLAPVTTCDSRIMKIFILKGCKELDKANPSEVLNFISNGHVDISNGWIDTIRTQAGIGVEYDVNKEEMRQIASAGTGCVNERTYRPSKKRKPQDCQRDETTDTKANSTAVVQDNAMKPDKPASRRRQQDEFITGSITGPINPEVNMTNRSLFDISRSRRSS

SEQ ID NO: 29257 - DNA, 840 bp, Muscodor strobelii
  misc_feature: SGI cDNA ID NO. 570046
  misc_feature: Encodes the peptide sequence at SEQ ID NO 29258
atggctagaggctggcgcaagacgcttcaaggccgtattcggtggctgccagagaagcgcgagcagcggactgctgagccatttatcgccgactacatttacaatcatcctgttgttgtcctttcagagaagcaaactggtggtagagtcgaggcagttatgattacctcattccacaagaggaggccttcggacattttcaacaagtcgcatggagctatacgttcaatgcacctgtcgattgcccatgacgatcacaccgcgaacgatgacttggtggatgagatcgcccttcaattgactgacccaggccgccgtcttgccagaaagtcatatgtaaatctaggagctcatttcaccattccctacgcctggctagaggactgcgtctcctcaatgcgtggtctacgcttaactaaagactcatgcgcccatatcatcgctgccttgcgcgagactggccccgagatcctccaaggctccgtactaggctggacctctcgcactccgtcctcactttcgtttctctgtccgcctatgtcaagcgaagttgggttggttgtctcacgatctaaggaagagaccagagacacactgtcgagggtcgtcgacgccacaagaagaattccgaaaccctaccctactggagcgtccagtaatggaagcacggtgcaaatggacctggcagattggcattgtgctcagttaccctcgatgctgagaagaccattggaacacgataattacgcgcccattggcacacacacaagaccggaggattggaccacgtatgggtcctgggaaagcgactcgtatatatcccatttcaaatctgaatag

SEQ ID NO: 29258 - protein, 279 aa, Muscodor strobelii
  misc_feature: SGI Peptide ID NO. 570046
  misc_feature (11)..(157): NCBI GI: 85090369 Blast Desc: NCU07797 [Neurospora crassa OR74A] gi|28919742|gb|EAA29147.1| [Neurospora crassa OR74A]
  misc_feature (9)..(128): NCBI GI: 85090383 Blast Desc: NCU07804 [Neurospora crassa OR74A] gi|28919749|gb|EAA29154.1| [Neurospora crassa OR74A]
MARGWRKTLQGRIRWLPEKREQRTAEPFIADYIYNHPVVVLSEKQTGGRVEAVMITSFHKRRPSDIFNKSHGAIRSMHLSIAHDDHTANDDLVDEIALQLTDPGRRLARKSYVNLGAHFTIPYAWLEDCVSSMRGLRLTKDSCAHIIAALRETGPEILQGSVLGWTSRTPSSLSFLCPPMSSEVGLVVSRSKEETRDTLSRVVDATRRIPKPYPTGASSNGSTVQMDLADWHCAQLPSMLRRPLEHDNYAPIGTHTRPEDWTTYGSWESDSYISHFKSE

SEQ ID NO: 29259 - DNA, 1080 bp, Muscodor strobelii
  misc_feature: SGI cDNA ID NO. 570047
  misc_feature: Encodes the peptide sequence at SEQ ID NO 29260
atggagatccccaaaacgatgcgcgcagcacagataacagcgttcaatcagccctacgagctgcgcaccataccagttccttcggatttagaaccatttgatgttctgattaaagtcgcagtggcctcccattgctacacggatttcaatgtgattttggggaaatggactactcctctcccatgcaccggctcccatgagggtaccggcattgtcgtcgcggtcggcagtgctgtctcatccggagagctacgcgtcggagaccgagttatgggcggcatgctacagcgcacatgtggcgtgtgctacgactgtactggcccagagaccaaccgccagtactgcgcatcgatgactggctatccaggggtcacgggcaatggtttctatgccgaatatgtccgtgtagacgcgcggcacaccgctaagctcccagaaggggtagacatgatcactggaagtcctcttgcgtgtgccggtcgcacggtctggagagcgctcaaggtagcagatcttgttgccgggcagtccgttgcaataataggagctggcggtgggttagggcacctcgcagtacagtttgcaaaggcaaagggtttcagggtcctcgctatcgatatcagagacgaggcattggcgcttgctcaggaactcggcgcagatgagacctttgatgcgcgccaaggcgacgcgaatacgatcgcagctattcgcgctgctactgatggtcttggggctcactgcactatcaatctgagtgtcgcgcgaacgtcagcagcactcgcttgcgccattacacgtatgcatcatactgtcatccaagttgcggagccagaggttgtagagattccgccagatgaattagtgtttagagacatcagaatcaggagcactttgattgcatccggcgacgaatcaagggagatgttacgcgatgcagctaatcacaagatccgtgtcaagacggagtgtttctacgggcttgagaaactgccagagatggtgactaaagcaagaaaccctcaacagactggtaaactctgtctcgtgattgatgaaaaacagcttattcacgcctag

SEQ ID NO: 29260 - protein, 359 aa, Muscodor strobelii
  misc_feature: SGI Peptide ID NO. 570047
  misc_feature (32)..(144): Pfam Id: PF08240 Pfam Desc: Alcohol dehydrogenase GroES-like domain
  misc_feature (174)..(315): Pfam Id: PF00107 Pfam Desc: Zinc-binding dehydrogenase
  misc_feature (58)..(356): NCBI GI: 169602088 Blast Desc: SNOG_03921 [Phaeosphaeria nodorum SN15] gi|160706076|gb|EAT89126.2| SNOG_03921 [Phaeosphaeria nodorum SN15]
  misc_feature (5)..(353): NCBI GI: 56961828 Blast Desc: alcohol dehydrogenase [Bacillus clausii KSM-K16] gi|56908062|dbj|BAD62589.1| alcohol dehydrogenase [Bacillus clausii KSM-K16]
  misc_feature (3)..(332): NCBI GI: 45381988 Blast Desc: alcohol dehydrogenase [Candida boidinii]
  misc_feature (1)..(349): NCBI GI: 241949417 Blast Desc: 40 kDa allergen, ; alcohol dehydrogenase, [Candida dubliniensis CD36] gi|223640769|emb|CAX45084.1| 40 kDa allergen, ; alcohol dehydrogenase, [Candida dubliniensis CD36]
  misc_feature (1)..(349): NCBI GI: 255732521 Blast Desc: alcohol dehydrogenase 2 [Candida tropicalis MYA-3404] gi|240131470|gb|EER31030.1| alcohol dehydrogenase 2 [Candida tropicalis MYA-3404]
  misc_feature (1)..(349): NCBI GI: 151946011 Blast Desc: alcohol dehydrogenase II [Saccharomyces cerevisiae YJM789]
  misc_feature (1)..(346): NCBI GI: 255714885 Blast Desc: KLTH0E05588p [Lachancea thermotolerans] gi|238935106|emb|CAR23287.1| KLTH0E05588p [Lachancea thermotolerans]
  misc_feature (3)..(349): NCBI GI: 50290317 Blast Desc: CAGL0I07843g [Candida glabrata CBS138] gi|49526900|emb|CAG60527.1| protein product [Candida glabrata]
  misc_feature (1)..(349): NCBI GI: 37787785 Blast Desc: alcohol dehydrogenase 2 [Saccharomyces bayanus]
  misc_feature (1)..(349): NCBI GI: 728802 Blast Desc: ADH1_KLUMA RecName: Full=Alcohol dehydrogenase 1 gi|297908|emb|CAA42785.1| alcohol dehydrogenase [Kluyveromyces marxianus]
  misc_feature (1)..(334): SWISSPROT Homolog: EC 1.1.1.1 Alcohol dehydrogenase
MEIPKTMRAAQITAFNQPYELRTIPVPSDLEPFDVLIKVAVASHCYTDFNVILGKWTTPLPCTGSHEGTGIVVAVGSAVSSGELRVGDRVMGGMLQRTCGVCYDCTGPETNRQYCASMTGYPGVTGNGFYAEYVRVDARHTAKLPEGVDMITGSPLACAGRTVWRALKVADLVAGQSVAIIGAGGGLGHLAVQFAKAKGFRVLAIDIRDEALALAQELGADETFDARQGDANTIAAIRAATDGLGAHCTINLSVARTSAALACAITRMHHTVIQVAEPEVVEIPPDELVFRDIRIRSTLIASGDESREMLRDAANHKIRVKTECFYGLEKLPEMVTKARNPQQTGKLCLVIDEKQLIHA

SEQ ID NO: 29261 - DNA, 1393 bp, Muscodor strobelii
  misc_feature: SGI EST ID NO. CUFF.69194.0
  misc_feature: Variant of the nucleotide sequence at SEQ ID NO 29259
cgtaggttcctccatcgaggacacagcgcgtcatgtctagttcccagcatcagtgcatacgcccttcggatttaatgtcaagacatcagcacttaagccgaacacagttgtaatcccgtacacgaactcagcatctccatgacatttctgtccccgatattggaaaacaagtatacaaaacaaaaatacagcatcgtaactcaagctcgtcaatttgaaaagatcacgcaagctcctgtagccaatttgatctgtcccaaaagagtatggcgtcagacatggagatccccaaaacgatgcgcgcagcacagataacagcgttcaatcagccctacgagctgcgcaccataccagttccttcggatttagaaccatttgatgttctgattaaagtcgcagtggcctcccattgctacacggatttcaatgtgattttggggaaatggactactcctctcccatgcaccggctcccatgagggtaccggcattgtcgtcgcggtcggcagtgctgtctcatccggagagctacgcgtcggagaccgagttatgggcggcatgctacagcgcacatgtggcgtgtgctacgactgtactggcccagagaccaaccgccagtactgcgcatcgatgactggctatccaggggtcacgggcaatggtttctatgccgaatatgtccgtgtagacgcgcggcacaccgctaagctcccagaaggggtagacatgatcactggaagtcctcttgcgtgtgccggtcgcacggtctggagagcgctcaaggtagcagatcttgttgccgggcagtccgttgcaataataggagctggcggtgggttagggcacctcgcagtacagtttgcaaaggcaaagggtttcagggtcctcgctatcgatatcagagacgaggcattggcgcttgctcaggaactcggcgcagatgagacctttgatgcgcgccaaggcgacgcgaatacgatcgcagctattcgcgctgctactgatggtcttggggctcactgcactatcaatctgagtgtcgcgcgaacgtcagcagcactcgcttgcgccattacacgtatgcatcatactgtcatccaagttgcggagccagaggttgtagagattccgccagatgaattagtgtttagagacatcagaatcaggagcactttgattgcatccggcgacgaatcaagggagatgttacgcgatgcagctaatcacaagatccgtgtcaagacggagtgtttctacgggcttgagaaactgccagagatggtgactaaagcaagaaaccctcaacagactggtaaactctgtctcgtgattgatgaaaaacagcttattcacgcctagagcaattcagcgcgcacgagcaaatttcattttca

SEQ ID NO: 29262 - DNA, 984 bp, Muscodor strobelii
  misc_feature: SGI cDNA ID NO. 570048
  misc_feature: Elevated expression when VOC is produced
  misc_feature: Encodes the peptide sequence at SEQ ID NO 29263
atggctgctacacaggaccgactcattctaggtctgatgaccattggtcccgctgcagacaaaggagctcgtatcacatcgatggacgaatacaagaaatgcctggactacctagcatctaagggttacaaggagctcgactcagccggtgtctacgttggcggtctccaggaaggcttcacacgcgatgccggcttcaaagagcggggcttcgcgattgcttcaaaaatcatgcctactaccccaggcgagcatgcaccggagaaattgacaaagtcgtggaacacgagcctggagaaactcggcgtcagcggagctgatatcatgtatttgcatgcgcccgaccgtgccactcccttcgaggccacactagaggctgccgataagatgtatcgcgagggcaaattcaagcagttgggattgagtaacttcgcagcttgggaagtcgcagaagttgttggcatttgcgagaggagaggatttgtcaagccgacgatatatcagggaatgtacaatgcaatcactcgcgcgatggagtctgagctcaagccctgtcttgagaaatttggaatcgacctggtcatctacaacccactagccggcgggctattctcagggaagcacacaactcttgataaccccagcgaaggtcgatacagcaaggactacagcctttccaaaatgtacagagacagatacttcaagcagtccgtcattgacgctctggcagcagttgagccggcagcgaagaagcacgacatcccactaatcgaagttgcgctacgatgggttttgcatcacagcaagctcaaaccgaagatcaagggtggaaatgatggtgttatccttggaatcagctcctacgaccagctagtacagaatgtcgaggcatgcgaaaaggggcctctgccggatgatgttattgaggctttggacaaagcttggatgatagcgaaggctgaatcgcctacttactggcgataa

SEQ ID NO: 29263 - protein, 327 aa, Muscodor strobelii
  misc_feature: SGI Peptide ID NO. 570048
  misc_feature (8)..(316): Pfam Id: PF00248 Pfam Desc: Aldo/keto reductase family
  misc_feature (73)..(313): Pfam Id: PF00248 Pfam Desc: Aldo/keto reductase family
  misc_feature (5)..(327): NCBI GI: 189201860 Blast Desc: aflatoxin B1 aldehyde reductase member 2 [Pyrenophora tritici-repentis Pt-1C-BFP] gi|187984365|gb|EDU49853.1| aflatoxin B1 aldehyde reductase member 2 [Pyrenophora tritici-repentis
  misc_feature (7)..(327): NCBI GI: 238844553 Blast Desc: aflatoxin B1 aldehyde reductase member 2 [Microsporum canis CBS 113480]
  misc_feature (7)..(327): NCBI GI: 121701307 Blast Desc: aflatoxin B1-aldehyde reductase, [Aspergillus clavatus NRRL 1] gi|119397061|gb|EAW07492.1| aflatoxin B1-aldehyde reductase, [Aspergillus clavatus NRRL 1]
  misc_feature (7)..(327): NCBI GI: 145240225 Blast Desc: An08g06440 [Aspergillus niger] gi|134077274|emb|CAK45614.1| protein product [Aspergillus niger]
  misc_feature (7)..(327): NCBI GI: 115491995 Blast Desc: conserved [Aspergillus terreus NIH2624] gi|114197485|gb|EAU39185.1| conserved [Aspergillus terreus NIH2624]
  misc_feature (7)..(327): NCBI GI: 259489056 Blast Desc: TPA: aflatoxin B1-aldehyde reductase GliO-like, (AFU_orthologue; AFUA_1G13370) [Aspergillus nidulans FGSC A4]
  misc_feature (7)..(327): NCBI GI: 258572340 Blast Desc: conserved [Uncinocarpus reesii 1704] gi|237905202|gb|EEP79603.1| conserved [Uncinocarpus reesii 1704]
  misc_feature (7)..(327): NCBI GI: 238489175 Blast Desc: aflatoxin B1-aldehyde reductase GliO-like, [Aspergillus flavus NRRL3357] gi|220698213|gb|EED54553.1| aflatoxin B1-aldehyde reductase GliO-like, [Aspergillus flavus
  misc_feature (7)..(326): NCBI GI: 242774617 Blast Desc: aflatoxin B1-aldehyde reductase GliO-like, [Talaromyces stipitatus ATCC 10500] gi|218722095|gb|EED21513.1| aflatoxin B1-aldehyde reductase GliO-like, [Talaromyces ATCC
  misc_feature (7)..(327): NCBI GI: 169763290 Blast Desc: [Aspergillus oryzae RIB40] gi|83770573|dbj|BAE60706.1| protein product [Aspergillus oryzae]
  misc_feature (24)..(267): SWISSPROT Homolog: EC 1.1.1.283 Methylglyoxal reductase (NADPH-dependent)
  misc_feature: Useful for introducing or modulating the production of volatile compounds
MAATQDRLILGLMTIGPAADKGARITSMDEYKKCLDYLASKGYKELDSAGVYVGGLQEGFTRDAGFKERGFAIASKIMPTTPGEHAPEKLTKSWNTSLEKLGVSGADIMYLHAPDRATPFEATLEAADKMYREGKFKQLGLSNFAAWEVAEVVGICERRGFVKPTIYQGMYNAITRAMESELKPCLEKFGIDLVIYNPLAGGLFSGKHTTLDNPSEGRYSKDYSLSKMYRDRYFKQSVIDALAAVEPAAKKHDIPLIEVALRWVLHHSKLKPKIKGGNDGVILGISSYDQLVQNVEACEKGPLPDDVIEALDKAWMIAKAESPTYWR

SEQ ID NO: 29264 - DNA, 1426 bp, Muscodor strobelii
  misc_feature: SGI EST ID NO. CUFF.69196.0
  misc_feature: Variant of the nucleotide sequence at SEQ ID NO 29262
gcaagcctgggctggaagggttcgatccaatcgcacttctttccgacatggctgggcaggtggaattgcgggacgggaaccaggccgattccatcggaggggcatggaggggcagcagtactgatgtaatgctcagtgatctattatgcgaagcgtgaccaaaatcgggggggtaagggtggaagaaatccaacttcatatcacaaaagcaccggctgtgaagtctgtagacgatttgtcaactcaatccagaaaacagcgcccgagcatcgcgagcaatcatggctgctacacaggaccgactcattctaggtctgatgaccattggtcccgctgcagacaaaggagctcgtatcacatcgatggacgaatacaagaaatgcctggactacctagcatctaagggttacaaggagctcgactcagccggtgtctacgttggcggtctccaggaaggcttcacacgcgatgccggcttcaaagagcggggcttcgcgattgcttcaaaaatcatgcctactaccccaggcgagcatgcaccggagaaattgacaaagtcgtggaacacgagcctggagaaactcggcgtcagcggagctgatatcatgtatttgcatgcgcccgaccgtgccactcccttcgaggccacactagaggctgccgataagatgtatcgcgagggcaaattcaagcagttgggattgagtaacttcgcagcttgggaagtcgcagaagttgttggcatttgcgagaggagaggatttgtcaagccgacgatatatcagggaatgtacaatgcaatcactcgcgcgatggagtctgagctcaagccctgtcttgagaaatttggaatcgacctggtcatctacaacccactagccggcgggctattctcagggaagcacacaactcttgataaccccagcgaaggtcgatacagcaaggactacagcctttccaaaatgtacagagacagatacttcaagcagtccgtcattgacgctctggcagcagttgagccggcagcgaagaagcacgacatcccactaatcgaagttgcgctacgatgggttttgcatcacagcaagctcaaaccgaagatcaagggtggaaatgatggtgttatccttggaatcagctcctacgaccagctagtacagaatgtcgaggcatgcgaaaaggggcctctgccggatgatgttattgaggctttggacaaagcttggatgatagcgaaggctgaatcgcctacttactggcgataatcacaattagcgattctaaggcgctgaatattgagtgttatgatgaaatgtttgacgacaagactgtgtttgaatactctgcatggtgtctgacgtaacacttacactttaaattgtaagcctagtaacatgtagcatatatacttttgtgatgatcctgc

SEQ ID NO: 29265 - DNA, 1401 bp, Muscodor strobelii
  misc_feature: SGI cDNA ID NO. 570049
  misc_feature: Encodes the peptide sequence at SEQ ID NO 29266
atgcagttcattgtgactacatccacagcaccgtcaattgaagagaaccggaagctcattcgcagctatgtgatgcgagacaagaatcgcaaaaagccacggaaagttcccggatcctggatcaacagatacgctctcggagatgaattcttccgcgaggagaaaactcatcgctgcatccctcctcggatcggaggcgaattctcattctcaccgtgcgccgatgatattaccccggccgttctagagacgatccggagattcggtagttgggtcccgcgaagagttttcagcttagtaccaggtctaacagcggatgacttcgaagcatcatggctcgaacccgtgcttcatgataccgcatgtcttcacttcaccatacaccaagctttgctctactccaactacatcgattcgggtaggaatgaagcgagcgagcttgctctcagtcactatgcgaaagcattatctgctcttcaggagcgtctgctgaagtgcgatgattcgctagctatatgtgactcaacattgattgtcgttattggtctggctatgtctgcaaatgccgtcggagacatagaaactgcgcagaaacatgtagctggtctgcataagatggtcacgctaagaggaggactacctgcttggaaagataaccatcggttacaaacgaagatatgccgcactgaacttgaagtgtcgctcaattctggggtcaggcctaaatttttcccctccagcatttcctggcatccgtatattgccttacgaaataatactctcctggcgggctctccgctaaaacatgagtgcacactcgccaatactgaatttccattgtgccaagacgagagactgagctcggtttgggatgatctagctgaattcacacgagcgtcagatatagcgactcaatctggacttgagattgatcgaacgctctaccatgagcttatggtctcagtgcattatcgtctcgcaaacctccatttcgatgccgggagtctagaagagtatcttcggcttggccttagcgcattttgctgcactttctttcaccacccagatggcgtggtcattcattataacaatcttgcgtatctttttgagcatgcactgcgtgcccgcggagactctgatacgcagatagaagacaatttcaagctttggatgtatactttcggcgtcgcattcttgttcaattcggagcaaagagttacgttccagcctgcgattgataaactcgtccgacgtatgggaatatcatcatgggatcaagcaaaagcgcttcttaggtccgccttgtggattgaccccttacatgacggggcagccaaggtccaattggaagcggcattagctaggattgccaaggactccgtcaatctcttcacgacttag

SEQ ID NO: 29266 - protein, 466 aa, Muscodor strobelii
  misc_feature: SGI Peptide ID NO. 570049
  misc_feature (1)..(462): NCBI GI: 256727322 Blast Desc: NECHADRAFT_76080 [Nectria haematococca mpVI 77-13-4]
  misc_feature (132)..(453): NCBI GI: 256720804 Blast Desc: NECHADRAFT_85486 [Nectria haematococca mpVI 77-13-4]
  misc_feature (3)..(459): NCBI GI: 171688826 Blast Desc: protein product [Podospora anserina] gi|170944375|emb|CAP70485.1| protein product [Podospora anserina]
  misc_feature (3)..(442): NCBI GI: 261205392 Blast Desc: conserved [Ajellomyces dermatitidis SLH14081] gi|239592492|gb|EEQ75073.1| conserved [Ajellomyces dermatitidis SLH14081]
  misc_feature (3)..(442): NCBI GI: 239611353 Blast Desc: conserved [Ajellomyces dermatitidis ER-3]
  misc_feature (2)..(446): NCBI GI: 256730301 Blast Desc: NECHADRAFT_45111 [Nectria haematococca mpVI 77-13-4]
  misc_feature (1)..(446): NCBI GI: 212529582 Blast Desc: conserved [Penicillium marneffei ATCC 18224] gi|210074346|gb|EEA28433.1| conserved [Penicillium marneffei ATCC 18224]
  misc_feature (2)..(452): NCBI GI: 256734956 Blast Desc: NECHADRAFT_75734 [Nectria haematococca mpVI 77-13-4]
  misc_feature (2)..(452): NCBI GI: 46138011 Blast Desc: FG10520.1 [Gibberella zeae PH-1]
  misc_feature (1)..(456): NCBI GI: 145256372 Blast Desc: An19g00360 [Aspergillus niger CBS 513.88] gi|134084771|emb|CAK47359.1| protein product [Aspergillus niger]
MQFIVTTSTAPSIEENRKLIRSYVMRDKNRKKPRKVPGSWINRYALGDEFFREEKTHRCIPPRIGGEFSFSPCADDITPAVLETIRRFGSWVPRRVFSLVPGLTADDFEASWLEPVLHDTACLHFTIHQALLYSNYIDSGRNEASELALSHYAKALSALQERLLKCDDSLAICDSTLIVVIGLAMSANAVGDIETAQKHVAGLHKMVTLRGGLPAWKDNHRLQTKICRTELEVSLNSGVRPKFFPSSISWHPYIALRNNTLLAGSPLKHECTLANTEFPLCQDERLSSVWDDLAEFTRASDIATQSGLEIDRTLYHELMVSVHYRLANLHFDAGSLEEYLRLGLSAFCCTFFHHPDGVVIHYNNLAYLFEHALRARGDSDTQIEDNFKLWMYTFGVAFLFNSEQRVTFQPAIDKLVRRMGISSWDQAKALLRSALWIDPLHDGAAKVQLEAALARIAKDSVNLFTT

SEQ ID NO: 29267 - DNA, 864 bp, Muscodor strobelii
  misc_feature: SGI EST ID NO. CUFF.69211.0
  misc_feature: Variant of the nucleotide sequence at SEQ ID NO 29265
cgatgattcgctagctatatgtgactcaacattgattgtcgttattggtctggctatgtctgcaaatgccgtcggagacatagaaactgcgcagaaacatgtagctggtctgcataagatggtcacgctaagaggaggactacctgcttggaaagataaccatcggttacaaacgaagatatgccgcactgaacttgaagtgtcgctcaattctggggtcaggcctaaatttttcccctccagcatttcctggcatccgtatattgccttacgaaataatactctcctggcgggctctccgctaaaacatgagtgcacactcgccaatactgaatttccattgtgccaagacgagagactgagctcggtttgggatgatctagctgaattcacacgagcgtcagatatagcgactcaatctggacttgagattgatcgaacgctctaccatgagcttatggtctcagtgcattatcgtctcgcaaacctccatttcgatgccgggagtctagaagagtatcttcggcttggccttagcgcattttgctgcactttctttcaccacccagatggcgtggtcattcattataacaatcttgcgtatctttttgagcatgcactgcgtgcccgcggagactctgatacgcagatagaagacaatttcaagctttggatgtatactttcggcgtcgcattcttgttcaattcggagcaaagagttacgttccagcctgcgattgataaactcgtccgacgtatgggaatatcatcatgggatcaagcaaaagcgcttcttaggtccgccttgtggattgaccccttacatgacggggcagccaaggtccaattggaagcggcattagc

SEQ ID NO: 29268 - DNA, 1368 bp, Muscodor strobelii
  misc_feature: SGI cDNA ID NO. 570050
  misc_feature: Encodes the peptide sequence at SEQ ID NO 29269
atgatttttaatcttcctgctgaacttcttttacgagttggtcaacaacttgctgtggccgactgtcgctctctcagctccgtcaattcacaattcagacaatttctcctaccaactcttttcaaaggccttcgcgtcaacaatcgatatgaacatgctgaaacatatcagaagctagttccagagattgcgaaatatgtgcaaagactgaactttgacctttatctgaacgagaacaacgaagaagacgaagatgatgatgacgtagattcacagaagtcggaagatagtaatgtcgagcggaccttgaaagtctcggacacggcaccaattgtgtgggaactgctgagccgccgtatattgccaaatctagcggctttgagggtgactttctgtcctttgccagataattttgacggcgatgggtggtcggacgacggactaggcggtggtatctacctcgccgaggatgcagaagacgaggatcgggtcgcagaagcagaattgaagtactcttggcgagaacttctcaataaatccttcgctacaatatctggtggctcaggagaacttcagcgactggaaatcctcaatctacccccaaagtctgtctctgcgcaattgacagatggatggaagacctttttaggcactataaaagaattcgaaattagtctatggggcggagataatggtgctgggtggcatgcgaatactcttgaagggtacctggagccaattagtgacttggaaaattcgttctttgagcatttgacgtcggcgacgagagtcaagttgatagcccatgatcaaaacccaattggttgcccaggcatgcgacaatgccccatacccctcggttcccaccaaatgccaagaattaaacacctagagctccaggattgtttcgtcgacgccgcactcattgcatttttgaaggggcacactcatcaactggaatctctccgacttactagctgctactcggccggaaatgacgaagaaatgggtacagcgagctccgcaacaccctgggcagagttcttttccgcggttagggagtcacagggaaaccttcgcgaattcacactggaacaacgccgaaacccgcctctgacacacgaggagcagtttgaccatgaggatcgaccttacgagccaccagaagatgaaggagatgacgtcaagactgtgaggagaattttaaatgaggacacggggagaagactttttgcgtatgtttctttagatgacaagtacgggatggtttttgcatacgaggagctaaatatcagtgcgttcatggaaggaagtgatcagagagaatttgatgacttgatggcgatggttaagggaaatcagaggtag

SEQ ID NO: 29269 - protein, 455 aa, Muscodor strobelii
  misc_feature: SGI Peptide ID NO. 570050
  misc_feature (5)..(447): NCBI GI: 256730173 Blast Desc: NECHADRAFT_45286 [Nectria haematococca mpVI 77-13-4]
  misc_feature (4)..(455): NCBI GI: 46115846 Blast Desc: FG03765.1 [Gibberella zeae PH-1]
  misc_feature (21)..(455): NCBI GI: 261195224 Blast Desc: [Ajellomyces dermatitidis SLH14081] gi|239587888|gb|EEQ70531.1| [Ajellomyces dermatitidis SLH14081]
  misc_feature (21)..(455): NCBI GI: 239610623 Blast Desc: [Ajellomyces dermatitidis ER-3]
  misc_feature (15)..(453): NCBI GI: 169785861 Blast Desc: [Aspergillus oryzae RIB40] gi|83776139|dbj|BAE66258.1| protein product [Aspergillus oryzae]
  misc_feature (15)..(453): NCBI GI: 238506767 Blast Desc: conserved [Aspergillus flavus NRRL3357] gi|220689298|gb|EED45649.1| conserved [Aspergillus flavus NRRL3357]
  misc_feature (231)..(453): NCBI GI: 238495686 Blast Desc: conserved [Aspergillus flavus NRRL3357] gi|220695729|gb|EED52072.1| conserved [Aspergillus flavus NRRL3357]
  misc_feature (196)..(322): NCBI GI: 169618187 Blast Desc: SNOG_12282 [Phaeosphaeria nodorum SN15] gi|111058975|gb|EAT80095.1| SNOG_12282 [Phaeosphaeria nodorum SN15]
  misc_feature (188)..(455): NCBI GI: 145611648 Blast Desc: [Magnaporthe grisea 70-15] gi|145018906|gb|EDK03185.1| [Magnaporthe grisea 70-15]
  misc_feature (231)..(453): NCBI GI: 169778375 Blast Desc: [Aspergillus oryzae RIB40] gi|83772390|dbj|BAE62520.1| protein product [Aspergillus oryzae]
MIFNLPAELLLRVGQQLAVADCRSLSSVNSQFRQFLLPTLFKGLRVNNRYEHAETYQKLVPEIAKYVQRLNFDLYLNENNEEDEDDDDVDSQKSEDSNVERTLKVSDTAPIVWELLSRRILPNLAALRVTFCPLPDNFDGDGWSDDGLGGGIYLAEDAEDEDRVAEAELKYSWRELLNKSFATISGGSGELQRLEILNLPPKSVSAQLTDGWKTFLGTIKEFEISLWGGDNGAGWHANTLEGYLEPISDLENSFFEHLTSATRVKLIAHDQNPIGCPGMRQCPIPLGSHQMPRIKHLELQDCFVDAALIAFLKGHTHQLESLRLTSCYSAGNDEEMGTASSATPWAEFFSAVRESQGNLREFTLEQRRNPPLTHEEQFDHEDRPYEPPEDEGDDVKTVRRILNEDTGRRLFAYVSLDDKYGMVFAYEELNISAFMEGSDQREFDDLMAMVKGNQR

SEQ ID NO: 29270 - DNA, 1701 bp, Muscodor strobelii
  misc_feature: SGI EST ID NO. CUFF.69224.0
  misc_feature: Variant of the nucleotide sequence at SEQ ID NO 29268
tgaacctcgactggccgtgcgccgactatgcagggatgccagtagcctgaagtgggcctggagatttactatttcaccacctccacgacatctcttctggattaaaagcgtgttctaaatctcacctagatatactggaacaccgaatctggccatcaatatgatttttaatcttcctgctgaacttcttttacgagttggtcaacaacttgctgtggccgactgtcgctctctcagctccgtcaattcacaattcagacaatttctcctaccaactcttttcaaaggccttcgcgtcaacaatcgatatgaacatgctgaaacatatcagaagctagttccagagattgcgaaatatgtgcaaagactgaactttgacctttatctgaacgagaacaacgaagaagacgaagatgatgatgacgtagattcacagaagtcggaagatagtaatgtcgagcggaccttgaaagtctcggacacggcaccaattgtgtgggaactgctgagccgccgtatattgccaaatctagcggctttgagggtgactttctgtcctttgccagataattttgacggcgatgggtggtcggacgacggactaggcggtggtatctacctcgccgaggatgcagaagacgaggatcgggtcgcagaagcagaattgaagtactcttggcgagaacttctcaataaatccttcgctacaatatctggtggctcaggagaacttcagcgactggaaatcctcaatctacccccaaagtctgtctctgcgcaattgacagatggatggaagacctttttaggcactataaaagaattcgaaattagtctatggggcggagataatggtgctgggtggcatgcgaatactcttgaagggtacctggagccaattagtgacttggaaaattcgttctttgagcatttgacgtcggcgacgagagtcaagttgatagcccatgatcaaaacccaattggttgcccaggcatgcgacaatgccccatacccctcggttcccaccaaatgccaagaattaaacacctagagctccaggattgtttcgtcgacgccgcactcattgcatttttgaaggggcacactcatcaactggaatctctccgacttactagctgctactcggccggaaatgacgaagaaatgggtacagcgagctccgcaacaccctgggcagagttcttttccgcggttagggagtcacagggaaaccttcgcgaattcacactggaacaacgccgaaacccgcctctgacacacgaggagcagtttgaccatgaggatcgaccttacgagccaccagaagatgaaggagatgacgtcaagactgtgaggagaattttaaatgaggacacggggagaagactttttgcgtatgtttctttagatgacaagtacgggatggtttttgcatacgaggagctaaatatcagtgcgttcatggaaggaagtgatcagagagaatttgatgacttgatggcgatggttaagggaaatcagaggtagagaaggacgcagtaggagttttcgacatgcttcaaggcgcttctgggtgggcgctgatggagacggaatcttcgttgttgaaaaccaaaaaccacatatgaatacacctattttctaaacttgggcatactgtaatccaaggactcttcatacttggcatagctatatctcct

SEQ ID NO: 29271 - DNA, 1809 bp, Muscodor strobelii
  misc_feature: SGI cDNA ID NO. 570051
  misc_feature: Encodes the peptide sequence at SEQ ID NO 29272
atgtttgaacggaagccgtgccacaactgtcgaaggcgccggctccggtgcgacagatcggtaccaggttgtctaaaatgcgcaaaacagggacaagaatgtcttgggtacggtcagctttaccgatgggttgacagcggccggagagagagcggaacgggcttattcttttcaactgaaaagagtcatatcttacttcatcagagccacgaccggtcattagatgatcagagtatagttgccaaacagaagcactgcggacaagatgggcctaccgtagtactgtctgatccactcttgcaagatcttcaccggtcatcgcgatactaccttctgtactttgcctctcgcttttgccaggatctcgttgttcacgattcagctgaacacgggacgaacccttttcgagagcttattcctatgtcgcgggctcatccttacctacagcatattgtcgttgctgtatctgcggttcactactaccacgctataaggcacacttcgtgtcactcttctggtactgtaagacaagccttgatcgatgccctcagagcccgccaacaagctatagaagagctcattgccattctcaaccgaccgcgcagtaccgcagatcacgcaagggataagaaggagcaggatgctcttctcgctaccgtcttattctttgtcaacttcaccctcatcgattcaggcaaggatggttggcggactcatttgaccgctgcaggccgattactatcagtacgccgcgctgcatcactatctctgccccctactggaagagagttcgacggccctacatgcagaccggccactgctccggacaatgtgtcattagctgtcaccgagacaatgttcccaggaacctttgaactcgtcgtggatcacggagctcgtccgctaagcgcttgtgactatgtggcgtcagacacagtagcatatttcatttggaatggagcactcgatgctctcgtcaccacaccctctttaagatcaagttccggcccagattacgctgttcagccagcagagtgggacgtatcgaaggtcatgacagtcttgtcacgaacagaagccaacagttatcacagttgcccagcgcacttgatgggaattgtgctacgcgtttcacggctaggacacattttgaaaacaaggccaaatcggacccttacaccatcccttacagacgagttcgttgtcttgctaagagaagcagaggaatttgatgccgaaggctgggctacgaccatagccacccatgtcatcggtacatatggcgttgtagacgagggagagacgaaactgcgctctcatattgcggccacctatcgcgctgctgtttgcttgtatatcctccttcttgcgccaacccttccgacggaggtccgcaaacgctcgctgcagacagggtcttcctccgaaaggctcccattcctctttacaactgacgatctcgcgtttacaatattacagcatctctcgtttgtgccaaacactagccccttcttcaagttcactacatggcctgtgttcttgaccggcatggatgcatctagtagcacgaggagggcatgggtcacagatagactctgcgccatgcgtgatttatgcccctggggtatgctgacttcggcgatggaaacgcttgaagagatctggaagcttcgggaccttggctccgtgaatatcgaggatgagaaggggttgcaaggagcaataatcaaggctgaggtgcctgaaggtgataaaatcgactggttagctcgcttacagggcttaaagatagattgtctaatagtatga

SEQ ID NO: 29272 - protein, 602 aa, Muscodor strobelii
  misc_feature: SGI Peptide ID NO. 570051
  misc_feature (5)..(44): Pfam Id: PF00172 Pfam Desc: Fungal Zn(2)-Cys(6) binuclear cluster domain
  misc_feature (5)..(602): NCBI GI: 46121803 Blast Desc: FG05279.1 [Gibberella zeae PH-1]
  misc_feature (5)..(602): NCBI GI: 256727386 Blast Desc: [Nectria haematococca mpVI 77-13-4]
  misc_feature (5)..(602): NCBI GI: 238843891 Blast Desc: acriflavine sensitivity control protein acr-2 [Microsporum canis CBS 113480]
  misc_feature (5)..(558): NCBI GI: 256723210 Blast Desc: NECHADRAFT_51752 [Nectria haematococca mpVI 77-13-4]
  misc_feature (5)..(602): NCBI GI: 116191165 Blast Desc: CHGG_05300 [Chaetomium globosum CBS 148.51] gi|88181213|gb|EAQ88681.1| CHGG_05300 [Chaetomium globosum CBS 148.51]
  misc_feature (93)..(602): NCBI GI: 85109381 Blast Desc: NCU05733 [Neurospora crassa OR74A] gi|44889033|sp|P78704.3|ACR2_NEUCR RecName: Full=Acriflavine sensitivity control protein acr-2 gi|28924531|gb|EAA33653.1|
  misc_feature (93)..(602): NCBI GI: 1754596 Blast Desc: acr-2 [Neurospora crassa]
  misc_feature (95)..(602): NCBI GI: 171683730 Blast Desc: protein product [Podospora anserina] gi|170941825|emb|CAP67478.1| protein product [Podospora anserina]
  misc_feature (95)..(578): NCBI GI: 189208105 Blast Desc: acriflavine sensitivity control protein acr-2 [Pyrenophora tritici-repentis Pt-1C-BFP] gi|187976479|gb|EDU43105.1| acriflavine sensitivity control acr-2
  misc_feature (94)..(562): NCBI GI: 256733884 Blast Desc: [Nectria haematococca mpVI 77-13-4]
MFERKPCHNCRRRRLRCDRSVPGCLKCAKQGQECLGYGQLYRWVDSGRRESGTGLFFSTEKSHILLHQSHDRSLDDQSIVAKQKHCGQDGPTVVLSDPLLQDLHRSSRYYLLYFASRFCQDLVVHDSAEHGTNPFRELIPMSRAHPYLQHIVVAVSAVHYYHAIRHTSCHSSGTVRQALIDALRARQQAIEELIAILNRPRSTADHARDKKEQDALLATVLFFVNFTLIDSGKDGWRTHLTAAGRLLSVRRAASLSLPPTGREFDGPTCRPATAPDNVSLAVTETMFPGTFELVVDHGARPLSACDYVASDTVAYFIWNGALDALVTTPSLRSSSGPDYAVQPAEWDVSKVMTVLSRTEANSYHSCPAHLMGIVLRVSRLGHILKTRPNRTLTPSLTDEFVVLLREAEEFDAEGWATTIATHVIGTYGVVDEGETKLRSHIAATYRAAVCLYILLLAPTLPTEVRKRSLQTGSSSERLPFLFTTDDLAFTILQHLSFVPNTSPFFKFTTWPVFLTGMDASSSTRRAWVTDRLCAMRDLCPWGMLTSAMETLEEIWKLRDLGSVNIEDEKGLQGAIIKAEVPEGDKIDWLARLQGLKIDCLIV

SEQ ID NO: 29273 - DNA, 3833 bp, Muscodor strobelii
  misc_feature: SGI EST ID NO. CUFF.69236.0
  misc_feature: Variant of the nucleotide sequence at SEQ ID NO 29271
caatattaaaaccgctgatgaagtattcggacatcatcattgagagaatgatggcaaggacgaatccaacttccgaggatgcatttttgaaagttgacgggcgttggcgacccaaaagttcgagatgagtcttgtcaaaggtggtcggggtggatgcgccctctgcatcaccctccggtgtgaggacaccctcgttcaactcctgcgaccgtctcatattgagttatgataatcagtccgacagattagtatgtgagttgcatatcccaaatcttccttgcacaagtgatattggttcgtccatatcgaaaaacccgaggtcagtgaccagtattatatgagcccgtggtttctacaagctttccgcacattcaccatgccgactaagtggagatgaggcgttgatgacacattcatagaaatggaggcttgcgatttacaatcacactgaggaatcacgcacaagttgctattcgattaccgaattgggcgaaacatgggacacatgtagttacaactggctcgaacatcatgttgacaatgacgaccggctcttcatattcaactccatatgtgcattgtgtgtcttggctactggatgcggaatagcgtaacgcactaacacgttctgcactcgtctgtcattaataatcttgcctcgcctgctccatcacattcatgatgtacgttgaggttgttacgctttgagcgcttgcaagatgagtagtacatcacaggaggcccggttgtcggagagtcgtacgcagacatcattggcaaacctggagaaggagagaaacctcgataacgcaatccgaaagaacctgacttaccgcaggcaaaatgaacctgatcgcgatatacgtacttttcacaaaggcatcgcttagagagatggttgtttctccaatgccatgactgtgaataagccgccgcctgcgtattgtgcataaaaaaatggagccaactgccctgacgccagtatgcaggacgtgtgtcttggcaactcttttgagtatagcgtgtctttaagttcgaccacgggcggcaaacatgcacgaattgttgttttcgctcccaaaacgacggttaggtgtttaagatctccattctatctgccagtccccgccgacacggactctacatctcattgtcttgtcaaattctagttctagacgtggctggcttcactatggcctaatgaagccccgccagttgactcgcacactcatctgctgaaccaccgagcggtttattccgggtaacgcgtgaaaaggacagcaagtccgaactggcagggaatgactgtctcatccggaatcagacacctcttttctcactgggacaagaatgtcttgggtacggtcagctttaccgatgggttgacagcggccggagagagagcggaacgggcttattcttttcaactgaaaagagtcatatcttacttcatcagagccacgaccggtcattagatgatcagagtatagttgccaaacagaagcactgcggacaagatgggcctaccgtagtactgtctgatccactcttgcaagatcttcaccggtcatcgcgatactaccttctgtactttgcctctcgcttttgccaggatctcgttgttcacgattcagctgaacacgggacgaacccttttcgagagcttattcctatgtcgcgggctcatccttacctacagcatattgtcgttgctgtatctgcggttcactactaccacgctataaggcacacttcgtgtcactcttctggtactgtaagacaagccttgatcgatgccctcagagcccgccaacaagctatagaagagctcattgccattctcaaccgaccgcgcagtaccgcagatcacgcaagggataagaaggagcaggatgctcttctcgctaccgtcttattctttgtcaacttcaccctcatcgattcaggcaaggatggttggcggactcatttgaccgctgcaggccgattactatcagtacgccgcgctgcatcactatctctgccccctactggaagagagttcgacggccctacatgcagaccggccactgctccggacaatgtgtcattagctgtcaccgagacaatgttcccaggaacctttgaactcgtcgtggatcacggagctcgtccgctaagcgcttgtgactatgtggcgtcagacacagtagcatatttcatttggaatggagcactcgatgctctcgtcaccacaccctctttaagatcaagttccggcccagattacgctgttcagccagcagagtgggacgtatcgaaggtcatgacagtcttgtcacgaacagaagccaacagttatcacagttgcccagcgcacttgatgggaattgtgctacgcgtttcacggctaggacacattttgaaaacaaggccaaatcggacccttacaccatcccttacagacgagttcgttgtcttgctaagagaagcagaggaatttgatgccgaaggctgggctacgaccatagccacccatgtcatcggtacatatggcgttgtagacgagggagagacgaaactgcgctctcatattgcggccacctatcgcgctgctgtttgcttgtatatcctccttcttgcgccaacccttccgacggaggtccgcaaacgctcgctgcagacagggtcttcctccgaaaggctcccattcctctttacaactgacgatctcgcgtttacaatattacagcatctctcgtttgtgccaaacactagccccttcttcaagttcactacatggcctgtgttcttgaccggcatggatgcatctagtagcacgaggagggcatgggtcacagatagactctgcgccatgcgtgatttatgcccctggggtatgctgacttcggcgatggaaacgcttgaagagatctggaagcttcgggaccttggctccgtgaatatcgaggatgagaaggggttgcaaggagcaataatcaaggctgaggtgcctgaaggtgataaaatcgactggttagctcgcttacagggcttaaagatagattgtctaatagtatgatgctgtcaaagcccggctgcacagtatgcgcggtacgatatcaagcacacgatacccatgttcggtcacaggcaagccgtcacgctacaaaaacgctaatcggcaatggcgcggatagattgcgggacagacggcttacgtatttctgcgccttgcacaatgaatcgaactttgaaaacatctcaattctacttagactactggtctgagtccaaatgtacggaaccgcagcacaggggtggatgatacgtaggtgcatagcgatctacaagtcgtttgctacagagcttctcacctatacaagctaaagtctggtgcgacttccaatcccctatacgatttgtgcagacatcggtggtgatgagccacgtctgggcaatcaacgcagaatttcgacatactacatttccgctcgttcagggtagctgaggataatacacatgaaaattgtcgcgatgcgatacatcattgctccttttgttgtttacctgccttgccgaccgggctcatttttcattcgttcgagttgtgcacaacaatatatggcaagagccaatgcactacctccggctcaggtgtccttacagatacactggcggcatgccgtgagatgaggagaatttggtagcagatgcccaggatgttttcagagtcccatagctgcctgaagagcgtcaataagcattaccctgaacatggaagatataggtgagccagctcggtttaatagaacataacgacttttgattgatcttaaatatccctatggtgc

SEQ ID NO: 29274 - DNA, 1611 bp, Muscodor strobelii
  misc_feature: SGI cDNA ID NO. 570052
  misc_feature: Encodes the peptide sequence at SEQ ID NO 29275
atgagacggtcgcaggagttgaacgagggtgtcctcacaccggagggtgatgcagagggcgcatccaccccgaccacctttgacaagactcatctcgaacttttgggtcgccaacgcccgtcaactttcaaaaatgcatcctcggaagttggattcgtccttgccatcattctctcaatgatgatgtccgaatacttcatcagcggttttaatattgttctaccagatatcgctgacgcgttgaatattcccgatgcacagcgtacatggcccgccgccgtacccaatcttacaacggccgtattgctattaccgttcgcacgtctatgcgatatgttcggagggcgctatattttcctcggcggacatacctgggcactcgcatggtcccttgcgggtggattcagctctactccgacagttctcattgtatgccgggccatgcagggcgtcggtttcagcgcatttttgcccgccggtatgtcgctactcgggcactcatatcggcctggcccgcgaaagaatttcgtatacagcatgtacggagcatttgctgtgatcggattctacttcgggatcttcgtgggagcagtagcggcacaattctggagctggcgctggtatttctacattggcgccatcttaatggcgattgtcatcgtcacggccataatcacaataccacatgaacttggcgaccacaactccggtatcgtcatggactggtggggtttaagtaccgttgtaccggggttgtcgcttgtcgtttacgctttcagtgatggtggcactgccccagatggatggagatcgccctacatcatcttgacgctcgtcattggtgttctcttgctgctcgcttttatcggtgttgaacgttttgtgtcatcacagcctttccttcccggagaactcttcaaagccaagtacataagacgtctgtgcttcggacttttctgctcgtatggcgttttcgggctctttcttttttatgcaagttactatgtcgagactgtgttcaacaccacaccgctccagacagcagcatggtttgctccgctagctggagggggcatattcattgctacagcgggcggcttcgtcttgcacttactctcaggtcgaattttgatgatgatatctagtgcgggatttttgttgtcgtcgctgcttttcgcgcttattccagcgcagtccgaaggaagtccgtccacaagctttctttactgggcgtatatattccctgctatgcttggaggtaccatcggcgttgatatccagttcaatgtcacaaacgtttacatcaccacttcgatgcctaagcgtttacaagccactgctggtgcaactatcaacagcttgctctatcttggctttgctttctggttgggcattggcgatttagcaatcggaacaacggttcgtacttctggaaaagacttggatcaccggagtcagtatcagataggtttctggactgccgtcggcttatcagtattatctttcatactcattgtgaccgttaagttcggccgagctgcgtcagaattgacggcggacgagaaggaggagctagagaaggaattgcgggtagatggcgttcagagctga

SEQ ID NO: 29275 - protein, 536 aa, Muscodor strobelii
  misc_feature: SGI Peptide ID NO. 570052
  misc_feature (56)..(463): Pfam Id: PF07690 Pfam Desc: Major Facilitator Superfamily
  misc_feature (56)..(260): Pfam Id: PF07690 Pfam Desc: Major Facilitator Superfamily
  misc_feature (268)..(463): Pfam Id: PF07690 Pfam Desc: Major Facilitator Superfamily
  misc_feature (1)..(536): NCBI GI: 46126345 Blast Desc: FG07550.1 [Gibberella zeae PH-1]
  misc_feature (9)..(528): NCBI GI: 256724793 Blast Desc: [Nectria haematococca mpVI 77-13-4]
  misc_feature (27)..(528): NCBI GI: 256724386 Blast Desc: NECHADRAFT_54715 [Nectria haematococca mpVI 77-13-4]
  misc_feature (13)..(534): NCBI GI: 238844199 Blast Desc: drug resistance protein [Microsporum canis CBS 113480]
  misc_feature (25)..(536): NCBI GI: 85109385 Blast Desc: NCU05735 [Neurospora crassa OR74A] gi|28924533|gb|EAA33655.1| conserved [Neurospora crassa OR74A]
  misc_feature (26)..(501): NCBI GI: 169615318 Blast Desc: SNOG_10816 [Phaeosphaeria nodorum SN15] gi|160702933|gb|EAT82210.2| SNOG_10816 [Phaeosphaeria nodorum SN15]
  misc_feature (5)..(533): NCBI GI: 169771943 Blast Desc: [Aspergillus oryzae RIB40] gi|83768300|dbj|BAE58439.1| protein product [Aspergillus oryzae]
  misc_feature (1)..(530): NCBI GI: 46117168 Blast Desc: FG04426.1 [Gibberella zeae PH-1]
  misc_feature (3)..(518): NCBI GI: 189208103 Blast Desc: membrane transporter [Pyrenophora tritici-repentis Pt-1C-BFP] gi|187976478|gb|EDU43104.1| membrane transporter [Pyrenophora tritici-repentis Pt-1C-BFP]
  misc_feature (13)..(536): NCBI GI: 256729485 Blast Desc: [Nectria haematococca mpVI 77-13-4]
MRRSQELNEGVLTPEGDAEGASTPTTFDKTHLELLGRQRPSTFKNASSEVGFVLAIILSMMMSEYFISGFNIVLPDIADALNIPDAQRTWPAAVPNLTTAVLLLPFARLCDMFGGRYIFLGGHTWALAWSLAGGFSSTPTVLIVCRAMQGVGFSAFLPAGMSLLGHSYRPGPRKNFVYSMYGAFAVIGFYFGIFVGAVAAQFWSWRWYFYIGAILMAIVIVTAIITIPHELGDHNSGIVMDWWGLSTVVPGLSLVVYAFSDGGTAPDGWRSPYIILTLVIGVLLLLAFIGVERFVSSQPFLPGELFKAKYIRRLCFGLFCSYGVFGLFLFYASYYVETVFNTTPLQTAAWFAPLAGGGIFIATAGGFVLHLLSGRILMMISSAGFLLSSLLFALIPAQSEGSPSTSFLYWAYIFPAMLGGTIGVDIQFNVTNVYITTSMPKRLQATAGATINSLLYLGFAFWLGIGDLAIGTTVRTSGKDLDHRSQYQIGFWTAVGLSVLSFILIVTVKFGRAASELTADEKEELEKELRVDGVQS

SEQ ID NO: 29276 - DNA, 1323 bp, Muscodor strobelii
  misc_feature: SGI EST ID NO. CUFF.69229.0
  misc_feature: Variant of the nucleotide sequence at SEQ ID NO 29274
ggcggacatacctgggcactcgcatggtcccttgcgggtggattcagctctactccgacagttctcattgtatgccgggccatgcagggcgtcggtttcagcgcatttttgcccgccggtatgtcgctactcgggcactcatatcggcctggcccgcgaaagaatttcgtatacagcatgtacggagcatttgctgtgatcggattctacttcgggatcttcgtgggagcagtagcggcacaattctggagctggcgctggtatttctacattggcgccatcttaatggcgattgtcatcgtcacggccataatcacaataccacatgaacttggcgaccacaactccggtatcgtcatggactggtggggtttaagtaccgttgtaccggggttgtcgcttgtcgtttacgctttcagtgatggtggcactgccccagatggatggagatcgccctacatcatcttgacgctcgtcattggtgttctcttgctgctcgcttttatcggtgttgaacgttttgtgtcatcacagcctttccttcccggagaactcttcaaagccaagtacataagacgtctgtgcttcggacttttctgctcgtatggcgttttcgggctctttcttttttatgcaagttactatgtcgagactgtgttcaacaccacaccgctccagacagcagcatggtttgctccgctagctggagggggcatattcattgctacagcgggcggcttcgtcttgcacttactctcaggtcgaattttgatgatgatatctagtgcgggatttttgttgtcgtcgctgcttttcgcgcttattccagcgcagtccgaaggaagtccgtccacaagctttctttactgggcgtatatattccctgctatgcttggaggtaccatcggcgttgatatccagttcaatgtcacaaacgtttacatcaccacttcgatgcctaagcgtttacaagccactgctggtgcaactatcaacagcttgctctatcttggctttgctttctggttgggcattggcgatttagcaatcggaacaacggttcgtacttctggaaaagacttggatcaccggagtcagtatcagataggtttctggactgccgtcggcttatcagtattatctttcatactcattgtgaccgttaagttcggccgagctgcgtcagaattgacggcggacgagaaggaggagctagagaaggaattgcgggtagatggcgttcagagctgatcaagagcgagcgtcgtcattttttcaatcggacgcgatagatagatatgatactttgcgtaatgataccct

SEQ ID NO: 29277 - DNA, 2124 bp, Muscodor strobelii
  misc_feature: SGI cDNA ID NO. 570053
  misc_feature: Encodes the peptide sequence at SEQ ID NO 29278
atgtcggatagctcaaccacctcgtatccggttcatcttggagtttggattaattggtcccgcggaccagtattcggatcaacacttactctgaagaggcgtgacggtgagttcctcacggcactgacggcttttttcatcgcgtatgtggctacgcgcttctggaggatcgcatgcttcgttctacatcgactagcctcaacatctctgccgcaagatgccatctaccatcagcaacaggcaatcttacgtaatgcgtcgtctcccgaagatgggatacgtcttcttttcaagcttatgctagcgggccgtcgcttccggaatcctttccgtccactacccgcgctagtaatcgcaagcttttcgataattggtttcacgattgcgggaggatactcttcgactatctcgagctccgttggtaatgaggtgttactccaaagctctcactgcggctatattaacgaggggcaagctcaaagggagagtgagctcttcccgttattcatctacggatcacaaaagatcaactcggcgggaaattacgctcaacagtgctattcgagcaacaccacagggttactagattgcagccgctttgttaataaagagatcatccccacgatcaacgcaaacgcatcatgtccatttagtaacgaactttgtcgcgacagtcattcaaacatcgtggtagattctggttatatcgacagccatgtgcatttcggcctgaactctccggagaaggaaagaatattgacaaggaacgtccttcattgcgcgcctctggccacggaaggatacaccactcaggccaataccaccttgcagaatgtaactcaataccactacggcagcaccagaaacgccactggttaccatgactggctttatgtcgctgaatctgtggaggatcagtataatattgattacacctgggcgaatagcaatttcaagttagacgccacgagagctattgtgaagaataatgaaacatatgaatcaggctcaaaattcttgccaatcgacgccatatttcggagcgatgctgatatccatatattcttcctttccggaaacggtgtgtactatgaggaagcatcagatgatgcgtggtacagaccgcgaagtgcgcctacgaatgtcagcttcactgccaatggcgtggccactccaccaggcacccaggagttctacgtaccgaccgagcctgcgtctccaatgggatgcacagatcagtaccagttctgtactactgcattacctggcactagcggctgtggccctcttgcaagttttcgagacgcacttgctggtgttgcgccgttcttcgggtccgattataacgacttctacaatttgactcttactgccaatttcgataacgtagtccacaaatcaaaatccgcggtccaattcttatacttcaccgcaacgctattctcaatagatcgctctgtcttctcagtgatcactcagttaggatctccatcacttgcgtcacaagcgaccttgctcggcggcatccagtatggtacgctaccttggaaccagtggcaccaagatgtcgttcgctggtggggtacatcaatggcactcacacaatcaatgttcattgatactgcacatggctcttcggatccaggtcttcttaagttgcacatcaacttcacagatccagattggaagcccttctgcactggtcaaaaaatccgaagcacggactacacatctttcagtcttttcgggatactcttcaccttcgtcgtaggagctctgatcattgcgatttcgttttcaattgagccattatttgctttcttgcacaaaatcggatgttatgatcgatatcattatttagaatggaatactaacggcactctacaattgcaacgcctcgcacatgaaggtatgggacttggtagctggtccggctgtacaagaactgtgccgatgaccaggccaaatgagctcctgggatcgctcgatattgcggacgtcgagcatcccgtcttggatagatctgtttcgagacaccatagccccttgtatcgtgatgagaagtcaggggatacgcaagtcgacgatcgcgacctcggtttgtcggaaaagaagcctttataa

SEQ ID NO: 29278 - protein, 707 aa, Muscodor strobelii
  misc_feature: SGI Peptide ID NO. 570053
  misc_feature (5)..(670): NCBI GI: 169615058 Blast Desc: SNOG_10683 [Phaeosphaeria nodorum SN15] gi|111060957|gb|EAT82077.1| SNOG_10683 [Phaeosphaeria nodorum SN15]
  misc_feature (1)..(674): NCBI GI: 115399382 Blast Desc: [Aspergillus terreus NIH2624] gi|114192163|gb|EAU33863.1| [Aspergillus terreus NIH2624]
  misc_feature (1)..(657): NCBI GI: 70986226 Blast Desc: conserved [Aspergillus fumigatus Af293] gi|66846236|gb|EAL86569.1| conserved [Aspergillus fumigatus Af293]
  misc_feature (1)..(657): NCBI GI: 159128250 Blast Desc: conserved [Aspergillus fumigatus A1163]
  misc_feature (1)..(674): NCBI GI: 119474227 Blast Desc: NFIA_004500 [Neosartorya fischeri NRRL 181] gi|119407142|gb|EAW17092.1| conserved [Neosartorya fischeri NRRL 181]
  misc_feature (11)..(696): NCBI GI: 189194015 Blast Desc: conserved [Pyrenophora tritici-repentis Pt-1C-BFP] gi|187978910|gb|EDU45536.1| conserved [Pyrenophora tritici-repentis Pt-1C-BFP]
  misc_feature (1)..(640): NCBI GI: 121699395 Blast Desc: ACLA_082720 [Aspergillus clavatus NRRL 1] gi|119396149|gb|EAW06581.1| ACLA_082720 [Aspergillus clavatus NRRL 1]
  misc_feature (11)..(640): NCBI GI: 169772941 Blast Desc: [Aspergillus oryzae RIB40] gi|83768800|dbj|BAE58937.1| protein product [Aspergillus oryzae]
  misc_feature (11)..(707): NCBI GI: 256723662 Blast Desc: NECHADRAFT_86728 [Nectria haematococca mpVI 77-13-4]
  misc_feature (1)..(436): NCBI GI: 115433432 Blast Desc: [Aspergillus terreus NIH2624] gi|114189705|gb|EAU31405.1| [Aspergillus terreus NIH2624]
MSDSSTTSYPVHLGVWINWSRGPVFGSTLTLKRRDGEFLTALTAFFIAYVATRFWRIACFVLHRLASTSLPQDAIYHQQQAILRNASSPEDGIRLLFKLMLAGRRFRNPFRPLPALVIASFSIIGFTIAGGYSSTISSSVGNEVLLQSSHCGYINEGQAQRESELFPLFIYGSQKINSAGNYAQQCYSSNTTGLLDCSRFVNKEIIPTINANASCPFSNELCRDSHSNIVVDSGYIDSHVHFGLNSPEKERILTRNVLHCAPLATEGYTTQANTTLQNVTQYHYGSTRNATGYHDWLYVAESVEDQYNIDYTWANSNFKLDATRAIVKNNETYESGSKFLPIDAIFRSDADIHIFFLSGNGVYYEEASDDAWYRPRSAPTNVSFTANGVATPPGTQEFYVPTEPASPMGCTDQYQFCTTALPGTSGCGPLASFRDALAGVAPFFGSDYNDFYNLTLTANFDNVVHKSKSAVQFLYFTATLFSIDRSVFSVITQLGSPSLASQATLLGGIQYGTLPWNQWHQDVVRWWGTSMALTQSMFIDTAHGSSDPGLLKLHINFTDPDWKPFCTGQKIRSTDYTSFSLFGILFTFVVGALIIAISFSIEPLFAFLHKIGCYDRYHYLEWNTNGTLQLQRLAHEGMGLGSWSGCTRTVPMTRPNELLGSLDIADVEHPVLDRSVSRHHSPLYRDEKSGDTQVDDRDLGLSEKKPL

SEQ ID NO: 29279 - DNA, 3224 bp, Muscodor strobelii
  misc_feature: SGI EST ID NO. CUFF.69291.0
  misc_feature: Variant of the nucleotide sequence at SEQ ID NO 29277
caaatttcaagtcatgtcagcttgccaatcgccaatcgcgggcagtcaaattcttgttaggcatggtacaaagatgacttgcagagtgcagggcgaagaacagcgaatcggctagttgccgtgaaactgatattttcttcatcgattcgactgatcgggtccagaagcgcagctgaaaggcacattcgagatatagcgttggtttctttctctcgcccattccacccacccctcgactgctcgcggactttcatttgtgtctaacttagatgatcatgcaaaatgtcggatagctcaaccacctcgtatccggttcatcttggagtttggattaattggtcccgcggaccagtattcggatcaacacttactctgaagaggcgtgacggtgagttcctcacggcactgacggcttttttcatcgcgtatgtggctacgcgcttctggaggatcgcatgcttcgttctacatcgactagcctcaacatctctgccgcaagatgccatctaccatcagcaacaggcaatcttacgtaatgcgtcgtctcccgaagatgggatacgtcttcttttcaagcttatgctagcgggccgtcgcttccggaatcctttccgtccactacccgcgctagtaatcgcaagcttttcgataattggtttcacgattgcgggaggatactcttcgactatctcgagctccgttggtaatgaggtgttactccaaagctctcactgcggctatattaacgaggggcaagctcaaagggagagtgagctcttcccgttattcatctacggatcacaaaagatcaactcggcgggaaattacgctcaacagtgctattcgagcaacaccacagggttactagattgcagccgctttgttaataaagagatcatccccacgatcaacgcaaacgcatcatgtccatttagtaacgaactttgtcgcgacagtcattcaaacatcgtggtagattctggttatatcgacagccatgtgcatttcggcctgaactctccggagaaggaaagaatattgacaaggaacgtccttcattgcgcgcctctggccacggaaggatacaccactcaggccaataccaccttgcagaatgtaactcaataccactacggcagcaccagaaacgccactggttaccatgactggctttatgtcgctgaatctgtggaggatcagtataatattgattacacctgggcgaatagcaatttcaagttagacgccacgagagctattgtgaagaataatgaaacatatgaatcaggctcaaaattcttgccaatcgacgccatatttcggagcgatgctgatatccatatattcttcctttccggaaacggtgtgtactatgaggaagcatcagatgatgcgtggtacagaccgcgaagtgcgcctacgaatgtcagcttcactgccaatggcgtggccactccaccaggcacccaggagttctacgtaccgaccgagcctgcgtctccaatgggatgcacagatcagtaccagttctgtactactgcattacctggcactagcggctgtggccctcttgcaagttttcgagacgcacttgctggtgttgcgccgttcttcgggtccgattataacgacttctacaatttgactcttactgccaatttcgataacgtagtccacaaatcaaaatccgcggtccaattcttatacttcaccgcaacgctattctcaatagatcgctctgtcttctcagtgatcactcagttaggatctccatcacttgcgtcacaagcgaccttgctcggcggcatccagtatggtacgctaccttggaaccagtggcaccaagatgtcgttcgctggtggggtacatcaatggcactcacacaatcaatgttcattgatactgcacatggctcttcggatccaggtcttcttaagttgcacatcaacttcacagatccagattggaagcccttctgcactggtcaaaaaatccgaagcacggactacacatctttcagtcttttcgggatactcttcaccttcgtcgtaggagctctgatcattgcgatttcgttttcaattgagccattatttgctttcttgcacaaaatcggatgttatgatcgatatcattatttagaatggaatactaacggcactctacaattgcaacgcctcgcacatgaaggtatgggacttggtagctggtccggctgtacaagaactgtgccgatgaccaggccaaatgagctcctgggatcgctcgatattgcggacgtcgagcatcccgtcttggatagatctgtttcgagacaccatagccccttgtatcgtgatgagaagtcaggggatacgcaagtcgacgatcgcgacctcggtttgtcggaaaagaagcctttataatgccgaacccatcctttacgccgatgaccaggcacttgctacttgtgcgacctttggcagccagtgtcggcgacagagattatagttgacgcaaccctctgaagacttagacccgttccgtgcatcggtctactctacacgatctgcttacatgtactggaaaagaaagacatgctgtgttagacttacatcttagcgtggatataagcgatagacggaatattagatgaggcatcataagaaatgcgataagctatgatcatccgttgggacgttatagccttgggcaaaaaacaaagtttgattgaatactatcaaggtatcccaaatgttatagacgcaaaagctcaaaggaaattttgtaattgttttgtttatttgcacctttgtcatcaacgtgtctcatacaagcatatcgactcgccgtttttaaaattcaagatcgaaacacagaacctcatctgtcagaccttcccgaagcttagataatctattatgagtcaatacatgagccgtggcaacattccatgtcatgacttactcgttgtgggccgggtgcgtcgcaaataccataatgtcatctggtttctccaatatggccgtgacgcctaggtcgtacccttgggcacgcgcagcagtaattggcaagggtgagcccgcactgaacttcactaggcctttaatgtctgtcagattatgatcatgaaaatgccttaggtaaaacatgaatatacccgggatcttgccaaccatctctctgccttttgcacaccagtcatccacttgctcctgcttgacaccgggcttaagtttgaaaa

SEQ ID NO: 29280 - DNA, 303 bp, Muscodor strobelii
  misc_feature: SGI cDNA ID NO. 570054
  misc_feature: Reduced expression when VOC is produced
  misc_feature: Encodes the peptide sequence at SEQ ID NO 29281
atggcagtctatcacatcgtacttttcaaacttaagcccggtgtcaagcaggagcaagtggatgactggtgtgcaaaaggcagagagatggttggcaagatcccgggcctagtgaagttcagtgcgggctcacccttgccaattactgctgcgcgtgcccaagggtacgacctaggcgtcacggccatattggagaaaccagatgacattatggtatttgcgacgcacccggcccacaacgaattatctaagcttcgggaaggtctgacagatgaggttctgtgtttcgatcttgaattttaa

SEQ ID NO: 29281 - protein, 100 aa, Muscodor strobelii
  misc_feature: SGI Peptide ID NO. 570054
  misc_feature (3)..(100): Pfam Id: PF07876 Pfam Desc: Stress responsive A/B Barrel Domain
  misc_feature (1)..(100): NCBI GI: 121701471 Blast Desc: stress responsive A/B barrel domain protein [Aspergillus clavatus NRRL 1] gi|119397143|gb|EAW07574.1| stress responsive A/B barrel domain protein [Aspergillus clavatus NRRL
  misc_feature (1)..(100): NCBI GI: 261203421 Blast Desc: [Ajellomyces dermatitidis SLH14081] gi|239586709|gb|EEQ69352.1| [Ajellomyces dermatitidis SLH14081]
  misc_feature (1)..(100): NCBI GI: 239608260 Blast Desc: [Ajellomyces dermatitidis ER-3]
  misc_feature (1)..(100): NCBI GI: 225683326 Blast Desc: conserved [Paracoccidioides brasiliensis Pb03]
  misc_feature (1)..(100): NCBI GI: 226283824 Blast Desc: conserved [Paracoccidioides brasiliensis Pb01]
  misc_feature (1)..(100): NCBI GI: 225560116 Blast Desc: [Ajellomyces capsulatus G186AR]
  misc_feature (1)..(99): NCBI GI: 256725922 Blast Desc: NECHADRAFT_82116 [Nectria haematococca mpVI 77-13-4]
  misc_feature (1)..(82): NCBI GI: 119495441 Blast Desc: stress responsive A/B barrel domain protein [Neosartorya fischeri NRRL 181] gi|119412667|gb|EAW22608.1| stress responsive A/B barrel domain protein [Neosartorya fischeri
  misc_feature (1)..(100): NCBI GI: 242775162 Blast Desc: TSTA_088610 [Talaromyces stipitatus ATCC 10500] gi|218722207|gb|EED21625.1| TSTA_088610 [Talaromyces stipitatus ATCC 10500]
  misc_feature (1)..(79): NCBI GI: 255937379 Blast Desc: Pc13g13020 [Penicillium chrysogenum Wisconsin 54-1255] gi|211584336|emb|CAP92371.1| Pc13g13020 [Penicillium chrysogenum Wisconsin 54-1255]
  misc_feature: Useful for introducing or modulating the production of volatile compounds
MAVYHIVLFKLKPGVKQEQVDDWCAKGREMVGKIPGLVKFSAGSPLPITAARAQGYDLGVTAILEKPDDIMVFATHPAHNELSKLREGLTDEVLCFDLEF

SEQ ID NO: 29282 - DNA, 2171 bp, Muscodor strobelii
  misc_feature: SGI EST ID NO. CUFF.69292.1
  misc_feature: Variant of the nucleotide sequence at SEQ ID NO 29280
aatgtggtggaaaattacacctagaagcgatttcctcatcagggatcagggccatcgacatacttaggaggccatggggctgtcagcacacgggtcattatagcagattgacatactgtgcgagattgatgacgtgacgatgtttatgtaatgccctatttgctctctgaccaccatagtataagtgcagttgcatctcgtttccttaaactcaaagctgcgtttcaagacacacagatcgggatcatatctacctcactgttcatactccttcaaaatggcagtctatcacatcgtacttttcaaacttaagcccggtgtcaagcaggagcaagtggatgactggtgtgcaaaaggcagagagatggttggcaagatcccgggcctagtgaagttcagtgcgggctcacccttgccaattactgctgcgcgtgcccaagggtacgacctaggcgtcacggccatattggagaaaccagatgacattatggtatttgcgacgcacccggcccacaacgaattatctaagcttcgggaaggtctgacagatgaggttctgtgtttcgatcttgaattttaaaaacggcgagtcgatatgcttgtatgagacacgttgatgacaaaggtgcaaataaacaaaacaattacaaaatttcctttgagcttttgcgtctataacatttgggataccttgatagtattcaatcaaactttgttttttgcccaaggctataacgtcccaacggatgatcatagcttatcgcatttcttatgatgcctcatctaatattccgtctatcgcttatatccacgctaagatgtaagtctaacacagcatgtctttcttttccagtacatgtaagcagatcgtgtagagtagaccgatgcacggaacgggtctaagtcttcagagggttgcgtcaactataatctctgtcgccgacactggctgccaaaggtcgcacaagtagcaagtgcctggtcatcggcgtaaaggatgggttcggcattataaaggcttcttttccgacaaaccgaggtcgcgatcgtcgacttgcgtatcccctgacttctcatcacgatacaaggggctatggtgtctcgaaacagatctatccaagacgggatgctcgacgtccgcaatatcgagcgatcccaggagctcatttggcctggtcatcggcacagttcttgtacagccggaccagctaccaagtcccataccttcatgtgcgaggcgttgcaattgtagagtgccgttagtattccattctaaataatgatatcgatcataacatccgattttgtgcaagaaagcaaataatggctcaattgaaaacgaaatcgcaatgatcagagctcctacgacgaaggtgaagagtatcccgaaaagactgaaagatgtgtagtccgtgcttcggattttttgaccagtgcagaagggcttccaatctggatctgtgaagttgatgtgcaacttaagaagacctggatccgaagagccatgtgcagtatcaatgaacattgattgtgtgagtgccattgatgtaccccaccagcgaacgacatcttggtgccactggttccaaggtagcgtaccatactggatgccgccgagcaaggtcgcttgtgacgcaagtgatggagatcctaactgagtgatcactgagaagacagagcgatctattgagaatagcgttgcggtgaagtataagaattggaccgcggattttgatttgtggactacgttatcgaaattggcagtaagagtcaaattgtagaagtcgttataatcggacccgaagaacggcgcaacaccagcaagtgcgtctcgaaaacttgcaagagggccacagccgctagtgccaggtaatgcagtagtacagaactggtactgatctgtgcatcccattggagacgcaggctcggtcggtacgtagaactcctgggtgcctggtggagtggccacgccattggcagtgaagctgacattcgtaggcgcacttcgcggtctgtaccacgcatcatctgatgcttcctcatagtacacaccgtttccggaaaggaagaatatatggatatcagcatcgctccgaaatatggcgtcgattggcaagaattttgagcctgattcatatgtttcattattcttcacaatagctctcgtggcg

SEQ ID NO: 29283 - DNA, 360 bp, Muscodor strobelii
  misc_feature: SGI cDNA ID NO. 570055
  misc_feature: Encodes the peptide sequence at SEQ ID NO 29284
atggcagtctatcacatcgtacttttcaaacttaagcccggtgtcaagcaggagcaagtggatgactggtgtgcaaaaggcagagagatggttggcaagatcccgggtatattcatgttttacctaaggcattttcatgatcataatctgacagacattaaaggcctagtgaagttcagtgcgggctcacccttgccaattactgctgcgcgtgcccaagggtacgacctaggcgtcacggccatattggagaaaccagatgacattatggtatttgcgacgcacccggcccacaacgaattatctaagcttcgggaaggtctgacagatgaggttctgtgtttcgatcttgaattttaa

SEQ ID NO: 29284 - protein, 119 aa, Muscodor strobelii
  misc_feature: SGI Peptide ID NO. 570055
  misc_feature (3)..(119): Pfam Id: PF07876 Pfam Desc: Stress responsive A/B Barrel Domain
  misc_feature (3)..(37): Pfam Id: PF07876 Pfam Desc: Stress responsive A/B Barrel Domain
  misc_feature (1)..(119): NCBI GI: 121701471 Blast Desc: stress responsive A/B barrel domain protein [Aspergillus clavatus NRRL 1] gi|119397143|gb|EAW07574.1| stress responsive A/B barrel domain protein [Aspergillus clavatus NRRL
  misc_feature (1)..(119): NCBI GI: 261203421 Blast Desc: [Ajellomyces dermatitidis SLH14081] gi|239586709|gb|EEQ69352.1| [Ajellomyces dermatitidis SLH14081]
  misc_feature (1)..(119): NCBI GI: 239608260 Blast Desc: [Ajellomyces dermatitidis ER-3]
  misc_feature (1)..(119): NCBI GI: 225683326 Blast Desc: conserved [Paracoccidioides brasiliensis Pb03]
  misc_feature (1)..(119): NCBI GI: 226283824 Blast Desc: conserved [Paracoccidioides brasiliensis Pb01]
  misc_feature (1)..(119): NCBI GI: 225560116 Blast Desc: [Ajellomyces capsulatus G186AR]
  misc_feature (1)..(118): NCBI GI: 256725922 Blast Desc: NECHADRAFT_82116 [Nectria haematococca mpVI 77-13-4]
  misc_feature (1)..(100): NCBI GI: 119495441 Blast Desc: stress responsive A/B barrel domain protein [Neosartorya fischeri NRRL 181] gi|119412667|gb|EAW22608.1| stress responsive A/B barrel domain protein [Neosartorya fischeri
  misc_feature (1)..(119): NCBI GI: 242775162 Blast Desc: TSTA_088610 [Talaromyces stipitatus ATCC 10500] gi|218722207|gb|EED21625.1| TSTA_088610 [Talaromyces stipitatus ATCC 10500]
  misc_feature (1)..(98): NCBI GI: 255937379 Blast Desc: Pc13g13020 [Penicillium chrysogenum Wisconsin 54-1255] gi|211584336|emb|CAP92371.1| Pc13g13020 [Penicillium chrysogenum Wisconsin 54-1255]
MAVYHIVLFKLKPGVKQEQVDDWCAKGREMVGKIPGIFMFYLRHFHDHNLTDIKGLVKFSAGSPLPITAARAQGYDLGVTAILEKPDDIMVFATHPAHNELSKLREGLTDEVLCFDLEF

SEQ ID NO: 29285 - DNA, 2171 bp, Muscodor strobelii; identical to SEQ ID NO: 29282
  misc_feature: SGI EST ID NO. CUFF.69292.1
  misc_feature: Variant of the nucleotide sequence at SEQ ID NO 29283

SEQ ID NO: 29286 - DNA, 729 bp, Muscodor strobelii
  misc_feature: SGI cDNA ID NO. 570056
  misc_feature: Encodes the peptide sequence at SEQ ID NO 29287
atggggtcactaccttccgagctcaaatccagagtgacatacttcctctgcgtgaatgatctgaagtcactgcgcttcgtcaacaagcagtacgcggccgttgccgctcgtccgcttttcaacgtcctccgtctttccggtcgtcgacaagatgatggaccatggcttaattccggaccgctggtggaacacgtgcctcctcccggacatggccgaacaaagaagttcaacttcactcaacttgacaacgccgtcgatgagatactatctttctctctagcaaggtacatgagaacgctgatctttgatcctgcattctaccgtgaaaggttctggtcggactatcgcatggtcttggaacatgagatgcatgagcctgtcacagacgtcgagtttgacgatagcggctccgaggatgactacgaaagagctatccaacgggtcatcgagcaccgcatgactcgaccggagcgagaagatgaagctatctctgcggccactgtcgtatggaacacccagatagcccagcaaagggacaaggaagcatttattgtttctgacctcgcgagacttttcgaggctaccagtgcattggaggccgttgaaatcaaggcatctgaattttgtggctatccaggcctggagtcttgcaagtacagcttccgcgcggtcaagtacgagacagatgtggatactaactcgattgacctgcagttcttatcaaattga

SEQ ID NO: 29287 - protein, 242 aa, Muscodor strobelii
  misc_feature: SGI Peptide ID NO. 570056
MGSLPSELKSRVTYFLCVNDLKSLRFVNKQYAAVAARPLFNVLRLSGRRQDDGPWLNSGPLVEHVPPPGHGRTKKFNFTQLDNAVDEILSFSLARYMRTLIFDPAFYRERFWSDYRMVLEHEMHEPVTDVEFDDSGSEDDYERAIQRVIEHRMTRPEREDEAISAATVVWNTQIAQQRDKEAFIVSDLARLFEATSALEAVEIKASEFCGYPGLESCKYSFRAVKYETDVDTNSIDLQFLSN

SEQ ID NO: 29288 - DNA, 3027 bp, Muscodor strobelii
  misc_feature: SGI EST ID NO. CUFF.69281.0
  misc_feature: Variant of the nucleotide sequence at SEQ ID NO 29286
cagctacatccatccctcagtcgcattcgatcgttggtagcagctaattccgatgagtgtctaacgtatcgacgaggtggacttttacactcttcttgagaagaaagggttgaccaagtcatgtcaatcagttgaagaatgaatgtgaaacgaagataccaggataaagcatttgaggcgatggattctgtggtatgtcgccaatgtcatgccgaaagcccgcagctgaaaccagctgccgcgagcagagctagacggcgaaggtggtccccatcttgtttgcattagcatgcgcggatgacgaacatcgtctgctgcgagatggggtcactaccttccgagctcaaatccagagtgacatacttcctctgcgtgaatgatctgaagtcactgcgcttcgtcaacaagcagtacgcggccgttgccgctcgtccgcttttcaacgtcctccgtctttccggtcgtcgacaagatgatggaccatggcttaattccggaccgctggtggaacacgtgcctcctcccggacatggccgaacaaagaagttcaacttcactcaacttgacaacgccgtcgatgagatactatctttctctctagcaaggtacatgagaacgctgatctttgatcctgcattctaccgtgaaaggttctggtcggactatcgcatggtcttggaacatgagatgcatgagcctgtcacagacgtcgagtttgacgatagcggctccgaggatgactacgaaagagctatccaacgggtcatcgagcaccgcatgactcgaccggagcgagaagatgaagctatctctgcggccactgtcgtatggaacacccagatagcccagcaaagggacaaggaagcatttattgtttctgacctcgcgagacttttcgaggctaccagtgcattggaggccgttgaaatcaaggcatctgaattttgtggctatccaggcctggagtcttgcaattcttatcaaattgatggtcaacgacgagataccttttcatctgttttcttcctgcacattataagccaagcactgtactctgccaggcgtcacattaaaacactcaaaatatcagagctcttgcccgaaaaggtctcaaattctgagagtgtgagacacattttcacgggcctcgaaaatctgagattggacattattcatatggaagcattggctgaggaaagcagtcttgagacgaatctcccagcattgatggcacgtgcacagccgacgctgaagtcgctaactctggtgggcggggggaaatggattcagcattgtgcccgaggtgaacattctctgcaaaagatatgtcatgacggagatgggaagacacccttggtatttccaaaactagagtctctcgaattaggagggctgattgtggacacgtctaagctgattcgtttcatgcacgcgcagccgaagctcaaatacataaggttctactacgttcacctggctacgccaggattcggatggcctcgactcgccgacgaacttccagaaagcctgaaacaatgggaaatttggggagagcttcgtcacgagcctcagtttcccctgcacaatgccgatgacccggttgcttacaattggatgcaaatatggcgtcccccatatcttctggaccatccttggtgggtacgagctgaatctgcagacggtattcggcaagagaagacaatgttcatacgagctccggcttgaacttcgcatttacagaagtgacggaaatcgctaaaaagaagccagagttttgaatgcacagagatatctcctttgcggcaaggttcttattttggttgcgggctcaacttcatccagctctcattctgtaaacaacatggctagaaaactttagacaaaaggaatttgtcaaattcaacagtttcatatttgcacccaatttgctaggcagtgtgtctaaggtctaaggccctagattgattcaagcacatggccccactagcatgcaccaggacaagatatctatacctgccattgaatttgccaagcactactttgcctatgcacctagcagcatcattgcaaatatcatttcagacatcgactcttgcgtcccataatgctcgcaattaactcagagacactgactataatagtcgttggagtatttgcaagtcgatccggtcgcacagcttgaacacccagagtatccgatgccgccacactggccgtagagagcaacactgcagcccccagtgccgccgcctgtcgtcgtcggtgcactagttgtagccgtggtcgtcgaggtcgggactgcggtagcagtgccccatgcgttcagggcagatgtactatttcacacgtaatcagtactatgtccttagattctggcatggaggcatctcaatcagatactgtgcttactacgcaggcttcttagcaaggccactgttccatggcagcggtgcaccgcccgagatccaggtatacttgtctgcaacaccccactgtgtgataccgatacactttgataccgacttgcaagcattaaccacacttgcatagtccttaccttgctgctcgagcgtagccgaggtaccgggtgatgccgtattaatatccagctcagtataagcaatctcgacgttcaacgcagcgaaagcgttcagattcgtgattagattagcctggttcacgcttccgacactcatgtgaccctgaagtcccattccgtcaatgcgggcgccgtacgaacggatagtctggatgagattctgagcgttggttgatttagtccctggaacatcacaattatagtcgttatagtagagcttagcagacggatcgatggtggcggcgtgtgcgaatgcgatgggaatgtatgcagggccgataaccttgtaccaggggctgtctgtgcgatagccgccgctgtctgatagagcctcgttcactacatcccaggcatagcactggcctttgaaatgtgtcatcacatttgtgatgtgattcttcatgatagagatcatggtagcattatcc

SEQ ID NO: 29289 - DNA, 1188 bp, Muscodor strobelii
  misc_feature: SGI cDNA ID NO. 570057
  misc_feature: Elevated expression when VOC is produced
  misc_feature: Encodes the peptide sequence at SEQ ID NO 29290
atggtttctgttcgcgatctctgtttgtctgccttggcgtctggtgtcgtatttgctgatgggctcaacgccagagccaaaaatgccgggaggctgtattggggcaccgcggtcaaccccaccgttctaaacgatgccacggcgaagtccattgcgatcaataaccaagacttcggggcctacacatgcgaaaacgagatgaagtttgacgcaacggagccctcccggggcgttttctcatacactaacgccgacaagattgtcagccaggcgcggagcaccggccaattgatgcgttgtcatactcttgtctggcacagccaacttccttcgtgggttaccagtaccagctgggataatgctaccatgatctctatcatgaagaatcacatcacaaatgtgatgacacatttcaaaggccagtgctatgcctgggatgtagtgaacgaggctctatcagacagcggcggctatcgcacagacagcccctggtacaaggttatcggccctgcatacattcccatcgcattcgcacacgccgccaccatcgatccgtctgctaagctctactataacgactataattgtgatgttccagggactaaatcaaccaacgctcagaatctcatccagactatccgttcgtacggcgcccgcattgacggaatgggacttcagggtcacatgagtgtcggaagcgtgaaccaggctaatctaatcacgaatctgaacgctttcgctgcgttgaacgtcgagattgcttatactgagctggatattaatacggcatcacccggtacctcggctacgctcgagcagcaaggtaaggactatgcaagtgtggttaatgcttgcaagtcggtatcaaagtgtatcggtatcacacagtggggtgttgcagacaagtatacctggatctcgggcggtgcaccgctgccatggaacagtggccttgctaagaagcctgcgtatacatctgccctgaacgcatggggcactgctaccgcagtcccgacctcgacgaccacggctacaactagtgcaccgacgacgacaggcggcggcactgggggctgcagtgttgctctctacggccagtgtggcggcatcggatactctgggtgttcaagctgtgcgaccggatcgacttgcaaatactccaacgactattatagtcagtgtctctga

SEQ ID NO: 29290 - protein, 395 aa, Muscodor strobelii
  misc_feature: SGI Peptide ID NO. 570057
  misc_feature (363)..(391): Pfam Id: PF00734 Pfam Desc: Fungal cellulose binding domain
  misc_feature (21)..(331): Pfam Id: PF00331 Pfam Desc: Glycosyl hydrolase family 10
  misc_feature (9)..(395): NCBI GI: 115390166 Blast Desc: endo-1,4-beta-xylanase precursor [Aspergillus terreus NIH2624] gi|114194984|gb|EAU36684.1| endo-1,4-beta-xylanase precursor [Aspergillus terreus NIH2624]
  misc_feature (1)..(395): NCBI GI: 119473107 Blast Desc: endo-1,4-beta-xylanase, [Neosartorya fischeri NRRL 181] gi|119406652|gb|EAW16603.1| endo-1,4-beta-xylanase, [Neosartorya fischeri NRRL 181]
  misc_feature (17)..(395): NCBI GI: 70992777 Blast Desc: endo-1,4-beta-xylanase [Aspergillus fumigatus Af293] gi|66848870|gb|EAL89199.1| endo-1,4-beta-xylanase, [Aspergillus fumigatus Af293] gi|159130308|gb|EDP55421.1| [Aspergillus A1163]
  misc_feature (1)..(395): NCBI GI: 121700300 Blast Desc: endo-1,4-beta-xylanase, [Aspergillus clavatus NRRL 1] gi|119396557|gb|EAW06989.1| endo-1,4-beta-xylanase, [Aspergillus clavatus NRRL 1]
  misc_feature (7)..(395): NCBI GI: 255946720 Blast Desc: Pc22g00820 [Penicillium chrysogenum Wisconsin 54-1255] gi|211591144|emb|CAP97370.1| Pc22g00820 [Penicillium chrysogenum Wisconsin 54-1255]
  misc_feature (16)..(395): NCBI GI: 261354362 Blast Desc: endo-1,4-beta-xylanase [Verticillium albo-atrum VaMs.102]
  misc_feature (9)..(395): NCBI GI: 116178804 Blast Desc: CHGG_00030 [Chaetomium globosum CBS 148.51] gi|88184327|gb|EAQ91795.1| CHGG_00030 [Chaetomium globosum CBS 148.51]
  misc_feature (12)..(395): NCBI GI: 261357694 Blast Desc: endo-1,4-beta-xylanase Z [Verticillium albo-atrum VaMs.102]
  misc_feature (1)..(395): NCBI GI: 53747929 Blast Desc: endo-1,4-xylanase D [Penicillium funiculosum]
  misc_feature (22)..(395): NCBI GI: 164428377 Blast Desc: NCU04997 [Neurospora crassa OR74A] gi|157072122|gb|EAA26581.2| NCU04997 [Neurospora crassa OR74A]
  misc_feature (22)..(331): SWISSPROT Homolog: EC 3.2.1.8 Endo-1,4-beta-xylanase
  misc_feature: Useful for introducing or modulating the production of volatile compounds
MVSVRDLCLSALASGVVFADGLNARAKNAGRLYWGTAVNPTVLNDATAKSIAINNQDFGAYTCENEMKFDATEPSRGVFSYTNADKIVSQARSTGQLMRCHTLVWHSQLPSWVTSTSWDNATMISIMKNHITNVMTHFKGQCYAWDVVNEALSDSGGYRTDSPWYKVIGPAYIPIAFAHAATIDPSAKLYYNDYNCDVPGTKSTNAQNLIQTIRSYGARIDGMGLQGHMSVGSVNQANLITNLNAFAALNVEIAYTELDINTASPGTSATLEQQGKDYASVVNACKSVSKCIGITQWGVADKYTWISGGAPLPWNSGLAKKPAYTSALNAWGTATAVPTSTTTATTSAPTTTGGGTGGCSVALYGQCGGIGYSGCSSCATGSTCKYSNDYYSQCL

SEQ ID NO: 29291 - DNA, 3682 bp, Muscodor strobelii
  misc_feature: SGI EST ID NO. CUFF.69282.1
  misc_feature: Variant of the nucleotide sequence at SEQ ID NO 29289
gcagttgccaagcttcagtggctgatgtgcaggtctaattcgcggcgtcctagtgggacgcagattacaggttggaagactcttgggaaagatctttactataaattccatcagcgatcccaaaaaacttgatgccaaaagactgtcgagttagattgtatattcatcatggtttctgttcgcgatctctgtttgtctgccttggcgtctggtgtcgtatttgctgatgggctcaacgccagagccaaaaatgccgggaggctgtattggggcaccgcggtcaaccccaccgttctaaacgatgccacggcgaagtccattgcgatcaataaccaagacttcggggcctacacatgcgaaaacgagatgaagtttgacgcaacggagccctcccggggcgttttctcatacactaacgccgacaagattgtcagccaggcgcggagcaccggccaattgatgcgttgtcatactcttgtctggcacagccaacttccttcgtgggttaccagtaccagctgggataatgctaccatgatctctatcatgaagaatcacatcacaaatgtgatgacacatttcaaaggccagtgctatgcctgggatgtagtgaacgaggctctatcagacagcggcggctatcgcacagacagcccctggtacaaggttatcggccctgcatacattcccatcgcattcgcacacgccgccaccatcgatccgtctgctaagctctactataacgactataattgtgatgttccagggactaaatcaaccaacgctcagaatctcatccagactatccgttcgtacggcgcccgcattgacggaatgggacttcagggtcacatgagtgtcggaagcgtgaaccaggctaatctaatcacgaatctgaacgctttcgctgcgttgaacgtcgagattgcttatactgagctggatattaatacggcatcacccggtacctcggctacgctcgagcagcaaggtaaggactatgcaagtgtggttaatgcttgcaagtcggtatcaaagtgtatcggtatcacacagtggggtgttgcagacaagtatacctggatctcgggcggtgcaccgctgccatggaacagtggccttgctaagaagcctgcgtatacatctgccctgaacgcatggggcactgctaccgcagtcccgacctcgacgaccacggctacaactagtgcaccgacgacgacaggcggcggcactgggggctgcagtgttgctctctacggccagtgtggcggcatcggatactctgggtgttcaagctgtgcgaccggatcgacttgcaaatactccaacgactattatagtcagtgtctctgagttaattgcgagcattatgggacgcaagagtcgatgtctgaaatgatatttgcaatgatgctgctaggtgcataggcaaagtagtgcttggcaaattcaatggcaggtatagatatcttgtcctggtgcatgctagtggggccatgtgcttgaatcaatctagggccttagaccttagacacactgcctagcaaattgggtgcaaatatgaaactgttgaatttgacaaattccttttgtctaaagttttctagccatgttgtttacagaatgagagctggatgaagttgagcccgcaaccaaaataagaaccttgccgcaaaggagatatctctgtgcattcaaaactctggcttctttttagcgatttccgtcacttctgtaaatgcgaagttcaagccggagctcgtatgaacattgtcttctcttgccgaataccgtctgcagattcagctcgtacccaccaaggatggtccagaagatatgggggacgccatatttgcatccaattgtaagcaaccgggtcatcggcattgtgcaggggaaactgaggctcgtgacgaagctctccccaaatttcccattgtttcaggctttctggaagttcgtcggcgagtcgaggccatccgaatcctggcgtagccaggtgaacgtagtagaaccttatgtatttgagcttcggctgcgcgtgcatgaaacgaatcagcttagacgtgtccacaatcagccctcctaattcgagagactctagttttggaaataccaagggtgtcttcccatctccgtcatgacatatcttttgcagagaatgttcacctcgggcacaatgctgaatccatttccccccgcccaccagagttagcgacttcagcgtcggctgtgcacgtgccatcaatgctgggagattcgtctcaagactgctttcctcagccaatgcttccatatgaataatgtccaatctcagattttcgaggcccgtgaaaatgtgtctcacactctcagaatttgagaccttttcgggcaagagctctgatattttgagtgttttaatgtgacgcctggcagagtacagtgcttggcttataatgtgcaggaagaaaacagatgaaaagctgtggaaaaaaagctttagcatctgaagtcaggaatgctggttgcagccatccccttgcaatgaacacgaaaaagggtggtaacatacgtatctcgtcgttgaccatcaatttgataagaactgcaggtcaatcgagttagtatccacatctgtctcgtacttgaccgcgcggaagctgtacttgcaagactccaggcctggatagccacaaaattcagatgccttgatttcaacggcctccaatgcactggtagcctcgaaaagtctcgcgaggtcagaaacaataaatgcttccttgtccctttgctgggctatctgggtgttccatacgacagtggccgcagagatagcttcatcttctcgctccggtcgagtcatgcggtgctcgatgacccgttggatagctctttcgtagtcatcctcggagccgctatcgtcaaactcgacgtctgtgacaggctcatgcatctcatgttccaagaccatgcgatagtccgaccagaaccctaggaaatgatatcaataacagggagaaaaatgcacgagcgccttttaagtcgtactttcacggtagaatgcaggatcaaagatcagcgttctcatgtaccttgctagagagaaagatagtatctcatcgacggcgttgtcaagttgagtgaagttgaacttctttgttcggccatgtccgggaggaggcacgtgttccaccagcggtccggaattaagccatggtccatcatcttgtcgacgaccggaaagacggaggacgttgaaaagcggacgagcggcaacggccgcgtactgcttgttgacgaagcgcagtgacttcagatcattcacgcagaggaagtatgtcactctggatttgagctcggaaggtagtgaccccatctcgcagcagacgatgttcgtcatccgcgcatgctaatgcaaacaagatggggaccaccttcgccgtctagctctgctcgcggcagctggtttcagctgcgggctttcggcatgacattggcgacataccacagaatccatcgcctcaaatgctttatcctggtatcttcgtttcacattcattcttcaactgattgacatgacttggtcaaccctttcttctcaagaagagtgtaaaagtccacctcgtcgatacgttagacactcatcggaattagctgctaccaacgatcgaatgcgactgagggatggatgtagctg

SEQ ID NO: 29292 - DNA, 900 bp, Muscodor strobelii
  misc_feature: SGI cDNA ID NO. 570058
  misc_feature: Encodes the peptide sequence at SEQ ID NO 29293
atgtcacaatctgagtgtaccgaggatgtcacgatttacaacgctgctgacgctcagtcattggtaaaccgttgtcagacgctgtcaggaagtctgatcttcgctcataacctcacagaagacgtcaacctggacggcctcgaggaaattgatggaggtatcaacggggacttcggtgatcttgagttccgcagttatcagtacacaggaccaagatacggcatcagcagctcaacgcttaaaaaagtcaaatacggacttcatttctcccagaacgagcctcaaggtggaggcagcggtttggccaatgtttctttcccaaacctagagatagtgtatggagacgtgcatttcgccctaccgaatctaacctatcttgacttaacgaagttacatcaatcccctcgaatctatataaacacgcctaaactcgaagaattaaaaataagcagatacgaaggacaaatacccgaacacataaacgatggccgttatatacacggcacagaaatcacgctgggtgacgtcggaaacgttgaatcagtcgatagtctcttcagtcagccaattcagacattgcaaaatgagattaaccagacctacgaaaacatcatgtatgtcaacacgagcacgagtattcgatcactcacaatcggatgggagcacattagtgacatgacattggctggtttggatgttattgtcaattttggaatagaatctactgatatgatgagaatcgaatcgctcactttgggagacgtgggaaggggcggcacatacgacatccaacgaagcacaaacctgcaaaacttgagtgttggggcaatttgggcctcatacatcgacaacactgacttgacgctgcctttcgaccaaatcgactctttggatctataa

SEQ ID NO: 29293 - protein, 299 aa, Muscodor strobelii
  misc_feature: SGI Peptide ID NO. 570058
  misc_feature (12)..(299): NCBI GI: 255939416 Blast Desc: Pc16g00550 [Penicillium chrysogenum Wisconsin 54-1255] gi|211585100|emb|CAP92725.1| Pc16g00550 [Penicillium chrysogenum Wisconsin 54-1255]
  misc_feature (9)..(299): NCBI GI: 256722244 Blast Desc: NECHADRAFT_86840 [Nectria haematococca mpVI 77-13-4]
  misc_feature (4)..(228): NCBI GI: 39956722 Blast Desc: [Magnaporthe grisea 70-15] gi|145016520|gb|EDK00950.1| [Magnaporthe grisea 70-15]
MSQSECTEDVTIYNAADAQSLVNRCQTLSGSLIFAHNLTEDVNLDGLEEIDGGINGDFGDLEFRSYQYTGPRYGISSSTLKKVKYGLHFSQNEPQGGGSGLANVSFPNLEIVYGDVHFALPNLTYLDLTKLHQSPRIYINTPKLEELKISRYEGQIPEHINDGRYIHGTEITLGDVGNVESVDSLFSQPIQTLQNEINQTYENIMYVNTSTSIRSLTIGWEHISDMTLAGLDVIVNFGIESTDMMRIESLTLGDVGRGGTYDIQRSTNLQNLSVGAIWASYIDNTDLTLPFDQIDSLDL

SEQ ID NO: 29294 - DNA, 1564 bp, Muscodor strobelii
  misc_feature: SGI EST ID NO. CUFF.69246.0
  misc_feature: Variant of the nucleotide sequence at SEQ ID NO 29292
gttgaagagccgcccatctcgacggcgctggacaccagcaggctcttctgtagcacgttagcgattgtgccgtttcgcgatgcgcggccttaagtccatagccagccgcttggctacgtacagtctttttgtgttacctggcattccatttgtgatgtcacaatctgagtgtaccgaggatgtcacgatttacaacgctgctgacgctcagtcattggtaaaccgttgtcagacgctgtcaggaagtctgatcttcgctcataacctcacagaagacgtcaacctggacggcctcgaggaaattgatggaggtatcaacggggacttcggtgatcttgagttccgcagttatcagtacacaggaccaagatacggcatcagcagctcaacgcttaaaaaagtcaaatacggacttcatttctcccagaacgagcctcaaggtggaggcagcggtttggccaatgtttctttcccaaacctagagatagtgtatggagacgtgcatttcgccctaccgaatctaacctatcttgacttaacgaagttacatcaatcccctcgaatctatataaacacgcctaaactcgaagaattaaaaataagcagatacgaaggacaaatacccgaacacataaacgatggccgttatatacacggcacagaaatcacgctgggtgacgtcggaaacgttgaatcagtcgatagtctcttcagtcagccaattcagacattgcaaaatgagattaaccagacctacgaaaacatcatgtatgtcaacacgagcacgagtattcgatcactcacaatcggatgggagcacattagtgacatgacattggctggtttggatgttattgtcaattttggaatagaatctactgatatgatgagaatcgaatcgctcactttgggagacgtgggaaggggcggcacatacgacatccaacgaagcacaaacctgcaaaacttgagtgttggggcaatttgggcctcatacatcgacaacactgacttgacgctgcctttcgaccaaatcgactctttggatctataagacgacaagctcaccgccttgactttaccacaacaggcggagaattgggtcaattccacaatcagagttagctcggagaatctaaccctggatggttctacaacgtggcattggccaaaaaatggaatgtattacgtcgagttgcgtgctcataaaatcacatcagatttctttgacaatttagtcgacagcaacattactatatctagttatctgttgctcgaggatcatagcaattctcttcgttgctcgaagctagagaagcaagtctccggtgacgcagaactttccaagcggtttccgaagttcagctgcaactcgttcaaagccggatccatttctctcaggtcgcaatctatgttcgtttgggcatgtgttgttgcgattgtggctctagtcgtatgaaaatgaagggagtttatgaacgcatcattattgtttgcattagcaagcgcttgaagaagcgaaatatgacagagtaatctagactcatgcggctgtaacgatcgc

SEQ ID NO: 29295 - DNA, 1245 bp, Muscodor strobelii
  misc_feature: SGI cDNA ID NO. 570059
  misc_feature: Elevated expression when VOC is produced
  misc_feature: Encodes the peptide sequence at SEQ ID NO 29296
atgcgtttctcggcattcttaacagctgtcatcagcttcttcgccattggccttgatgcctactggcttcaagacatcaagcatcagggtgtagctccctatgctggcagcggatacagcgtctttcgcaacgtcaaggactacggcgccagaggtgatggcgtcactgatgatactgcggccattgctgctgccttgaatgccggtaacaaccgctgcttgcaaggctgcgcgtccaccaccaagaccccagctgtggtctacttccctgctgggacatatatcctttccagctctctccttcctccctacttcactcagctgattggtgatcctaccaatccgcctactttgaaggctacagcgaatttccaaggatttggtttgatcgatggcaatcattactacacgtcggatctcaactgggtctcgacaaacgtgttctatcgtcagatgcgaaactttgtcattgacacaactgccgttgctcccggtacagcatgcactggtattcactggccgacctcgcaggcaacgtctcttatcaacatcgttttcaacatgcctacagcctctaacgttgtacacgttggtctgttcgtcgaaagcggttcgggcggtttcatgagcgatctgactttcaatggtggtgccactggtgcctctatgggtaaccagcagtatactacgcgtaattttgtcttcaataactgcaagacagcgatcatccagctctggaactggggatggacttaccagaacttgcagatcaacaactgcggtgttggtatcgatctcagcgctgtcactgatacgggcgctctcaatgtcggatctgctatcgtcatcgacagtacgttcaagagcgttacgacagccatcaagaccgcatacactcagagcacttcgcccgataccgctggtagcatgctcttagagaacgttatcctgaacagcgttggtactgcagttcagggacctagtggttctcttcttgctggtggatcgacgacgatcgcagggtgggctttaggccatcgctatgtgaatggagtttctcgcgaggttgctggaagcatcactcctaacactcggccttccgtccttgttggctccaacaactattactactccagatcgaagcctcagtacaacaacctggctgcgagcgccttccagagtgcccgtgacgccggagccaagggtgatggcagcaccgacgatgtgagtataacgccaaattag

SEQ ID NO: 29296 - protein, 414 aa, Muscodor strobelii
  misc_feature: SGI Peptide ID NO. 570059
  misc_feature (1)..(414): NCBI GI: 85097220 Blast Desc: NCU04850 [Neurospora crassa OR74A] gi|28921899|gb|EAA31173.1| NCU04850 [Neurospora crassa OR74A]
  misc_feature (1)..(414): NCBI GI: 171681846 Blast Desc: protein product [Podospora anserina] gi|170940882|emb|CAP66532.1| protein product [Podospora anserina]
  misc_feature (26)..(414): NCBI GI: 116202035 Blast Desc: CHGG_08902 [Chaetomium globosum CBS 148.51] gi|88177420|gb|EAQ84888.1| CHGG_08902 [Chaetomium globosum CBS 148.51]
  misc_feature (4)..(414): NCBI GI: 39974389 Blast Desc: MGG_00659 [Magnaporthe grisea 70-15] gi|145018426|gb|EDK02705.1| MGG_00659 [Magnaporthe grisea 70-15]
  misc_feature (4)..(410): NCBI GI: 119472314 Blast Desc: NFIA_057650 [Neosartorya fischeri NRRL 181] gi|119406464|gb|EAW16415.1| conserved [Neosartorya fischeri NRRL 181]
  misc_feature (21)..(410): NCBI GI: 159124647 Blast Desc: exo-beta-1,3-glucanase, [Aspergillus fumigatus A1163]
  misc_feature (21)..(410): NCBI GI: 70992457 Blast Desc: exo-beta-1,3-glucanase [Aspergillus fumigatus Af293] gi|66848710|gb|EAL89039.1| exo-beta-1,3-glucanase, [Aspergillus fumigatus Af293]
  misc_feature (20)..(410): NCBI GI: 162707730 Blast Desc: beta 1,3 exoglucanase [Trichoderma asperellum]
  misc_feature (19)..(408): NCBI GI: 156045339 Blast Desc: SS1G_09858 [Sclerotinia sclerotiorum 1980] gi|154694253|gb|EDN93991.1| SS1G_09858 [Sclerotinia sclerotiorum 1980]
  misc_feature (20)..(414): NCBI GI: 30575680 Blast Desc: beta-1,3-exoglucanase [Trichoderma hamatum]
  misc_feature (18)..(408): SWISSPROT Homolog: EC 3.2.1.58 Glucan 1,3-beta-glucosidase
  misc_feature: Useful for introducing or modulating the production of volatile compounds
MRFSAFLTAVISFFAIGLDAYWLQDIKHQGVAPYAGSGYSVFRNVKDYGARGDGVTDDTAAIAAALNAGNNRCLQGCASTTKTPAVVYFPAGTYILSSSLLPPYFTQLIGDPTNPPTLKATANFQGFGLIDGNHYYTSDLNWVSTNVFYRQMRNFVIDTTAVAPGTACTGIHWPTSQATSLINIVFNMPTASNVVHVGLFVESGSGGFMSDLTFNGGATGASMGNQQYTTRNFVFNNCKTAIIQLWNWGWTYQNLQINNCGVGIDLSAVTDTGALNVGSAIVIDSTFKSVTTAIKTAYTQSTSPDTAGSMLLENVILNSVGTAVQGPSGSLLAGGSTTIAGWALGHRYVNGVSREVAGSITPNTRPSVLVGSNNYYYSRSKPQYNNLAASAFQSARDAGAKGDGSTDDVSITPN

SEQ ID NO: 29297 - DNA, 1295 bp, Muscodor strobelii
  misc_feature: SGI EST ID NO. CUFF.69278.0
  misc_feature: Variant of the nucleotide sequence at SEQ ID NO 29295
ctcttgtaatgcatatattctgctataaatccgagacattccatcgaaagatgatcacggtgctcctcaagtcgctcagcttttattccgcgtcaagatgcgtttctcggcattcttaacagctgtcatcagcttcttcgccattggccttgatgcctactggcttcaagacatcaagcatcagggtgtagctccctatgctggcagcggatacagcgtctttcgcaacgtcaaggactacggcgccagaggtgatggcgtcactgatgatactgcggccattgctgctgccttgaatgccggtaacaaccgctgcttgcaaggctgcgcgtccaccaccaagaccccagctgtggtctacttccctgctgggacatatatcctttccagctctctccttcctccctacttcactcagctgattggtgatcctaccaatccgcctactttgaaggctacagcgaatttccaaggatttggtttgatcgatggcaatcattactacacgtcggatctcaactgggtctcgacaaacgtgttctatcgtcagatgcgaaactttgtcattgacacaactgccgttgctcccggtacagcatgcactggtattcactggccgacctcgcaggcaacgtctcttatcaacatcgttttcaacatgcctacagcctctaacgttgtacacgttggtctgttcgtcgaaagcggttcgggcggtttcatgagcgatctgactttcaatggtggtgccactggtgcctctatgggtaaccagcagtatactacgcgtaattttgtcttcaataactgcaagacagcgatcatccagctctggaactggggatggacttaccagaacttgcagatcaacaactgcggtgttggtatcgatctcagcgctgtcactgatacgggcgctctcaatgtcggatctgctatcgtcatcgacagtacgttcaagagcgttacgacagccatcaagaccgcatacactcagagcacttcgcccgataccgctggtagcatgctcttagagaacgttatcctgaacagcgttggtactgcagttcagggacctagtggttctcttcttgctggtggatcgacgacgatcgcagggtgggctttaggccatcgctatgtgaatggagtttctcgcgaggttgctggaagcatcactcctaacactcggccttccgtccttgttggctccaacaactattactactccagatcgaagcctcagtacaacaacctggctgcgagcgccttccagagtgcccgtgacgccggag

SEQ ID NO: 29298 - DNA, 312 bp, Muscodor strobelii
  misc_feature: SGI cDNA ID NO. 570060
  misc_feature: Reduced expression when VOC is produced
  misc_feature: Encodes the peptide sequence at SEQ ID NO 29299
gaacccgccgccccacagcccgtggtcgacgacgatcgactccgaccccaggatctggatccgcgtcgggccctcgctgtctctgctgctgctgctgtcgtcatggccgctgtggccgctgtggccgctgtggccgttgaccaggggttcggacatgttggccaacgaactagcctctgttctccctgtctctttgtcttcgtcttctcgtcgtcgtcgccgcagcgtgtggcagccgagtgttgcgtcgccgccgccgagaggatgggaagtgtcggacggggagagatgggcggtgtagtagtagtatag

SEQ ID NO: 29299 - protein, 103 aa, Muscodor strobelii
  misc_feature: SGI Peptide ID NO. 570060
  misc_feature: Useful for introducing or modulating the production of volatile compounds
EPAAPQPVVDDDRLRPQDLDPRRALAVSAAAAVVMAAVAAVAAVAVDQGFGHVGQRTSLCSPCLFVFVFSSSSPQRVAAECCVAAAERMGSVGRGEMGGVVVV

SEQ ID NO: 29300 - DNA, 6386 bp, Muscodor strobelii
  misc_feature: SGI EST ID NO. CUFF.69605.2
  misc_feature: Variant of the nucleotide sequence at SEQ ID NO 29298
cgccccacagcccgtggtcgacgacgatcgactccgaccccaggatctggatccgcgtcgggccctcgctgtctctgctgctgctgctgtcgtcatggccgctgtggccgctgtggccgctgtggccgttgaccaggggttcggacatgttggccaacgaactagcctctgttctccctgtctctttgtcttcgtcttctcgtcgtcgtcgccgcagcgtgtggcagccgagtgttgcgtcgccgccgccgagaggatgggaagtgtcggacggggagagatgggcggtgtagtagtagtatagtggtgtgcgggcggagatgcttagatgggcattctcacggggctcggccaagtctgacggtcagcccaacacccgaattgctccgtctctagatagtctcctcgctgctgcagatcgcacctgtgaggagggttggcgatagaggtagacggacccgtgagcagtgagcagtgagcagtcggcagcgatgcgtgagctgtgactcttttggctgcgaatgccacttttgccatggtggttttttcaccccgcggcagcgatctcggagtagctcgaggcaggtacctagtcgcctcgtctgtgatttgcccaggactgcccaacgggtgcgcttcaattgaccaataggacaagcagggattcgagacctacggctctcttcaaacttggctctcattattactacaatacctaaccttaggtagttccatgccctgatcacttccgtcccagctatgactgccgtggaaccgtgactctggacatgtaggtatctggggatcctacgtcaggtgccttacctgtgcatctgctcagactcactgaaaagaactagatccagtaacaactctatcggctaacacctagtgggacaatcgttaacggcctgtgattaactaaatacacctagtaggtaggttgccctaaggagtagacaggaaatatgccgaattggtcacggaggagtcgtgggttgggggatcttctgcgatgtgacggacgccatgtaacagtgggagacaggcaaagacaggtgggggctaatagtttagtgccccgtccccaggaacacggaacaccactactgccatcatcgtcttatatagtaaggtagtatctcagtaggcttccgaactacgaaccgaatctaatggccagatagatagtcggatggaccaagagccgcaatgttcgtgggcgaatagcctgttcgagaaaacgtacaaatagacgactggtcttcccgaccttctcgggctacttctcgccagcaatgtgcgagccataatcttgtcacacgagacatcaagcatgaaatagtcacttccatcctgaaggcgtggtgatgcctggtgtatctatctgcagtccttgatggcgtcgcagtctctcagcccactcgagatgccctgcggctgcccgctttggtcagtcgtcaaaacggaatgcgcaacagcccggctgggcgcccgttgaggcttcggtgactgactcaccgccgcctagccacgacaccacccacagctcagcggcatatcaccgtcacttgtcgatcccttcgacgacatgtcctaaatagttgcagggaacaccatttcgtctacatcttgccagcaggggatgatctacgaagcccatgttcttttcggctacaactcaccgtcagtcttgatcatgtccgttcccaaggctgtccgtgaccgccgcgccgccttggtcaatgtcgccagagagaccaacgccgttctcccctgcatactgcaccagctgcctcatctgaatgccgctcgctccgagaagctcaccttttctcagttgcccgccctcgatcccgctcgttgccctgcattcgctctgtcgtctaactccacgtcctgtggtacccccgtcaaggtcatcaatgaagatactctcgacgccgctatcatgatggccgactgtctcgccgtcccgggcgtcatgcaggccgctgtcggagtgacgccgccggcgaatcagagagtggccgtactaaacctcgcttccgacaagaacccaggtggcggctggctgagcggcgcgtctgctcaagaggaagccatctgctatcgctcttcgctcgctatgtccctacccaagtcttggtatccttggacagcaaccgaagccgtatatacaccggatgtggttgtcataaggtcctccatgggttcaggacacgccctcttggcaccgcagacaccacctgctcgactacccgttgtcagcgtcatcagcgtcgctgcaatccggcgccccgagacttgctatccatccgccgggagtggccgcgcacctcctcgtgacacggccgtcttcaagcgctccgctgaccgcgacctaactaaggaaaagatgcgatccgtcttgcgactcgcggcgcgtgagaagcatgagttgctggtgctcggcgcaatgggatgtggtgctttcaagaatcccccacgtgatgtcgcaagttgctggtctgaagtcttgagcgaacccgagttttctggcgggtggtggagagagatttggtttgctgtctttgatagacgcaacgaagggaacttcgaaattttcgatcacgcacttggcggaaaggtattcggagaaaagtcaagatctgatcaattcatgcatacatccttggcgtgatgtttcgtgtcggcctgtcccactcttccatgaagcttacttgtgttttccgaaattccgagccgtaatgggacgcgcggtgcactcaagtaaacgtcggcaatgagtcactatcaacactggttcaactgaattgggctgcaaacttgagctctcctggtccatcaatccactgcctgattatgaaagcagagaagttgtcaataagtcattaccctcgaccgtcagcacttttttccgaccgtctctcgctaggtaataatcaccggttaatcatttccgcggtgatcagcaagtagaataacatatccaaaaaggcaactattgctgacatttcttatccaatgacaaaccatcggcgatacagtacacaacaaatctgtgaatagtgtatcatattttgctggagtgtaatgcgtgattgcaggccggaattagcatctcgcgactcgcgcattcgccttttgcgtctccagcccactaatctcgaatgcattgtggactacggctgtaaaccctagccatttgcgagactgacggccgccaaagaggggctcactggcggatcccgccatggaaggtgtgaaaacagcggccagagccatcattctgcctggggatccccatatcttaccattggtgatccgcttcgtcatgacttcgagtgaaaacgagactgctcggagattagtacaccaccgacaagcgctgatatataggtacataggtaaaaagcttcacactatgcaacacaccatcggtattctgtttttggatcttcttgccgtgccgtttgtgtcgtcgtcttttaacctgcagataccccgataatgagcgtgttggatcgtacttttgaggaacttgggtttacgactagcaaattctcacatccggcgcatcattcttggcggtgacggcggaacgggaccctccggacggcaagcacagaactacgccatggcggccgaccgggattcgacggacggcggagcgggctcgacaagctccccggacgtctcgaaaatggcatcacggtcggaaaccacgcttgagttgggtatcgtgcggtctcagaacggccacggctgtgcggacctgccagaaaaatatgaactggatcagtcgcgcccgaaagacgatccgttcgaggtatcgtttgatggggacgatgatcccttgaatcctagaagcatgaatcttgtgaggaaatggatcgttgttgttttggtcggattgggtagtctctgcgtgacctgcacaagttccatttacacggctacatatgaccagatgaacccagaattcggcatgtccgatgagcttgcgacggcgggactgtcgacgtttgtcctaggcatcgccctcggaccacttttcctggggccattgagtgagttctacggacgccgtcccatctacctgtcgtcttggggccttttcgttatttggcttattcctagtgctgttgcacgtaatgcggcgactatgatcacggtgcggtttctcgctgggttttccgggagcgcgtttctcagcgtggctggcggttccgtcagtgatatgttcacaagagagcatgtggcatcaccgatgtccatcatctcactcagtcctttcatcggccccagccttggcccccttatcggcggcttcatcaactaccatgtcaactggcgctggacatactatgttctcatcatctggtccgccgcactgctgttagccttggtgtttctggcacccgagacatatcaccccatcttactacgggacaaggcaaggaagctaagaaaggagagtggcgagcaacgctgggtagctcccatggagaagtcgaccaagtccatcccgaagaccatcgggctaagtctactgcgtccgttccagctgttgacattggagccgatgtgtctacttctgtcactactctccgccgtcctgcttggggtcatctatctcttcttcggggcgtttccgttggtgtttggcaccaattttggcttcaatctctggcagattggtctgacgttcctcgggcttctgggcggcatggtcgcaggtgcattgacgaacagcttctggggccgtgttcacaagtcacttgtccgacgcaacaatggagtgcatgagccggagttccggctcgcgccatctattgccggcgccttcctcgtcactattgggctattctggttcgcttggacttcattttcttatatacattggatcttgcccattatcggctcgggtatctttggctgtggcacgctgctcgtgttcaccggcatattcacttttctcggtacgttctcgtggtgcatgtccagattgacgttgttgccgtttgttaacataagataaagttgattgttaccctatgtacgccgcttcggccttggctgccaatagttttttgcgcggttcctttgctgctgctttccctctcttcggacaacagctatataagcggctaggcttccaatgggcatctagcctactggctttcatcaccttggccttactacctctgccatacctatttttcgtagttggaaaacgattgcgaaagcgcagcagattcacagcacaggtgtactagcaatgttcgttttgtatataagtagacactgatattgatcctgacattaataccactttttctctgaagcgatcacaattttgccgtgacaccatagtcgaatgtgaattagtgacaccgactgctgtaccctgctagatgcaggagaggagatacttatcgatgatactggcacgagtcgcgagctcccttgtactatgcccacccggcatgctggacttggtgcagactttgtactgtatatggtctttcgccaagtgacaggtattagatcactggcagaggatccgaagccatcattgttagctgcattgcaagttttaaattgctacagaatgtagatcggccgcccatatatactagattcacatgcccgtattgcctctagtgatactttatgatggactatgagactactcaattgtgcgaacattcattacaaagcagagtcgtgtaattgtatgttggcgacaaatgagaacctggtcctcacgctagacgtactttagcaactagcgagatatttcacggcataaatatcgcacattcggtcacagactgtgaccacgtgtgactcgacaagacgatattatcgccgacatgatttatataatacatatggatttcccccaacctctgagacaagggtccaacaggcgtacgaagcactgctctgaccgaattgaaacgctgatcattgttgggtgattgtagacgaacagaggccggagcttgtcaatcgtctgatggccttttggcagtggaaaatcgtacttgtgagaagagcatggttgcttttcgccatgcgtatacatccctgcctcaatggccgcacgacgttacatgcaatatgccgcgcatttggatcaaaatggtttcacgacttgtgtaaagatatgtccgataccatatgtggacctatttggagactggggatagctgtatcattttcgagatatggcactgataatccatcagataactggccatatcattaccaataaaacccccctgtgtattagccaatgctattgtaagttgtctttttggcgataagcttttgcggtgtgcacgtacctacatattgaggatccaacggttctg

SEQ ID NO: 29301 - DNA, 984 bp, Muscodor strobelii
  misc_feature: SGI cDNA ID NO. 570061
  misc_feature: Reduced expression when VOC is produced
  misc_feature: Encodes the peptide sequence at SEQ ID NO 29302
atgtccgttcccaaggctgtccgtgaccgccgcgccgccttggtcaatgtcgccagagagaccaacgccgttctcccctgcatactgcaccagctgcctcatctgaatgccgctcgctccgagaagctcaccttttctcagttgcccgccctcgatcccgctcgttgccctgcattcgctctgtcgtctaactccacgtcctgtggtacccccgtcaaggtcatcaatgaagatactctcgacgccgctatcatgatggccgactgtctcgccgtcccgggcgtcatgcaggccgctgtcggagtgacgccgccggcgaatcagagagtggccgtactaaacctcgcttccgacaagaacccaggtggcggctggctgagcggcgcgtctgctcaagaggaagccatctgctatcgctcttcgctcgctatgtccctacccaagtcttggtatccttggacagcaaccgaagccgtatatacaccggatgtggttgtcataaggtcctccatgggttcaggacacgccctcttggcaccgcagacaccacctgctcgactacccgttgtcagcgtcatcagcgtcgctgcaatccggcgccccgagacttgctatccatccgccgggagtggccgcgcacctcctcgtgacacggccgtcttcaagcgctccgctgaccgcgacctaactaaggaaaagatgcgatccgtcttgcgactcgcggcgcgtgagaagcatgagttgctggtgctcggcgcaatgggatgtggtgctttcaagaatcccccacgtgatgtcgcaagttgctggtctgaagtcttgagcgaacccgagttttctggcgggtggtggagagagatttggtttgctgtctttgatagacgcaacgaagggaacttcgaaattttcgatcacgcacttggcggaaaggtattcggagaaaagtcaagatctgatcaattcatgcatacatccttggcgtga

SEQ ID NO: 29302 - protein, 327 aa, Muscodor strobelii
  misc_feature: SGI Peptide ID NO. 570061
  misc_feature (12)..(307): NCBI GI: 46111773 Blast Desc: FG02768.1 [Gibberella zeae PH-1]
  misc_feature (12)..(309): NCBI GI: 256722002 Blast Desc: NECHADRAFT_61692 [Nectria haematococca mpVI 77-13-4]
  misc_feature (11)..(310): NCBI GI: 169775945 Blast Desc: [Aspergillus oryzae RIB40] gi|83771174|dbj|BAE61306.1| protein product [Aspergillus oryzae]
  misc_feature (11)..(310): NCBI GI: 238502605 Blast Desc: conserved [Aspergillus flavus NRRL3357] gi|220691346|gb|EED47694.1| conserved [Aspergillus flavus NRRL3357]
  misc_feature (4)..(310): NCBI GI: 256731922 Blast Desc: NECHADRAFT_104577 [Nectria haematococca mpVI 77-13-4]
  misc_feature (10)..(309): NCBI GI: 240105288 Blast Desc: CPC735_048510 [Coccidioides posadasii C735 delta SOWgp]
  misc_feature (105)..(309): NCBI GI: 261352861 Blast Desc: mitochondrial chaperone BCS1 [Verticillium albo-atrum VaMs.102]
  misc_feature (11)..(309): NCBI GI: 225556814 Blast Desc: conserved [Ajellomyces capsulatus G186AR]
  misc_feature (9)..(309): NCBI GI: 169771321 Blast Desc: [Aspergillus oryzae RIB40] gi|83767989|dbj|BAE58128.1| protein product [Aspergillus oryzae]
  misc_feature (11)..(309): NCBI GI: 240281677 Blast Desc: conserved [Ajellomyces capsulatus H143]
  misc_feature: Useful for introducing or modulating the production of volatile compounds
MSVPKAVRDRRAALVNVARETNAVLPCILHQLPHLNAARSEKLTFSQLPALDPARCPAFALSSNSTSCGTPVKVINEDTLDAAIMMADCLAVPGVMQAAVGVTPPANQRVAVLNLASDKNPGGGWLSGASAQEEAICYRSSLAMSLPKSWYPWTATEAVYTPDVVVIRSSMGSGHALLAPQTPPARLPVVSVISVAAIRRPETCYPSAGSGRAPPRDTAVFKRSADRDLTKEKMRSVLRLAAREKHELLVLGAMGCGAFKNPPRDVASCWSEVLSEPEFSGGWWREIWFAVFDRRNEGNFEIFDHALGGKVFGEKSRSDQFMHTSLA

SEQ ID NO: 29303 - DNA, 6386 bp, Muscodor strobelii; identical to SEQ ID NO: 29300
  misc_feature: SGI EST ID NO. CUFF.69605.2
  misc_feature: Variant of the nucleotide sequence at SEQ ID NO 29301

SEQ ID NO: 29304 - DNA, 1581 bp, Muscodor strobelii
  misc_feature: SGI cDNA ID NO. 570062
  misc_feature: Reduced expression when VOC is produced
  misc_feature: Encodes the peptide sequence at SEQ ID NO 29305
atggcggccgaccgggattcgacggacggcggagcgggctcgacaagctccccggacgtctcgaaaatggcatcacggtcggaaaccacgcttgagttgggtatcgtgcggtctcagaacggccacggctgtgcggacctgccagaaaaatatgaactggatcagtcgcgcccgaaagacgatccgttcgaggtatcgtttgatggggacgatgatcccttgaatcctagaagcatgaatcttgtgaggaaatggatcgttgttgttttggtcggattgggtagtctctgcgtgacctgcacaagttccatttacacggctacatatgaccagatgaacccagaattcggcatgtccgatgagcttgcgacggcgggactgtcgacgtttgtcctaggcatcgccctcggaccacttttcctggggccattgagtgagttctacggacgccgtcccatctacctgtcgtcttggggccttttcgttatttggcttattcctagtgctgttgcacgtaatgcggcgactatgatcacggtgcggtttctcgctgggttttccgggagcgcgtttctcagcgtggctggcggttccgtcagtgatatgttcacaagagagcatgtggcatcaccgatgtccatcatctcactcagtcctttcatcggccccagccttggcccccttatcggcggcttcatcaactaccatgtcaactggcgctggacatactatgttctcatcatctggtccgccgcactgctgttagccttggtgtttctggcacccgagacatatcaccccatcttactacgggacaaggcaaggaagctaagaaaggagagtggcgagcaacgctgggtagctcccatggagaagtcgaccaagtccatcccgaagaccatcgggctaagtctactgcgtccgttccagctgttgacattggagccgatgtgtctacttctgtcactactctccgccgtcctgcttggggtcatctatctcttcttcggggcgtttccgttggtgtttggcaccaattttggcttcaatctctggcagattggtctgacgttcctcgggcttctgggcggcatggtcgcaggtgcattgacgaacagcttctggggccgtgttcacaagtcacttgtccgacgcaacaatggagtgcatgagccggagttccggctcgcgccatctattgccggcgccttcctcgtcactattgggctattctggttcgcttggacttcattttcttatatacattggatcttgcccattatcggctcgggtatctttggctgtggcacgctgctcgtgttcaccggcatattcacttttctcgttgattgttaccctatgtacgccgcttcggccttggctgccaatagttttttgcgcggttcctttgctgctgctttccctctcttcggacaacagctatataagcggctaggcttccaatgggcatctagcctactggctttcatcaccttggccttactacctctgccatacctatttttcgtagttggaaaacgattgcgaaagcgcagcagattcacagcacaggtgtactag

SEQ ID NO: 29305 - protein, 526 aa, Muscodor strobelii
  misc_feature: SGI Peptide ID NO. 570062
  misc_feature (91)..(475): Pfam Id: PF07690 Pfam Desc: Major Facilitator Superfamily
  misc_feature (13)..(525): NCBI GI: 256732336 Blast Desc: NECHADRAFT_104581 [Nectria haematococca mpVI 77-13-4]
  misc_feature (39)..(521): NCBI GI: 46105196 Blast Desc: FG00226.1 [Gibberella zeae PH-1]
  misc_feature (20)..(522): NCBI GI: 256734039 Blast Desc: NECHADRAFT_36294 [Nectria haematococca mpVI 77-13-4]
  misc_feature (14)..(521): NCBI GI: 154292626 Blast Desc: BC1G_14639 [Botryotinia fuckeliana B05.10] gi|150845853|gb|EDN21046.1| BC1G_14639 [Botryotinia fuckeliana B05.10]
  misc_feature (44)..(521): NCBI GI: 238481955 Blast Desc: bicyclomycin resistance protein, [Aspergillus flavus NRRL3357] gi|220700266|gb|EED56604.1| bicyclomycin resistance protein, [Aspergillus flavus NRRL3357]
  misc_feature (5)..(521): NCBI GI: 119193260 Blast Desc: CIMG_01007 [Coccidioides immitis RS]
  misc_feature (59)..(524): NCBI GI: 40882338 Blast Desc: related to multidrug resistant protein [Neurospora crassa]
  misc_feature (5)..(505): NCBI GI: 240105787 Blast Desc: Major Facilitator Superfamily protein [Coccidioides posadasii C735 delta SOWgp]
  misc_feature (23)..(524): NCBI GI: 255955145 Blast Desc: Pc21g12990 [Penicillium chrysogenum Wisconsin 54-1255] gi|211590036|emb|CAP96196.1| Pc21g12990 [Penicillium chrysogenum Wisconsin 54-1255]
  misc_feature (70)..(521): NCBI GI: 212528870 Blast Desc: MFS multidrug transporter, [Penicillium marneffei ATCC 18224] gi|210073990|gb|EEA28077.1| MFS multidrug transporter, [Penicillium marneffei ATCC 18224]
  misc_feature: Useful for introducing or modulating the production of volatile compounds
MAADRDSTDGGAGSTSSPDVSKMASRSETTLELGIVRSQNGHGCADLPEKYELDQSRPKDDPFEVSFDGDDDPLNPRSMNLVRKWIVVVLVGLGSLCVTCTSSIYTATYDQMNPEFGMSDELATAGLSTFVLGIALGPLFLGPLSEFYGRRPIYLSSWGLFVIWLIPSAVARNAATMITVRFLAGFSGSAFLSVAGGSVSDMFTREHVASPMSIISLSPFIGPSLGPLIGGFINYHVNWRWTYYVLIIWSAALLLALVFLAPETYHPILLRDKARKLRKESGEQRWVAPMEKSTKSIPKTIGLSLLRPFQLLTLEPMCLLLSLLSAVLLGVIYLFFGAFPLVFGTNFGFNLWQIGLTFLGLLGGMVAGALTNSFWGRVHKSLVRRNNGVHEPEFRLAPSIAGAFLVTIGLFWFAWTSFSYIHWILPIIGSGIFGCGTLLVFTGIFTFLVDCYPMYAASALAANSFLRGSFAAAFPLFGQQLYKRLGFQWASSLLAFITLALLPLPYLFFVVGKRLRKRSRFTAQVY

SEQ ID NO: 29306 - DNA, 6386 bp, Muscodor strobelii; identical to SEQ ID NO: 29300
  misc_feature: SGI EST ID NO. CUFF.69605.2
  misc_feature: Variant of the nucleotide sequence at SEQ ID NO 29304

SEQ ID NO: 29307 - DNA, 1083 bp, Muscodor strobelii
  misc_feature: SGI cDNA ID NO. 570063
  misc_feature: Encodes the peptide sequence at SEQ ID NO 29308
atgtggtaccccgagcctggagtcgaaaccgtgctcacgacgctcgttattgtttttttagttctcaacttcatcagtgttgctcttcgatgctatgttcgacttgtgattagcaagtccttcagctatgatgactatgcaatggtagctggttttgccagctacgccgccatgtgcgcgactctgttagcggcaatgatatacggctacggcgcaacttacccacagcccggatacaatctcctcaaagccggacagtcacttatcgccttccaactggtttatgtcgtggctgcgtatgcgtgcaagctcagtgcaggccttgttttactaaggattgccggtaatgaaaaaaagagtcctattcgcatcaccttgctagtatccatcgccgtcattacgatatttgccattgctacattcctcacacttgcactccaatgtcgaccgctttcgcttgcttggggtgtgggtgaaggcacttgtgtcgagggttatgtcataaccaatatcgcttatgcattttcggcttctgatattgctagcggctggctgtacgcgacattgcctatctttttgctgtggcgcgtgcagttgagcatccgtgtgaagctgtccgtcatcattctgttgggactcggattcacaagcagcattgctactctcgtacgcctcaagtatgtggtagatctggagtcgctcggttcaagcgatccaacccagcctctgaaacttttgacctcaatcatttggtctcatctcgaaattgcactggccatcctggctgcatctctcgccgctttgcgccctctgttgaagttcatcaccaatggtcacagttcgtacgcagacaacaaaaagagcgggggatggagtgaagggatttcttctcgcaataagctcggctcatctgctattcgcatggatacgtggaacgaggtccagtccgacagcggtagccaagagtttgttctgcccaagatgggcaccaagaagaccacctaccaaaacggaaataacgacggcatctacaaacacacgacaattgaaatttcgcgtcaggatcgaagcaacgaggtttaa

SEQ ID NO: 29308 - protein, 360 aa, Muscodor strobelii
  misc_feature: SGI Peptide ID NO. 570063
  misc_feature (15)..(272): NCBI GI: 46117316 Blast Desc: FG04500.1 [Gibberella zeae PH-1]
  misc_feature (8)..(322): NCBI GI: 46126829 Blast Desc: FG07792.1 [Gibberella zeae PH-1]
  misc_feature (12)..(281): NCBI GI: 256733374 Blast Desc: [Nectria haematococca mpVI 77-13-4]
  misc_feature (12)..(341): NCBI GI: 256730940 Blast Desc: NECHADRAFT_48436 [Nectria haematococca mpVI 77-13-4]
  misc_feature (10)..(302): NCBI GI: 46139657 Blast Desc: FG11343.1 [Gibberella zeae PH-1]
  misc_feature (20)..(290): NCBI GI: 154295897 Blast Desc: BC1G_13318 [Botryotinia fuckeliana B05.10] gi|150843868|gb|EDN19061.1| BC1G_13318 [Botryotinia fuckeliana B05.10]
  misc_feature (5)..(273): NCBI GI: 46125517 Blast Desc: FG07136.1 [Gibberella zeae PH-1]
  misc_feature (18)..(345): NCBI GI: 85109074 Blast Desc: NCU07649 [Neurospora crassa OR74A] gi|28924355|gb|EAA33496.1| [Neurospora crassa OR74A]
  misc_feature (17)..(328): NCBI GI: 121706204 Blast Desc: conserved [Aspergillus clavatus NRRL 1] gi|119399511|gb|EAW09939.1| conserved [Aspergillus clavatus NRRL 1]
  misc_feature (18)..(349): NCBI GI: 49409616 Blast Desc: polytopic membrane protein [Aspergillus flavus]
MWYPEPGVETVLTTLVIVFLVLNFISVALRCYVRLVISKSFSYDDYAMVAGFASYAAMCATLLAAMIYGYGATYPQPGYNLLKAGQSLIAFQLVYVVAAYACKLSAGLVLLRIAGNEKKSPIRITLLVSIAVITIFAIATFLTLALQCRPLSLAWGVGEGTCVEGYVITNIAYAFSASDIASGWLYATLPIFLLWRVQLSIRVKLSVIILLGLGFTSSIATLVRLKYVVDLESLGSSDPTQPLKLLTSIIWSHLEIALAILAASLAALRPLLKFITNGHSSYADNKKSGGWSEGISSRNKLGSSAIRMDTWNEVQSDSGSQEFVLPKMGTKKTTYQNGNNDGIYKHTTIEISRQDRSNEV

SEQ ID NO: 29309 - DNA, 1814 bp, Muscodor strobelii
  misc_feature: SGI EST ID NO. CUFF.69311.0
  misc_feature: Variant of the nucleotide sequence at SEQ ID NO 29307
catccagaccctggtgcccctttctagagcaacagcagtatgaatggtgacaggtaggtcttcactgcatctagcattcgagtccaggggccccgggttctagatcaggggcctgttcgaagaggaatgacacttacagcctcgaccggttactgacacacggcaccgaaaacaaatgggggttgctaagatcttctctccattacttcttacatagataatgcaagcccacttagtccgttctttgagatcttgaatcttcattcctttcagcaactgtgtagatgtgacgactctttttggtcttgtcccaagattgagccagactcgagctgaccgctacaatcaactccaccagttcttcattcgacgtcaaagcttgcaacaatgtggtaccccgagcctggagtcgaaaccgtgctcacgacgctcgttattgtttttttagttctcaacttcatcagtgttgctcttcgatgctatgttcgacttgtgattagcaagtccttcagctatgatgactatgcaatggtagctggttttgccagctacgccgccatgtgcgcgactctgttagcggcaatgatatacggctacggcgcaacttacccacagcccggatacaatctcctcaaagccggacagtcacttatcgccttccaactggtttatgtcgtggctgcgtatgcgtgcaagctcagtgcaggccttgttttactaaggattgccggtaatgaaaaaaagagtcctattcgcatcaccttgctagtatccatcgccgtcattacgatatttgccattgctacattcctcacacttgcactccaatgtcgaccgctttcgcttgcttggggtgtgggtgaaggcacttgtgtcgagggttatgtcataaccaatatcgcttatgcattttcggcttctgatattgctagcggctggctgtacgcgacattgcctatctttttgctgtggcgcgtgcagttgagcatccgtgtgaagctgtccgtcatcattctgttgggactcggattcacaagcagcattgctactctcgtacgcctcaagtatgtggtagatctggagtcgctcggttcaagcgatccaacccagcctctgaaacttttgacctcaatcatttggtctcatctcgaaattgcactggccatcctggctgcatctctcgccgctttgcgccctctgttgaagttcatcaccaatggtcacagttcgtacgcagacaacaaaaagagcgggggatggagtgaagggatttcttctcgcaataagctcggctcatctgctattcgcatggatacgtggaacgaggtccagtccgacagcggtagccaagagtttgttctgcccaagatgggcaccaagaagaccacctaccaaaacggaaataacgacggcatctacaaacacacgacaattgaaatttcgcgtcaggatcgaagcaacgaggtttaagtaccactgcaggcaaggtgttcaacaaacagtcctttcagcatcgaatcaaatgtgccgttctattcaatcgtttacgctgtatgatcgcaattttgtacagtacatcatgtataagaaaaaaggggcagacccaggatcaggctcaggcaacgataagacctgtgtagacttaatacaatgagaaaaactcataatgatcacaacaagtatcttgctgctgttgctttagtcaccatcctttgagcacaccaccgaagatgtttggccgaatgtctccgtctattgactcacgatgtgacgagctatcaaacatcatgtgcaaataattcgatacatgaatg

SEQ ID NO: 29310 - DNA, 1428 bp, Muscodor strobelii
  misc_feature: SGI cDNA ID NO. 570064
  misc_feature: Encodes the peptide sequence at SEQ ID NO 29311
atggcgacgctgttattcataatattatggtccattatctcatattccatttatgctttatactttcacccgctgcgagaatatccgggtccgaagctagcagccatcactcgaataccatattggatcgcttgttttcggggtaaccaggtgaagcatctaaccaagctccatcggcaatatggaccagtcgtgcgctttgcgccgaacgacttgagttactccgacggtcgcgcatggaaagacatttgcaacgttccgaagggaaagaaagaaaatggaaaggaaatcaagttccacgcaccgccggccatgggacagcccaatttgatcacagagcctagctctgagcgtcatgccactctgcgacgtgtattctcgccagcgttctccgagtcggccctgaaggcccaggagcccatatttcaaaaatacgcagacctgatggtcgtgaggggtcgcgaggctgatcaggtcaacatggcgcagttgctaaactttgcaacctttgacatcatggctgagttcgccttcggcgaatcgttacacttgctagaaaagaaccagtactcggaatgggttgcgactgtgttcgagactctgaaggtcctgccagcactccaaattatccaattctacacaatcttaaataaactatttgagagattcgagccaaaggccgtagcaaagatgcgtctagatcacttcaaccataccgtgagccgggtcgataaacgcctcaaggagggatcggcgcagcaagacctctgggatcttgtggtggactcgaatgttcttacacccgctgagatctatgttaacgctgagttattcatgaccgcgggcacggagactaccgcctcgcttctaacaggtactacttattaccttatctcaaatcccgacaaactagcacttctagtcgatgagataagatctaccttcaaggacgacaaagatattacattagagcggctggcacctctcaaatatctcaacgcatgcttgaaagaaggactccgagtttatccctctatcccatcagccatacctcgagaaattgcaccaggtggcaatgccatcctgggcaaatggcttccggaaggcactcgcgtatcagttcatcaaaccgccacataccgctctcctgcgaacttcaaaaatcctgataagttcgccccggagcgctggttgggagacccggtatacaagaatgataatcgtgacgcccatcaacctttctctgtcgggcccaggaattgcattggaatgaatatggcatggcacgagatgagactgctacttgctaagctgatttggaattttgacatcgactccgatgttggtccagaatgggccgatcagaacgtctatgttatctgggaccgtaaacctctaatgtgtcgtttaaacgagagagccaaatag

SEQ ID NO: 29311 - protein, 475 aa, Muscodor strobelii
  misc_feature: SGI Peptide ID NO. 570064
  misc_feature (29)..(469): Pfam Id: PF00067 Pfam Desc: Cytochrome P450
  misc_feature (117)..(451): Pfam Id: PF00067 Pfam Desc: Cytochrome P450
  misc_feature (12)..(469): NCBI GI: 46114698 Blast Desc: FG03191.1 [Gibberella zeae PH-1]
  misc_feature (17)..(472): NCBI GI: 116208430 Blast Desc: CHGG_03508 [Chaetomium globosum CBS 148.51] gi|88184105|gb|EAQ91573.1| CHGG_03508 [Chaetomium globosum CBS 148.51]
  misc_feature (12)..(471): NCBI GI: 145605329 Blast Desc: MGG_09945 [Magnaporthe grisea 70-15] gi|145013150|gb|EDJ97791.1| MGG_09945 [Magnaporthe grisea 70-15]
  misc_feature (1)..(470): NCBI GI: 169609919 Blast Desc: SNOG_08051 [Phaeosphaeria nodorum SN15] gi|111063207|gb|EAT84327.1| SNOG_08051 [Phaeosphaeria nodorum SN15]
  misc_feature (2)..(470): NCBI GI: 189204680 Blast Desc: cytochrome P450 46A1 [Pyrenophora tritici-repentis Pt-1C-BFP] gi|187985774|gb|EDU51262.1| cytochrome P450 46A1 [Pyrenophora tritici-repentis Pt-1C-BFP]
  misc_feature (8)..(473): NCBI GI: 115391773 Blast Desc: [Aspergillus terreus NIH2624] gi|114194315|gb|EAU36015.1| [Aspergillus terreus NIH2624]
  misc_feature (7)..(474): NCBI GI: 145247518 Blast Desc: An12g09560 [Aspergillus niger] gi|134080747|emb|CAL00861.1| protein product [Aspergillus niger]
  misc_feature (5)..(473): NCBI GI: 39971031 Blast Desc: MGG_02982 [Magnaporthe grisea 70-15] gi|149210571|ref|XP_001522660.1| MGCH7_ch7g760 [Magnaporthe grisea 70-15] gi|86196715|gb|EAQ71353.1| MGCH7_ch7g760 grisea
  misc_feature (7)..(474): NCBI GI: 169783630 Blast Desc: [Aspergillus oryzae RIB40] gi|83775021|dbj|BAE65144.1| protein product [Aspergillus oryzae]
  misc_feature (6)..(475): NCBI GI: 170293003 Blast Desc: Fum2 [Fusarium oxysporum]
  misc_feature (111)..(473): SWISSPROT Homolog: EC 1.14.14.1 Unspecific monooxygenase
MATLLFIILWSIISYSIYALYFHPLREYPGPKLAAITRIPYWIACFRGNQVKHLTKLHRQYGPVVRFAPNDLSYSDGRAWKDICNVPKGKKENGKEIKFHAPPAMGQPNLITEPSSERHATLRRVFSPAFSESALKAQEPIFQKYADLMVVRGREADQVNMAQLLNFATFDIMAEFAFGESLHLLEKNQYSEWVATVFETLKVLPALQIIQFYTILNKLFERFEPKAVAKMRLDHFNHTVSRVDKRLKEGSAQQDLWDLVVDSNVLTPAEIYVNAELFMTAGTETTASLLTGTTYYLISNPDKLALLVDEIRSTFKDDKDITLERLAPLKYLNACLKEGLRVYPSIPSAIPREIAPGGNAILGKWLPEGTRVSVHQTATYRSPANFKNPDKFAPERWLGDPVYKNDNRDAHQPFSVGPRNCIGMNMAWHEMRLLLAKLIWNFDIDSDVGPEWADQNVYVIWDRKPLMCRLNERAK

SEQ ID NO: 29312 - DNA, 3046 bp, Muscodor strobelii
  misc_feature: SGI EST ID NO. CUFF.69475.1
  misc_feature: Variant of the nucleotide sequence at SEQ ID NO 29310
cgcatatcggctcagcatacgagtataattttcacgtggaatttgccattatcgtcgtgccgacgttgctccacacgatcccacggcctaaagccaaagggtctctcctcttatcagtttgttctaggcgatctgtatggcaacgccaatcgtcccgcgaaggcgtggcggagccctataaggcacaggattttcctcatgtgctatgtaataagcagattactggacactatcgactatgtggatgagtagaccctcgatttggacagcactcgaggtagtcgcccttctacgattgcacaaatgtactatcgcggcactctgtcggaatcttgctatttcacggcttgccaattagttgagtctaatgctctcctgcccattacgctatggtgcaacaacgagaatcaatccatgtctaggccgggatcctcatcaagctgaatactaattaagcccaataaataatcactatggctcacaaattatgaggaaaagattttcgtgaggatgttgtgcagtgccagggtatgattgtcgatttcaaacaagggttggcagttgcactgtacggcattgtatcatgtatccctgtcaataactttctcgcttcagtctggctcatttgagaaactcttcatagactggtttcatatggacaaactcggcaaagggtaactgctcaatccccgtcgcaactgctcgagtagcacagaaacacaaccgtagttgtggctcgacttgtatgaacaatccaacatgcatagcagaagctcgatttggagcttcgtagcccatcttggtcaagggctattagatcggaagttttcctgccgagttgtttgaataagtgggcgctagaaatcggactagaattgagttgaacacaaccccccacttagactccaagaacacattcaaagatacatctgctgataaaatatagctcgcggaggaagcgaaaaaagggtacgtaaagatcgatggactttgctctctgatacacgatgaggttcacgtgtgcaagagtcgtaatggattcatccataacctcttaaattcataccctaatgaatgggggcgttgtcttacccaggccctgagcaaattgtggacatggtatcgtggtttggaacatgccatcgaaagggggaaacacgcgacggccaggataaagctagactacttacaatgcaccgattgaggcaatacaccacccacgccaattgctttcgcatcgctagacattggctggttcagcttgccaggcaaggggtcggtcgtccttgattgggtgcgaatggatatcctacctagagagcggagacaacttagctaacattcatgcattacttacagacgccttgcgacttgaggcgcgataaataatacaaacaagcagcacatgactgaccgtggccgaacgcaacttacctcgttaaacaattcaagatagtaagtagttgcttgcaacagatcgcaacatcgctctccttcatcatggcgacgctgttattcataatattatggtccattatctcatattccatttatgctttatactttcacccgctgcgagaatatccgggtccgaagctagcagccatcactcgaataccatattggatcgcttgttttcggggtaaccaggtgaagcatctaaccaagctccatcggcaatatggaccagtcgtgcgctttgcgccgaacgacttgagttactccgacggtcgcgcatggaaagacatttgcaacgttccgaagggaaagaaagaaaatggaaaggaaatcaagttccacgcaccgccggccatgggacagcccaatttgatcacagagcctagctctgagcgtcatgccactctgcgacgtgtattctcgccagcgttctccgagtcggccctgaaggcccaggagcccatatttcaaaaatacgcagacctgatggtcgtgaggggtcgcgaggctgatcaggtcaacatggcgcagttgctaaactttgcaacctttgacatcatggctgagttcgccttcggcgaatcgttacacttgctagaaaagaaccagtactcggaatgggttgcgactgtgttcgagactctgaaggtcctgccagcactccaaattatccaattctacacaatcttaaataaactatttgagagattcgagccaaaggccgtagcaaagatgcgtctagatcacttcaaccataccgtgagccgggtcgataaacgcctcaaggagggatcggcgcagcaagacctctgggatcttgtggtggactcgaatgttcttacacccgctgagatctatgttaacgctgagttattcatgaccgcgggcacggagactaccgcctcgcttctaacaggtactacttattaccttatctcaaatcccgacaaactagcacttctagtcgatgagataagatctaccttcaaggacgacaaagatattacattagagcggctggcacctctcaaatatctcaacgcatgcttgaaagaaggactccgagtttatccctctatcccatcagccatacctcgagaaattgcaccaggtggcaatgccatcctgggcaaatggcttccggaaggcactcgcgtatcagttcatcaaaccgccacataccgctctcctgcgaacttcaaaaatcctgataagttcgccccggagcgctggttgggagacccggtatacaagaatgataatcgtgacgcccatcaacctttctctgtcgggcccaggaattgcattggaatgaatatggcatggcacgagatgagactgctacttgctaagctgatttggaattttgacatcgactccgatgttggtccagaatgggccgatcagaacgtctatgttatctgggaccgtaaacctctaatgtgtcgtttaaacgagagagccaaataggtatagacaattatttaatatggaagcttttatgataatggcccgtatatgtacccggtcggtcctgatgcagcaaccagcatgaacagagaggacacgaaccaatgcccccttattc

SEQ ID NO: 29313 - DNA, 747 bp, Muscodor strobelii
  misc_feature: SGI cDNA ID NO. 570065
  misc_feature: Encodes the peptide sequence at SEQ ID NO 29314
atgcatcttcaaccagtgcaggtagacttgcctgtctcaagtcatgatctgctcccagctccgatcccagctgtcaccaaacctccaaatgatgtcggacggacgcttaaaccattgttagctcatttcacaactgcattgggttacaccggcgccagggtgggcgacgatcttcatggactcttaaaggctatgaacgacgaggcgtgtcggattggaatcccatatcctgagggttctaggtcctggttttccttcgaagtaggagtatattatgcacagctctgctatccaagccacccgctcgagatacgcgtctacaccggcatattcacatggctcgctgtgctcgtggatgacggcgcaagcaagaatcctgaagaatggcagcaattcctacctcgtttctactcgggctgctcacaggccagcctcctagctcagtcatgggctgactatcttcgacttagctatcggtattattctccgatagtagctaattttatcgtcacctctgctttgaatttcgtcaatgcaaatgtgttagaaggcgcagaaatcccaagaatggagcgcacgagtggaggggagagttggccgtattaccttcgcgacaaagatggaatatccgaagcatatgtctggctaacatttcctgacgtgctctatcctgacgtttcctgctatatggaagcgatcccagacatgaacaagtatatatcgttcaccaatgacataatgtcgtga

SEQ ID NO: 29314 - protein, 248 aa, Muscodor strobelii
  misc_feature: SGI Peptide ID NO. 570065
  misc_feature (25)..(248): NCBI GI: 46124133 Blast Desc: FG06444.1 [Gibberella zeae PH-1]
  misc_feature (36)..(248): NCBI GI: 46137763 Blast Desc: FG10397.1 [Gibberella zeae PH-1]
  misc_feature (36)..(248): NCBI GI: 263199514 Blast Desc: longiborneol synthase [Gibberella zeae]
  misc_feature (157)..(248): NCBI GI: 238578540 Blast Desc: MPER_12192 [Moniliophthora perniciosa FA553] gi|215450320|gb|EEB89683.1| MPER_12192 [Moniliophthora perniciosa FA553]
  misc_feature (82)..(248): NCBI GI: 169601396 Blast Desc: SNOG_03562 [Phaeosphaeria nodorum SN15] gi|111067647|gb|EAT88767.1| SNOG_03562 [Phaeosphaeria nodorum SN15]
  misc_feature (102)..(248): NCBI GI: 242216337 Blast Desc: [Postia placenta Mad-698-R] gi|220726921|gb|EED80856.1| [Postia placenta Mad-698-R]
  misc_feature (102)..(248): NCBI GI: 242216687 Blast Desc: [Postia placenta Mad-698-R] gi|220726694|gb|EED80635.1| [Postia placenta Mad-698-R]
  misc_feature (95)..(248): NCBI GI: 238603080 Blast Desc: MPER_04018 [Moniliophthora perniciosa FA553] gi|215467296|gb|EEB96786.1| MPER_04018 [Moniliophthora perniciosa FA553]
  misc_feature (85)..(248): NCBI GI: 169851720 Blast Desc: CC1G_03563 [Coprinopsis cinerea okayama7#130] gi|116506403|gb|EAU89298.1| CC1G_03563 [Coprinopsis cinerea okayama7#130]
  misc_feature (92)..(248): NCBI GI: 255955463 Blast Desc: Pc21g14700 [Penicillium chrysogenum Wisconsin 54-1255] gi|211590195|emb|CAP96367.1| Pc21g14700 [Penicillium chrysogenum Wisconsin 54-1255]
MHLQPVQVDLPVSSHDLLPAPIPAVTKPPNDVGRTLKPLLAHFTTALGYTGARVGDDLHGLLKAMNDEACRIGIPYPEGSRSWFSFEVGVYYAQLCYPSHPLEIRVYTGIFTWLAVLVDDGASKNPEEWQQFLPRFYSGCSQASLLAQSWADYLRLSYRYYSPIVANFIVTSALNFVNANVLEGAEIPRMERTSGGESWPYYLRDKDGISEAYVWLTFPDVLYPDVSCYMEAIPDMNKYISFTNDIMS

SEQ ID NO: 29315 - DNA, 365 bp, Muscodor strobelii
  misc_feature: SGI EST ID NO. CUFF.69298.0
  misc_feature: Variant of the nucleotide sequence at SEQ ID NO 29313
cgacgatcttcatggactcttaaaggctatgaacgacgaggcgtgtcggattggaatcccatatcctgagggttctaggtcctggttttccttcgaagtaggagtatattatgcacagctctgctatccaagccacccgctcgagatacgcgtctacaccggcatattcacatggctcgctgtgctcgtggatgacggcgcaagcaagaatcctgaagaatggcagcaattcctacctcgtttctactcgggctgctcacaggccagcctcctagctcagtcatgggctgactatcttcgacttagctatcggtattattctccgatagtagctaattttatcgtcacctctgctttgaatttcg

SEQ ID NO: 29316 - DNA, 645 bp, Muscodor strobelii
  misc_feature: SGI cDNA ID NO. 570066
  misc_feature: Encodes the peptide sequence at SEQ ID NO 29317
atgaaggtctccaacatacgagcaggaagatccgagaccggtaccatcggcgcattcccgaattggtcggcgaatctgctcttccatctggactatccagtagaggtggacttggtgcgatttccggggtcggggccagcgaagtctatttcactaaaatcatcgatcgcaattcctacagactatggaagtcctcgggcatctacggaaaggagcatactgcaggagaggatcctcggcaccaagaccaagcacgatgcgtgcccgctggccaaggtctatcacctcctgattgatctcttaaaagatgtaatgaagcgatccacggttattttgagaacgcacggcttcagattgacgagcttctgcgcgcgatttgttgttctcgaatcgatcattcttaatcgcgcttactcacaagcgcgattgtctcgatgtgggccatacgtgacagcgggtggtgtgcgcacgtgggatcttgagtacgtggtttgcaaagacatggcattgttcatgggccattgttgttgccagtcggtcctgcaggcaggctcccttgtttgtccgagccacagcacggttgagtccccgaactctgattgcggcaagactccccccgcccttttcaagaagacgtggatgtga

SEQ ID NO: 29317 - protein, 214 aa, Muscodor strobelii
  misc_feature: SGI Peptide ID NO. 570066
MKVSNIRAGRSETGTIGAFPNWSANLLFHLDYPVEVDLVRFPGSGPAKSISLKSSIAIPTDYGSPRASTERSILQERILGTKTKHDACPLAKVYHLLIDLLKDVMKRSTVILRTHGFRLTSFCARFVVLESIILNRAYSQARLSRCGPYVTAGGVRTWDLEYVVCKDMALFMGHCCCQSVLQAGSLVCPSHSTVESPNSDCGKTPPALFKKTWM

SEQ ID NO: 29318 - DNA, 1773 bp, Muscodor strobelii
  misc_feature: SGI cDNA ID NO. 570067
  misc_feature: Encodes the peptide sequence at SEQ ID NO 29319
atgcagacgtacaagcatttggaccggctcctaaagcccctccccctagatacgccgacgacactcgaattgcaacccggccacacgatccaggtcacgcttttggacgccaatcactgtgtgggagccgtgatgttcttgctagagggcaatgaaaacgctgtgctatatactggtgacataagatgtgagcctcgatttgtcactgcgatcactcagaaccccaacatggtggcatactcatcaggctggaagatccttgatcggatatatctcgacacctccgtagtcagtgactatcctctgcagacgaaggccgaagggctcaaggagctccttgagaaggtgcagcgatatccgagtgatacgatattccacttccaagcatggacatacgggtatactaggcccacctatcttcatgacccttttctcacgtcgtccacagatatgaagaagtatggatcgcgctttcaaaggcgctcaattcgcaggcatgtgtccatggctaatccctggctgcttctaactgtctttcagatacatgtcgacagctacaaaatacgagtattcaagtctctgctcacaaagtcaaaggacaatcgatgggccatacagacacatctggctaaagaggcggcggccttagttggctttacgtgcggaaacagttttcatgaaggttgtttgactcttgatgaaagtgtcagaattcatagctgtgagaaaggaatgggatgcaaagtgatggagagtgagaacatcgtctggatccgtccgatcgtgacacatcttcgagatggacaagatgtcatggaagtcggggtaggcggtggcggcgacgacttgacgcaagcaatgacactcacaaccgaagatctaacagaacttcttcaattattggcagcaagcgaagaactacccgttgagcttcagcactgcatggacttgattaagacaaccttggctagcggcagagacatgacaatcatgattgacgaggacaggcccggggatagtgccgaaagtatgactgcacttctgaaacctatggtacgcaaggtggaagcgatgcgtgaccccgccgagacacctgcaaacgacaactccgatagacgactccctagtgtcatcacatttccgtatgcgcgacactcttcccttcctgagcttcgacagtttgttgcagctctcaagcccagagatgttgttccgtgcacgtttgatgttgacaactggattgaaaagggtttgtcaataggaaagctatttggtgattgttgttcaggcgacgatttctcatatgacgtgctcattgaccagagaaaagtcgagactgcagcgtcactggtggaagaacagagtaagggaactgatacgcaacagtcgagaagctccgtcccacgagaatcaagtccgattgaattgtctcatgagaaacaccaagaggccatggaacccgaaatcgccatcatggataccaaccggccaggaagcaacaatgcgtccatcgttgacacgacatcgccaactgactttgatgctccgccactaagtcatcacaaacgtggtttcgcttctttatcggacgatgcgcccgagctacagtatgattcacaagaatctgttttatcagatcgggcgtatgcaacaagactcaaagctttcgacactgtatgcgccaatatcgacggggagcattggcagaccattggacttatctcaacgacggatcatcatacttacaacgaacccgaattaggaatcccgtag

SEQ ID NO: 29319 - protein, 590 aa, Muscodor strobelii
  misc_feature: SGI Peptide ID NO. 570067
  misc_feature (1)..(582): NCBI GI: 261361558 Blast Desc: artemis protein [Verticillium albo-atrum VaMs.102]
  misc_feature (1)..(589): NCBI GI: 171682278 Blast Desc: protein product [Podospora anserina] gi|170941098|emb|CAP66748.1| protein product [Podospora anserina]
  misc_feature (3)..(588): NCBI GI: 85090777 Blast Desc: NCU05966 [Neurospora crassa OR74A] gi|28919953|gb|EAA29344.1| [Neurospora crassa OR74A]
  misc_feature (2)..(473): NCBI GI: 256724960 Blast Desc: NECHADRAFT_13421 [Nectria haematococca mpVI 77-13-4]
  misc_feature (2)..(517): NCBI GI: 46121907 Blast Desc: FG05331.1 [Gibberella zeae PH-1]
  misc_feature (2)..(478): NCBI GI: 156053902 Blast Desc: SS1G_05799 [Sclerotinia sclerotiorum 1980] gi|154703579|gb|EDO03318.1| SS1G_05799 [Sclerotinia sclerotiorum 1980]
  misc_feature (2)..(587): NCBI GI: 212540178 Blast Desc: DNA repair protein, [Penicillium marneffei ATCC 18224] gi|210067543|gb|EEA21635.1| DNA repair protein, [Penicillium marneffei ATCC 18224]
  misc_feature (2)..(587): NCBI GI: 242802706 Blast Desc: DNA repair protein, [Talaromyces stipitatus ATCC 10500] gi|218717370|gb|EED16791.1| DNA repair protein, [Talaromyces stipitatus ATCC 10500]
  misc_feature (4)..(436): NCBI GI: 255940940 Blast Desc: Pc16g09210 [Penicillium chrysogenum Wisconsin 54-1255] gi|211585862|emb|CAP93591.1| Pc16g09210 [Penicillium chrysogenum Wisconsin 54-1255]
  misc_feature (4)..(489): NCBI GI: 70990712 Blast Desc: DNA repair protein [Aspergillus fumigatus Af293] gi|66847837|gb|EAL88167.1| DNA repair protein, [Aspergillus fumigatus Af293]
MQTYKHLDRLLKPLPLDTPTTLELQPGHTIQVTLLDANHCVGAVMFLLEGNENAVLYTGDIRCEPRFVTAITQNPNMVAYSSGWKILDRIYLDTSVVSDYPLQTKAEGLKELLEKVQRYPSDTIFHFQAWTYGYTRPTYLHDPFLTSSTDMKKYGSRFQRRSIRRHVSMANPWLLLTVFQIHVDSYKIRVFKSLLTKSKDNRWAIQTHLAKEAAALVGFTCGNSFHEGCLTLDESVRIHSCEKGMGCKVMESENIVWIRPIVTHLRDGQDVMEVGVGGGGDDLTQAMTLTTEDLTELLQLLAASEELPVELQHCMDLIKTTLASGRDMTIMIDEDRPGDSAESMTALLKPMVRKVEAMRDPAETPANDNSDRRLPSVITFPYARHSSLPELRQFVAALKPRDVVPCTFDVDNWIEKGLSIGKLFGDCCSGDDFSYDVLIDQRKVETAASLVEEQSKGTDTQQSRSSVPRESSPIELSHEKHQEAMEPEIAIMDTNRPGSNNASIVDTTSPTDFDAPPLSHHKRGFASLSDDAPELQYDSQESVLSDRAYATRLKAFDTVCANIDGEHWQTIGLISTTDHHTYNEPELGIP

SEQ ID NO: 29320 - DNA, 2474 bp, Muscodor strobelii
  misc_feature: SGI EST ID NO. CUFF.69449.0
  misc_feature: Variant of the nucleotide sequence at SEQ ID NO 29318
ctggtgacataagatgtgagcctcgatttgtcactgcgatcactcagaaccccaacatggtggcatactcatcaggctggaagatccttgatcggatatatctcgacacctccgtagtcagtgactatcctctgcagacgaaggccgaagggctcaaggagctccttgagaaggtgcagcgatatccgagtgatacgatattccacttccaagcatggacatacggatatgaagaagtatggatcgcgctttcaaaggcgctcaattcgcagatacatgtcgacagctacaaaatacgagtattcaagtctctgctcacaaagtcaaaggacaatcgatgggccatacagacacatctggctaaagaggcggcggccttagttggctttacgtgcggaaacagttttcatgaaggttgtttgactcttgatgaaagtgtcagaattcatagctgtgagaaaggaatgggatgcaaagtgatggagagtgagaacatcgtctggatccgtccgatcgtgacacatcttcgagatggacaagatgtcatggaagtcggggtaggcggtggcggcgacgacttgacgcaagcaatgacactcacaaccgaagatctaacagaacttcttcaattattggcagcaagcgaagaactacccgttgagcttcagcactgcatggacttgattaagacaaccttggctagcggcagagacatgacaatcatgattgacgaggacaggcccggggatagtgccgaaagtatgactgcacttctgaaacctatggtacgcaaggtggaagcgatgcgtgaccccgccgagacacctgcaaacgacaactccgatagacgactccctagtgtcatcacatttccgtatgcgcgacactcttcccttcctgagcttcgacagtttgttgcagctctcaagcccagagatgttgttccgtgcacgtttgatgttgacaactggattgaaaagggtttgtcaataggaaagctatttggtgattgttgttcaggcgacgatttctcatatgacgtgctcattgaccagagaaaagtcgagactgcagcgtcactggtggaagaacagagtaagggaactgatacgcaacagtcgagaagctccgtcccacgagaatcaagtccgattgaattgtctcatgagaaacaccaagaggccatggaacccgaaatcgccatcatggataccaaccggccaggaagcaacaatgcgtccatcgttgacacgacatcgccaactgactttgatgctccgccactaagtcatcacaaacgtggtttcgcttctttatcggacgatgcgcccgagctacagtatgattcacaagaatctgttttatcagatcgggcgtatgcaacaagactcaaagctttcgacactgtatgcgccaatatcgacggggagcattggcagaccattggacttatctcaacgacggatcatcatacttacaacgaacccgaattaggaatcccgtagcatatgcatacgaaatctcagaatattggtcattcaaagatgaaaaatagagaagggcactatttcattgagtgaaggatatctatctatttaagtactgtacaatgagacccgcaagcccatttgtctcgtaagtgagtggatcttctacatggaatattcaaagataccgggtagcttcgacttatcatagcctcctgccactggcggacacgtcctagtcattacacgtcctaggcttcccttaggcttcagctttcctatgtttcgcgaacatttcagtgagacgttgtacgccatcttcagcgtacgtgatatcagccagctgcaggctatcgagaacatgttcgcgagcgcggggacgcatctcttcctcgtacgccacaacagcacgctcgactgccgctgcgtcagcttcctggtcatacgccagagtctgccccttattcttctcgatctcggcaatcaagctctcgtaaagcttaagggcgtcgaacatcgcctcgttcacgccaccaccatttggaattgtaatgtgtgcagcatctcctaggagtgtcacacccgcagtgcggaaccaagactttccctgctgctcgtctgtgaagaggtcggcatccacgcggtaaagaggccaagggcgccacggtccctcggcattcttaatgaaagcctgtaagtccggtgaccagtgcgaaaagagcccgaggagtgcctcccgtgctttctccgtatcaccactcgtcatgtcaaggggaccgccggctttcattatactctcaggttcctggatgcctgcatacatgcgatatgaaccatcgctcacttgttgaattgccaacatccgctttgctccgatgccgcagctaccgccaggaccgaccattttgacagccgcgttgtactgggggttacccttgttaatgcgaccttcgatatatgagtagccagagtagaatggcttgtgcg

SEQ ID NO: 29321 - DNA, 1257 bp, Muscodor strobelii
  misc_feature: SGI cDNA ID NO. 570068
  misc_feature: Encodes the peptide sequence at SEQ ID NO 29322
atgtcctcatcaggacctgcccccattgccgttgtaggagcaggaccctgcgggttaaccttcgcgagactgctcgagaatgcgaagataccctatgttgtgttcgaacgcgacgagtcgcgcacacagatggggccatttcaaggcgggaccctcgatcttcacaagccaaccgggcaagaagcactacgcgtggctggcctcacagatgagttcgagaagctcgcccgtcgcgacgcaatgattatgtcattccaaggctctcaaggtgagggttttgtcaagtttggtactgaaggtgcaagagacgcgccagaaattgatcgcctgcacctgcggcacatgctgctggattccattccgtccgatgtgatccgttgggggaagaagctggtcaacgtcgaaaaggacgaagagaagaaaggtgccaaggcattcacgctgcagttcgctgatgggactaccgagaacgggttccgattgatagttggtgctgatggagcgtggagcaagattagaccattgatcacatcgcacaagccattctactctggctactcatatatcgaaggtcgcattaacaagggtaacccccagtacaacgcggctgtcaaaatggtcggtcctggcggtagctgcggcatcggagcaaagcggatgttggcaattcaacaagtgagcgatggttcatatcgcatgtatgcaggcatccaggaacctgagagtataatgaaagccggcggtccccttgacatgacgagtggtgatacggagaaagcacgggaggcactcctcgggctcttttcgcactggtcaccggacttacaggctttcattaagaatgccgagggaccgtggcgcccttggcctctttaccgcgtggatgccgacctcttcacagacgagcagcagggaaagtcttggttccgcactgcgggtgtgacactcctaggagatgctgcacacattacaattccaaatggtggtggcgtgaacgaggcgatgttcgacgcccttaagctttacgagagcttgattgccgagatcgagaagaataaggggcagactctggcgtatgaccaggaagctgacgcagcggcagtcgagcgtgctgttgtggcgtacgaggaagagatgcgtccccgcgctcgcgaacatgttctcgatagcctgcagctggctgatatcacgtacgctgaagatggcgtacaacgtctcactgaaatgttcgcgaaacataggaaagctgaagcctaa

SEQ ID NO: 29322 - protein, 418 aa, Muscodor strobelii
  misc_feature: SGI Peptide ID NO. 570068
  misc_feature (6)..(371): Pfam Id: PF01494 Pfam Desc: FAD binding domain
  misc_feature (6)..(412): NCBI GI: 145248071 Blast Desc: An13g01450 [Aspergillus niger] gi|134081033|emb|CAK41545.1| protein product [Aspergillus niger]
  misc_feature (9)..(410): NCBI GI: 256730663 Blast Desc: NECHADRAFT_16445 [Nectria haematococca mpVI 77-13-4]
  misc_feature (9)..(410): NCBI GI: 256726710 Blast Desc: NECHADRAFT_90693 [Nectria haematococca mpVI 77-13-4]
  misc_feature (2)..(410): NCBI GI: 46126397 Blast Desc: FG07576.1 [Gibberella zeae PH-1]
  misc_feature (9)..(400): NCBI GI: 171677270 Blast Desc: protein product [Podospora anserina] gi|170936703|emb|CAP61361.1| protein product [Podospora anserina]
  misc_feature (7)..(387): NCBI GI: 242780955 Blast Desc: monoxygenase, [Talaromyces stipitatus ATCC 10500] gi|218719851|gb|EED19270.1| monoxygenase, [Talaromyces stipitatus ATCC 10500]
  misc_feature (9)..(411): NCBI GI: 169772109 Blast Desc: [Aspergillus oryzae RIB40] gi|83768383|dbj|BAE58522.1| protein product [Aspergillus oryzae]
  misc_feature (9)..(408): NCBI GI: 238485280 Blast Desc: monooxygenase, [Aspergillus flavus NRRL3357] gi|220698757|gb|EED55096.1| monooxygenase, [Aspergillus flavus NRRL3357]
  misc_feature (9)..(392): NCBI GI: 170106989 Blast Desc: [Laccaria bicolor S238N-H82] gi|164640267|gb|EDR04533.1| [Laccaria bicolor S238N-H82]
  misc_feature (7)..(387): NCBI GI: 242780960 Blast Desc: monoxygenase, [Talaromyces stipitatus ATCC 10500] gi|218719852|gb|EED19271.1| monoxygenase, [Talaromyces stipitatus ATCC 10500]
  misc_feature (9)..(329): SWISSPROT Homolog: EC 1.14.13.90 Zeaxanthin epoxidase
MSSSGPAPIAVVGAGPCGLTFARLLENAKIPYVVFERDESRTQMGPFQGGTLDLHKPTGQEALRVAGLTDEFEKLARRDAMIMSFQGSQGEGFVKFGTEGARDAPEIDRLHLRHMLLDSIPSDVIRWGKKLVNVEKDEEKKGAKAFTLQFADGTTENGFRLIVGADGAWSKIRPLITSHKPFYSGYSYIEGRINKGNPQYNAAVKMVGPGGSCGIGAKRMLAIQQVSDGSYRMYAGIQEPESIMKAGGPLDMTSGDTEKAREALLGLFSHWSPDLQAFIKNAEGPWRPWPLYRVDADLFTDEQQGKSWFRTAGVTLLGDAAHITIPNGGGVNEAMFDALKLYESLIAEIEKNKGQTLAYDQEADAAAVERAVVAYEEEMRPRAREHVLDSLQLADITYAEDGVQRLTEMFAKHRKAEA

SEQ ID NO: 29323 - DNA, 2669 bp, Muscodor strobelii
  misc_feature: SGI EST ID NO. CUFF.69450.1
  misc_feature: Variant of the nucleotide sequence at SEQ ID NO 29321
ctccaatactagcacaggggcgtagcatagttcgtacgcagacttcaatatgtcgagacaccgagattttcgacacaaggggacggaagacggcatatataaaaggtcggcggtttgctgttgttgcatcacttctggaagatgttcacatcaaacaccatctcacgactcattctcggtataacaaagatctcaacccacacaacttacgatcgagcaatttattgttcttcttttcttctggtttcaacctacaaatttcgaccttactctcgtctcactacaccgaacatcaccatgtcctcatcaggacctgcccccattgccgttgtaggagcaggaccctgcgggttaaccttcgcgagactgctcgagaatgcgaagataccctatgttgtgttcgaacgcgacgagtcgcgcacacagatggggccatttcaaggcgggaccctcgatcttcacaagccaaccgggcaagaagcactacgcgtggctggcctcacagatgagttcgagaagctcgcccgtcgcgacgcaatgattatgtcattccaaggctctcaaggtgagggttttgtcaagtttggtactgaaggtgcaagagacgcgccagaaattgatcgcctgcacctgcggcacatgctgctggattccattccgtccgatgtgatccgttgggggaagaagctggtcaacgtcgaaaaggacgaagagaagaaaggtgccaaggcattcacgctgcagttcgctgatgggactaccgagaacgggttccgattgatagttggtgctgatggagcgtggagcaagattagaccattgatcacatcgcacaagccattctactctggctactcatatatcgaaggtcgcattaacaagggtaacccccagtacaacgcggctgtcaaaatggtcggtcctggcggtagctgcggcatcggagcaaagcggatgttggcaattcaacaagtgagcgatggttcatatcgcatgtatgcaggcatccaggaacctgagagtataatgaaagccggcggtccccttgacatgacgagtggtgatacggagaaagcacgggaggcactcctcgggctcttttcgcactggtcaccggacttacaggctttcattaagaatgccgagggaccgtggcgcccttggcctctttaccgcgtggatgccgacctcttcacagacgagcagcagggaaagtcttggttccgcactgcgggtgtgacactcctaggagatgctgcacacattacaattccaaatggtggtggcgtgaacgaggcgatgttcgacgcccttaagctttacgagagcttgattgccgagatcgagaagaataaggggcagactctggcgtatgaccaggaagctgacgcagcggcagtcgagcgtgctgttgtggcgtacgaggaagagatgcgtccccgcgctcgcgaacatgttctcgatagcctgcagctggctgatatcacgtacgctgaagatggcgtacaacgtctcactgaaatgttcgcgaaacataggaaagctgaagcctaagggaagcctaggacgtgtaatgactaggacgtgtccgccagtggcaggaggctatgataagtcgaagctacccggtatctttgaatattccatgtagaagatccactcacttacgagacaaatgggcttgcgggtctcattgtacagtacttaaatagatagatatccttcactcaatgaaatagtgcccttctctatttttcatctttgaatgaccaatattctgagatttcgtatgcatatgctacgggattcctaattcgggttcgttgtaagtatgatgatccgtcgttgagataagtccaatggtctgccaatgctccccgtcgatattggcgcatacagtgtcgaaagctttgagtcttgttgcatacgcccgatctgataaaacagattcttgtgaatcatactgtagctcgggcgcatcgtccgataaagaagcgaaaccacgtttgtgatgacttagtggcggagcatcaaagtcagttggcgatgtcgtgtcaacgatggacgcattgttgcttcctggccggttggtatccatgatggcgatttcgggttccatggcctcttggtgtttctcatgagacaattcaatcggacttgattctcgtgggacggagcttctcgactgttgcgtatcagttcccttactctgttcttccaccagtgacgctgcagtctcgacttttctctggtcaatgagcacgtcatatgagaaatcgtcgcctgaacaacaatcaccaaatagctttcctattgacaaacccttttcaatccagttgtcaacatcaaacgtgcacggaacaacatctctgggcttgagagctgcaacaaactgtcgaagctcaggaagggaagagtgtcgcgcatacggaaatgtgatgacactagggagtcgtctatcggagttgtcgtttgcaggtgtctcggcggggtcacgcatcgcttccaccttgcgtaccataggtttcagaagtgcagtcatactttcggcactatccccgggcctgtcctcgtcaatcatgattgtcatgtctctgccgctagccaaggttgtcttaatcaagtccatgcagtgctgaagctcaacgggtagttcttcgcttgctgcc

SEQ ID NO: 29324 - DNA, 2019 bp, Muscodor strobelii
  misc_feature: SGI cDNA ID NO. 570069
  misc_feature: Encodes the peptide sequence at SEQ ID NO 29325
atggcggagacggtacccctccctccaaatgagtcgatccaccaagctggcggtggtcaacagggtcttcatgaccgcgtgatacacgatatcaatgcctcaacactgccctatctggagcagatatttgagaagcatgcaagcaaggataaaaggtggcacaaagatgatatcatttcatttctgcatcactgtcaagcggacaaggttaccgagtcctcaggcgatatcgcgaacaaggatgcacttgatttcagcggattcctacaatacatgacctctgcggccgcaaacgctctcgcaccgcctctggaatccgatctttcttatccactatcgagttactatatcagctccagtcataacacgtatctcacgggcaaccagctgaacagtgactcggatgcagacgcttacaaaaatgtcttactgcggggttgccgctgtgtagaggtcgatgtctgggatggcgatgactctgactccgagtcgagttctggctctagtagtgaaggggaggaatctaaggagaagaagagcattaaaaaggctaatcggaaggaccgactgaaatctagactcccgaactcacttgctagtcgcctagagaaaacatccttgggccgcaaactatccatcaagaaaggaaccaacacaaaggagcctacctcgcccgccgcatcaacgactcaagagaaatccgccgatggagtattggccgagaagtctacatcaggtccccagaccgtagccgtggagccaagagtgttgcacggatacacgctcacgaaggaggtctcattccgtaaggtttgccaagccatcaaagatcacgctttcgtagtatcggatttacctgtcatcgtgagccttgaggtgcactgtaaccaccagcaacaagagtcaatggtacagatcatgaacgagacatgggccggctacctgcttgagaagccaggcgctgggtgcaagtttctcccatcccctggcgatatgcgccgcaagatcctcgtcaaagtcaaatacgcaccccccggccagtctgttgccgctgcggataaggccgaaatcaaagacaagctcccaaccgagactgctaagtcggcgccggctcagaaggcaaaaaagccaagcaagatcattcagcctctgtcggcactggggatatacacgaatggtatctcattcaagtcactggaccaacccgaggccacgatgccgacacacatattctccgtctcggagaatggcgtgactgaggtgcacgagaagaatgcgcagctgctgttcgaccacaatcgtcaatacatgatgaggacttatccttcaggaatgcgaattgggtcatcaaatctggatcctccagtattttggcggaaaggtctccaaatcgttgccctcaattggcaaaagtgggacgaaggcatgatgctcaatgagggcatgttcgcaggcaccgggggctatgtcctgaaaccagacggataccgagggaagaaagtcatcaacgtgaccgaagagaacaccaccaaagaaacacccattgttgcaccactcgccacccccgccatcttacaccaaaagctggacctcaaaatcacagtcttcgcagctcaagatctcccactcccagagaaggaagacacagcacggagcttcaaaccttacattaaggtcgaactacacaccgagccaccacacacgctccttaaaggtaaagaagacggacacgcgaaagaaggcgagtacaaagcgcgaagtaggacacagaaaggtatacaccccgacttcaagagcgatgtcctcgcattcgaaggcgtacagggtgttgtgccggagctagcatttgtgcgtttcttgataaaggacgatgagattgggcgcgatgatctgtcggcttgggcttgtatcagacttgatcggttgcgctctggataccggtttgtgcatttgatgaataagcggggtgcggtgagtaatggtgtggtgttggttaagattgagaagactttgacctag

SEQ ID NO: 29325 - protein, 672 aa, Muscodor strobelii
  misc_feature: SGI Peptide ID NO. 570069
  misc_feature (108)..(342): Pfam Id: PF00388 Pfam Desc: Phosphatidylinositol-specific phospholipase C, X domain
  misc_feature (383)..(497): Pfam Id: PF00387 Pfam Desc: Phosphatidylinositol-specific phospholipase C, Y domain
  misc_feature (531)..(636): Pfam Id: PF00168 Pfam Desc: C2 domain
  misc_feature (253)..(342): Pfam Id: PF00388 Pfam Desc: Phosphatidylinositol-specific phospholipase C, X domain
  misc_feature (108)..(159): Pfam Id: PF00388 Pfam Desc: Phosphatidylinositol-specific phospholipase C, X domain
  misc_feature (384)..(497): Pfam Id: PF00387 Pfam Desc: Phosphatidylinositol-specific phospholipase C, Y domain
  misc_feature (6)..(647): NCBI GI: 116192247 Blast Desc: CHGG_05841 [Chaetomium globosum CBS 148.51] gi|88181754|gb|EAQ89222.1| CHGG_05841 [Chaetomium globosum CBS 148.51]
  misc_feature (8)..(671): NCBI GI: 56553604 Blast Desc: phosphatidyl inositol-specific phospholipase C [Cryphonectria parasitica]
  misc_feature (14)..(671): NCBI GI: 171686642 Blast Desc: protein product [Podospora anserina] gi|170943282|emb|CAP68935.1| protein product [Podospora anserina]
  misc_feature (15)..(671): NCBI GI: 46124631 Blast Desc: FG06693.1 [Gibberella zeae PH-1]
  misc_feature (14)..(671): NCBI GI: 71089896 Blast Desc: phospholipase C [Neurospora crassa]
  misc_feature (14)..(671): NCBI GI: 39939816 Blast Desc: MGG_05332 [Magnaporthe grisea 70-15] gi|145010381|gb|EDJ95037.1| MGG_05332 [Magnaporthe grisea 70-15]
  misc_feature (14)..(671): NCBI GI: 71089890 Blast Desc: phospholipase C [Neurospora crassa]
  misc_feature (14)..(671): NCBI GI: 71089888 Blast Desc: phospholipase C [Neurospora crassa]
  misc_feature (14)..(671): NCBI GI: 71089884 Blast Desc: phospholipase C [Neurospora crassa]
  misc_feature (14)..(671): NCBI GI: 71089886 Blast Desc: phospholipase C [Neurospora crassa]
  misc_feature (254)..(656): SWISSPROT Homolog: EC 3.1.4.11 Phosphoinositide phospholipase C
MAETVPLPPNESIHQAGGGQQGLHDRVIHDINASTLPYLEQIFEKHASKDKRWHKDDIISFLHHCQADKVTESSGDIANKDALDFSGFLQYMTSAAANALAPPLESDLSYPLSSYYISSSHNTYLTGNQLNSDSDADAYKNVLLRGCRCVEVDVWDGDDSDSESSSGSSSEGEESKEKKSIKKANRKDRLKSRLPNSLASRLEKTSLGRKLSIKKGTNTKEPTSPAASTTQEKSADGVLAEKSTSGPQTVAVEPRVLHGYTLTKEVSFRKVCQAIKDHAFVVSDLPVIVSLEVHCNHQQQESMVQIMNETWAGYLLEKPGAGCKFLPSPGDMRRKILVKVKYAPPGQSVAAADKAEIKDKLPTETAKSAPAQKAKKPSKIIQPLSALGIYTNGISFKSLDQPEATMPTHIFSVSENGVTEVHEKNAQLLFDHNRQYMMRTYPSGMRIGSSNLDPPVFWRKGLQIVALNWQKWDEGMMLNEGMFAGTGGYVLKPDGYRGKKVINVTEENTTKETPIVAPLATPAILHQKLDLKITVFAAQDLPLPEKEDTARSFKPYIKVELHTEPPHTLLKGKEDGHAKEGEYKARSRTQKGIHPDFKSDVLAFEGVQGVVPELAFVRFLIKDDEIGRDDLSAWACIRLDRLRSGYRFVHLMNKRGAVSNGVVLVKIEKTLT

SEQ ID NO: 29326 - DNA, 4933 bp, Muscodor strobelii
  misc_feature: SGI EST ID NO. CUFF.69521.2
  misc_feature: Variant of the nucleotide sequence at SEQ ID NO 29324
tacgtagcgtattcttatactggtgaagggacaaggaactggcgtaccatgatgctttcttctattcggctgctcattgccaatcatcgccgtcctgtctaccggcgcggctatctttcagctaaaactcggtaacacgacagttaatagccccgattaatgcctgtacacttgggcctctgcttcaataacatgttccagatgaggtattgaattggaccttacagagtgtggcaaggaggtttggagacatcttgtctctgttcttgggcaaagagccgactatgacatgactggggctatgtaactcggagatcacgggcacctatacattcgccgttcgtcatgctagctcggtgcagcattcagagcattatggtaaccatgtagaagtttttgtttcaaccatgacttgtatgatgcgagggtcaaagacgaacagaggatactccgaccagtggcgtagctggaacatgtaatatattccgaagcgagatgtagaaatgagattcttacaccgtcaactatgacgtcatcgagaatactcaagacgccgacgagtctataggagtgtacgctgataactttgttactagtagcagcgccttcattgacatgtggatgggcatcaacgacgtgatcagcacgtacttgtatgacgacaaggcgaatcaggcgctcctagatgcgcttagttatctcgttcggtagatgcatgatactggcgcgagatatttctggttcctaaatgtcccacaactgacacccgacctagactatatatcagttgctagcgaaggagattgtggcattggtggagagcggcaccccggtcaatcaagaccagtacggtagagtgtgctcttaattcagaaaccgcgtgaacagactcaggggccgaatatttgcaagacggcgacgtgggcagacagtatcagtggcggacacgacatattggttccttgtccgttcttcgatgcgactttctcgccatgattgagtggtcagtgtactatgtgcaaatttgacatcttgccagcatcatttccccagatcagaccagcttctgttacaaataatacaaagtcacggctcacattttacagtaagtgcagagtatgtgatttgagttaggtcaactgtatagtcacctattgtgtatgagaggagagtcgaacgcgcacgcctttcgggtaaggatcaaaacacaacgatttgagctaggtctgtaccagatccaactgggacgtcaggttcaacgattcagcggcaattgcatattgctttccgctccgtttcacgtctcatgtggaggatggaaatcgacaacggctctcgcgtactatacacgtagatgtgtacgtgctttcgtcagccaagggcatcttgatataatcgaagatctcgaagccgaacttctgataaagtggcaggcctttcaccgacgcgatcgtaacgcagacaaggtcattctggtccgcaaagccggttgcccattccagcatcaagctcgcggcgccacgccgttgatgggatggcgatgtcgcaagaacatccagcactgtattattagaattgttcagaacatacatgtttccaacagcaggggattagcaatctacaacatacccattcttggacgagctccgacggcccgagcctggatggctttacgttcttcggcgaacttctcgctaaatgagacatcgcggccgtcatccgctctttcaagcaacggcgcgtctatagagcttattcgcacctcttgccatgtttatcagctgtgttctcaagatagtctcgcatacagtcagaaacgtctaccatgccactgagggagaattaggtccgcgggcgtctccacaaatgaccacttggaatagctgacgatttcactagtcaccgtgtcgacgaccttgataaatcggcagcctttgtcggtgtatttttgaggccatcgcgctattgcattggacaacaagccgtcaaatgaaacaccaggaaaaagagtctgattgaaaatgtcgtcatagaatgcgctgacgtgtacatcggctatagacgccccatcctcaaaatgcacgtcgcgaagctcaagcgacattttgtgctaattctgtgatgaaaatcaagagatcagccgaagacgatgttagcttgaaagaggcagcccactgctgcctgtctgctgggcgggggacattaaggatgccattttcggctgggcctccatgtcttcacaataggtaggttatgcgacgttcagaatcaagtatgatacgacctcaactagggatctcaggcttttctacgcctttttattatcgccaagcattacaacagacatcgtgaattggaagctgatgagtgttggttgagctgagagtcaaataaattgacagtggatttgacgaactagcacggaccttgtccaagccaagatcccttagtgaaacacgttggccagctgagcgacgtcacaaacgctgggcagctagatcttggcacattcctggccactgtcattcagacaagttttgttccccatgacaatgccttgaatcattttagactaaatgattttccgagataacgaaatcttttcagatagtttactatttaattctccatatttataagttctcattctcttgcatggaatattagaaacagacaagcagcgttcagcattacctattaccatggcggagacggtacccctccctccaaatgagtcgatccaccaagctggcggtggtcaacagggtcttcatgaccgcgtgatacacgatatcaatgcctcaacactgccctatctggagcagatatttgagaagcatgcaagcaaggataaaaggtggcacaaagatgatatcatttcatttctgcatcactgtcaagcggacaaggttaccgagtcctcaggcgatatcgcgaacaaggatgcacttgatttcagcggattcctacaatacatgacctctgcggccgcaaacgctctcgcaccgcctctggaatccgatctttcttatccactatcgagttactatatcagctccagtcataacacgtatctcacgggcaaccagctgaacagtgactcggatgcagacgcttacaaaaatgtcttactgcggggttgccgctgtgtagaggtcgatgtctgggatggcgatgactctgactccgagtcgagttctggctctagtagtgaaggggaggaatctaaggagaagaagagcattaaaaaggctaatcggaaggaccgactgaaatctagactcccgaactcacttgctagtcgcctagagaaaacatccttgggccgcaaactatccatcaagaaaggaaccaacacaaaggagcctacctcgcccgccgcatcaacgactcaagagaaatccgccgatggagtattggccgagaagtctacatcaggtccccagaccgtagccgtggagccaagagtgttgcacggatacacgctcacgaaggaggtctcattccgtaaggtttgccaagccatcaaagatcacgctttcgtagtatcggatttacctgtcatcgtgagccttgaggtgcactgtaaccaccagcaacaagagtcaatggtacagatcatgaacgagacatgggccggctacctgcttgagaagccaggcgctgggtgcaagtttctcccatcccctggcgatatgcgccgcaagatcctcgtcaaagtcaaatacgcaccccccggccagtctgttgccgctgcggataaggccgaaatcaaagacaagctcccaaccgagactgctaagtcggcgccggctcagaaggcaaaaaagccaagcaagatcattcagcctctgtcggcactggggatatacacgaatggtatctcattcaagtcactggaccaacccgaggccacgatgccgacacacatattctccgtctcggagaatggcgtgactgaggtgcacgagaagaatgcgcagctgctgttcgaccacaatcgtcaatacatgatgaggacttatccttcaggaatgcgaattgggtcatcaaatctggatcctccagtattttggcggaaaggtctccaaatcgttgccctcaattggcaaaagtgggacgaaggcatgatgctcaatgagggcatgttcgcaggcaccgggggctatgtcctgaaaccagacggataccgagggaagaaagtcatcaacgtgaccgaagagaacaccaccaaagaaacacccattgttgcaccactcgccacccccgccatcttacaccaaaagctggacctcaaaatcacagtcttcgcagctcaagatctcccactcccagagaaggaagacacagcacggagcttcaaaccttacattaaggtcgaactacacaccgagccaccacacacgctccttaaaggtaaagaagacggacacgcgaaagaaggcgagtacaaagcgcgaagtaggacacagaaaggtatacaccccgacttcaagagcgatgtcctcgcattcgaaggcgtacagggtgttgtgccggagctagcatttgtgcgtttcttgataaaggacgatgagattgggcgcgatgatctgtcggcttgggcttgtatcagacttgatcggttgcgctctggataccggtttgtgcatttgatgaataagcggggtgcggtgagtaatggtgtggtgttggttaagattgagaagactttgacctagcgactggtaaacctgcgtccacaggcaccctcagagtgggtgcgcgagagagagggagattatggcatatacgcgacatgagcgaatggtcaattagaacgttaatatcatttgcatctgctggacttcaactaggcatcaatgtctaattgagatgactcaaacacaggtgacagtcgaaccaagaaaatcgagaagtcagaagacagcat

SEQ ID NO: 29327 - DNA, 672 bp, Muscodor strobelii
  misc_feature: SGI cDNA ID NO. 570070
  misc_feature: Elevated expression when VOC is produced
  misc_feature: Encodes the peptide sequence at SEQ ID NO 29328
atgtcgcttgagcttcgcgacgtgcattttgaggatggggcgtctatagccgatgtacacgtcagcgcattctatgacgacattttcaatcagactctttttcctggtgtttcatttgacggcttgttgtccaatgcaatagcgcgatggcctcaaaaatacaccgacaaaggctgccgatttatcaaggtcgtcgacacggtgactagtgaaatcgtcagctattccaagtggtcatttgtggagacgcccgcggacctaattctccctcagtggcatgaggtgcgaataagctctatagacgcgccgttgcttgaaagagcggatgacggccgcgatgtctcatttagcgagaagttcgccgaagaacgtaaagccatccaggctcgggccgtcggagctcgtccaagaatggtgctggatgttcttgcgacatcgccatcccatcaacggcgtggcgccgcgagcttgatgctggaatgggcaaccggctttgcggaccagaatgaccttgtctgcgttacgatcgcgtcggtgaaaggcctgccactttatcagaagttcggcttcgagatcttcgattatatcaagatgcccttggctgacgaaagcacgtacacatctacgtgtatagtacgcgagagccgttgtcgatttccatcctccacatga

SEQ ID NO: 29328 - protein, 223 aa, Muscodor strobelii
  misc_feature: SGI Peptide ID NO. 570070
  misc_feature (120)..(191): Pfam Id: PF00583 Pfam Desc: Acetyltransferase (GNAT) family
  misc_feature (127)..(191): Pfam Id: PF00583 Pfam Desc: Acetyltransferase (GNAT) family
  misc_feature (5)..(216): NCBI GI: 189206285 Blast Desc: conserved [Pyrenophora tritici-repentis Pt-1C-BFP] gi|187975570|gb|EDU42196.1| conserved [Pyrenophora tritici-repentis Pt-1C-BFP]
  misc_feature (2)..(209): NCBI GI: 116181338 Blast Desc: CHGG_01297 [Chaetomium globosum CBS 148.51] gi|88185594|gb|EAQ93062.1| CHGG_01297 [Chaetomium globosum CBS 148.51]
  misc_feature (2)..(216): NCBI GI: 238495188 Blast Desc: conserved [Aspergillus flavus NRRL3357] gi|220695480|gb|EED51823.1| conserved [Aspergillus flavus NRRL3357]
  misc_feature (2)..(216): NCBI GI: 169777953 Blast Desc: [Aspergillus oryzae RIB40] gi|83772179|dbj|BAE62309.1| protein product [Aspergillus oryzae]
  misc_feature (2)..(192): NCBI GI: 115443124 Blast Desc: [Aspergillus terreus NIH2624] gi|114188238|gb|EAU29938.1| [Aspergillus terreus NIH2624]
  misc_feature (3)..(202): NCBI GI: 171695550 Blast Desc: protein product [Podospora anserina] gi|170948017|emb|CAP60181.1| protein product [Podospora anserina]
  misc_feature (1)..(194): NCBI GI: 119484944 Blast Desc: acetyltransferase, GNAT family family [Neosartorya fischeri NRRL 181] gi|119410270|gb|EAW20217.1| acetyltransferase, GNAT family family [Neosartorya fischeri NRRL 181]
  misc_feature (12)..(206): NCBI GI: 169780704 Blast Desc: [Aspergillus oryzae RIB40] gi|83773556|dbj|BAE63683.1| protein product [Aspergillus oryzae]
  misc_feature (12)..(206): NCBI GI: 238505100 Blast Desc: conserved [Aspergillus flavus NRRL3357] gi|220689893|gb|EED46243.1| conserved [Aspergillus flavus NRRL3357]
  misc_feature (12)..(198): NCBI GI: 255946505 Blast Desc: Pc20g15480 [Penicillium chrysogenum Wisconsin 54-1255] gi|211588755|emb|CAP86877.1| Pc20g15480 [Penicillium chrysogenum Wisconsin 54-1255]
  misc_feature: Useful for introducing or modulating the production of volatile compounds
MSLELRDVHFEDGASIADVHVSAFYDDIFNQTLFPGVSFDGLLSNAIARWPQKYTDKGCRFIKVVDTVTSEIVSYSKWSFVETPADLILPQWHEVRISSIDAPLLERADDGRDVSFSEKFAEERKAIQARAVGARPRMVLDVLATSPSHQRRGAASLMLEWATGFADQNDLVCVTIASVKGLPLYQKFGFEIFDYIKMPLADESTYTSTCIVRESRCRFPSST

SEQ ID NO: 29329 - DNA, 4781 bp, Muscodor strobelii
  misc_feature: SGI EST ID NO. CUFF.69520.0
  misc_feature: Variant of the nucleotide sequence at SEQ ID NO 29327
atgctgtcttctgacttctcgattttcttggttcgactgtcacctgtgtttgagtcatctcaattagacattgatgcctagttgaagtccagcagatgcaaatgatattaacgttctaattgaccattcgctcatgtcgcgtatatgccataatctccctctctctcgcgcacccactctgagggtgcctgtggacgcaggtttaccagtcgctaggtcaaagtcttctcaatcttaaccaacaccacaccattactcaccgcaccccgcttattcatcaaatgcacaaaccggtatccagagcgcaaccgatcaagtctgatacaagcccaagccgacagatcatcgcgcccaatctcatcgtcctttatcaagaaacgcacaaatgctagctccggcacaacaccctgtacgccttcgaatgcgaggacatcgctcttgaagtcggggtgtatacctttctgtgtcctacttcgcgctttgtactcgccttctttcgcgtgtccgtcttctttacctttaaggagcgtgtgtggtggctcggtgtgtagttcgaccttaatgtaaggtttgaagctccgtgctgtgtcttccttctctgggagtgggagatcttgagctgcgaagactgtgattttgaggtccagcttttggtgtaagatggcgggggtggcgagtggtgcaacaatgggtgtttctttggtggtgttctcttcggtcacgttgatgactttcttccctcggtatccgtctggtttcaggacatagcccccggtgcctgcgaacatgccctcattgagcatcatgccttcgtcccacttttgccaattgagggcaacgatttggagacctttccgccactgtcgcgagtgtcagtacaaaaagggtcgggctcgttaatcgtcgtacggatgacttacaaatactggaggatccagatttgatgacccaattcgcattcctgaaggataagtcctcatcatgtattgacgattgtggtcgaacagcagctgcgcattcttctcgtgcacctcagtcacgccattctccgagacggagaatatgtgtgtcggcatcgtggcctcgggttggtccagtgacttgaatgagataccattcgtgtatatccccagtgccgacagaggctgaatgatcttgcttggcttttttgccttctgagccggcgccgacttagcagtctcggttgggagcttgtctttgatttcggccttatccgcagcggcaacagactggccggggggtgcgtatttgactttgacgaggatcttgcggcgcatatcgccaggggatgggagaaacttgcacccagcgcctggcttctcaagcaggtagccggcccatgtctcgttcatgatctgtaccattgactcttgttgctggtggttacagtgcacctcaaggctcacgatgacaggtaaatccgatactacgaaagcgtgatctttgatggcttggcaaaccttacggaatgagacctccttcgtgagcgtgtatccgtgcaacactcttggctccacggctacggtctggggacctgatgtagacttctcggccaatactccatcggcggatttctcttgagtcgttgatgcggcgggcgaggtaggctcctttgtgttggttcctttcttgatggatagtttgcggcccaaggatgttttctctaggcgactagcaagtgagttcgggagtctagatttcagtcggtccttccgattagcctttttaatgctcttcttctccttagattcctccccttcactactagagccagaactcgactcggagtcagagtcatcgccatcccagacatcgacctctacacagcggcaaccccgcagtaagacattttttggataagaaagatcggattccagaggcggtgcgagagcgtttgcggccgcagaggtcatgtattgtaggaatccgctgaaatcaagtgcatccttgttcgcgatatcgcctgaggactcggtaaccttgtccgcttgacagtgatgcagaaatgaaatgatatcatctttgtgccaccttttatccttgcttgcatgcttctcaaatatctgctccagatagggcagtgttgaggcattgatatcgtgtatcacgcggtcatgaagaccctgttgaccaccgccagcttggtggatcgactcatttggagggaggggtaccgtctccgccatggtaataggtaatgctgaacgctgcttgtctgtttctaatattccatgcaagagaatgagaacttataaatatggagaattaaatagtaaactatctgaaaagatttcgttatctcggaaaatcatttagtctaaaatgattcaaggcattgtcatggggaacaaaacttgtctgaatgacagtggccaggaatgtgccaagatctagctgcccagcgtttgtgacgtcgctcagctggccaacgtgtttcactaagggatcttggcttggacaaggtccgtgctagttcgtcaaatccactgtcaatttatttgactctcagctcaaccaacactcatcagcttccaattcacgatgtctgttgtaatgcttggcgataataaaaaggcgtagaaaagcctgagatccctagttgaggtcgtatcatacttgattctgaacgtcgcataacctacctattgtgaagacatggaggcccagccgaaaatggcatccttaatgtcccccgcccagcagacaggcagcagtgggctgcctctttcaagctaacatcgtcttcggctgatctcttgattttcatcacagaattagcacaaaatgtcgcttgagcttcgcgacgtgcattttgaggatggggcgtctatagccgatgtacacgtcagcgcattctatgacgacattttcaatcagactctttttcctggtgtttcatttgacggcttgttgtccaatgcaatagcgcgatggcctcaaaaatacaccgacaaaggctgccgatttatcaaggtcgtcgacacggtgactagtgaaatcgtcagctattccaagtggtcatttgtggagacgcccgcggacctaattctccctcagtggcatgaggtgcgaataagctctatagacgcgccgttgcttgaaagagcggatgacggccgcgatgtctcatttagcgagaagttcgccgaagaacgtaaagccatccaggctcgggccgtcggagctcgtccaagaatggtgctggatgttcttgcgacatcgccatcccatcaacggcgtggcgccgcgagcttgatgctggaatgggcaaccggctttgcggaccagaatgaccttgtctgcgttacgatcgcgtcggtgaaaggcctgccactttatcagaagttcggcttcgagatcttcgattatatcaagatgcccttggctgacgaaagcacgtacacatctacgtgtatagtacgcgagagccgttgtcgatttccatcctccacatgagacgtgaaacggagcggaaagcaatatgcaattgccgctgaatcgttgaacctgacgtcccagttggatctggtacagacctagctcaaatcgttgtgttttgatccttacccgaaaggcgtgcgcgttcgactctcctctcatacacaataggtgactatacagttgacctaactcaaatcacatactctgcacttactgtaaaatgtgagccgtgactttgtattatttgtaacagaagctggtctgatctggggaaatgatgctggcaagatgtcaaatttgcacatagtacactgaccactcaatcatggcgagaaagtcgcatcgaagaacggacaaggaaccaatatgtcgtgtccgccactgatactgtctgcccacgtcgccgtcttgcaaatattcggcccctgagtctgttcacgcggtttctgaattaagagcacactctaccgtactggtcttgattgaccggggtgccgctctccaccaatgccacaatctccttcgctagcaactgatatatagtctaggtcgggtgtcagttgtgggacatttaggaaccagaaatatctcgcgccagtatcatgcatctaccgaacgagataactaagcgcatctaggagcgcctgattcgccttgtcgtcatacaagtacgtgctgatcacgtcgttgatgcccatccacatgtcaatgaaggcgctgctactagtaacaaagttatcagcgtacactcctatagactcgtcggcgtcttgagtattctcgatgacgtcatagttgacggtgtaagaatctcatttctacatctcgcttcggaatatattacatgttccagctacgccactggtcggagtatcctctgttcgtctttgaccctcgcatcatacaagtcatggttgaaacaaaaacttctacatggttaccataatgctctgaatgctgcaccgagctagcatgacgaacggcgaatgtataggtgcccgtgatctccgagttacatagccccagtcatgtcatagtcggctctttgcccaagaacagagacaagatgtctccaaacctccttgccacactctgtaaggtccaattcaatacctcatctggaacatgttattgaagcagaggcccaagtgtacaggcattaatcggggctattaactgtcgtgttaccgagttttagctgaaagatagccgcgccggtagacaggacggcgatgattggcaatgagcagccgaatagaagaaagcatcatggtacgccagttccttgtcccttcaccagtataagaatacgctacgta

SEQ ID NO: 29330 - DNA, 660 bp, Muscodor strobelii
  misc_feature: SGI cDNA ID NO. 570071
  misc_feature: Encodes the peptide sequence at SEQ ID NO 29331
atggtattgaaagtcttgaaagtccttgctctcgtctctctaggatggagaacaacatattgttattctccttaccaagtgggccctctatatctacaagtctcaagtcccgcgaatagctcattctcaggatacatcaaggcttgtttcacgggcgtcccaggtacagcaggcctatgctatgtcgagggcagcttgccgacagacgacggcggacagggatcaccaaactacttcttttacaacactaccacaagcggcattctcacatccggcgagatctcttcgctgtatcctgctccttacgttccgtttcctggcattggtccattcgtcatgtccttgtccgcggccgctgctgggtctaatgtcgcaagcctcaatgtagccggtggcagcacgtacaggcttgtcgttgggtttgatcaagctcatgtgatgtatagaatcggtgccgatgactcgcaatacgcaacgggcgcgccatccaacggcacgtctcctccaagtttagacatcgcgtattacgactggctgatttgttggatgtatattcaaaaggtctatgcgccttttctagtttggctggaaggtcatgaaagggttccaacgaaccccacttgcgtcagcgttcatgtttcgatgatcgaagtgcagtga

SEQ ID NO: 29331 - protein, 219 aa, Muscodor strobelii
  misc_feature: SGI Peptide ID NO. 570071
MVLKVLKVLALVSLGWRTTYCYSPYQVGPLYLQVSSPANSSFSGYIKACFTGVPGTAGLCYVEGSLPTDDGGQGSPNYFFYNTTTSGILTSGEISSLYPAPYVPFPGIGPFVMSLSAAAAGSNVASLNVAGGSTYRLVVGFDQAHVMYRIGADDSQYATGAPSNGTSPPSLDIAYYDWLICWMYIQKVYAPFLVWLEGHERVPTNPTCVSVHVSMIEVQ

SEQ ID NO: 29332 - DNA, 618 bp, Muscodor strobelii
  misc_feature: SGI cDNA ID NO. 570072
  misc_feature: Encodes the peptide sequence at SEQ ID NO 29333
atgattgttgttaagaaataccatctcccctcaacccctctcgtccccaattcgccatggcctttactacactatcccagagtgttccgagacggtaatgaagctttaactgcactagctcatgacaagttctcggaaaacggttgggaaatccaatggatatttcggtatggtccaacacagccatcacactaccattcaagggcccatgaatgtatggcagtattgtcaggcaacgcgaccatccggtttggggtcgctgacaccgaagaagaagacgggggtcttgagatcgaagctaatgtaggagacgtgtttgtcataccggccggggtggcccacaagactttcaatgcgagtccggtggacaagttcaaacttttgactcctgggagcggtcatggtgttgctgcagacgatactcgggccgcgctggtgaatatcaaactctctggatttacgatgctcggcgcataccctaagggctgcttagaatgggactttgtcgagtatgagagggacttggagaaacataaggcatcatggaatattgaaaaaccgcattgcgatcccgtagtaggaaatggggcggagggactctgtgcactctggaactaa

SEQ ID NO: 29333 - protein, 205 aa, Muscodor strobelii
  misc_feature: SGI Peptide ID NO. 570072
  misc_feature (53)..(131): Pfam Id: PF07883 Pfam Desc: Cupin domain
  misc_feature (64)..(118): Pfam Id: PF00190 Pfam Desc: Cupin
  misc_feature (1)..(204): NCBI GI: 256734981 Blast Desc: NECHADRAFT_75785 [Nectria haematococca mpVI 77-13-4]
  misc_feature (1)..(205): NCBI GI: 256722046 Blast Desc: NECHADRAFT_51151 [Nectria haematococca mpVI 77-13-4]
  misc_feature (1)..(205): NCBI GI: 255955843 Blast Desc: Pc21g16710 [Penicillium chrysogenum Wisconsin 54-1255] gi|211590385|emb|CAP96568.1| Pc21g16710 [Penicillium chrysogenum Wisconsin 54-1255]
  misc_feature (5)..(204): NCBI GI: 256725436 Blast Desc: NECHADRAFT_45870 [Nectria haematococca mpVI 77-13-4]
  misc_feature (1)..(204): NCBI GI: 169781100 Blast Desc: [Aspergillus oryzae RIB40] gi|83773755|dbj|BAE63880.1| protein product [Aspergillus oryzae]
  misc_feature (1)..(204): NCBI GI: 238500898 Blast Desc: conserved [Aspergillus flavus NRRL3357] gi|220691920|gb|EED48267.1| conserved [Aspergillus flavus NRRL3357]
  misc_feature (1)..(204): NCBI GI: 46109896 Blast Desc: FG01830.1 [Gibberella zeae PH-1]
  misc_feature (7)..(195): NCBI GI: 256723670 Blast Desc: NECHADRAFT_97328 [Nectria haematococca mpVI 77-13-4]
  misc_feature (7)..(204): NCBI GI: 46139509 Blast Desc: FG11269.1 [Gibberella zeae PH-1]
  misc_feature (2)..(205): NCBI GI: 169613448 Blast Desc: SNOG_09855 [Phaeosphaeria nodorum SN15] gi|111062000|gb|EAT83120.1| SNOG_09855 [Phaeosphaeria nodorum SN15]
MIVVKKYHLPSTPLVPNSPWPLLHYPRVFRDGNEALTALAHDKFSENGWEIQWIFRYGPTQPSHYHSRAHECMAVLSGNATIRFGVADTEEEDGGLEIEANVGDVFVIPAGVAHKTFNASPVDKFKLLTPGSGHGVAADDTRAALVNIKLSGFTMLGAYPKGCLEWDFVEYERDLEKHKASWNIEKPHCDPVVGNGAEGLCALWN

SEQ ID NO: 29334 - DNA, 204 bp, Muscodor strobelii
  misc_feature: SGI cDNA ID NO. 570073
  misc_feature: Encodes the peptide sequence at SEQ ID NO 29335
atggatatccggatcaacagtggcgctgcaggcccgattacttctgcttcgctcttcttgaagacagcagtatcggctgccaagttattgctcttcgtgctccctgatttccacgaccgcgactgcgcacacatcaacattatcctcatcaactacgcaaagtgctacgacgtcaacgtcgacgacgatagccgtagctcctaa

SEQ ID NO: 29335 - protein, 67 aa, Muscodor strobelii
  misc_feature: SGI Peptide ID NO. 570073
MDIRINSGAAGPITSASLFLKTAVSAAKLLLFVLPDFHDRDCAHINIILINYAKCYDVNVDDDSRSS

SEQ ID NO: 29336 - DNA, 927 bp, Muscodor strobelii
  misc_feature: SGI cDNA ID NO. 570074
  misc_feature: Encodes the peptide sequence at SEQ ID NO 29337
atgactacgcctcgtgtatggcttattaccggtgcttctgctggcattggtcttgaactgggcaagattgccgcaagtcgtggagatcatgtcatcgcagctagtcgctcaccacagaagcttgctggtatcgaaggcataactgctgcacatcttgatcataaccaggctttggaagatgtaaaggcggacatgcagaaaatcatcgacatctatgggaccgtcgacattgtggtgaataatgccgcctacgttcagacaggtaccgtcgaggaaaccaccccagaagagacacagagacaattccaagcggtgaatttgtacaatagcaatacgttcggacccatcaacgtgtaccgcgcaatcttaccgcacttacgatcaaagggcgccggtagccttattaccatcgggacaatggctgcatggcacacaatgaacgcttgcaacctatacagcgcgtccaaagcagcactccggtggttggttattggcctggctgatgaagtgagaggcttcggtatcaagcattgcctggttgagccgggtttcttccggactgatctcctcaagccgggcagcaatatcggccagacaacaactaagactcgcgtcaccgactacgcacaaaccaacaaggatgccgacgaggccattgccaattttcatggctcacagcttggtgaccctctcaaaggtgctcagatcatggcattaagtaatctgaactatcagatatcaaaaaccagctctttgtatgatgttatcacatcttctggcgtcgctgcaggacgagaacttcccagtctcttgccccttggcagtgacgcaaataagcagctcacggaagcagctcagttggtcattgaccaggtcggagagtgggctgaggttgcggcgatgagcgattatcctgaggggaaatga

SEQ ID NO: 29337 - protein, 308 aa, Muscodor strobelii
  misc_feature: SGI Peptide ID NO. 570074
  misc_feature (5)..(171): Pfam Id: PF00106 Pfam Desc: short chain dehydrogenase
  misc_feature (5)..(104): Pfam Id: PF00106 Pfam Desc: short chain dehydrogenase
  misc_feature (1)..(308): NCBI GI: 242816941 Blast Desc: estradiol 17 beta-dehydrogenase, [Talaromyces stipitatus ATCC 10500] gi|218713316|gb|EED12740.1| estradiol 17 beta-dehydrogenase, [Talaromyces stipitatus ATCC 10500]
  misc_feature (5)..(308): NCBI GI: 171677262 Blast Desc: protein product [Podospora anserina] gi|170936699|emb|CAP61357.1| protein product [Podospora anserina]
  misc_feature (4)..(308): NCBI GI: 238840999 Blast Desc: 3-oxoacyl-[acyl-carrier-protein] reductase [Microsporum canis CBS 113480]
  misc_feature (5)..(303): NCBI GI: 119474277 Blast Desc: short-chain oxidoreductase, [Neosartorya fischeri NRRL 181] gi|119407167|gb|EAW17117.1| short-chain oxidoreductase, [Neosartorya fischeri NRRL 181]
  misc_feature (4)..(306): NCBI GI: 119183427 Blast Desc: CIMG_06649 [Coccidioides immitis RS]
  misc_feature (6)..(303): NCBI GI: 115389138 Blast Desc: conserved [Aspergillus terreus NIH2624] gi|114194470|gb|EAU36170.1| conserved [Aspergillus terreus NIH2624]
  misc_feature (4)..(303): NCBI GI: 67904782 Blast Desc: AN9378.2 [Aspergillus nidulans FGSC A4] gi|40747289|gb|EAA66445.1| AN9378.2 [Aspergillus nidulans FGSC A4] gi|259488220|tpe|CBF87502.1| TPA: conserved [Aspergillus FGSC
  misc_feature (4)..(300): NCBI GI: 240109601 Blast Desc: oxidoreductase,short chain dehydrogenase, [Coccidioides posadasii C735 delta SOWgp]
  misc_feature (1)..(306): NCBI GI: 284086832 Blast Desc: [Naegleria gruberi]
  misc_feature (1)..(304): NCBI GI: 169868626 Blast Desc: CC1G_03113 [Coprinopsis cinerea okayama7#130] gi|116498042|gb|EAU80937.1| CC1G_03113 [Coprinopsis cinerea okayama7#130]
  misc_feature (5)..(205): SWISSPROT Homolog: EC 1.1.1.100 3-oxoacyl-[acyl-carrier-protein] reductase
MTTPRVWLITGASAGIGLELGKIAASRGDHVIAASRSPQKLAGIEGITAAHLDHNQALEDVKADMQKIIDIYGTVDIVVNNAAYVQTGTVEETTPEETQRQFQAVNLYNSNTFGPINVYRAILPHLRSKGAGSLITIGTMAAWHTMNACNLYSASKAALRWLVIGLADEVRGFGIKHCLVEPGFFRTDLLKPGSNIGQTTTKTRVTDYAQTNKDADEAIANFHGSQLGDPLKGAQIMALSNLNYQISKTSSLYDVITSSGVAAGRELPSLLPLGSDANKQLTEAAQLVIDQVGEWAEVAAMSDYPEGK

SEQ ID NO: 29338 - DNA, 966 bp, Muscodor strobelii
  misc_feature: SGI cDNA ID NO. 570075
  misc_feature: Encodes the peptide sequence at SEQ ID NO 29339
atgattgaccaaagtagttttgcagcgcgccgccctgctgcaccgacagttttgtaccgggatagcacatggcaagaaccacttgagcgcccgaagatctggattccggattctacatcctatgagatgctgtttcctacggaggtgacgtggtacttcgaaaatatcgaagacttcacggctgcgccgtacgtcacagatgtccctatagtggacttcatggggttcaatgacaggagatccaaggcactaatcttcgaaggattctacatttacggaattcagttgaaaagatgtgatctccagtatatggaaaacgaacgatggtcaataatgagattcgttgacaatctcatcaagatggaaactgacaatgctgagaacattcacactcgtattttcgagcgcaagaagcatttcaagcatgcagggctgatgtggctgccgtttttagacggcacgggcatcactgcaaaaattgggtatacacctccagaaccgttcgagccccttcctgtttacacatgcctgctaccaagccctccgccatactgcgaagtcgaactcaaccatacggcaatcgatatggtcaagagggacatctgcatatggtctgacgagcctccatcgtatgagacagctatcaaggctattctacctacgacgaataaggaggaagaggtgagtcttactatcgcgcctactgtccctacgactctcgtcaaggagattcctagtatctctatcgacgctgccggtgaagataacactgaagctcaagatgaagtcgaagataatggctccgtcgaaccacaaattgtgcttgaagctgttgcccccatggtcgaagaaaatgaagttgaggttatgccggaggccgaacacatagccaaaacttggtcgatgggcttttctaggccccaaagatggcttgaatgtgtgcggtccctcttttcatgctggtaa

SEQ ID NO: 29339 - protein, 321 aa, Muscodor strobelii
  misc_feature: SGI Peptide ID NO. 570075
MIDQSSFAARRPAAPTVLYRDSTWQEPLERPKIWIPDSTSYEMLFPTEVTWYFENIEDFTAAPYVTDVPIVDFMGFNDRRSKALIFEGFYIYGIQLKRCDLQYMENERWSIMRFVDNLIKMETDNAENIHTRIFERKKHFKHAGLMWLPFLDGTGITAKIGYTPPEPFEPLPVYTCLLPSPPPYCEVELNHTAIDMVKRDICIWSDEPPSYETAIKAILPTTNKEEEVSLTIAPTVPTTLVKEIPSISIDAAGEDNTEAQDEVEDNGSVEPQIVLEAVAPMVEENEVEVMPEAEHIAKTWSMGFSRPQRWLECVRSLFSCW

SEQ ID NO: 29340 - DNA, 274 bp, Muscodor strobelii
  misc_feature: SGI EST ID NO. CUFF.69370.0
  misc_feature: Variant of the nucleotide sequence at SEQ ID NO 29338
gcgaagtcgaactcaaccatacggcaatcgatatggtcaagagggacatctgcatatggtctgacgagcctccatcgtatgagacagctatcaaggctattctacctacgacgaataaggaggaagaggtgagtcttactatcgcgcctactgtccctacgactctcgtcaaggagattcctagtatctctatcgacgctgccggtgaagataacactgaagctcaagatgaagtcgaagataatggctccgtcgaaccacaaattgtgcttga

SEQ ID NO: 29341 - DNA, 1797 bp, Muscodor strobelii
  misc_feature: SGI cDNA ID NO. 570076
  misc_feature: Encodes the peptide sequence at SEQ ID NO 29342
atgatggcgcgacagcactcgcctttcgttatttttgcactatgggtgttaggcgctgttgccagggtcgttggccctatagatcctgcgcctgttgacttgaccagtgagaatagtctggtgcaaaaccaatgggagggtcttacatccatcctcgacgctcatttcaacggtactcagtcgaataagacactgtccacgctggatgcccaaacattttctattggtctcttctctttacacgatccggacgccgctaggtgtttgcaataccatcacactggccccgacgtcaaaaattcgactcttggagtacggcacgcggatggcaatagcatctaccgcgtagccagtatgaccaaaatcttcaccgtctacgccgggctgcttcttcttgacatgagcgactggcacaggtcaattgcagagatctttccagagattgatatcctgcctcgggacgaccctgtacaccatgtccagtgggataccatcacaccatttgccctcgcatctcaaatatccggcctcgctcgtgatgcgagaccctttgatgccggcgagctgtacaactccctagttgcagggcccgatcctagcgaccccgcggatctaggtctcccccaattgacggcaagcagcaccggcctagccgtagcctgcgaatcttattactgttcgggagaggactacatcaaaagcttccagtggccttctcaccctgttttccaaaccacgggttatgccgattccaactttatcttgctgggccgggttatctcgaagattacaggcctcgatgcgaatgaggactggtttcagaaagctttaattggaccattagacctgcaaaatacttcctcaattactccaacagagaagccgtattccgggtacgtggtgacgggagatgtagaggatggcttcgcagtacaaggtggcatcacaagctcatccggtgggatattttccacgactaatgacgtggcacgcgtggggcttagcatacttaatcacacgctgctccctccggacatcactcgacggtggatgaaacctaatagcttcacggctagccgcaacttcgcgcatggtttggggtgggagatctaccgctttgaagatcctgtaacggggcatatcaccgatctgtacactaaactcggaggatctggttcatatttcagttatctggttgttgtacccgactacgattttggcttctctgtactcatgggcgcccccgacgtcaccaagggagaagccgcgagcgccttggttgcggatctcgtctctaactctatactaccggcactccgagcacaggcagcggctgaaacagcacgcaactatgcgggcacatacactgcaagcggaggcagtgccggaaaacgggctacgagcactctcacgcttgcctacaatgacacggcagggcctggatacgggctaacacttacttcgctctccaacgacggcgtcgacgtcatgaaaattctttatggcgtatttgtacgcgctgggatcgacgaaaaacagcttctgctagccccttccgaggtggtgtccgacaatgggctacagcgcggcttcgttgtaaaccccgttcatatcgatatcccgagcacgggcgtcttttctgatatggcggaaaacgactacgactggcttgcaaacaacggcgtcacgtggggcgggcgagcattaggcaccatcgtcttcgacctaactgttgatgggagcgtcgaggccgctgaagtgggattcttgcgcaagaagttccaaaagacaggctag

SEQ ID NO: 29342 - protein, 598 aa, Muscodor strobelii
  misc_feature: SGI Peptide ID NO. 570076
  misc_feature (77)..(432): Pfam Id: PF00144 Pfam Desc: Beta-lactamase
  misc_feature (106)..(432): Pfam Id: PF00144 Pfam Desc: Beta-lactamase
  misc_feature (19)..(587): NCBI GI: 121708785 Blast Desc: beta-lactamase family protein [Aspergillus clavatus NRRL 1] gi|119400395|gb|EAW10821.1| beta-lactamase family protein [Aspergillus clavatus NRRL 1]
  misc_feature (4)..(507): NCBI GI: 115433338 Blast Desc: ATEG_08185 [Aspergillus terreus NIH2624] gi|114189658|gb|EAU31358.1| ATEG_08185 [Aspergillus terreus NIH2624]
  misc_feature (19)..(587): NCBI GI: 119499782 Blast Desc: beta-lactamase family protein [Neosartorya fischeri NRRL 181] gi|119414813|gb|EAW24751.1| beta-lactamase family protein [Neosartorya fischeri NRRL 181]
  misc_feature (2)..(596): NCBI GI: 169780908 Blast Desc: [Aspergillus oryzae RIB40] gi|83773658|dbj|BAE63785.1| protein product [Aspergillus oryzae]
  misc_feature (2)..(596): NCBI GI: 238504882 Blast Desc: alkaline D-peptidase, [Aspergillus flavus NRRL3357] gi|220689784|gb|EED46134.1| alkaline D-peptidase, [Aspergillus flavus NRRL3357]
  misc_feature (20)..(596): NCBI GI: 256727758 Blast Desc: NECHADRAFT_91384 [Nectria haematococca mpVI 77-13-4]
  misc_feature (17)..(587): NCBI GI: 169765968 Blast Desc: [Aspergillus oryzae RIB40] gi|83765310|dbj|BAE55453.1| protein product [Aspergillus oryzae]
  misc_feature (23)..(596): NCBI GI: 240110103 Blast Desc: penicillin-binding protein, [Coccidioides posadasii C735 delta SOWgp]
  misc_feature (23)..(495): NCBI GI: 256723738 Blast Desc: NECHADRAFT_52100 [Nectria haematococca mpVI 77-13-4]
  misc_feature (1)..(598): NCBI GI: 145604308 Blast Desc: MGG_08486 [Magnaporthe grisea 70-15] gi|145012325|gb|EDJ96981.1| MGG_08486 [Magnaporthe grisea 70-15]
MMARQHSPFVIFALWVLGAVARVVGPIDPAPVDLTSENSLVQNQWEGLTSILDAHFNGTQSNKTLSTLDAQTFSIGLFSLHDPDAARCLQYHHTGPDVKNSTLGVRHADGNSIYRVASMTKIFTVYAGLLLLDMSDWHRSIAEIFPEIDILPRDDPVHHVQWDTITPFALASQISGLARDARPFDAGELYNSLVAGPDPSDPADLGLPQLTASSTGLAVACESYYCSGEDYIKSFQWPSHPVFQTTGYADSNFILLGRVISKITGLDANEDWFQKALIGPLDLQNTSSITPTEKPYSGYVVTGDVEDGFAVQGGITSSSGGIFSTTNDVARVGLSILNHTLLPPDITRRWMKPNSFTASRNFAHGLGWEIYRFEDPVTGHITDLYTKLGGSGSYFSYLVVVPDYDFGFSVLMGAPDVTKGEAASALVADLVSNSILPALRAQAAAETARNYAGTYTASGGSAGKRATSTLTLAYNDTAGPGYGLTLTSLSNDGVDVMKILYGVFVRAGIDEKQLLLAPSEVVSDNGLQRGFVVNPVHIDIPSTGVFSDMAENDYDWLANNGVTWGGRALGTIVFDLTVDGSVEAAEVGFLRKKFQKTG

SEQ ID NO: 29343 - DNA, 432 bp, Muscodor strobelii
  misc_feature: SGI cDNA ID NO. 570077
  misc_feature: Encodes the peptide sequence at SEQ ID NO 29344
atgaagcaattgatcttcgcaatcgtcgccgctttgttagctgcagcctttgcaacgcctctcgaggacgccaatatccctcatctaattgctacgcgcgacgtggctttcaacgtatccaaccacgccacattggctgagctcgagaaacgtcaagacacctactgctggtacaccggcttcagcaaccacggctgccagggcactatgggcgacgttattggctacgatgagcggtgtatctacgctcgtggcagcacgtctttctacatcagcacagcatgtccatctatgtatgttgggctctacgagcacaagaagtgcgagcatggccatgacacatatcttactgctgcacccgggtcgtgccacgatgtcaatactgggtacgcgtggctcagtacctcttggactgctcaacttgctggttga

SEQ ID NO: 29344 - protein, 143 aa, Muscodor strobelii
  misc_feature: SGI Peptide ID NO. 570077
MKQLIFAIVAALLAAAFATPLEDANIPHLIATRDVAFNVSNHATLAELEKRQDTYCWYTGFSNHGCQGTMGDVIGYDERCIYARGSTSFYISTACPSMYVGLYEHKKCEHGHDTYLTAAPGSCHDVNTGYAWLSTSWTAQLAG

SEQ ID NO: 29345 - DNA, 264 bp, Muscodor strobelii
  misc_feature: SGI EST ID NO. CUFF.69391.0
  misc_feature: Variant of the nucleotide sequence at SEQ ID NO 29343
gcaaaatcacatataagaagggttgagatctgataaaacgaaagaggaacacccaaagcatatcacgtctctcaactctccatcagccaactcaacaagcaactcgcctatcatgaagcaattgatcttcgcaatcgtcgccgctttgttagctgcagcctttgcaacgcctctcgaggacgccaatatccctcatctaattgctacgcgcgacgtggctttcaacgtatccaaccacgccacattggctgagctcgagaaacg

SEQ ID NO: 29346 - DNA, 1869 bp, Muscodor strobelii
  misc_feature: SGI cDNA ID NO. 570078
  misc_feature: Encodes the peptide sequence at SEQ ID NO 29347
atgtcgcgacgaagcagctcagatcccgcgtccgcggttgagagctccttagagctctataacttgatatgcaaattgaagcccttgaccacggatatccatcaatcaggcgaaaagattcaagtcatcgagaaagagaagaatgagaatgagggcatcgacattgaaggctgggaacggatcgcgcattgtggacccggtgaggattgtcaatcagaagtgtcggaatcaatgcaagaccgcatagtccgcgtctccgaagatttaacagaactccagaagtactacagcattgaaggttcaccaacacgctacaataagctagtcgagttcttctcctcagaactcgagggactccattccgtcggcttcgcgtcatacaatcaacaagagaaagttgattacctcctcctaaagaacttcttgatccgatcacaacggaatctcgaactggaacttgtccgagagaaggagtatgcaccattcttcgagccctttgccggtccgattgcggagtggtgcgagatacggcagcgacagcaacaggacgagatcattgacccgcagactttcgcacaaagtctatccgcattacgcgatactgtagcaacttgctctgaacacgtcacagaaaatggtgcgaagtactcgcaagcaaccggaagtcgagcggctcgacgcatcggcgagctgcgagagcacctgaaagagactttcaagttctacgaaggctatgtgccttcattccattactgggttaatagcccctggtcaaaccttaacattgcacttaaagacctcgaaactcgcgttcgagatgtcataatccggagtgctgacgacaaaacgatcgtgggcgagccaatcggccgcgatggattaatcgcagagctagaagctgagatgataccctacacaccggaagaactgctcaaaattgccggaaaagagtacgcctggtgcgaaaaggaaatgaaagccgcagcatcctcgctgaattactcatcctggcgcgacgcgctagagcatgtcaagaatcaatacgaaccaccccgaacacacgtaacctatgtccgaagtctcgtcgaagaaggctcctcatacgtcaaagaacataatctcgtcactgtacctgcacttgcagaagagacaataagaataacccgtatcccgcccgaaaaacaactggtctcgcctttcttcctcggcggcacaagactacaaattgcgtatccgcgagaagatatgaagcacgaagataagatgatgacgctccgcggcaataatcggtcattcagtcgcgccacagcattccacgaaatggtaccaggacaccgtcttcaaatgtacatcggtgcccgttcgcgcccttatcgcgccgcattgttcagtacaccattttacgtcgaaggttgggcactgtactgggagatgatcttctggaaccggggtgacttcttcgtcacaccagaggatagggtcgggacgttgttctggcgcatgcatagatgtgcacggattaccttctcgctgagttttcatttaggcaagatgagtgcacaagagtgtgttgagctacttgtcaacagagtaggccatgagaggtccactgctgagggcgaggtgaggaggagtctgaacgggagttatggcccgctttatcaggctgggtatatgcttggcgcgttgcagctgatgaaattaagggaagaggtactgggacagggaaagatgggcgaaaaggagtttcatgataaggttcttaaggcgaatgttatgcctattgagatgttgagggctctgctgttgaataaggaattaaatgaggaattcgagtcctcttggaggttctatgcggacaaggactaa

SEQ ID NO: 29347 - protein, 622 aa, Muscodor strobelii
  misc_feature: SGI Peptide ID NO. 570078
  misc_feature (95)..(607): Pfam Id: PF05960 Pfam Desc: Bacterial protein of function (DUF885)
  misc_feature (64)..(619): NCBI GI: 240107379 Blast Desc: X-Pro dipeptidyl-peptidase, [Coccidioides posadasii C735 delta SOWgp]
  misc_feature (61)..(619): NCBI GI: 119190961 Blast Desc: CIMG_05528 [Coccidioides immitis RS]
  misc_feature (77)..(618): NCBI GI: 256732353 Blast Desc: [Nectria haematococca mpVI 77-13-4]
  misc_feature (72)..(619): NCBI GI: 256729030 Blast Desc: NECHADRAFT_39842 [Nectria haematococca mpVI 77-13-4]
  misc_feature (77)..(592): NCBI GI: 46105140 Blast Desc: FG00198.1 [Gibberella zeae PH-1]
  misc_feature (88)..(617): NCBI GI: 126646474 Blast Desc: X-Pro dipeptidyl-peptidase [Algoriphagus sp. PR1] gi|126578106|gb|EAZ82326.1| X-Pro dipeptidyl-peptidase [Algoriphagus sp. PR1]
  misc_feature (88)..(618): NCBI GI: 256424545 Blast Desc: protein of function DUF885 [Chitinophaga pinensis DSM 2588] gi|256039453|gb|ACU62997.1| protein of function DUF885 [Chitinophaga pinensis DSM 2588]
  misc_feature (75)..(617): NCBI GI: 83814606 Blast Desc: X-Pro dipeptidyl-peptidase [Salinibacter ruber DSM 13855] gi|83756000|gb|ABC44113.1| X-Pro dipeptidyl-peptidase [Salinibacter ruber DSM 13855]
  misc_feature (73)..(620): NCBI GI: 225872907 Blast Desc: ACP_1270 [Acidobacterium capsulatum ATCC 51196] gi|225791228|gb|ACO31318.1| conserved [Acidobacterium capsulatum ATCC 51196]
  misc_feature (82)..(618): NCBI GI: 255035232 Blast Desc: protein of function DUF885 [Dyadobacter fermentans DSM 18053] gi|254947988|gb|ACT92688.1| protein of function DUF885 [Dyadobacter fermentans DSM 18053]
MSRRSSSDPASAVESSLELYNLICKLKPLTTDIHQSGEKIQVIEKEKNENEGIDIEGWERIAHCGPGEDCQSEVSESMQDRIVRVSEDLTELQKYYSIEGSPTRYNKLVEFFSSELEGLHSVGFASYNQQEKVDYLLLKNFLIRSQRNLELELVREKEYAPFFEPFAGPIAEWCEIRQRQQQDEIIDPQTFAQSLSALRDTVATCSEHVTENGAKYSQATGSRAARRIGELREHLKETFKFYEGYVPSFHYWVNSPWSNLNIALKDLETRVRDVIIRSADDKTIVGEPIGRDGLIAELEAEMIPYTPEELLKIAGKEYAWCEKEMKAAASSLNYSSWRDALEHVKNQYEPPRTHVTYVRSLVEEGSSYVKEHNLVTVPALAEETIRITRIPPEKQLVSPFFLGGTRLQIAYPREDMKHEDKMMTLRGNNRSFSRATAFHEMVPGHRLQMYIGARSRPYRAALFSTPFYVEGWALYWEMIFWNRGDFFVTPEDRVGTLFWRMHRCARITFSLSFHLGKMSAQECVELLVNRVGHERSTAEGEVRRSLNGSYGPLYQAGYMLGALQLMKLREEVLGQGKMGEKEFHDKVLKANVMPIEMLRALLLNKELNEEFESSWRFYADKD

SEQ ID NO: 29348 - DNA, 2567 bp, Muscodor strobelii
  misc_feature: SGI EST ID NO. CUFF.69394.0
  misc_feature: Variant of the nucleotide sequence at SEQ ID NO 29346
cgcaacagtgcctaggctctttaagcgcgagatttagaggcataattgtcctcgcaacacaacagttctggtcacagggtatctaacgatcttcggcgttatcgtgttggagaacaacggaataattacgtatcgggggagatcccgaactccatgccccatttccccacccctgccacagcaaattctggtcagccgtcatcacactagtcctccaccagcatcaacataggacatcagaagaagacaacatactgaacatagagctggttatcccctcaagctaatttcaaccggtcttcaacccttgatcacgactaatgtggcttgtgagggcaagaaatcctcgatctcatgctcacggtcagaggccaatcaatggagattacgtcttctctccgcattaagctcctagaactcgaacgctattcggaagagcctaaagaagacgttaacaaaattgctatctccgagacagtccaagtacggctccgaagagagcgcaaagctgttaattggttaatcatagcatctcggaaaatcacgcggtgcggcctttgcggagatgtcgcgacgaagcagctcagatcccgcgtccgcggttgagagctccttagagctctataacttgatatgcaaattgaagcccttgaccacggatatccatcaatcaggcgaaaagattcaagtcatcgagaaagagaagaatgagaatgagggcatcgacattgaaggctgggaacggatcgcgcattgtggacccggtgaggattgtcaatcagaagtgtcggaatcaatgcaagaccgcatagtccgcgtctccgaagatttaacagaactccagaagtactacagcattgaaggttcaccaacacgctacaataagctagtcgagttcttctcctcagaactcgagggactccattccgtcggcttcgcgtcatacaatcaacaagagaaagttgattacctcctcctaaagaacttcttgatccgatcacaacggaatctcgaactggaacttgtccgagagaaggagtatgcaccattcttcgagccctttgccggtccgattgcggagtggtgcgagatacggcagcgacagcaacaggacgagatcattgacccgcagactttcgcacaaagtctatccgcattacgcgatactgtagcaacttgctctgaacacgtcacagaaaatggtgcgaagtactcgcaagcaaccggaagtcgagcggctcgacgcatcggcgagctgcgagagcacctgaaagagactttcaagttctacgaaggctatgtgccttcattccattactgggttaatagcccctggtcaaaccttaacattgcacttaaagacctcgaaactcgcgttcgagatgtcataatccggagtgctgacgacaaaacgatcgtgggcgagccaatcggccgcgatggattaatcgcagagctagaagctgagatgataccctacacaccggaagaactgctcaaaattgccggaaaagagtacgcctggtgcgaaaaggaaatgaaagccgcagcatcctcgctgaattactcatcctggcgcgacgcgctagagcatgtcaagaatcaatacgaaccaccccgaacacacgtaacctatgtccgaagtctcgtcgaagaaggctcctcatacgtcaaagaacataatctcgtcactgtacctgcacttgcagaagagacaataagaataacccgtatcccgcccgaaaaacaactggtctcgcctttcttcctcggcggcacaagactacaaattgcgtatccgcgagaagatatgaagcacgaagataagatgatgacgctccgcggcaataatcggtcattcagtcgcgccacagcattccacgaaatggtaccaggacaccgtcttcaaatgtacatcggtgcccgttcgcgcccttatcgcgccgcattgttcagtacaccattttacgtcgaaggttgggcactgtactgggagatgatcttctggaaccggggtgacttcttcgtcacaccagaggatagggtcgggacgttgttctggcgcatgcatagatgtgcacggattaccttctcgctgagttttcatttaggcaagatgagtgcacaagagtgtgttgagctacttgtcaacagagtaggccatgagaggtccactgctgagggcgaggtgaggaggagtctgaacgggagttatggcccgctttatcaggctgggtatatgcttggcgcgttgcagctgatgaaattaagggaagaggtactgggacagggaaagatgggcgaaaaggagtttcatgataaggttcttaaggcgaatgttatgcctattgagatgttgagggctctgctgttgaataaggaattaaatgaggaattcgagtcctcttggaggttctatgcggacaaggactaacactaaactgaaaaaggacatcgttctcaaggcgcaaggctcttcactttgtaatcgtaaagagaggctgggactttcctgcttgactacatagatactgtgtaagactatatacatcaaagccagaaatgtg

SEQ ID NO: 29349 - DNA, 2823 bp, Muscodor strobelii
  misc_feature: SGI cDNA ID NO. 570079
  misc_feature: Encodes the peptide sequence at SEQ ID NO 29350
atgagcgccgaagcaacgcctaacgcacatggaggacaacgtcttgatgatcaggggacattatcgactcgtggtaccggtacaatgcggcaagggcgcagcctgtccttcaatgtatcacacactacaactctatttgacgcagtaaaaagaggagatctggaaaaagcgaggtctgtactaggcggcctagccactgagaaatacaggaacagctgcgtcacggcgcaagacgacagtcaatatcaaacaccactccataaagccgcagtagatgcaagacgtgcccaagcgcctgaaatcgtgagccttcttatggagaatgctcttgatcaggaggcgtaccttcatacacaggacgaactcggtagaactgcccttcacctcgcgtgtctgtgtcccatgggccgtcccagtgaaggcacagaagagtcacagagaatccttgaggtcattgcgaaacttctagacgcggctgagaacaaagatcaatatctcaacgcaaaagactacgaaggcagaactgcccttcaccttgcgtattgcgagccgtaccagataacacgtcagattgttgagcaactattaagtgtggctcagaacaaggatcaattcgttaatgcgcaagacaatcgtggaaccactgcccttcatcaagcttgtgctgctgagttggaagaaacccaaaagcaccagatcataacacaactcttggacgcagctgcaaacaaagatcaatacatgagcacacaagattcaagtggttgtactgtcctttggcatccagttgcgatcggtgatcctagccttgttgagtggcttgttgagcaggttggtgatacgaaagatacttttatcaccacagggatgcacggtgacggttccgccttgcatgttgcagtggataacacatcattagaggtcatgagagcccttctcgtccacactaagaatgtcaaatattgcattaattatcaagacgaaaagggcaggacctctcttcatctagcggtagagaaacgtttctggcatggtgtacttttcctattaaaatatggcgccaacccagaaattcaagattccaaagataatacagtatgggatcttgcaagtatcccaggtgaagagcgctgggaggccatatctgcgctgatagaacacaatacgttcagtcaaaatgcgctctcggagaggtacaataaagtgaagcttgatacaccaggggactacgacatcaaattcatcgaagtcgaggccggtatccttcgacagattcggcgagaactttatggaaatccagaggcgctcccgagttttcaaactagagaatcctcatgtgtttccgcagccctcgatacttccggacagataaaggctaatctgaggttcatttcgctggtgatgccattcttctctgttggaccttggtcgactattgaacaacaacagattgataatcagggtgaaaatgttgcgggctgtgttcctgaaagaactcgcggggagggacaaagattccgtgaagtctatacgcctgtaaccctggacgagtattgcaatccagccttgcctcaaacaatactcacaaagcgcaacaaggatcaagttctcgggcgctacgagcggtatacactttccaatacgctgggcatgtggcatcaggttgataacgaaaagctgcgggacgctcacccgccaccagaaaggcttatcctggtagagcaagcatatatctggcaaattggcgaccagctcattacacctcctccttcgatggaatcggagttaaccaatgtatcttgggatgagctccgtgattaccagccaaacgggtttattgccctgttcctcgacaaactcgtggaaaaaatagatgcatctacacatagagagcaagggtcgatccttagaatatatgaaaacgccctagttgctatctcggagcaagtgaacgagtatacaaagaatgcgcaggttgaggacatcgatttagatcaagaaaaagctctgtaccacgagatcaatgatcttagagaggaactatcaatggtcaaatcagtactcgctgaacaacgggaagtgtggaatggatatatgaacgtggttcaatccaaccaacatcgtggtggggaaccgcaacaaaccaaagatggggaaaattactacagagataagtttcttgaacgattaaaacgccaggaaggcagcgaaagtgagattatggacgcgcaaaatagaagaacaagggcaaaactcgacaaatatagtcggcgaatcgagaaacttgaagcagatgcggagagagttgaacacaacatctcaaccaaactagaactcaagcaaaagcacgctactatcaaagaagcccactctacagctatcctaagcgcgacagtttttggtttcactatcatcactgtcatctttgcccctttatcgttcgttgttgcgctttttgcgctaccaatcgatatgtttaaggaagggaagtccaggcaagacgatgttttcgtttccagttatataggcaaatgggccgctactaccgagattgtttcaattgctgtaactttggtagcaatgtgggctgcgctgcgcttcgcggaccttcatgtctggggaaagaaaggtctgcgcgaatccatccggcaaaaggcaaagagcgtgcgagagaaagaacaagacgacacaaagaacatgcattcttctcgtgatggaaatcttggatccgaccttgagcaaggaacaggtcagacgctcgctattttgaagacgaataacgccgtctatgcggggatcatcaaggtcaccttctctagatag

SEQ ID NO: 29350 - protein, 940 aa, Muscodor strobelii
  misc_feature: SGI Peptide ID NO. 570079
  misc_feature (329)..(361): Pfam Id: PF00023 Pfam Desc: Ankyrin repeat
  misc_feature (514)..(916): NCBI GI: 169613761 Blast Desc: SNOG_10013 [Phaeosphaeria nodorum SN15] gi|111061228|gb|EAT82348.1| SNOG_10013 [Phaeosphaeria nodorum SN15]
  misc_feature (487)..(875): NCBI GI: 169617431 Blast Desc: SNOG_11894 [Phaeosphaeria nodorum SN15] gi|111059818|gb|EAT80938.1| SNOG_11894 [Phaeosphaeria nodorum SN15]
  misc_feature (84)..(381): NCBI GI: 123503806 Blast Desc: ankyrin repeat protein [Trichomonas vaginalis G3] gi|121911551|gb|EAY16383.1| ankyrin repeat protein, [Trichomonas vaginalis G3]
  misc_feature (528)..(823): NCBI GI: 169615727 Blast Desc: SNOG_11027 [Phaeosphaeria nodorum SN15] gi|160703031|gb|EAT81526.2| SNOG_11027 [Phaeosphaeria nodorum SN15]
  misc_feature (662)..(861): NCBI GI: 169612041 Blast Desc: SNOG_09135 [Phaeosphaeria nodorum SN15] gi|160702424|gb|EAT83327.2| SNOG_09135 [Phaeosphaeria nodorum SN15]
  misc_feature (84)..(387): NCBI GI: 123397491 Blast Desc: ankyrin repeat protein [Trichomonas vaginalis G3] gi|121882233|gb|EAX88168.1| ankyrin repeat protein, [Trichomonas vaginalis G3]
  misc_feature (662)..(894): NCBI GI: 255941688 Blast Desc: Pc16g13140 [Penicillium chrysogenum Wisconsin 54-1255] gi|211586236|emb|CAP93984.1| Pc16g13140 [Penicillium chrysogenum Wisconsin 54-1255]
  misc_feature (514)..(896): NCBI GI: 70996130 Blast Desc: ankyrin repeat protein [Aspergillus fumigatus Af293] gi|66850455|gb|EAL90782.1| ankyrin repeat protein [Aspergillus fumigatus Af293] gi|159131573|gb|EDP56686.1| ankyrin repeat
  misc_feature (637)..(896): NCBI GI: 119495022 Blast Desc: ankyrin repeat protein [Neosartorya fischeri NRRL 181] gi|119412469|gb|EAW22410.1| ankyrin repeat protein [Neosartorya fischeri NRRL 181]
  misc_feature (89)..(377): NCBI GI: 123397491 Blast Desc: ankyrin repeat protein [Trichomonas vaginalis G3] gi|121882233|gb|EAX88168.1| ankyrin repeat protein, [Trichomonas vaginalis G3]
MSAEATPNAHGGQRLDDQGTLSTRGTGTMRQGRSLSFNVSHTTTLFDAVKRGDLEKARSVLGGLATEKYRNSCVTAQDDSQYQTPLHKAAVDARRAQAPEIVSLLMENALDQEAYLHTQDELGRTALHLACLCPMGRPSEGTEESQRILEVIAKLLDAAENKDQYLNAKDYEGRTALHLAYCEPYQITRQIVEQLLSVAQNKDQFVNAQDNRGTTALHQACAAELEETQKHQIITQLLDAAANKDQYMSTQDSSGCTVLWHPVAIGDPSLVEWLVEQVGDTKDTFITTGMHGDGSALHVAVDNTSLEVMRALLVHTKNVKYCINYQDEKGRTSLHLAVEKRFWHGVLFLLKYGANPEIQDSKDNTVWDLASIPGEERWEAISALIEHNTFSQNALSERYNKVKLDTPGDYDIKFIEVEAGILRQIRRELYGNPEALPSFQTRESSCVSAALDTSGQIKANLRFISLVMPFFSVGPWSTIEQQQIDNQGENVAGCVPERTRGEGQRFREVYTPVTLDEYCNPALPQTILTKRNKDQVLGRYERYTLSNTLGMWHQVDNEKLRDAHPPPERLILVEQAYIWQIGDQLITPPPSMESELTNVSWDELRDYQPNGFIALFLDKLVEKIDASTHREQGSILRIYENALVAISEQVNEYTKNAQVEDIDLDQEKALYHEINDLREELSMVKSVLAEQREVWNGYMNVVQSNQHRGGEPQQTKDGENYYRDKFLERLKRQEGSESEIMDAQNRRTRAKLDKYSRRIEKLEADAERVEHNISTKLELKQKHATIKEAHSTAILSATVFGFTIITVIFAPLSFVVALFALPIDMFKEGKSRQDDVFVSSYIGKWAATTEIVSIAVTLVAMWAALRFADLHVWGKKGLRESIRQKAKSVREKEQDDTKNMHSSRDGNLGSDLEQGTGQTLAILKTNNAVYAGIIKVTFSR

SEQ ID NO: 29351 - DNA, 1359 bp, Muscodor strobelii
  misc_feature: SGI cDNA ID NO. 570080
  misc_feature: Encodes the peptide sequence at SEQ ID NO 29352
atgtcgtccctcgtcaagctccaaccccggatcatcatccacggcggagcaggaaacatcaagcgcgaaaacatgagcgtagagcaatacaaagaatacagtcaagctctgataggcatcgtcctaaaaacacaaacctacatgacaacacccaagtcctcatcctcaaaaccctcttctttttcaacgtcatacgcctaccccacagccctagaaatcgcagtccacgccgtaacccaattagaagaccatgcgctcttcaactccgggcacggcgcggtatttacccgagatggatacaacgagctggaagcctctgtcatggtgtcacggggatatgccaagcgaggcgtaggcgttacgggactgcgccatatcaagaaccccatcctcctcgcgaaagcaatgctagagcacggagaacatgatctgggcggtgactatgtacccccacctcctatgtcaagtacagagaatgagggtccggaattgaatgtgggactagatgtaccttcagcacaaggccatactctcatccacggtgccgcggctgaacagttagctgggtcctacggtctagagaccgttgatccatcgtattttttcacgcagcggcgatgggatgagcatctccgcggtctcgaaaaagagaaatctggaaagggcgtggccagttggtgtcctgaaagttatttcccacagggcacttgtggcgctgttgctttggatgaaaacggagtcgtgtgcgcggcgactagtacgggtgggatcacgaacaaactctctgggcgtattggtgatacacctgtagtcggtgctggtttctgggcggaagactggacagagaaaggggaactgagtggggcgcgggattctttgagtgtctcggatgcagttgtacagctcacgaattcgctgaggggctggtttgcggattgcttgcccactccatcgctgtatcgtcccgttacaccgctaagcgagcggcggaaagaagtgttcgtgactcggtcggctgctgtgtcgggaactggtaatggtgattctttcatgcgcctagctgcggcgaggtcggtgggagccatggcgcagtgggcgggtgtctccacagcgtcggccgtggaagcgatcgcaggccggggtggccagctgcagaggagcgctggatatcgttggggcaaagccggagagggcgagggcggcatgattggtgtcgagtgtgtcatcgcgaaaaatgggattggagaagtgctgtacacagagtcgcagattgtgcacgatcataattgcgctggtatgtttcgagcttggatcgatgatgaagggctgccggcgatgcagatatggcatgatgattga

SEQ ID NO: 29352 - protein, 452 aa, Muscodor strobelii
  misc_feature: SGI Peptide ID NO. 570080
  misc_feature (7)..(451): Pfam Id: PF01112 Pfam Desc: Asparaginase
  misc_feature (235)..(279): Pfam Id: PF01112 Pfam Desc: Asparaginase
  misc_feature (70)..(142): Pfam Id: PF01112 Pfam Desc: Asparaginase
  misc_feature (3)..(449): NCBI GI: 256727760 Blast Desc: NECHADRAFT_32296 [Nectria haematococca mpVI 77-13-4]
  misc_feature (7)..(452): NCBI GI: 39944436 Blast Desc: MGG_04229 [Magnaporthe grisea 70-15] gi|145014976|gb|EDJ99544.1| MGG_04229 [Magnaporthe grisea 70-15]
  misc_feature (5)..(452): NCBI GI: 85095906 Blast Desc: NCU05624 [Neurospora crassa OR74A] gi|28921647|gb|EAA30932.1| conserved [Neurospora crassa OR74A]
  misc_feature (6)..(446): NCBI GI: 46124077 Blast Desc: FG06416.1 [Gibberella zeae PH-1]
  misc_feature (3)..(452): NCBI GI: 171682642 Blast Desc: protein product [Podospora anserina] gi|170941280|emb|CAP66930.1| protein product [Podospora anserina]
  misc_feature (6)..(452): NCBI GI: 116202889 Blast Desc: CHGG_09329 [Chaetomium globosum CBS 148.51] gi|88177847|gb|EAQ85315.1| CHGG_09329 [Chaetomium globosum CBS 148.51]
  misc_feature (6)..(449): NCBI GI: 156059955 Blast Desc: SS1G_02114 [Sclerotinia sclerotiorum 1980] gi|154699524|gb|EDN99262.1| SS1G_02114 [Sclerotinia sclerotiorum 1980]
  misc_feature (7)..(449): NCBI GI: 154290687 Blast Desc: BC1G_15602 [Botryotinia fuckeliana B05.10] gi|150847454|gb|EDN22647.1| BC1G_15602 [Botryotinia fuckeliana B05.10]
  misc_feature (7)..(452): NCBI GI: 189201579 Blast Desc: L-asparaginase precursor [Pyrenophora tritici-repentis Pt-1C-BFP] gi|187984225|gb|EDU49713.1| L-asparaginase precursor [Pyrenophora tritici-repentis Pt-1C-BFP]
  misc_feature (7)..(452): NCBI GI: 169619850 Blast Desc: SNOG_13123 [Phaeosphaeria nodorum SN15] gi|111058330|gb|EAT79450.1| SNOG_13123 [Phaeosphaeria nodorum SN15]
  misc_feature (11)..(281): SWISSPROT Homolog: EC 3.4.19.5 Beta-aspartyl-peptidase
MSSLVKLQPRIIIHGGAGNIKRENMSVEQYKEYSQALIGIVLKTQTYMTTPKSSSSKPSSFSTSYAYPTALEIAVHAVTQLEDHALFNSGHGAVFTRDGYNELEASVMVSRGYAKRGVGVTGLRHIKNPILLAKAMLEHGEHDLGGDYVPPPPMSSTENEGPELNVGLDVPSAQGHTLIHGAAAEQLAGSYGLETVDPSYFFTQRRWDEHLRGLEKEKSGKGVASWCPESYFPQGTCGAVALDENGVVCAATSTGGITNKLSGRIGDTPVVGAGFWAEDWTEKGELSGARDSLSVSDAVVQLTNSLRGWFADCLPTPSLYRPVTPLSERRKEVFVTRSAAVSGTGNGDSFMRLAAARSVGAMAQWAGVSTASAVEAIAGRGGQLQRSAGYRWGKAGEGEGGMIGVECVIAKNGIGEVLYTESQIVHDHNCAGMFRAWIDDEGLPAMQIWHDD

SEQ ID NO: 29353 - DNA, 459 bp, Muscodor strobelii
  misc_feature: SGI cDNA ID NO. 570081
  misc_feature: Reduced expression when VOC is produced
  misc_feature: Encodes the peptide sequence at SEQ ID NO 29354
atggatcacacacgcgacccgtgtccctatgtcatcctcaatgactttggcggtgctttcgctatgggtgccatcggtggcacgatatggcacggcatcaaagggttcaggaacagccccctcggcgagagaaggataggcgccatcacagccatcaaggccagagcgcccgtactgggcggcaacttcggcgtctggggaggtctgttttccacattcgactgcgccgtcaagggcatccgcaagaaggaggacccctggaacgccatcaccgctggtttcttcaccggtggtgccctggcgattcgaggtggctacaaggccgcgagaaacggtgccatcggttgtgccgtcctgctggctgtcatcgaaggtgtcggcatcggcttccagagaatgatggccggagggaccaagctcgagatgcctcctcctcccgccgaaaaggccctcgcataa

SEQ ID NO: 29354 - protein, 152 aa, Muscodor strobelii
  misc_feature: SGI Peptide ID NO. 570081
  misc_feature (1)..(130): Pfam Id: PF02466 Pfam Desc: Tim17/Tim22/Tim23 family
  misc_feature (1)..(151): NCBI GI: 171682640 Blast Desc: protein product [Podospora anserina] gi|170941279|emb|CAP66929.1| protein product [Podospora anserina]
  misc_feature (1)..(152): NCBI GI: 261361477 Blast Desc: mitochondrial import inner membrane translocase subunit tim-17 [Verticillium albo-atrum VaMs.102]
  misc_feature (1)..(150): NCBI GI: 46124075 Blast Desc: IM17_NEUCR Mitochondrial import inner membrane translocase subunit TIM17 [Gibberella zeae PH-1]
  misc_feature (1)..(152): NCBI GI: 258564959 Blast Desc: mitochondrial import inner membrane translocase subunit TIM17 [Uncinocarpus reesii 1704] gi|237906925|gb|EEP81326.1| mitochondrial import inner membrane
  misc_feature (1)..(152): NCBI GI: 67522871 Blast Desc: IM17_NEUCR Mitochondrial import inner membrane translocase subunit TIM17 [Aspergillus nidulans FGSC A4] gi|40745901|gb|EAA65057.1| IM17_NEUCR Mitochondrial import inner
  misc_feature (1)..(152): NCBI GI: 85095902 Blast Desc: mitochondrial import inner membrane translocase subunit TIM17 [Neurospora crassa OR74A] gi|30580414|sp|P59670.1|TIM17_NEUCR RecName: Full=Mitochondrial
  misc_feature (1)..(152): NCBI GI: 119190969 Blast Desc: CIMG_05532 [Coccidioides immitis RS] gi|240107383|gb|EER25568.1| Mitochondrial import inner membrane translocase subunit TIM17, [Coccidioides posadasii C735 delta
  misc_feature (1)..(148): NCBI GI: 189201519 Blast Desc: mitochondrial import inner membrane translocase subunit tim-17 [Pyrenophora tritici-repentis Pt-1C-BFP] gi|187984195|gb|EDU49683.1| mitochondrial import inner membrane
  misc_feature (1)..(150): NCBI GI: 256727184 Blast Desc: [Nectria haematococca mpVI 77-13-4]
  misc_feature (1)..(152): NCBI GI: 119480059 Blast Desc: mitochondrial inner membrane translocase subunit (TIM17), [Neosartorya fischeri NRRL 181] gi|119408212|gb|EAW18161.1| mitochondrial inner membrane subunit
  misc_feature: Useful for introducing or modulating the production of volatile compounds
MDHTRDPCPYVILNDFGGAFAMGAIGGTIWHGIKGFRNSPLGERRIGAITAIKARAPVLGGNFGVWGGLFSTFDCAVKGIRKKEDPWNAITAGFFTGGALAIRGGYKAARNGAIGCAVLLAVIEGVGIGFQRMMAGGTKLEMPPPPAEKALA

SEQ ID NO: 29355 - DNA, 2703 bp, Muscodor strobelii
  misc_feature: SGI EST ID NO. CUFF.69787.1
  misc_feature: Variant of the nucleotide sequence at SEQ ID NO 29353
cgagcatcggcgctggcatcatcgcgacaatcccatcattccatcattcatcattaaccatccaaccttccgccacaattccaccctaaccacctatcttcttcgaaccgtctcctctatctcgcgcctccgacctttcccgttttgtttcttcacctgcgacgaaatcagcgagccgaccaacgctgtctgacttcctcaactttgacccgcggtccatcctcctgacctctcacttccttcacaatcacaatggatcacacacgcgacccgtgtccctatgtcatcctcaatgactttggcggtgctttcgctatgggtgccatcggtggcacgatatggcacggcatcaaagggttcaggaacagccccctcggcgagagaaggataggcgccatcacagccatcaaggccagagcgcccgtactgggcggcaacttcggcgtctggggaggtctgttttccacattcgactgcgccgtcaagggcatccgcaagaaggaggacccctggaacgccatcaccgctggtttcttcaccggtggtgccctggcgattcgaggtggctacaaggccgcgagaaacggtgccatcggttgtgccgtcctgctggctgtcatcgaaggtgtcggcatcggcttccagagaatgatggccggagggaccaagctcgagatgcctcctcctcccgccgaaaaggccctcgcataagcatctaacgacgatactcgatacaccaacaacgaaaacgtgtcgcacccaactccttcataccgacggccaccacggcccccggctcctgtactctatatggtttttggcggtccttgcatatttggggggagtttcacgtgtatattaagatagacggctgctgccaccacggcgacttggcaatttcgtcacgaggcagcatccgccggccgggaagccgccgacagctcataaaacgcaatacatcctaatgatcttccaatccgaacatactatgctgctgatgctctttcacacatgcactcctcatatgtttggcctgctttgctattgacaaggtgtctagattctaagcatgtcaacgaagcgacctctcggacccatcgtcggactctgcgtctacactcttctcgaaaacagttgttcaatcatcatgccatatctgcatcgccggcagcccttcatcatcgatccaagctcgaaacataccagcgcaattatgatcgtgcacaatctgcgactctgtgtacagcacttctccaatcccatttttcgcgatgacacactcgacaccaatcatgccgccctcgccctctccggctttgccccaacgatatccagcgctcctctgcagctggccaccccggcctgcgatcgcttccacggccgacgctgtggagacacccgcccactgcgccatggctcccaccgacctcgccgcagctaggcgcatgaaagaatcaccattaccagttcccgacacagcagccgaccgagtcacgaacacttctttccgccgctcgcttagcggtgtaacgggacgatacagcgatggagtgggcaagcaatccgcaaaccagcccctcagcgaattcgtgagctgtacaactgcatccgagacactcaaagaatcccgcgccccactcagttcccctttctctgtccagtcttccgcccagaaaccagcaccgactacaggtgtatcaccaatacgcccagagagtttgttcgtgatcccacccgtactagtcgccgcgcacacgactccgttttcatccaaagcaacagcgccacaagtgccctgtgggaaataactttcaggacaccaactggccacgccctttccagatttctctttttcgagaccgcggagatgctcatcccatcgccgctgcgtgaaaaaatacgatggatcaacggtctctagaccgtaggacccagctaactgttcagccgcggcaccgtggatgagagtatggccttgtgctgaaggtacatctagtcccacattcaattccggaccctcattctctgtacttgacataggaggtgggggtacatagtcaccgcccagatcatgttctccgtgctctagcattgctttcgcgaggaggatggggttcttgatatggcgcagtcccgtaacgcctacgcctcgcttggcatatccccgtgacaccatgacagaggcttccagctcgttgtatccatctcgggtaaataccgcgccgtgcccggagttgaagagcgcatggtcttctaattgggttacggcgtggactgcgatttctagggctgtggggtaggcgtatgacgttgaaaaagaagagggttttgaggatgaggacttgggtgttgtcatgtaggtttgtgtttttaggacgatgcctatcagagcttgactgtattctttgtattgctctacgctcatgttttcgcgcttgatgtttcctgctccgccgtggatgatgatccggggttggagcttgacgagggacgacatgctgggtgagtgttgtgctgtttattgggggtggtaaggttctgtgtttgttggagtgaaggtagcgcttgagtgggataaatgaaataaccgaggtctactgctgcctctcctaaaattgatggagtgattctatgagattgctgtctatgttcaattagatgtagcgaagtctgtctatcaatcctgaaccggagaaagataag

SEQ ID NO: 29356 - DNA, 2799 bp, Muscodor strobelii
  misc_feature: SGI cDNA ID NO. 570082
  misc_feature: Elevated expression when VOC is produced
  misc_feature: Encodes the peptide sequence at SEQ ID NO 29357
atgccgatcgcgtgcgtagctaccgagatggcggcgcgggcgtccatcagctgcgagggctgtctaaagatcgaggagaataaactgaaggaagaacaacaaccgacgccatttcagtatcaatatcttcaacagaaatatgaagagagcgagtttgacgaggactccgattcggacttcggcacgatgccacccacgccaccggcttcggtcgtggcgccgtctccgatcctagagctgccccctcacacgacgcccgagctctcgcacacgctcaagcacagcagctccgtcctcgctttggccgtcagcagcgacaacatctacgccggcacgcaggatggcgagattgtcgtttggtcgctggccaacttccaggctatcggccgcgtccaggcccataagcgcagcgtcatgtgcctgttcctgtccgacgaccaagagctcctcttctccagcgccagcacccccatcgtcaatgtctggtgtcccaagacgatgacacgcctctacgagatctacagcaccatggactccttcggcgacatcttctctgtcgcctactcttctcagtacgagacggtctactacggcacccagaacacttccatccagtgggtgagcctcaacgaccccgaacgacgctcttcgcacgaatcccctaatcaccccgatcaacggaatcatcgcttcttcgactctagagcagctggcggcgtcagcacaccacggcctaccgacgaacggtacaatctgatcccccaacctcgcaccgtactcgagacgagcaaccgcgccaataagatgtatgctcacttcggatacgtctactgcatgctcatcgccaagggcgtcacggcttatgcaaacccaaatgacgacattctgatatcaggcggcggcgatggcactatcaaagcctggaagctgggcggcaaggagatcggaccagatggctatgaaactggcattgaggaaattatggtccttggtgaagacgatgccaactctgttatgtctctggctgttgacggatctttcctctatagtggaaaactcgagggcgtcgttgagctgtgggacttggacacgaaacagaagctccgagtgattaaggcacaccgaggcgatgtcatgtctgtccagatgcgctggggcttcctgtggagtgtcgctcgttctggtacagcaagtaaacatagcactgttcactctgagaaatatcaatcagaagcttcgcaggttgtcagccagaaatatcagtgtttgacacagtggaaagcccacaatggcaagatcttatcgtcggctgtcaccacgtatcaaggcaaggacctctatatcactggagccaatgatgacaatgtcgcggtttggcagttggacatcccttctacttctgctcccgaccagcctgttgcagaccaggatgatgacgccatgattgcgtctcttcgcgagttcgtctcgtacaagactgtctcatcccgggcagaatatgctgaagactgcagacttggtgcttctttcctgctcagcttgtttcgggaactgggcgccgagaccgaaatgctgagcgcagacgagacccttcaccatcctgttgtctatgccaggttcagaggcaaggctttgccggctgagcaccgaaagaagattctattctacgggcactacgatgtcgtggctgccgatttgaagaagggcaattggaaccatgatccctttcagttgacgggtaaggatggatatctgtacggtcgcggcgtgagcgacaacaaaggccctatcatggctgcgctatacgcagtcaccgatcttgtgcaagcgaagtcgttagattcagacatcgtgtttctcatcgagggccaagaagaatctagttcccgtggattcaaggaaacgattcggaagcacaaagaacgcatcggtgccatcgactacattctcttggcaaatagctattggctggatgacgaaacgccatgtctgacgtatggtctgagaggcgttatgcacgccaccgtgtgcgtcgagtctagaggccccgacttgcactctggcatcaacggatcgtccttggtcaatgaaccggcttcagatctgatggctctcctatcaaagctaaagggcccgcgtaatcgagtcaatctcccggggttttacgagggtattttgcctctgacacctgaggaagatgctcgttatgaagacatcgtgtccgtgcttatggcgcagggcaagacaaatggccacgcatctgcggagtcgctgaaggccagtcttttggcaagatggcgcgagccaaatttgacgcatcatggcatgaaggtgtcaagtccagagggaagtctgattagtagccatgcgagtgctaaggtcagcatacggctagttccatcccagggagtcgaggatatcactgcatcgctcaaaactctcctcgagcaagagtttgaagatctcgaatcggtaaataagctcacgattcagatcgacgatcaagccgagccatggattggctacccgggaagctacatcttccgcacgcttgaggacgctgtcatcaatgcttggggcccgctattctcggacggcaagctagatcgtccgctgtatattagggaaggcggatcgatccctgcgattcggttcctggaaaaggagttcgatgcgcccgctgctcacctcccctgtggccaagcatcagactcggcgcatctagacaatgagcgtctaagggttttgaatttgttcaagagtcgggaaattttcaggagtgtattcaagaaattgtaa

SEQ ID NO: 29357 - protein, 932 aa, Muscodor strobelii
  misc_feature: SGI Peptide ID NO. 570082
  misc_feature (666)..(823): Pfam Id: PF07687 Pfam Desc: Peptidase dimerisation domain
  misc_feature (263)..(309): Pfam Id: PF00400 Pfam Desc: WD domain, G-beta repeat
  misc_feature (554)..(931): Pfam Id: PF01546 Pfam Desc: Peptidase family M20/M25/M40
  misc_feature (554)..(660): Pfam Id: PF01546 Pfam Desc: Peptidase family M20/M25/M40
  misc_feature (66)..(932): NCBI GI: 145607415 Blast Desc: MGG_04227 [Magnaporthe grisea 70-15] gi|145014974|gb|EDJ99542.1| MGG_04227 [Magnaporthe grisea 70-15]
  misc_feature (82)..(932): NCBI GI: 261361479 Blast Desc: WD repeat-containing protein [Verticillium albo-atrum VaMs.102]
  misc_feature (82)..(932): NCBI GI: 171682638 Blast Desc: protein product [Podospora anserina] gi|170941278|emb|CAP66928.1| protein product [Podospora anserina]
  misc_feature (82)..(932): NCBI GI: 116202893 Blast Desc: CHGG_09331 [Chaetomium globosum CBS 148.51] gi|88177849|gb|EAQ85317.1| CHGG_09331 [Chaetomium globosum CBS 148.51]
  misc_feature (63)..(932): NCBI GI: 256726635 Blast Desc: NECHADRAFT_34280 [Nectria haematococca mpVI 77-13-4]
  misc_feature (82)..(932): NCBI GI: 40881949 Blast Desc: conserved [Neurospora crassa]
  misc_feature (82)..(932): NCBI GI: 164425511 Blast Desc: NCU05622 [Neurospora crassa OR74A] gi|157070954|gb|EAA30930.2| conserved [Neurospora crassa OR74A]
  misc_feature (63)..(932): NCBI GI: 46110725 Blast Desc: FG02244.1 [Gibberella zeae PH-1]
  misc_feature (84)..(862): NCBI GI: 154290677 Blast Desc: BC1G_15597 [Botryotinia fuckeliana B05.10] gi|150847449|gb|EDN22642.1| BC1G_15597 [Botryotinia fuckeliana B05.10]
  misc_feature (86)..(862): NCBI GI: 156059949 Blast Desc: SS1G_02111 [Sclerotinia sclerotiorum 1980] gi|154699521|gb|EDN99259.1| SS1G_02111 [Sclerotinia sclerotiorum 1980]
  misc_feature: Useful for introducing or modulating the production of volatile compounds
MPIACVATEMAARASISCEGCLKIEENKLKEEQQPTPFQYQYLQQKYEESEFDEDSDSDFGTMPPTPPASVVAPSPILELPPHTTPELSHTLKHSSSVLALAVSSDNIYAGTQDGEIVVWSLANFQAIGRVQAHKRSVMCLFLSDDQELLFSSASTPIVNVWCPKTMTRLYEIYSTMDSFGDIFSVAYSSQYETVYYGTQNTSIQWVSLNDPERRSSHESPNHPDQRNHRFFDSRAAGGVSTPRPTDERYNLIPQPRTVLETSNRANKMYAHFGYVYCMLIAKGVTAYANPNDDILISGGGDGTIKAWKLGGKEIGPDGYETGIEEIMVLGEDDANSVMSLAVDGSFLYSGKLEGVVELWDLDTKQKLRVIKAHRGDVMSVQMRWGFLWSVARSGTASKHSTVHSEKYQSEASQVVSQKYQCLTQWKAHNGKILSSAVTTYQGKDLYITGANDDNVAVWQLDIPSTSAPDQPVADQDDDAMIASLREFVSYKTVSSRAEYAEDCRLGASFLLSLFRELGAETEMLSADETLHHPVVYARFRGKALPAEHRKKILFYGHYDVVAADLKKGNWNHDPFQLTGKDGYLYGRGVSDNKGPIMAALYAVTDLVQAKSLDSDIVFLIEGQEESSSRGFKETIRKHKERIGAIDYILLANSYWLDDETPCLTYGLRGVMHATVCVESRGPDLHSGINGSSLVNEPASDLMALLSKLKGPRNRVNLPGFYEGILPLTPEEDARYEDIVSVLMAQGKTNGHASAESLKASLLARWREPNLTHHGMKVSSPEGSLISSHASAKVSIRLVPSQGVEDITASLKTLLEQEFEDLESVNKLTIQIDDQAEPWIGYPGSYIFRTLEDAVINAWGPLFSDGKLDRPLYIREGGSIPAIRFLEKEFDAPAAHLPCGQASDSAHLDNERLRVLNLFKSREIFRSVFKKL

SEQ ID NO: 29358 - DNA, 3139 bp, Muscodor strobelii
  misc_feature: SGI EST ID NO. CUFF.69798.2
  misc_feature: Variant of the nucleotide sequence at SEQ ID NO 29356
ctccggttgttgttctttacttttgtgatacgaactgtctggaacagttgtgagtgcagtcatcggcaaatctgacttctacgaccacagctccaagatgccgatcgcgtgcgtagctaccgagatggcggcgcgggcgtccatcagctgcgagggctgtctaaagatcgaggagaataaactgaaggaagaacaacaaccgacgccatttcagtatcaatatcttcaacagaaatatgaagagagcgagtttgacgaggactccgattcggacttcggcacgatgccacccacgccaccggcttcggtcgtggcgccgtctccgatcctagagctgccccctcacacgacgcccgagctctcgcacacgctcaagcacagcagctccgtcctcgctttggccgtcagcagcgacaacatctacgccggcacgcaggatggcgagattgtcgtttggtcgctggccaacttccaggctatcggccgcgtccaggcccataagcgcagcgtcatgtgcctgttcctgtccgacgaccaagagctcctcttctccagcgccagcacccccatcgtcaatgtctggtgtcccaagacgatgacacgcctctacgagatctacagcaccatggactccttcggcgacatcttctctgtcgcctactcttctcagtacgagacggtctactacggcacccagaacacttccatccagtgggtgagcctcaacgaccccgaacgacgctcttcgcacgaatcccctaatcaccccgatcaacggaatcatcgcttcttcgactctagagcagctggcggcgtcagcacaccacggcctaccgacgaacggtacaatctgatcccccaacctcgcaccgtactcgagacgagcaaccgcgccaataagatgtatgctcacttcggatacgtctactgcatgctcatcgccaagggcgtcacggcttatgcaaacccaaatgacgacattctgatatcaggcggcggcgatggcactatcaaagcctggaagctgggcggcaaggagatcggaccagatggctatgaaactggcattgaggaaattatggtccttggtgaagacgatgccaactctgttatgtctctggctgttgacggatctttcctctatagtggaaaactcgagggcgtcgttgagctgtgggacttggacacgaaacagaagctccgagtgattaaggcacaccgaggcgatgtcatgtctgtccagatgcgctggggcttcctgtggagtgtcgctcgttctggtacagcaagtaaacatagcactgttcactctgagaaatatcaatcagaagcttcgcaggttgtcagccagaaatatcagtgtttgacacagtggaaagcccacaatggcaagatcttatcgtcggctgtcaccacgtatcaaggcaaggacctctatatcactggagccaatgatgacaatgtcgcggtttggcagttggacatcccttctacttctgctcccgaccagcctgttgcagaccaggatgatgacgccatgattgcgtctcttcgcgagttcgtctcgtacaagactgtctcatcccgggcagaatatgctgaagactgcagacttggtgcttctttcctgctcagcttgtttcgggaactgggcgccgagaccgaaatgctgagcgcagacgagacccttcaccatcctgttgtctatgccaggttcagaggcaaggctttgccggctgagcaccgaaagaagattctattctacgggcactacgatgtcgtggctgccgatttgaagaagggcaattggaaccatgatccctttcagttgacgggtaaggatggatatctgtacggtcgcggcgtgagcgacaacaaaggccctatcatggctgcgctatacgcagtcaccgatcttgtgcaagcgaagtcgttagattcagacatcgtgtttctcatcgagggccaagaagaatctagttcccgtggattcaaggaaacgattcggaagcacaaagaacgcatcggtgccatcgactacattctcttggcaaatagctattggctggatgacgaaacgccatgtctgacgtatggtctgagaggcgttatgcacgccaccgtgtgcgtcgagtctagaggccccgacttgcactctggcatcaacggatcgtccttggtcaatgaaccggcttcagatctgatggctctcctatcaaagctaaagggcccgcgtaatcgagtcaatctcccggggttttacgagggtattttgcctctgacacctgaggaagatgctcgttatgaagacatcgtgtccgtgcttatggcgcagggcaagacaaatggccacgcatctgcggagtcgctgaaggccagtcttttggcaagatggcgcgagccaaatttgacgcatcatggcatgaaggtgtcaagtccagagggaagtctgattagtagccatgcgagtgctaaggtcagcatacggctagttccatcccagggagtcgaggatatcactgcatcgctcaaaactctcctcgagcaagagtttgaagatctcgaatcggtaaataagctcacgattcagatcgacgatcaagccgagccatggattggctacccgggaagctacatcttccgcacgcttgaggacgctgtcatcaatgcttggggcccgctattctcggacggcaagctagatcgtccgctgtatattagggaaggcggatcgatccctgcgattcggttcctggaaaaggagttcgatgcgcccgctgctcacctcccctgtggccaagcatcagactcggcgcatctagacaatgagcgtctaagggttttgaatttgttcaagagtcgggaaattttcaggagtgtattcaagaaattgtaaggtgttatggatagccagattttggtgtctcaaggtgtccggtttttacgtggattcccgtttttatggttacaggctgtatgattatgggcaagggaaaaactgggaattgaaggacaatatggatcggcgtttcggcattggggaaaagtgcctgcatgtcttcacggagttgtgggatacccatattttgtgtcgttaagtatgaatatcatgataaataatacactgtataaaattttg

SEQ ID NO: 29359 - DNA, 1656 bp, Muscodor strobelii
  misc_feature: SGI cDNA ID NO. 570083
  misc_feature: Elevated expression when VOC is produced
  misc_feature: Encodes the peptide sequence at SEQ ID NO 29360
atgtgcaagaccaaagatgagaatgactccactgctgcatctagcacaatcaacgaagaggaataccctgaacctcttcgcctaacattcatcgtcgcatcattgattctcagcatcttccttgcgtctctcgacacgacaatcatcacgacagccattccctcgataacaacatcgttccatagcctacaagacataggttggtatggctccgcaatcagtttcccattagccgcaacgcaatcggtttgggcaaaggcatacaaatacttccacgttagacaggtgtttctaataagtatattgatcttcgagattgggagtttgatatgcgcactatcaccgaacagtcccaccttcatcgcagggagggcgataacaggcacaggatgcgccggcatattcgcaggttgctacattctcatatctctggtctcacctcctcgtatccgcccagtgctaactagtacacttactgtctcctttgccgtggcttctgtcgtcggacccctaatagggggtgcgttcgcagatactgggggtattgggtggcgatggtgtttctacatcaaccttccattcggcttccttgctgctctggcaacgaccctctcgttccgggcacctaaagccgctgcaccgataccagcaaataagagagagaagatcttgcagatggatattccaggtgctttcctcatctccgcaatcattgtgtcttttacactagccctgcgatgggctggtgtcgaaaaagcatggagcgactcagatgttattggcctccttgtcgccacaccgatttttcttctcctatttggcgttgaccaatggcttcaggacgaacgggcgctcatcttgcactctttcttgcgaaatagagttttgctggtcggtgcggtgtttgaattttttatcgcaggttgtttcaacttggcactcttctatctacctatttatttccaggctgttctctccgtttctgcaatatcatctggtattcatttgatcccatgcatcctctccctgaccattacccagatcctcgtcggaggttatataaccataacaggaatccacaacccgttcctaatcctggggcccgcgattgcggctgtaggctcaggcctattcctgttacttgacgaagattcaagcgcaggccattggataggcttccaggtcattcacggagtcggggtcggtttatgtctaagcattccattgttactgtcgcaagtcgtagttagggcaaaagatgtctctactgcgacgccatttatcatttttgctcaatccctatcaagcgcattcgtcctgccaacatcccaagccgttttccagaacgagctactaaaagccctacggcgtcttgtgcccgatacagatccttatcaagtgttatctgcaggagcaaacagcgcagcgatctcgagtttccccaactcaaggagaagtggcattttagaaagttataccgcagctctgcattcgactctcgcagtcggtactccatttgcgggtatcgcactattggtcagtctcttcatgccttggttcaactatcacaatctatccggtgcccccaaaacccagggagttatccttacaccaggggaagctggcgatatggaaaagggaaagacaactgaatga

SEQ ID NO: 29360 - protein, 551 aa, Muscodor strobelii
  misc_feature: SGI Peptide ID NO. 570083
  misc_feature (35)..(440): Pfam Id: PF07690 Pfam Desc: Major Facilitator Superfamily
  misc_feature (94)..(204): Pfam Id: PF00083 Pfam Desc: Sugar (and other) transporter
  misc_feature (7)..(516): NCBI GI: 240106665 Blast Desc: Major Facilitator Superfamily protein [Coccidioides posadasii C735 delta SOWgp]
  misc_feature (7)..(516): NCBI GI: 119174022 Blast Desc: CIMG_08993 [Coccidioides immitis RS]
  misc_feature (5)..(535): NCBI GI: 156065817 Blast Desc: SS1G_00919 [Sclerotinia sclerotiorum 1980] gi|154691778|gb|EDN91516.1| SS1G_00919 [Sclerotinia sclerotiorum 1980]
  misc_feature (4)..(533): NCBI GI: 154301769 Blast Desc: BC1G_10036 [Botryotinia fuckeliana B05.10] gi|150855698|gb|EDN30890.1| BC1G_10036 [Botryotinia fuckeliana B05.10]
  misc_feature (6)..(533): NCBI GI: 258570113 Blast Desc: [Uncinocarpus reesii 1704] gi|237904130|gb|EEP78531.1| [Uncinocarpus reesii 1704]
  misc_feature (18)..(521): NCBI GI: 146322684 Blast Desc: MFS multidrug transporter [Aspergillus fumigatus Af293] gi|129557790|gb|EAL91021.2| MFS multidrug transporter, [Aspergillus fumigatus Af293] gi|159131795|gb|EDP56908.1| MFS
  misc_feature (3)..(526): NCBI GI: 238841277 Blast Desc: MFS gliotoxin efflux transporter GliA [Microsporum canis CBS 113480]
  misc_feature (2)..(526): NCBI GI: 261359861 Blast Desc: GliA [Verticillium albo-atrum VaMs.102]
  misc_feature (3)..(528): NCBI GI: 46116692 Blast Desc: FG04188.1 [Gibberella zeae PH-1]
  misc_feature (1)..(519): NCBI GI: 171692971 Blast Desc: protein product [Podospora anserina] gi|170946434|emb|CAP73235.1| protein product [Podospora anserina]
  misc_feature: Useful for introducing or modulating the production of volatile compounds
MCKTKDENDSTAASSTINEEEYPEPLRLTFIVASLILSIFLASLDTTIITTAIPSITTSFHSLQDIGWYGSAISFPLAATQSVWAKAYKYFHVRQVFLISILIFEIGSLICALSPNSPTFIAGRAITGTGCAGIFAGCYILISLVSPPRIRPVLTSTLTVSFAVASVVGPLIGGAFADTGGIGWRWCFYINLPFGFLAALATTLSFRAPKAAAPIPANKREKILQMDIPGAFLISAIIVSFTLALRWAGVEKAWSDSDVIGLLVATPIFLLLFGVDQWLQDERALILHSFLRNRVLLVGAVFEFFIAGCFNLALFYLPIYFQAVLSVSAISSGIHLIPCILSLTITQILVGGYITITGIHNPFLILGPAIAAVGSGLFLLLDEDSSAGHWIGFQVIHGVGVGLCLSIPLLLSQVVVRAKDVSTATPFIIFAQSLSSAFVLPTSQAVFQNELLKALRRLVPDTDPYQVLSAGANSAAISSFPNSRRSGILESYTAALHSTLAVGTPFAGIALLVSLFMPWFNYHNLSGAPKTQGVILTPGEAGDMEKGKTTE

SEQ ID NO: 29361 - DNA, 2337 bp, Muscodor strobelii
  misc_feature: SGI EST ID NO. CUFF.69444.0
  misc_feature: Variant of the nucleotide sequence at SEQ ID NO 29359
agcgaaggagcccacccttgcttcagtgtgctgcatctggcggcaagcgggactaaccctgacgcttgcaaggcctaacagctaatgtctcggcgcacctatcatacccttgctccatgcctgtgttgcatataacgaacttttgcatcccttacggacgaaagtatccagaagctcccagaaagcttggagactgtgatctgaaataaagatagggcggacattctacaaagacacgctcttcgagaccgaaactactacgggagaccgacgttagaataaggttgatctcattagtcgtgtttatgccgtattctcacgtcgtcactcgccgtagttgcaatcctacaagatttctcaacttagcgaattaatcatatagattccaaggagttccaaagtttgctttcgcctacctcgattcggtgagatttagaccccgtcgcaatgtgcaagaccaaagatgagaatgactccactgctgcatctagcacaatcaacgaagaggaataccctgaacctcttcgcctaacattcatcgtcgcatcattgattctcagcatcttccttgcgtctctcgacacgacaatcatcacgacagccattccctcgataacaacatcgttccatagcctacaagacataggttggtatggctccgcaatcagtttcccattagccgcaacgcaatcggtttgggcaaaggcatacaaatacttccacgttagacaggtgtttctaataagtatattgatcttcgagattgggagtttgatatgcgcactatcaccgaacagtcccaccttcatcgcagggagggcgataacaggcacaggatgcgccggcatattcgcaggttgctacattctcatatctctggtctcacctcctcgtatccgcccagtgctaactagtacacttactgtctcctttgccgtggcttctgtcgtcggacccctaatagggggtgcgttcgcagatactgggggtattgggtggcgatggtggtatggggagtcttctttcctttttgagatgattttcctattttgcggaaggagaagcgtagagtcgtgtgataagtctgcgtaatgggctgaatcgatactcaccgaaaacagtttctacatcaaccttccattcggcttccttgctgctctggcaacgaccctctcgttccgggcacctaaagccgctgcaccgataccagcaaataagagagagaagatcttgcagatggatattccaggtgctttcctcatctccgcaatcattgtgtcttttacactagccctgcgatgggctggtgtcgaaaaagcatggagcgactcagatgttattggcctccttgtcgccacaccgatttttcttctcctatttggcgttgaccaatggcttcaggacgaacgggcgctcatcttgcactctttcttgcgaaatagagttttgctggtcggtgcggtgtttgaattttttatcgcaggttgtttcaacttggcactcttctatctacctatttatttccaggctgttctctccgtttctgcaatatcatctggtattcatttgatcccatgcatcctctccctgaccattacccagatcctcgtcggaggttatataaccataacaggaatccacaacccgttcctaatcctggggcccgcgattgcggctgtaggctcaggcctattcctgttacttgacgaagattcaagcgcaggccattggataggcttccaggtcattcacggagtcggggtcggtttatgtctaagcattccattgttactgtcgcaagtcgtagttagggcaaaagatgtctctactgcgacgccatttatcatttttgctcaatccctatcaagcgcattcgtcctgccaacatcccaagccgttttccagaacgagctactaaaagccctacggcgtcttgtgcccgatacagatccttatcaagtgttatctgcaggagcaaacagcgcagcgatctcgagtttccccaactcaaggagaagtggcattttagaaagttataccgcagctctgcattcgactctcgcagtcggtactccatttgcgggtatcgcactattggtcagtctcttcatgccttggttcaactatcacaatctatccggtgcccccaaaacccagggagttatccttacaccaggggaagctggcgatatggaaaagggaaagacaactgaatgagattctgattgagtgggaggaatctcgtcccatggccgccatatcaatagggctataggcattacgacaggcctagattaagtttcaccacgttaagttatagaagttgatctatcgttg

SEQ ID NO: 29362 - DNA, 1728 bp, Muscodor strobelii
  misc_feature: SGI cDNA ID NO. 570084
  misc_feature: Elevated expression when VOC is produced
  misc_feature: Encodes the peptide sequence at SEQ ID NO 29363
atgtcgctggcaaccgagacatcggtgtttgacattgtcgttgttggagcaggaatcacgggaatcattgcggcgcaacgcatgttacaagcgcatcccgacaccagactcacgattcttgagcgcgacagctgcgtgggtggagtatggagccagcgaaggatatatcctagcttctggacacaatggacgcatggcattgccgagttttccgatatgccaatggaaagacctccggaagaggactgcatgcacgacttatttcgcgctaagtacacgacgaagtatttagaggattatgtcgacaatatgaagcatgacggaaagagtctacgcgaaagaatgcagtttaataccagcgtcgagtctatcaagaaaattgatcgtaaatggcagttgacatcaatcaatacggccaccagagctcgacaggtgacaacctccctaaaactcatgatggcgaatggccaatgctctgttcccaacattcccgattttgctggccgagaacaatacaagggacaaatcattcactctatgaacttcggaaagtcggacgtgatgcaagacaaggcagtccagcatatcgcggtactcggcgcaggtaaatcagctgctgatatggtctacgaaggtgtcaaagccggcaagacagtatcgtggattgttcgcaagacaggcaatggctcacttggaactgcgccgtttgcgcctatcgacttacccacgccttataggaatgccgtcgaggcctcacaagcgaggatcatggcatcgttgcagccgagctatctgattcctgacaaatcatggtggtcctggcttctgcatggtacgactctcggtgcgaaactcgtgagtaaactattctcagcgatggaccaagcaatacgcaatcatgcaggttaccgagaaagacagagcgataagggatttgagaagttggaatatgacaatgaattgatatgggtaaatagtaccgccggagcttgtcacttcgcagatttctggcctctcgttgctcagaatgtctacgtttatcgtgcagacgtcgaactccttagaggaaaggagatatacctcgacgacgacaataacacccatttcccttgtgatgccatactatgcgggacgggttggaaagacgaacttggaatgtttgacgacgatactctgatgaaactcggcctaccatttaccaaaagtattgaaactcgagagttgacaaccaagtgggacaagctgctcggcgacgcagacgagaaaatactaaaacgattcgtcatgcttaggaaccctccgaaacactacctcaaactagaaacacgaactccatatagattatatcaaacgatggcacctgtcaacgacgactctatcttgttcatgaactgcataaccgctggggcaaaattgttcgtcgcggaagcacaggcgatctgggctgtcgcatactgggacaaggcattcgagctgccgtcggcggacgcgagagaaactgatgtcgcaaacatggtggcgtggaacaaacgacggtacttgtcgaatggtcagcttggaaattatgcagcttttgatagtgtgccgtacgttgataggctctttgacgagattggtcttaactcgcatagaagtaagagttggctgaagaatatgtttgcgcctttcttgccggctgatttgggggcagcgtgggaagagtatctggagaggcagcctaagcaatga

SEQ ID NO: 29363 - protein, 575 aa, Muscodor strobelii
  misc_feature: SGI Peptide ID NO. 570084
  misc_feature (19)..(48): Pfam Id: PF01593 Pfam Desc: Flavin containing amine oxidoreductase
  misc_feature (6)..(571): NCBI GI: 242770336 Blast Desc: dimethylaniline monooxygenase, [Talaromyces stipitatus ATCC 10500] gi|218725154|gb|EED24571.1| dimethylaniline monooxygenase, [Talaromyces stipitatus ATCC 10500]
  misc_feature (7)..(575): NCBI GI: 169619732 Blast Desc: SNOG_13063 [Phaeosphaeria nodorum SN15] gi|111058270|gb|EAT79390.1| SNOG_13063 [Phaeosphaeria nodorum SN15]
  misc_feature (11)..(571): NCBI GI: 154295873 Blast Desc: BC1G_13306 [Botryotinia fuckeliana B05.10] gi|150843856|gb|EDN19049.1| BC1G_13306 [Botryotinia fuckeliana B05.10]
  misc_feature (11)..(571): NCBI GI: 242809609 Blast Desc: dimethylaniline monooxygenase, [Talaromyces stipitatus ATCC 10500] gi|218716031|gb|EED15453.1| dimethylaniline monooxygenase, [Talaromyces stipitatus ATCC 10500]
  misc_feature (8)..(568): NCBI GI: 156057285 Blast Desc: SS1G_04373 [Sclerotinia sclerotiorum 1980] gi|154702159|gb|EDO01898.1| SS1G_04373 [Sclerotinia sclerotiorum 1980]
  misc_feature (11)..(572): NCBI GI: 119483520 Blast Desc: NFIA_093860 [Neosartorya fischeri NRRL 181] gi|119409819|gb|EAW19766.1| NFIA_093860 [Neosartorya fischeri NRRL 181]
  misc_feature (11)..(572): NCBI GI: 212545617 Blast Desc: dimethylaniline monooxygenase, [Penicillium marneffei ATCC 18224] gi|210064482|gb|EEA18577.1| dimethylaniline monooxygenase, [Penicillium marneffei ATCC 18224]
  misc_feature (11)..(572): NCBI GI: 242783838 Blast Desc: dimethylaniline monooxygenase, [Talaromyces stipitatus ATCC 10500] gi|218720413|gb|EED19832.1| dimethylaniline monooxygenase, [Talaromyces stipitatus ATCC 10500]
  misc_feature (54)..(315): NCBI GI: 154297947 Blast Desc: BC1G_12126 [Botryotinia fuckeliana B05.10] gi|150858253|gb|EDN33445.1| BC1G_12126 [Botryotinia fuckeliana B05.10]
  misc_feature (10)..(575): NCBI GI: 242793240 Blast Desc: monooxygenase, [Talaromyces stipitatus ATCC 10500] gi|218718710|gb|EED18130.1| monooxygenase, [Talaromyces stipitatus ATCC 10500]
  misc_feature: Useful for introducing or modulating the production of volatile compounds
MSLATETSVFDIVVVGAGITGIIAAQRMLQAHPDTRLTILERDSCVGGVWSQRRIYPSFWTQWTHGIAEFSDMPMERPPEEDCMHDLFRAKYTTKYLEDYVDNMKHDGKSLRERMQFNTSVESIKKIDRKWQLTSINTATRARQVTTSLKLMMANGQCSVPNIPDFAGREQYKGQIIHSMNFGKSDVMQDKAVQHIAVLGAGKSAADMVYEGVKAGKTVSWIVRKTGNGSLGTAPFAPIDLPTPYRNAVEASQARIMASLQPSYLIPDKSWWSWLLHGTTLGAKLVSKLFSAMDQAIRNHAGYRERQSDKGFEKLEYDNELIWVNSTAGACHFADFWPLVAQNVYVYRADVELLRGKEIYLDDDNNTHFPCDAILCGTGWKDELGMFDDDTLMKLGLPFTKSIETRELTTKWDKLLGDADEKILKRFVMLRNPPKHYLKLETRTPYRLYQTMAPVNDDSILFMNCITAGAKLFVAEAQAIWAVAYWDKAFELPSADARETDVANMVAWNKRRYLSNGQLGNYAAFDSVPYVDRLFDEIGLNSHRSKSWLKNMFAPFLPADLGAAWEEYLERQPKQ

SEQ ID NO: 29364 - DNA, 2467 bp, Muscodor strobelii
  misc_feature: SGI EST ID NO. CUFF.69446.0
  misc_feature: Variant of the nucleotide sequence at SEQ ID NO 29362
cgaacgcgcacatacaatctgcaattgcgtcatacacaatagacagcaatgaacgaacgcttctagacccgcttgcctgggctattagaattgagcagcccttgcattgcttcttaatctttggcgaaaccacctgcatagccacagccgtcatgtcgctggcaaccgagacatcggtgtttgacattgtcgttgttggagcaggaatcacgggaatcattgcggcgcaacgcatgttacaagcgcatcccgacaccagactcacgattcttgagcgcgacagctgcgtgggtggagtatggagccagcgaaggatatatcctagcttctggacacaatggacgcatggcattgccgagttttccgatatgccaatggaaagacctccggaagaggactgcatgcacgacttatttcgcgctaagtacacgacgaagtatttagaggattatgtcgacaatatgaagcatgacggaaagagtctacgcgaaagaatgcagtttaataccagcgtcgagtctatcaagaaaattgatcgtaaatggcagttgacatcaatcaatacggccaccagagctcgacaggtgacaacctccctaaaactcatgatggcgaatggccaatgctctgttcccaacattcccgattttgctggccgagaacaatacaagggacaaatcattcactctatgaacttcggaaagtcggacgtgatgcaagacaaggcagtccagcatatcgcggtactcggcgcaggtaaatcagctgctgatatggtctacgaaggtgtcaaagccggcaagacagtatcgtggattgttcgcaagacaggcaatggctcacttggaactgcgccgtttgcgcctatcgacttacccacgccttataggaatgccgtcgaggcctcacaagcgaggatcatggcatcgttgcagccgagctatctgattcctgacaaatcatggtggtcctggcttctgcatggtacgactctcggtgcgaaactcgtgagtaaactattctcagcgatggaccaagcaatacgcaatcatgcaggttaccgagaaagacagagcgataagggatttgagaagttggaatatgacaatgaattgatatgggtaaatagtaccgccggagcttgtcacttcgcagatttctggcctctcgttgctcagaatgtctacgtttatcgtgcagacgtcgaactccttagaggaaaggagatatacctcgacgacgacaataacacccatttcccttgtgatgccatactatgcgggacgggttggaaagacgaacttggaatgtttgacgacgatactctgatgaaactcggcctaccatttaccaaaagtattgaaactcgagagttgacaaccaagtgggacaagctgctcggcgacgcagacgagaaaatactaaaacgattcgtcatgcttaggaaccctccgaaacactacctcaaactagaaacacgaactccatatagattatatcaaacgatggcacctgtcaacgacgactctatcttgttcatgaactgcataaccgctggggcaaaattgttcgtcgcggaagcacaggcgatctgggctgtcgcatactgggacaaggcattcgagctgccgtcggcggacgcgagagaaactgatgtcgcaaacatggtggcgtggaacaaacgacggtacttgtcgaatggtcagcttggaaattatgcagcttttgatagtgtgccgtacgttgataggctctttgacgagattggtcttaactcgcatagaagtaagagttggctgaagaatatgtttgcgcctttcttgccggctgatttgggggcagcgtgggaagagtatctggagaggcagcctaagcaatgattgttcactgcaagtgcggactttttattaataaacgccatgccagcctggggcccctctctatcaaaagccaaatgaacttagagttgtgtcaaatcatgtcgacggcattgacatgcgttcgaaagttttctcctgaatgtatccgtatttactcgcatgagtatgactcaatctagaattgcagaatcttatcgcctatgtccaatagtctttcgcacaccgcaacccagtgagaggtatcggctgttatcctcaatcttgatatttcaatcagctatgtgtcgggttccagtaaatcggaaccgatactttactctggtgctctttgcagcagaccatccatgatgtatagattgaagagagaccgattgcgatgggtctcatagcatatgtggtcggtacgccctagcaccctatcagtctccggtgtttgtcatttaagataaataggttcatctggtgtccaatggtggctaaatgcttcacataacggccttggccaagctcttgaacttctatgctagggtgcatgctacacacgctcccgggctgtgcaatgcatgtgactggcctcaggagatcgt

SEQ ID NO: 29365 - DNA, 375 bp, Muscodor strobelii
  misc_feature: SGI cDNA ID NO. 570085
  misc_feature: Elevated expression when VOC is produced
  misc_feature: Encodes the peptide sequence at SEQ ID NO 29366
atggcacctgtcaacgacgactctatcttgttcatgaactgcataaccgctggggcaaaattgttcgtcgcggaagcacaggcgatctgggctgtcgcatactgggacaaggcattcgagctgccgtcggcggacgcgagagaaactgatgtcgcaaacatggtggcgtggaacaaacgacggtacttgtcgaatggtcagcttggaaattatgcagcttttgatagtgtgccgtacgttgataggctctttgacgagattggtcttaactcgcatagaagtaagagttggctgaagaatatgtttgcgcctttcttgccggctgatttgggggcagcgtgggaagagtatctggagaggcagcctaagcaatga

SEQ ID NO: 29366 - protein, 124 aa, Muscodor strobelii
  misc_feature: SGI Peptide ID NO. 570085
  misc_feature (4)..(120): NCBI GI: 154297949 Blast Desc: BC1G_12127 [Botryotinia fuckeliana B05.10] gi|150858254|gb|EDN33446.1| BC1G_12127 [Botryotinia fuckeliana B05.10]
  misc_feature (1)..(124): NCBI GI: 169619732 Blast Desc: SNOG_13063 [Phaeosphaeria nodorum SN15] gi|111058270|gb|EAT79390.1| SNOG_13063 [Phaeosphaeria nodorum SN15]
  misc_feature (6)..(120): NCBI GI: 242770336 Blast Desc: dimethylaniline monooxygenase, [Talaromyces stipitatus ATCC 10500] gi|218725154|gb|EED24571.1| dimethylaniline monooxygenase, [Talaromyces stipitatus ATCC 10500]
  misc_feature (1)..(120): NCBI GI: 154295873 Blast Desc: BC1G_13306 [Botryotinia fuckeliana B05.10] gi|150843856|gb|EDN19049.1| BC1G_13306 [Botryotinia fuckeliana B05.10]
  misc_feature (1)..(123): NCBI GI: 119196045 Blast Desc: CIMG_02397 [Coccidioides immitis RS]
  misc_feature (1)..(123): NCBI GI: 240110609 Blast Desc: Flavin-binding monooxygenase-like family protein [Coccidioides posadasii C735 delta SOWgp]
  misc_feature (1)..(117): NCBI GI: 156057285 Blast Desc: SS1G_04373 [Sclerotinia sclerotiorum 1980] gi|154702159|gb|EDO01898.1| SS1G_04373 [Sclerotinia sclerotiorum 1980]
  misc_feature (1)..(121): NCBI GI: 119483520 Blast Desc: NFIA_093860 [Neosartorya fischeri NRRL 181] gi|119409819|gb|EAW19766.1| NFIA_093860 [Neosartorya fischeri NRRL 181]
  misc_feature (5)..(124): NCBI GI: 242793240 Blast Desc: monooxygenase, [Talaromyces stipitatus ATCC 10500] gi|218718710|gb|EED18130.1| monooxygenase, [Talaromyces stipitatus ATCC 10500]
  misc_feature (1)..(121): NCBI GI: 242783838 Blast Desc: dimethylaniline monooxygenase, [Talaromyces stipitatus ATCC 10500] gi|218720413|gb|EED19832.1| dimethylaniline monooxygenase, [Talaromyces stipitatus ATCC 10500]
  misc_feature: Useful for introducing or modulating the production of volatile compounds
MAPVNDDSILFMNCITAGAKLFVAEAQAIWAVAYWDKAFELPSADARETDVANMVAWNKRRYLSNGQLGNYAAFDSVPYVDRLFDEIGLNSHRSKSWLKNMFAPFLPADLGAAWEEYLERQPKQ

SEQ ID NO: 29367 - DNA, 2467 bp, Muscodor strobelii; identical to SEQ ID NO: 29364
  misc_feature: SGI EST ID NO. CUFF.69446.0
  misc_feature: Variant of the nucleotide sequence at SEQ ID NO 29365

SEQ ID NO: 29368 - DNA, 1158 bp, Muscodor strobelii
  misc_feature: SGI cDNA ID NO. 570086
  misc_feature: Elevated expression when VOC is produced
  misc_feature: Encodes the peptide sequence at SEQ ID NO 29369
atggcttctaccactatgaaagccgtcaactatgtcgggccttacaaagtccgcgtcgaggaagttgaaaagcccaagattcagcatgcggatgacatcattgtcaaaatcacgactgcagccatttgcggctccgatctacatatgtatgaaggcagaacggcagcggagcctggaattacgtttggacatgagaacatggggataatagaagaaattggagagggcgtgactctcctaaagaagggcgatcgggttgtcatgccgttcaatgtagccgatggtcgatgccgcaattgtgaagaaggaaagactgcattctgtacaggcgttaatccggggtttgcaggaggtgcatatggctatgtggctatggggcccttccgtggtggccaagcgcagtacatccgtgttccgtacgctgactttaacgctttgaaattacctcccggcaaagagttcgaatcagacttcgtccttcttgccgatgtcttccccacaggctggcatggagttgagatttcgggcttccggtccggcgagagtgtcgcggttttcggcgccggccccgttggcttgatggcagcttactctgctgtccttcgtggcgcatcgcgcgtctatgtcgttgaccgcgtgcctgagcgtctacaatctgctgagaagattggatgcatccccatcaacttcacggaaggcaatgctgttgataggatcattgagatcaatggcgagatggtagaccggtcaatagatgccgttggctaccaagcgtcttctgggaatggcaatactgagcaggccaacattgttctcgagaacatgatccgtgttactagagcttgcggaggcttaggcattccggggctctatgtgccgagtgacccaggtgcagccgatgaagcatcgagaaatggaatgattagtctgagttttggcaagctattcgagaagggactttcggtcgccactggccagtgtaatgtcaaagcttacaatcgatatctgcgagatttaatcatctccgggcgggcaaagccgagttttgtcatctcgcacgagatcaatatcgatgatgctgcagtggcatacgagaagtttcagaagaggattgacggatacacgaaagtgcttatccacccaaatggaggcttctag

SEQ ID NO: 29369 - protein, 385 aa, Muscodor strobelii
  misc_feature: SGI Peptide ID NO. 570086
  misc_feature (30)..(148): Pfam Id: PF08240 Pfam Desc: Alcohol dehydrogenase GroES-like domain
  misc_feature (179)..(341): Pfam Id: PF00107 Pfam Desc: Zinc-binding dehydrogenase
  misc_feature (179)..(258): Pfam Id: PF00107 Pfam Desc: Zinc-binding dehydrogenase
  misc_feature (1)..(385): NCBI GI: 46116744 Blast Desc: FG04214.1 [Gibberella zeae PH-1]
  misc_feature (1)..(385): NCBI GI: 255954275 Blast Desc: Pc21g08510 [Penicillium chrysogenum Wisconsin 54-1255] gi|211589601|emb|CAP95748.1| Pc21g08510 [Penicillium chrysogenum Wisconsin 54-1255]
  misc_feature (1)..(385): NCBI GI: 145256072 Blast Desc: An10g00230 [Aspergillus niger CBS 513.88] gi|134078585|emb|CAK49113.1| protein product [Aspergillus niger]
  misc_feature (4)..(385): NCBI GI: 261358995 Blast Desc: glutathione-independent formaldehyde dehydrogenase [Verticillium albo-atrum VaMs.102]
  misc_feature (1)..(385): NCBI GI: 67904254 Blast Desc: AN9114.2 [Aspergillus nidulans FGSC A4] gi|40742757|gb|EAA61947.1| AN9114.2 [Aspergillus nidulans FGSC A4] gi|259485470|tpe|CBF82519.1| TPA: [Aspergillus nidulans FGSC
  misc_feature (1)..(385): NCBI GI: 189200208 Blast Desc: S-(hydroxymethyl)glutathione dehydrogenase [Pyrenophora tritici-repentis Pt-1C-BFP] gi|187983540|gb|EDU49028.1| S-(hydroxymethyl)glutathione
  misc_feature (6)..(381): NCBI GI: 256816883 Blast Desc: glutathione-independent formaldehyde dehydrogenase [Streptomyces griseoflavus Tu4000]
  misc_feature (6)..(381): NCBI GI: 239929678 Blast Desc: alcohol dehydrogenase [Streptomyces ghanaensis ATCC 14672]
  misc_feature (6)..(381): NCBI GI: 21222458 Blast Desc: alcohol dehydrogenase [Streptomyces coelicolor A3(2)] gi|256786470|ref|ZP_05524901.1| alcohol dehydrogenase [Streptomyces lividans TK24] gi|13122148|emb|CAC32326.1| alcohol
  misc_feature (6)..(382): NCBI GI: 254396339 Blast Desc: alcohol dehydrogenase [Streptomyces pristinaespiralis ATCC 25486] gi|197720057|gb|EDY63965.1| alcohol dehydrogenase [Streptomyces pristinaespiralis ATCC 25486]
  misc_feature (7)..(385): SWISSPROT Homolog: EC 1.2.1.46 Formaldehyde dehydrogenase
  misc_feature: Useful for introducing or modulating the production of volatile compounds
MASTTMKAVNYVGPYKVRVEEVEKPKIQHADDIIVKITTAAICGSDLHMYEGRTAAEPGITFGHENMGIIEEIGEGVTLLKKGDRVVMPFNVADGRCRNCEEGKTAFCTGVNPGFAGGAYGYVAMGPFRGGQAQYIRVPYADFNALKLPPGKEFESDFVLLADVFPTGWHGVEISGFRSGESVAVFGAGPVGLMAAYSAVLRGASRVYVVDRVPERLQSAEKIGCIPINFTEGNAVDRIIEINGEMVDRSIDAVGYQASSGNGNTEQANIVLENMIRVTRACGGLGIPGLYVPSDPGAADEASRNGMISLSFGKLFEKGLSVATGQCNVKAYNRYLRDLIISGRAKPSFVISHEINIDDAAVAYEKFQKRIDGYTKVLIHPNGGF

SEQ ID NO: 29370 - DNA, 3581 bp, Muscodor strobelii
  misc_feature: SGI EST ID NO. CUFF.69471.1
  misc_feature: Variant of the nucleotide sequence at SEQ ID NO 29368
ataagcatacgaccatgagcttggcatgtcataaccagatatctaagcctggctcatccagatattccaagttgcggcagctactccccactcaacccataaccaattaattcaatgccagttatcatgtttgacgtgcagcagtagcctcatcctttccgcgcagacacgtggaaacttcaactgagtgccatcgggcggtcttcatgagcgacaaatacggtagctttggcttttcctgcctttaaatcgcagtttttactcagcgcaattgacgcgtggttcaatgccccaaagtgacctgtgccgagcgacgacaaccactttgaaaatatggtgttcaataactatgtgataacagaaatatctcatattgtacttgatagaagagcagattgatgtcaaatgagagagtatgattatgatacgtttgttactaggattatagtggtggagatggtcaatgagtatagtaagtagcgtactaggtagggtcaattgcccagtcgcagtgcgcgtcggcgaaaactcactcgatcgagcgcacatccaacttgcgtgtttgcattggaaattcatcatcgtggatgggaagcccaacaagcgatatgtgttctaggcatccccacttaggaagcatttcgacgaaatttgggttccagcttgttggaatatcgggtatggggaatggtggagagcattatactgccccggatcccctcctgcgttgcattagtccaatcgtattcggagactcggtgtctcttggagtcatgtagttcagaaaaatagagcaattgacagaaagaacgagataggtgtaacgaatcatgaccccaactaatcgctttcaaggagttgttcccggtacagccagaacgacaccagtgcgggcagccaagcatcatgcggggttacagatgtgaataggacatcaatcatccagcatttttactgcagacgacatggaggaaactaaaacatgtatttagcaaatcttcaatcctgtacatcagagtgttgaagacgctggcagttcatcatggcttctaccactatgaaagccgtcaactatgtcgggccttacaaagtccgcgtcgaggaagttgaaaagcccaagattcagcatgcggatgacatcattgtcaaaatcacgactgcagccatttgcggctccgatctacatatgtatgaaggcagaacggcagcggagcctggaattacgtttggacatgagaacatggggataatagaagaaattggagagggcgtgactctcctaaagaagggcgatcgggttgtcatgccgttcaatgtagccgatggtcgatgccgcaattgtgaagaaggaaagactgcattctgtacaggcgttaatccggggtttgcaggaggtgcatatggctatgtggctatggggcccttccgtggtggccaagcgcagtacatccgtgttccgtacgctgactttaacgctttgaaattacctcccggcaaagagttcgaatcagacttcgtccttcttgccgatgtcttccccacaggctggcatggagttgagatttcgggcttccggtccggcgagagtgtcgcggttttcggcgccggccccgttggcttgatggcagcttactctgctgtccttcgtggcgcatcgcgcgtctatgtcgttgaccgcgtgcctgagcgtctacaatctgctgagaagattggatgcatccccatcaacttcacggaaggcaatgctgttgataggatcattgagatcaatggcgagatggtagaccggtcaatagatgccgttggctaccaagcgtcttctgggaatggcaatactgagcaggccaacattgttctcgagaacatgatccgtgttactagagcttgcggaggcttaggcattccggggctctatgtgccgagtgacccaggtgcagccgatgaagcatcgagaaatggaatgattagtctgagttttggcaagctattcgagaagggactttcggtcgccactggccagtgtaatgtcaaagcttacaatcgatatctgcgagatttaatcatctccgggcgggcaaagccgagttttgtcatctcgcacgagatcaatatcgatgatgctgcagtggcatacgagaagtttcagaagaggattgacggatacacgaaagtgcttatccacccaaatggaggcttctagcgacggagaccgatctcgacaacaaaatgaacggagtagttcttcgtgtgaaaaccggggggaaaacaaaaatcaaaaaaacatacgaggtgtattttaaatacagactgacgtgttgtcgtggccactattcactaatttcggtgcttatctaaatacgtgcaaaacgcgtgcattcagagctcctctcacatacaatttccttttaatacagtaatggcagtaggctcacaacaacaatcccaacaaatctcacatgccagaccacagctatcaacgccgtcgaatttctacgctgccagaccagcgctgtcgaaaccttgatatcgccgctcgcgatgactcgaaatggcctcaatttctgccttgtcagttgctggataaaagggtgcttcaggtccagggcttgctcctttccttcttcaccttcatccatctagaattcaacagaccacacccaatacgtctcacatacccacgtccagcattcagacacaaccatgacgatgtcggcaagcttccacgattgttcgccgtacgaacaatacaagtacttgacgagatacttcgctatccccaagaatgcgaagaagctcaacgtcgtggccactattcacgcaaggatttgcagttcagaatgatggggacaaaaaaaaatatcactctctcactgtgctaattgcgcgcgctcaataagatgataacatcactacaggcagctatcgcccgattgaatgagtggatggcgacgttggagcttcacgacgctatttcgccctgtgttgttcattcgttcttctagtagtaccgcacccttcaatttatttcgctgtcaattcatgcagtactatgtccaagtttgataccatggggatgaggtttaggtgactttcccgtaatccttctggcaaccagtaccacagtggtcaattgtctttccacagaagccaccggcgctacaacattggccgttgaaatccccactaacacacgtgtagccgcccttggtaaccccacacgaaccatcaacagacggtatgttggacgtgatgcacccgctcgaaagctcttttgactattcgttgtagatattagcgaagattccggattttgggatagagggatgaaggtcacggaacaaagctaaggaagaagaggaagaatgtactgaccatccttggccacagtaatttgccgtgctgccgcattgcccattcatcgaacagcagtttccggatactgaaccagcgcatgtctcccattgctagggcacatgccgtctatcggaatatggccagatgactcgtcgcaagttccaaaagccgagttgcactatagtgttaaaagttagtatttattgattagatcgtcggaagacgtc

SEQ ID NO: 29371 - DNA, 1152 bp, Muscodor strobelii
  misc_feature: SGI cDNA ID NO. 570087
  misc_feature: Elevated expression when VOC is produced
  misc_feature: Encodes the peptide sequence at SEQ ID NO 29372
atgccagtgactgtgcgccccgctaaccacccaccgcgacaatggcaaggctgtgccgcaacgtcggcagagacattattccacgcttcctgtcccgatgaggccgagcggtgcaagaggatcatccaatcctcgttcggtgaccttacagaagcggctggcatcaccgcgtccgcgaatggctttatctacgccgctacctctgcttacaatcagcaccatcacttgaccatccggcccgaggatgtctggttcaccatcctaactcaactgagcttctacataaacgccaatgccgagaaactgcgatctttgttcgtcgcccacgaaggccaaaaggaacttgaagttgtcggcatcggcacagtccacagcgctgactttgggaggttagcgatacaaatgaccaaagagatagagaagaatgtcgttgactcggagctccgtgattggattatgcctaaatttaccactacaacccagatagacaccatcaccgctgctgtcttgatgatgggttccacgcagaaatatttccgctacagcatgaggctactatgtggcattccgtccgtcactctcctaggtgacaaagcagactgggaaagcatacgccggcgtctcaacaaactacttcacttcggcaaggaagctgatcagttccgccgcttactgactccaatcctagacttctttattcgcacgttcgagaaagtggatgatccaggggtcgtagagttctggtccaagatgacccacaaagaaaacaacggctctggcccaaagtttttttcgggctggctgacaggtttctgtttttgggatgcgaagggccggttgatgcacagagggccgggttcggcttgcgagataaatggcacggcttatcataaactgaacatggccaatattcccgtcggctacgtttcagtgccagtcactgtggatgacaatggaaatgaaatcaagacgaggatggtggcaggctcagtgggcatcgcggcctggagtagcggagacaagctggacacaagctggactcatgcaggaaagcggcgggacgcgaccgtgaagcctaaggttggcgatgcaacaggtctcgactcgctgcgcccagtatccggttggtggatgtatgaggtggccgaatga

SEQ ID NO: 29372 - protein, 383 aa, Muscodor strobelii
  misc_feature: SGI Peptide ID NO. 570087
  misc_feature (1)..(380): NCBI GI: 145247740 Blast Desc: An12g10730 [Aspergillus niger] gi|134080862|emb|CAK41420.1| protein product [Aspergillus niger]
  misc_feature (1)..(380): NCBI GI: 255942128 Blast Desc: Pc16g15400 [Penicillium chrysogenum Wisconsin 54-1255] gi|211586456|emb|CAP94210.1| Pc16g15400 [Penicillium chrysogenum Wisconsin 54-1255]
  misc_feature (1)..(381): NCBI GI: 169786137 Blast Desc: [Aspergillus oryzae RIB40] gi|83776277|dbj|BAE66396.1| protein product [Aspergillus oryzae]
  misc_feature (1)..(381): NCBI GI: 238507081 Blast Desc: conserved [Aspergillus flavus NRRL3357] gi|220689455|gb|EED45806.1| conserved [Aspergillus flavus NRRL3357]
  misc_feature (1)..(381): NCBI GI: 169604216 Blast Desc: SNOG_05119 [Phaeosphaeria nodorum SN15] gi|111066390|gb|EAT87510.1| SNOG_05119 [Phaeosphaeria nodorum SN15]
  misc_feature (1)..(360): NCBI GI: 256732860 Blast Desc: NECHADRAFT_79491 [Nectria haematococca mpVI 77-13-4]
  misc_feature (1)..(380): NCBI GI: 255950062 Blast Desc: Pc22g18950 [Penicillium chrysogenum Wisconsin 54-1255] gi|211592815|emb|CAP99183.1| Pc22g18950 [Penicillium chrysogenum Wisconsin 54-1255]
  misc_feature (1)..(379): NCBI GI: 170103935 Blast Desc: [Laccaria bicolor S238N-H82] gi|164642063|gb|EDR06321.1| [Laccaria bicolor S238N-H82]
  misc_feature (1)..(379): NCBI GI: 171684309 Blast Desc: protein product [Podospora anserina] gi|170942115|emb|CAP67767.1| protein product [Podospora anserina]
  misc_feature (1)..(376): NCBI GI: 258568238 Blast Desc: [Uncinocarpus reesii 1704] gi|237906309|gb|EEP80710.1| [Uncinocarpus reesii 1704]
  misc_feature: Useful for introducing or modulating the production of volatile compounds
MPVTVRPANHPPRQWQGCAATSAETLFHASCPDEAERCKRIIQSSFGDLTEAAGITASANGFIYAATSAYNQHHHLTIRPEDVWFTILTQLSFYINANAEKLRSLFVAHEGQKELEVVGIGTVHSADFGRLAIQMTKEIEKNVVDSELRDWIMPKFTTTTQIDTITAAVLMMGSTQKYFRYSMRLLCGIPSVTLLGDKADWESIRRRLNKLLHFGKEADQFRRLLTPILDFFIRTFEKVDDPGVVEFWSKMTHKENNGSGPKFFSGWLTGFCFWDAKGRLMHRGPGSACEINGTAYHKLNMANIPVGYVSVPVTVDDNGNEIKTRMVAGSVGIAAWSSGDKLDTSWTHAGKRRDATVKPKVGDATGLDSLRPVSGWWMYEVAE

SEQ ID NO: 29373 - DNA, 1879 bp, Muscodor strobelii
  misc_feature: SGI EST ID NO. CUFF.69459.0
  misc_feature: Variant of the nucleotide sequence at SEQ ID NO 29371
gtggacagtgcctgtgcattacctggacgattgtggaatatgccaggcagccactgccaagactgctcggcagcttacagcgccaaccagcctgaatcaagaacatgcgccgggctcgtctcgccgttaacaacctacatgcaaccgcatggtaatcaatgataagcgacaaacccaaacacggacattccttgagcgcaacattgtcatacgtttcgatgctccttctcaccatctaggtgctgatcttgtcggctcgagttcagcatctcttttcatgatagatcaagagacgtcatgccagtgactgtgcgccccgctaaccacccaccgcgacaatggcaaggctgtgccgcaacgtcggcagagacattattccacgcttcctgtcccgatgaggccgagcggtgcaagaggatcatccaatcctcgttcggtgaccttacagaagcggctggcatcaccgcgtccgcgaatggctttatctacgccgctacctctgcttacaatcagcaccatcacttgaccatccggcccgaggatgtctggttcaccatcctaactcaactgagcttctacataaacgccaatgccgagaaactgcgatctttgttcgtcgcccacgaaggccaaaaggaacttgaagttgtcggcatcggcacagtccacagcgctgactttgggaggttagcgatacaaatgaccaaagagatagagaagaatgtcgttgactcggagctccgtgattggattatgcctaaatttaccactacaacccagatagacaccatcaccgctgctgtcttgatgatgggttccacgcagaaatatttccgctacagcatgaggctactatgtggcattccgtccgtcactctcctaggtgacaaagcagactgggaaagcatacgccggcgtctcaacaaactacttcacttcggcaaggaagctgatcagttccgccgcttactgactccaatcctagacttctttattcgcacgttcgagaaagtggatgatccaggggtcgtagagttctggtccaagatgacccacaaagaaaacaacggctctggcccaaagtttttttcgggctggctgacaggtttctgtttttgggatgcgaagggccggttgatgcacagagggccgggttcggcttgcgagataaatggcacggcttatcataaactgaacatggccaatattcccgtcggctacgtttcagtgccagtcactgtggatgacaatggaaatgaaatcaagacgaggatggtggcaggctcagtgggcatcgcggcctggagtagcggagacaagctggacacaagctggactcatgcaggaaagcggcgggacgcgaccgtgaagcctaaggttggcgatgcaacaggtctcgactcgctgcgcccagtatccggttggtggatgtatgaggtggccgaatgaataatgttcgttgcatgtgcattcgatattatattatcttcgccctttcttaatttttttgcgccgatgctggcttcgaccaaagaaggcataatcgctgcccgattgacaaccagccactaatacaagagcatcgtgtcatacgtcatagtcttacatatggcgcttaggattagcacttccgccgcattgttatgtggcaagcattcattttagaaatatctaccagcctctcagtcttgaccaccttattttgctgtttattcaatcgtttgtgagctatgtctatatgctgtgaattcatttgtatatcaaagtgccccaacacgcatgttagtatgagggtctgtgagggccctgtgaccagtgcacacaccccttagcaccactgaaacatagcgaacagggaacactaaacacttaactcgaa

SEQ ID NO: 29374 - DNA, 435 bp, Muscodor strobelii
  misc_feature: SGI cDNA ID NO. 570088
  misc_feature: Reduced expression when VOC is produced
  misc_feature: Encodes the peptide sequence at SEQ ID NO 29375
atgcagttcactactaccgttctcgctacgattctatcagcaaccgcagtgttcgctgctcccaccgtcaccgaacgggctgcaatccccgactggactgtcacaagcatgaagcgagtgtgcaacaccgctgacacaagttgcgcctggactttcggcatccagaccaacaccggcgccgccactgttccttgcagcttcaccatcgcaggaacgaaagctgaccagggcaacctcaccactcctaaggcctgcggcactttcagcgtcactgcaggctggagcggccaattcggcgcaggcaagggattcaccaccatctccgtctacaacaacgccaacaagcagattgcatggcccgcctacacggacactgagttggctggtggcaaggtcgtttcccccaataagaactggcccgtcactcagatgtaa

SEQ ID NO: 29375 - protein, 144 aa, Muscodor strobelii
  misc_feature: SGI Peptide ID NO. 570088
  misc_feature (1)..(139): NCBI GI: 46127721 Blast Desc: FG08238.1 [Gibberella zeae PH-1]
  misc_feature (1)..(139): NCBI GI: 256729378 Blast Desc: small secreted protein [Nectria haematococca mpVI 77-13-4]
  misc_feature (1)..(139): NCBI GI: 255936199 Blast Desc: Pc13g06930 [Penicillium chrysogenum Wisconsin 54-1255] gi|211583746|emb|CAP91762.1| Pc13g06930 [Penicillium chrysogenum Wisconsin 54-1255]
  misc_feature (1)..(139): NCBI GI: 256722734 Blast Desc: NECHADRAFT_72854 [Nectria haematococca mpVI 77-13-4]
  misc_feature (1)..(139): NCBI GI: 256722249 Blast Desc: NECHADRAFT_52368 [Nectria haematococca mpVI 77-13-4]
  misc_feature (18)..(139): NCBI GI: 67516423 Blast Desc: AN0493.2 [Aspergillus nidulans FGSC A4] gi|40747436|gb|EAA66592.1| AN0493.2 [Aspergillus nidulans FGSC A4] gi|259489254|tpe|CBF89373.1| TPA: [Aspergillus nidulans FGSC
  misc_feature (1)..(142): NCBI GI: 255935271 Blast Desc: Pc13g02210 [Penicillium chrysogenum Wisconsin 54-1255] gi|211583282|emb|CAP91290.1| Pc13g02210 [Penicillium chrysogenum Wisconsin 54-1255]
  misc_feature (22)..(139): NCBI GI: 256724272 Blast Desc: NECHADRAFT_53490 [Nectria haematococca mpVI 77-13-4]
  misc_feature (1)..(139): NCBI GI: 171685370 Blast Desc: protein product [Podospora anserina] gi|170942646|emb|CAP68298.1| protein product [Podospora anserina]
  misc_feature (1)..(139): NCBI GI: 116191121 Blast Desc: CHGG_05278 [Chaetomium globosum CBS 148.51] gi|88181191|gb|EAQ88659.1| CHGG_05278 [Chaetomium globosum CBS 148.51]
  misc_feature: Useful for introducing or modulating the production of volatile compounds
MQFTTTVLATILSATAVFAAPTVTERAAIPDWTVTSMKRVCNTADTSCAWTFGIQTNTGAATVPCSFTIAGTKADQGNLTTPKACGTFSVTAGWSGQFGAGKGFTTISVYNNANKQIAWPAYTDTELAGGKVVSPNKNWPVTQM

SEQ ID NO: 29376 - DNA, 949 bp, Muscodor strobelii
  misc_feature: SGI EST ID NO. CUFF.69527.0
  misc_feature: Variant of the nucleotide sequence at SEQ ID NO 29374
ggttggttctggtgagtaggagacattatataaatgatcaaagcccaatccatttcaccttcattcttcttcagtattctcatctacaatcagaacaatatcacatagactcactaaattcccacacctctttcccaaataaaccgatatatacactatcaaaatgcagttcactactaccgttctcgctacgattctatcagcaaccgcagtgttcgctgctcccaccgtcaccgaacgggctgcaatccccgactggactgtcacaagcatgaagcgagtgtgcaacaccgctgacacaagttgcgcctggactttcggcatccagaccaacaccggcgccgccactgttccttgcagcttcaccatcgcaggaacgaaagctgaccagggcaacctcaccactcctaaggcctgcggcactttcagcgtcactgcaggctggagcggccaattcggcgcaggcaagggattcaccaccatctccgtctacaacaacgccaacaagcagattgcatggcccgcctacacggacactgagttggctggtggcaaggtcgtttcccccaataagaactggcccgtcactcagatgtaaagaaaggagggtcgaaagccggagaacacagtcgtcaaaaacttagacatctagtacagggacgctgcgaagtcgacgtgtggtaatagcgataatctcaaggttaggaaaagggtcgacagtacatactattaagcaagcatcattaatgtagttagtgttgccttgaattacatattctatgtcccagaaaaaattttcgaactgaagagtgatgttgagatactatttctgataactatcaaggtagtaacattcctttctcgtttaacatccaaattcggctctagaatcgtactagagccagtcgtctgggaactaggtggtggtcgcctgtatatacgtacgtag

SEQ ID NO: 29377 - DNA, 630 bp, Muscodor strobelii
  misc_feature: SGI cDNA ID NO. 570089
  misc_feature: Encodes the peptide sequence at SEQ ID NO 29378
atggtgttttccgccatggccacgcgttcggcaaccttcactatcatattgctattggccagtcacgtcgctgctagcttcaagcaccagagtgggccagtcgactcaaacactgagcccgcctgcagcaaatatgacacggcatacaacgagattaacaactgtgactacttcgaaaattcatggggtgtttctcatgaagaattcgttgcttggaacccttctgtcaaagacgattgcagcggcattaaaataggcaactcctattgcgtctcggtgacgtgtaacctgaacgcgaccacctccgagatcaccacgccaactactaagctcaacacgactacaacacagccaacggaatgtcctccgcccttgcctacgcggctaggtctcattcccagctgcactatgtcttataaaccagtcaagggggacacttgcgacaagcttgtcgcgtcgggcactttcacaaaagctctgtttatcaagtggaatccggccttgggaattgatagctgtgctctctctcccggcatgtactattgcattgccgtttgtgatgcactaactattgagcctaccacaactacgactacgcccaccggcactgccaagccatcgcccccctag

SEQ ID NO: 29378 - protein, 209 aa, Muscodor strobelii
  misc_feature: SGI Peptide ID NO. 570089
  misc_feature (28)..(193): NCBI GI: 156037598 Blast Desc: SS1G_12513 [Sclerotinia sclerotiorum 1980] gi|154697921|gb|EDN97659.1| SS1G_12513 [Sclerotinia sclerotiorum 1980]
  misc_feature (9)..(185): NCBI GI: 238842262 Blast Desc: LysM domain-containing protein [Microsporum canis CBS 113480]
  misc_feature (30)..(209): NCBI GI: 116191411 Blast Desc: CHGG_05423 [Chaetomium globosum CBS 148.51] gi|88181336|gb|EAQ88804.1| CHGG_05423 [Chaetomium globosum CBS 148.51]
  misc_feature (54)..(208): NCBI GI: 169610744 Blast Desc: SNOG_08479 [Phaeosphaeria nodorum SN15] gi|111062527|gb|EAT83647.1| SNOG_08479 [Phaeosphaeria nodorum SN15]
  misc_feature (9)..(185): NCBI GI: 238845302 Blast Desc: LysM domain-containing protein [Microsporum canis CBS 113480]
  misc_feature (33)..(209): NCBI GI: 238841622 Blast Desc: LysM domain-containing protein [Microsporum canis CBS 113480]
  misc_feature (6)..(202): NCBI GI: 119494822 Blast Desc: LysM domain protein [Neosartorya fischeri NRRL 181] gi|119412377|gb|EAW22318.1| LysM domain protein [Neosartorya fischeri NRRL 181]
  misc_feature (30)..(185): NCBI GI: 238842262 Blast Desc: LysM domain-containing protein [Microsporum canis CBS 113480]
  misc_feature (6)..(153): NCBI GI: 46133901 Blast Desc: FG09090.1 [Gibberella zeae PH-1]
  misc_feature (64)..(209): NCBI GI: 238845302 Blast Desc: LysM domain-containing protein [Microsporum canis CBS 113480]
MVFSAMATRSATFTIILLLASHVAASFKHQSGPVDSNTEPACSKYDTAYNEINNCDYFENSWGVSHEEFVAWNPSVKDDCSGIKIGNSYCVSVTCNLNATTSEITTPTTKLNTTTTQPTECPPPLPTRLGLIPSCTMSYKPVKGDTCDKLVASGTFTKALFIKWNPALGIDSCALSPGMYYCIAVCDALTIEPTTTTTTPTGTAKPSPP

SEQ ID NO: 29379 - DNA, 752 bp, Muscodor strobelii
  misc_feature: SGI EST ID NO. CUFF.69494.0
  misc_feature: Variant of the nucleotide sequence at SEQ ID NO 29377
cgaaaattcatggggtgtttctcatgaagaattcgttgcttggaacccttctgtcaaagacgattgcagcggcattaaaataggcaactcctattgcgtctcggtgacgtgtaacctgaacgcgaccacctccgagatcaccacgccaactactaagctcaacacgactacaacacagccaacggaatgtcctccgcccttgcctacgcggctaggtctcattcccagctgcactatgtcttataaaccagtcaagggggacacttgcgacaagcttgtcgcgtcgggcactttcacaaaagctctgtttatcaagtggaatccggccttgggaattgatagctgtgctctctctcccggcatgtactattgcattgccgtttgtgatgcactaactattgagcctaccacaactacgactacgcccaccggcactgccaagccatcgcccccctagagtggccccatctctacctgtactagatcttccaaagccgtggaaggtcacataggaatccatgacatagaatcgcagtagtatctatgtacctttagcgatcgttcgtagcttagaaataggatgtatgcaacagctgctttcgcgtaagctattagccaccggtttacgcatcgcagtcgcgttatcttggcaaggatgtttgtttttgttgcaaatgtcattccaggttcggcgacatttcctaatccgcaccacattgttccccacgagaaagtatctcgctccatttttg

SEQ ID NO: 29380 - DNA, 1329 bp, Muscodor strobelii
  misc_feature: SGI cDNA ID NO. 570090
  misc_feature: Encodes the peptide sequence at SEQ ID NO 29381
atgagcactgttccagttcagacgatctgtatcgtcgctgctaaacgcgcggccatgaaacctctcagtcgcctggaagcccttcccatggaggtgaagttcctcatcattgagcatctcgcaaacatggagtccatagtcaacctggctttttcaggtcctgtcatgtacatcctggtggcaaacagcgaacacgtgatcgcggccaagacatttatgtccagcacaggacctttcctccagatagccgatctcgctctgtccttccctctgtcgcctaatcgtgctgaaacgtgtagtgagagcgagatcgttgcacaggcttcgatcatgcatataaacaacgctttccaggagaaggcgtaccactggacttcctacaagaacatcgccattaaagacgtcctagtggtttcccaacttcacacttcccttcgacacttcgcgtgcatcttagctcagaaagcccttaagaaggcaccgaagaagtcgaacgacccgtatctatctaccaacgagttgaatcggttcatcaaggcactctatatcatggaaatcgtttctaaaggatttcccaaagatttctgtcggcttcgtttttccaacgataacgacccggacgcagtctacagacaagcttggctcacactttggacgcattttgctccgtgggaaatgcagcatgtccgtgttgtgctgcagcagctcgtcactcacatacgagaatgcctcattcgtgagctcgacgagtgtaacgaggctgaacaagattctttctatgtcgacacatctcctgataaggtggtcacatttataatgagtcaaggaccgggcgctcttcaaaaattagagtgtcgcaagacattgcttcagacattcgtttcgttcatccaaggcaacaaacgccacctccgagcacacgctcacgaccgtcgacatgatgctctgtggctgaaaccgagcgagtcagatccggacgagttaggtcttctcagtctcaacgcagaacatattctacaaaagtatcccaaagacctcagcgccgccaccatttggtaccagactcttttgatgcctcacatagaagatcatgatttcttctatggcccatatgcaggaccaaggtgcgatctctgtactgaacagtggactccttccatgtgggacatggagcgcctcaacaagaatgagctgattgctctacttcccatcgagaaactgcaagaagctgcaattgaacaggccatcagcgagtctgatcttatccggcgctcggcagcacgcggtcttatctccaaatgtcagggatgtcgttcttatgtcgactaa

SEQ ID NO: 29381 - protein, 442 aa, Muscodor strobelii
  misc_feature: SGI Peptide ID NO. 570090
MSTVPVQTICIVAAKRAAMKPLSRLEALPMEVKFLIIEHLANMESIVNLAFSGPVMYILVANSEHVIAAKTFMSSTGPFLQIADLALSFPLSPNRAETCSESEIVAQASIMHINNAFQEKAYHWTSYKNIAIKDVLVVSQLHTSLRHFACILAQKALKKAPKKSNDPYLSTNELNRFIKALYIMEIVSKGFPKDFCRLRFSNDNDPDAVYRQAWLTLWTHFAPWEMQHVRVVLQQLVTHIRECLIRELDECNEAEQDSFYVDTSPDKVVTFIMSQGPGALQKLECRKTLLQTFVSFIQGNKRHLRAHAHDRRHDALWLKPSESDPDELGLLSLNAEHILQKYPKDLSAATIWYQTLLMPHIEDHDFFYGPYAGPRCDLCTEQWTPSMWDMERLNKNELIALLPIEKLQEAAIEQAISESDLIRRSAARGLISKCQGCRSYVD

SEQ ID NO: 29382 - DNA, 1862 bp, Muscodor strobelii
  misc_feature: SGI EST ID NO. CUFF.69508.0
  misc_feature: Variant of the nucleotide sequence at SEQ ID NO 29380
aaactctgaagtacaagttacattacattcttgcttcgcctaaacaaaaagaccggaacctgtcatcatcttccctgtaccacatagccgcaagtgcatcatccccgccttgcctacttcccttaccttcctgtggtgacgcatgcgagagtgtttccgcgtcacacaaatcagttaatccgtagctctatcgtcaagatgagcactgttccagttcagacgatctgtatcgtcgctgctaaacggtaagtctatgtgccgctattgaagatcaaacccatgctaatcatcgttgtgtttgctgtagcgcggccatgaaacctctcagtcgcctggaagcccttcccatggaggtgaagttcctcatcattgagcatctcgcaaacatggagtccatagtcaacctggctttttcaggtcctgtcatgtacatcctggtggcaaacagcgaacacgtgatcgcggccaagacatttatgtccagcacaggacctttcctccagatagccgatctcgctctgtccttccctctgtcgcctaatcgtgctgaaacgtgtagtgagagcgagatcgttgcacaggcttcgatcatgcatataaacaacgctttccaggagaaggcgtaccactggacttcctacaagaacatcgccattaaagacgtcctagtggtttcccaacttcacacttcccttcgacacttcgcgtgcatcttagctcagaaagcccttaagaaggcaccgaagaagtcgaacgacccgtatctatctaccaacgagttgaatcggttcatcaaggcactctatatcatggaaatcgtttctaaaggatttcccaaagatttctgtcggcttcgtttttccaacgataacgacccggacgcagtctacagacaagcttggctcacactttggacgcattttgctccgtgggaaatgcagcatgtccgtgttgtgctgcagcagctcgtcactcacatacgagaatgcctcattcgtgagctcgacgagtgtaacgaggctgaacaagattctttctatgtcgacacatctcctgataaggtggtcacatttataatgagtcaaggaccgggcgctcttcaaaaattagagtgtcgcaagacattgcttcagacattcgtttcgttcatccaaggcaacaaacgccacctccgagcacacgctcacgaccgtcgacatgatgctctgtggctgaaaccgagcgagtcagatccggacgagttaggtcttctcagtctcaacgcagaacatattctacaaaagtatcccaaagacctcagcgccgccaccatttggtaccagactcttttgatgcctcacatagaagatcatgatttcttctatggcccatatgcaggaccaaggtgcgatctctgtactgaacagtggactccttccatgtgggacatggagcgcctcaacaagaatgagctgattgctctacttcccatcgagaaactgcaagaagctgcaattgaacaggccatcagcgagtctgatcttatccggcgctcggcagcacgcggtcttatctccaaatgtcagggatgtcgttcttatgtcgactaagctcatccaactgtacaaatagtcgcaaacgcaggttttgtacgcttgagatgataatgatcgtctactcagcccttctaaccaaggttgagacgaaaaggaacgacgaatcagacggagacataaatgtcgatcattgaccaatgaacatagtattagtcgattgggatgaatttgatgcggtggttgcattgaggtcgtggcgtggatgtgatgggtttcatacagtggaggtgcccaatcgtatccccagggctaccttctcagctgaac

SEQ ID NO: 29383 - DNA, 1233 bp, Muscodor strobelii
  misc_feature: SGI cDNA ID NO. 570091
  misc_feature: Encodes the peptide sequence at SEQ ID NO 29384
atgccgctaaatagcagcgcgccagtaatatataacacaaactggacaccaccgccttatgattctctaaagcttaacgccaccattcatcccgatatatgtcaaacagcaggcgcctactttgcagacctggtagatccgcaaggtcatgaaagcgatgcaactgcaaaccaagctcgcgtcgcgtatctagcggcgattcttccgtcggacgtagatataccaaataatacgaccttgtctttgtggtgggatatcatatactcggaacagaacgactccgataccagtcaggttttctgggatctacagtatattccttttgattgtcctgccaacaatatctgcacgcagctgcagtggtcgggagatcaggaccttgcaggtcgaggaatattaatctcatactacatagcagcaggcctatcaacaatatacctcgtcattctctcactctgtaacctcaacttccttaccacttcagcaactgggcaaaagccgggttcaatcctatcccgtattacacaatccttccaagaaacagcctcctcgctcctcgactcagcactgatcttcgaaggatcaatgctggcagcgaatctagtacggctcacacactactacctccgcatcaccggcagcaaaatccgggtgaaaggcgactacgacatatatgccctcatcatctcaagctatatgtcgatcttctccgtgtttccagctgtcatcttacaatctgtcgcgattggacaacgaagacactggtttcgtgtactaatctggggtttgagcgctgcgctcgcgatcgttaacgaggtactctttgagcagttcgcgaagtcttggaacaagagcgtggaccaggagaccgaccgatggccgaagacaagggccttcttccgcagatggggcgtcttaattcgactcatcaacgctctggcttgtgccttcgtcatgtggggcatgctgggtatcttcactgcttataggctgcaggttgatgactcggcgggtgagggcaatcagaatgatatttggacgtttggacaggttgttgcgctggcgacctgggtgccggcgattttggagttctttactatttattcccacggcgctgtggatgggttgaataggaagctgtcaacaaggtatacagttgtacctaatgatgagcaggatcgcagctttgagaagttgccgagtgaaaggagccgtatggggagtggttggtga

SEQ ID NO: 29384 - protein, 410 aa, Muscodor strobelii
  misc_feature: SGI Peptide ID NO. 570091
  misc_feature (106)..(397): NCBI GI: 169620914 Blast Desc: SNOG_13662 [Phaeosphaeria nodorum SN15] gi|111057989|gb|EAT79109.1| SNOG_13662 [Phaeosphaeria nodorum SN15]
  misc_feature (263)..(387): NCBI GI: 189206293 Blast Desc: conserved [Pyrenophora tritici-repentis Pt-1C-BFP] gi|187975574|gb|EDU42200.1| conserved [Pyrenophora tritici-repentis Pt-1C-BFP]
MPLNSSAPVIYNTNWTPPPYDSLKLNATIHPDICQTAGAYFADLVDPQGHESDATANQARVAYLAAILPSDVDIPNNTTLSLWWDIIYSEQNDSDTSQVFWDLQYIPFDCPANNICTQLQWSGDQDLAGRGILISYYIAAGLSTIYLVILSLCNLNFLTTSATGQKPGSILSRITQSFQETASSLLDSALIFEGSMLAANLVRLTHYYLRITGSKIRVKGDYDIYALIISSYMSIFSVFPAVILQSVAIGQRRHWFRVLIWGLSAALAIVNEVLFEQFAKSWNKSVDQETDRWPKTRAFFRRWGVLIRLINALACAFVMWGMLGIFTAYRLQVDDSAGEGNQNDIWTFGQVVALATWVPAILEFFTIYSHGAVDGLNRKLSTRYTVVPNDEQDRSFEKLPSERSRMGSGW

SEQ ID NO: 29385 - DNA, 828 bp, Muscodor strobelii
  misc_feature: SGI cDNA ID NO. 570092
  misc_feature: Reduced expression when VOC is produced
  misc_feature: Encodes the peptide sequence at SEQ ID NO 29386
atggcttccaacctcaccgtcaacgtcaagaacatctccgccgagactggcgagcagcaggtcaaggagttcttcagcttctgcggcaagatcaccgacatcagtgtcaccaaggccgccgacggcacgcaagatgccatcgtcacctttgagaaggagacggccgctaagacggcccagctcctgaacaacacccagctcggcacctcccagatctctgtcacctccgccgacggcaagactgacgacggcacccctcataccaccaatgccgaccgtgactcagacgagatcactcaggaggaaaagccccgcagccgcatcctcgccgagtacctggcccacggctacgtcgtcgccgatgccggtctgcagcgcgctctcgagctcgaccagaagcacggcgtctctactcgcttcatgaacaccctcacccagctcgaccagaagtaccacgccaccgaccgcgccaaggccgtcgaccagagctacggcatcaccaaccgcgccaccaccctcttcggtggcttgtcctcgtacttcgagaaggcctccaacactcccacgggccagaagctcgtcaagttctactcggatggctcgcgtcaggtccaggacatccacactgaggcccagcgcctcaaggagttgaagaaggatgagcatggtggaagtgcctacaaggccgctggtctggagcgcgtctttggcaaggagaaggagaagaccgagaccgcacccgccgcaactgaggctacccctgccactggctcgactggcaccaccgaccccagcttcgccgaagtcacatcggagaagaaggcctaa

SEQ ID NO: 29386 - protein, 275 aa, Muscodor strobelii
  misc_feature: SGI Peptide ID NO. 570092
  misc_feature (7)..(74): Pfam Id: PF00076 Pfam Desc: RNA recognition motif. (a.k.a. RRM, RBD, or RNP domain)
  misc_feature (1)..(267): NCBI GI: 46127975 Blast Desc: FG08365.1 [Gibberella zeae PH-1]
  misc_feature (1)..(268): NCBI GI: 256733923 Blast Desc: [Nectria haematococca mpVI 77-13-4]
  misc_feature (1)..(265): NCBI GI: 261360646 Blast Desc: vip1 [Verticillium albo-atrum VaMs.102]
  misc_feature (6)..(263): NCBI GI: 39974819 Blast Desc: MGG_00444 [Magnaporthe grisea 70-15] gi|145018664|gb|EDK02943.1| MGG_00444 [Magnaporthe grisea 70-15]
  misc_feature (6)..(240): NCBI GI: 85097493 Blast Desc: NCU05488 [Neurospora crassa OR74A] gi|28921942|gb|EAA31214.1| NCU05488 [Neurospora crassa OR74A]
  misc_feature (1)..(269): NCBI GI: 156057791 Blast Desc: SS1G_04627 [Sclerotinia sclerotiorum 1980] gi|154702412|gb|EDO02151.1| SS1G_04627 [Sclerotinia sclerotiorum 1980]
  misc_feature (6)..(221): NCBI GI: 154323506 Blast Desc: BC1G_00152 [Botryotinia fuckeliana B05.10] gi|150842381|gb|EDN17574.1| BC1G_00152 [Botryotinia fuckeliana B05.10]
  misc_feature (6)..(238): NCBI GI: 171681644 Blast Desc: protein product [Podospora anserina] gi|170940781|emb|CAP66430.1| protein product [Podospora anserina]
  misc_feature (6)..(238): NCBI GI: 116201989 Blast Desc: CHGG_08879 [Chaetomium globosum CBS 148.51] gi|88177397|gb|EAQ84865.1| CHGG_08879 [Chaetomium globosum CBS 148.51]
  misc_feature (43)..(269): NCBI GI: 154323508 Blast Desc: BC1G_00153 [Botryotinia fuckeliana B05.10] gi|150842382|gb|EDN17575.1| BC1G_00153 [Botryotinia fuckeliana B05.10]
  misc_feature: Useful for introducing or modulating the production of volatile compounds
MASNLTVNVKNISAETGEQQVKEFFSFCGKITDISVTKAADGTQDAIVTFEKETAAKTAQLLNNTQLGTSQISVTSADGKTDDGTPHTTNADRDSDEITQEEKPRSRILAEYLAHGYVVADAGLQRALELDQKHGVSTRFMNTLTQLDQKYHATDRAKAVDQSYGITNRATTLFGGLSSYFEKASNTPTGQKLVKFYSDGSRQVQDIHTEAQRLKELKKDEHGGSAYKAAGLERVFGKEKEKTETAPAATEATPATGSTGTTDPSFAEVTSEKKA

SEQ ID NO: 29387 - DNA, 1434 bp, Muscodor strobelii
  misc_feature: SGI EST ID NO. CUFF.69961.0
  misc_feature: Variant of the nucleotide sequence at SEQ ID NO 29385
cacagctcgagcagcattgaatacaggcaagagcagaccaggctagccagtgtaacacaagttttcctaggtatagctgtccatagcatcagatagaaacccgtgacgcgttttactccgcctctgtcttgtcgcaggcccccagctttttcgtcgtctgcacccagatacataataattcctcaaccttcatcaccttttccgtgaacaacattcaaacatctcagacaactaaactgcatcactgcatcactgcaatccaatcaagatggcttccaacctcaccgtcaacgtcaagaacatctccgccgagactggcgagcagcaggtcaaggagttcttcagcttctgcggcaagatcaccgacatcagtgtcaccaaggccgccgacggcacgcaagatgccatcgtcacctttgagaaggagacggccgctaagacggcccagctcctgaacaacacccagctcggcacctcccagatctctgtcacctccgccgacggcaagactgacgacggcacccctcataccaccaatgccgaccgtgactcagacgagatcactcaggaggaaaagccccgcagccgcatcctcgccgagtacctggcccacggctacgtcgtcgccgatgccggtctgcagcgcgctctcgagctcgaccagaagcacggcgtctctactcgcttcatgaacaccctcacccagctcgaccagaagtaccacgccaccgaccgcgccaaggccgtcgaccagagctacggcatcaccaaccgcgccaccaccctcttcggtggcttgtcctcgtacttcgagaaggcctccaacactcccacgggccagaagctcgtcaagttctactcggatggctcgcgtcaggtccaggacatccacactgaggcccagcgcctcaaggagttgaagaaggatgagcatggtggaagtgcctacaaggccgctggtctggagcgcgtctttggcaaggagaaggagaagaccgagaccggtatgtgcaccttattatttgactatcggtgagcttgcctgcatttactaaccattgatctacagcacccgccgcaactgaggctacccctgccactggctcgactggcaccaccgaccccagcttcgccgaagtcacatcggagaagaaggcctaattgtgtaagaagttaggaaagtttggaggtgtgatgagtctacgaaagattacgacatagctgctctacttctttcctgtattgtttctactctttgattccgtcaagtacgttatgcaggcgtatggatgataggttgttcaagccaatgagaattttaattatgagatcatctgagcattatttgtgtctgtttgaatgtgtgcatggtggccgtgacatgagcccttgctgtaacaaggtctggatttcaataaaaatggagatacttcg

SEQ ID NO: 29388 - DNA, 228 bp, Muscodor strobelii
  misc_feature: SGI cDNA ID NO. 570093
  misc_feature: Reduced expression when VOC is produced
  misc_feature: Encodes the peptide sequence at SEQ ID NO 29389
atgtcttccgcatccaacgaaggccgccagtcccctcctcccgaggcccagtccggcaagcagctgcacgacgctcccgcctccggccagggcaccgacaaggccgacaacaaggaccagaccaatgcaaaccagctcaagaacctcacatccaaccccgccggccccatggacgcccacctggaggagaagttcggcaagaaagatgagctgaagaaggagacgtga

SEQ ID NO: 29389 - protein, 75 aa, Muscodor strobelii
  misc_feature: SGI Peptide ID NO. 570093
  misc_feature (10)..(71): NCBI GI: 171681646 Blast Desc: protein product [Podospora anserina] gi|170940782|emb|CAP66431.1| protein product [Podospora anserina]
  misc_feature (4)..(67): NCBI GI: 39974821 Blast Desc: [Magnaporthe grisea 70-15] gi|145018665|gb|EDK02944.1| [Magnaporthe grisea 70-15]
  misc_feature (10)..(67): NCBI GI: 116201987 Blast Desc: CHGG_08878 [Chaetomium globosum CBS 148.51] gi|88177396|gb|EAQ84864.1| CHGG_08878 [Chaetomium globosum CBS 148.51]
  misc_feature (10)..(67): NCBI GI: 85097501 Blast Desc: NCU05490 [Neurospora crassa OR74A] gi|28921944|gb|EAA31216.1| [Neurospora crassa OR74A]
  misc_feature (7)..(67): NCBI GI: 46127977 Blast Desc: FG08366.1 [Gibberella zeae PH-1]
  misc_feature (7)..(67): NCBI GI: 156057789 Blast Desc: SS1G_04626 [Sclerotinia sclerotiorum 1980] gi|154702411|gb|EDO02150.1| SS1G_04626 [Sclerotinia sclerotiorum 1980]
  misc_feature: Useful for introducing or modulating the production of volatile compounds
MSSASNEGRQSPPPEAQSGKQLHDAPASGQGTDKADNKDQTNANQLKNLTSNPAGPMDAHLEEKFGKKDELKKET

SEQ ID NO: 29390 - DNA, 1071 bp, Muscodor strobelii
  misc_feature: SGI EST ID NO. CUFF.69530.0
  misc_feature: Variant of the nucleotide sequence at SEQ ID NO 29388
ctctagtaaggcgcatgtttgtaggtaagcagccgcaatcgctggagagctatgacgcaactggtatataattcccgccgtacctgaacgtgagctccaattgacttcagacattcatcttcacttacgaacaacttcatttctcgccattctgcaagagatagcagaggaataatctcctgtaccaactgtcaatctccaagtaccaacaacaccacaaccatccacaatgtcttccgcatccaacgaaggccgccagtcccctcctcccgaggcccagtccggcaagcagctgcacgacgctcccgcctccggccagggcaccgacaaggccgacaacaaggaccagaccaatgcaaaccagctcaagaacctcacatccaaccccgccggccccatggacgcccacctggaggagaagttcggcaagaaagatgagctgaagaaggagacgtgagcacgagaggggaatgctgtgttgtaatgagagacgatgaccatgccaggagacccaccttcaccctttgccgacgaggctacccgagaaatggcttcatagatgttatgacggaatgaaattaatcatataatgtcaccatattcatgtgtttgcgaaacaatgatggttaatcgctgaggacgaaatatttgtcgctcccctaactaaaccgaagaccgcgctctgtccaccaaccactggtagctgaaaccatccacttctacatgctacaagatattctggtagaaccgtcgagaaacgtattgacatcaagcattattttttctctatataaaaaactatgtctgctacctgcaaaacctcctacagctgagtggctaataatcgaattgcaggtacattcaatctgcgcgcaatcacatgcagatagaatgtgtcgccacaaacgctcttgaagactattcgcaattctcggggctgagaagatgggagatgtcgagaataggctagcgcggccggatagcttaatggaactcggcgagcaggtctaggctacaggataaactgtcgaaagacaaaagatcatgattagaataattggcatacaacag

SEQ ID NO: 29391 - DNA, 1326 bp, Muscodor strobelii
  misc_feature: SGI cDNA ID NO. 570094
  misc_feature: Encodes the peptide sequence at SEQ ID NO 29392
atgcctgaccttaattctatgcctcccaccaatggctctggccatgctgccagtactgccagtactgccgtccgtcgtgtctcgtcgagccaccactcgcagcagcagcagcagccaaacgcgcctcacgcccgctccgaatctccctcgctcaacatcctcccctccaaccagcaggctttccacgacgccagcggcaacgccctgccttcgcctcttctccctaccaccgctgccatggcccctccacctgccccaggtcaggacaacacaggcgtcggagccggtcccggtcctctgcgccatccgcgtcccttgactgctgccgagctgcactctgaacttgagcaggaacaggagctgcttgtcaaccgtctcactcgcgatctggctatgttgcgaatggcccagaactcgtccgtcgtttccaatgcctcctcgacgagcgcctccaactcggtcgttgaccagctccacccttcttccttcaccgacacccacattctctcgggacccggctatcccgtgccgaccactcgcagacatcacaggacgagctccagtgccagcagccgcagcttcagccacatcgccagccagggctcttctgcaccgatcccgatccctcagtcggggcactctggaaatgccgcctccgtcctcgaggctgcccgcaaccctcgcggcccgacgtcgatgagcagacagaacagcaccacctcgcataggagcacgagtcgcaaccgctctcctcatccctaccacggcaccggctcgggctacttaccctcgccacacctgcccacccacgccttgccccacgagtacgcacctggctacttccaccgtggccgtacttcgtcaaacgctagtatcgccgccacccccggctccgagctgtcacctggcctgatgcccgccaccttacgctacgaagagactgcccactaccgtcaggagctggaggtggccaagcgcgagaacgagaccctcaagaagcgagtcaaggagctcgagaagatgctccgcgaccaacgcagcgacacgcccagcgacactacgagcgtcggcaggggaagaagcaccagcaatagcacggccacgagcttcagtgtcactggcaccaccggcgttggtggcaacatgggtggcggcaccggcattgcgggaggccgaagggatgagcgcagaggtatggaacgcacgcagagcgctatgagtgttgcgggtagcgtgggcgttggtgtcccgcttgatgaagtcaaggtcggcgagagtgcttccagtgccggtgtcagacaggagagcggatcagcgcagccttga

SEQ ID NO: 29392 - protein, 441 aa, Muscodor strobelii
  misc_feature: SGI Peptide ID NO. 570094
  misc_feature (1)..(432): NCBI GI: 46127979 Blast Desc: FG08367.1 [Gibberella zeae PH-1]
  misc_feature (1)..(434): NCBI GI: 171681648 Blast Desc: protein product [Podospora anserina] gi|170940783|emb|CAP66432.1| protein product [Podospora anserina]
  misc_feature (50)..(432): NCBI GI: 85097505 Blast Desc: NCU05491 [Neurospora crassa OR74A] gi|28921945|gb|EAA31217.1| NCU05491 [Neurospora crassa OR74A]
  misc_feature (41)..(433): NCBI GI: 154323510 Blast Desc: BC1G_00154 [Botryotinia fuckeliana B05.10] gi|150842383|gb|EDN17576.1| BC1G_00154 [Botryotinia fuckeliana B05.10]
  misc_feature (2)..(433): NCBI GI: 156057787 Blast Desc: SS1G_04625 [Sclerotinia sclerotiorum 1980] gi|154702410|gb|EDO02149.1| SS1G_04625 [Sclerotinia sclerotiorum 1980]
  misc_feature (1)..(329): NCBI GI: 116201985 Blast Desc: CHGG_08877 [Chaetomium globosum CBS 148.51] gi|88177395|gb|EAQ84863.1| CHGG_08877 [Chaetomium globosum CBS 148.51]
  misc_feature (1)..(264): NCBI GI: 261360592 Blast Desc: conserved [Verticillium albo-atrum VaMs.102]
  misc_feature (70)..(346): NCBI GI: 226288620 Blast Desc: [Paracoccidioides brasiliensis Pb18]
  misc_feature (70)..(346): NCBI GI: 225681482 Blast Desc: [Paracoccidioides brasiliensis Pb03]
  misc_feature (79)..(344): NCBI GI: 239615089 Blast Desc: [Ajellomyces dermatitidis ER-3]
MPDLNSMPPTNGSGHAASTASTAVRRVSSSHHSQQQQQPNAPHARSESPSLNILPSNQQAFHDASGNALPSPLLPTTAAMAPPPAPGQDNTGVGAGPGPLRHPRPLTAAELHSELEQEQELLVNRLTRDLAMLRMAQNSSVVSNASSTSASNSVVDQLHPSSFTDTHILSGPGYPVPTTRRHHRTSSSASSRSFSHIASQGSSAPIPIPQSGHSGNAASVLEAARNPRGPTSMSRQNSTTSHRSTSRNRSPHPYHGTGSGYLPSPHLPTHALPHEYAPGYFHRGRTSSNASIAATPGSELSPGLMPATLRYEETAHYRQELEVAKRENETLKKRVKELEKMLRDQRSDTPSDTTSVGRGRSTSNSTATSFSVTGTTGVGGNMGGGTGIAGGRRDERRGMERTQSAMSVAGSVGVGVPLDEVKVGESASSAGVRQESGSAQP

SEQ ID NO: 29393 - DNA, 2540 bp, Muscodor strobelii
  misc_feature: SGI EST ID NO. CUFF.69774.0
  misc_feature: Variant of the nucleotide sequence at SEQ ID NO 29391
tagcaattgccggagcttttagagcgggaagatccactgagcggaaatgactttattgaggctgatgaggggcagctgtggcgtgagttgatggctggtggaaagaacccccaccgttcccgcgcattgacgaccccttattagttcatctccgcccagagattcccccgcagtatcgttgagctgatactgtgacggatgcccgtcaagcgactcataaccagcctaacagatagcggccactcaacgcgtcctgggtccccgatgtgagcaatacgacacgtctgatatcagtcgcagcgtctcgtgttgcatcgacgtgtgtttgcgtctgcctgccaacactttctcattctcagttccgaccaaacagcttgttcttattattagccctgactgtttcatgcgcattggcgatcatcgttctcgtcactctcctccctcgcctcgtttgccgcttctaattcgactaattcgaccgtttcccctcgcattctcctcagcactgcattcctcttcgacctgtgcacttgttgttgtcagcctcgccaacgcaatggcctgagtgattcttcagcgagcatttgtctgacatcgagtgtaacactcgatttctgcatctccatttgcctggctgtttaacgatttgacgacgttgcacgacctaaagacaacgcacattcgcctctctctttccctctattacagcttctctacaaccatgcctgaccttaattctatgcctcccaccaatggctctggccatgctgccagtactgccagtactgccgtccgtcgtgtctcgtcgagccaccactcgcagcagcagcagcagccaaacgcgcctcacgcccgctccgaatctccctcgctcaacatcctcccctccaaccagcaggctttccacgacgccagcggcaacgccctgccttcgcctcttctccctaccaccgctgccatggcccctccacctgccccaggtcaggacaacacaggcgtcggagccggtcccggtcctctgcgccatccgcgtcccttgactgctgccgagctgcactctgaacttgagcaggaacaggagctgcttgtcaaccgtctcactcgcgatctggctatgttgcgaatggcccagaactcgtccgtcgtttccaatgcctcctcgacgagcgcctccaactcggtcgttgaccagctccacccttcttccttcaccgacacccacattctctcgggacccggctatcccgtgccgaccactcgcagacatcacaggacgagctccagtgccagcagccgcagcttcagccacatcgccagccagggctcttctgcaccgatcccgatccctcagtcggggcactctggaaatgccgcctccgtcctcgaggctgcccgcaaccctcgcggcccgacgtcgatgagcagacagaacagcaccacctcgcataggagcacgagtcgcaaccgctctcctcatccctaccacggcaccggctcgggctacttaccctcgccacacctgcccacccacgccttgccccacgagtacgcacctggctacttccaccgtggccgtacttcgtcaaacgctagtatcgccgccacccccggctccgagctgtcacctggcctgatgcccgccaccttacgctacgaagagactgcccactaccgtcaggagctggaggtggccaagcgcgagaacgagaccctcaagaagcgagtcaaggagctcgagaagatgctccgcgaccaacgcagcgacacgcccagcgacactacgagcgtcggcaggggaagaagcaccagcaatagcacggccacgagcttcagtgtcactggcaccaccggcgttggtggcaacatgggtggcggcaccggcattgcgggaggccgaagggatgagcgcagaggtatggaacgcacgcagagcgctatgagtgttgcgggtagcgtgggcgttggtgtcccgcttgatgaagtcaaggtcggcgagagtgcttccagtgccggtgtcagacaggagagcggatcagcgcagccttgaagtttcacattacgcgatgggttcttgaactgttagagtgagacgcaagaacgacctgagggggggtgacctagatatcggcaacgaggtatgccgacacgagtacggacgtttgcaaactatgcttaatcccttgtgatgcggcatctctctgtggtggaataactgggagctgaaatattcgcttacgaccacgaagcaaacaagatgctacaaatgatggtcgtgtctgtgaaacgcctggcagcgatacttgatctctagtctcggttcggtgtgtcagccacaataggatttgatacgagaccgacgagggaacacaggcaaggaaacagacatcatattacgaagaccatgaataaatgatcgattagacgagttgatagttgtctagcatagcagctcatgttaagagaatcgaggagattcgagaacacatcttgatagatatgagatcatatgtaatagagtgatgagtcaattgatcgtaaac

SEQ ID NO: 29394 - DNA, 1425 bp, Muscodor strobelii
  misc_feature: SGI cDNA ID NO. 570095
  misc_feature: Encodes the peptide sequence at SEQ ID NO 29395
atggctaccgagtcgagcgatggagaatcctccgagaagaccaccagaacggcgggcttcgttcgccatctcacttggacaccctcttggctaaggtgggatcccgatggcgatcatgagttgacttgggggatgaatgtgctgtttgggttgacaagtgcattaaccgtcgcaaatctctactatacgcacccaatcctcaacgttttggcagatgacttcgaagtctcgtacgaacgagcagctctcataccctcgctgacacaagctgggtatgcgatcgggctgttcttcatcatacctttaggcgatatccttaggcgacgccatttggtcttgagtctaatcttcatcacttctatcatctggctaggaagcaccctcacaacatccttttccgcctttctcgccctctcattcataaccggtatcctaaccgtaacgcctcaactaatgttcccactcgtcgtaacctatgcggcgccagcccgccgcgcaacaatgacctctgtaattatgtcaggcgtcgtcttcgggatcctcgtcgcgcgtctcctttccggtgtcatcacacaatacaccagttggcgcatcgtttactacctagcctttggattgcagctcgctctattctctgccttattcctgtgcatgaaggattaccccatcgccagacctggaacgagttatcctgcgttgttgaggaagatcgtctgtctgccgttcaggaaagctgaattgctacagatgagcttgattgcattcttggtcatgggcatgttcaccagtttctggacgacgcttacgttccaactcgcggatgtctttcacctttcgacacttgtcattgggttgttcgcattgatcggaattgcgcccgtgattttgaacccgatcgtttcgagagtcctgacgagtaggattcatacccatggtactctgcttatctctctactctttaccgaagctgtgattttggttggtacatttgtcggagctttcagtctggcgggtccggtgctttgggcgttcttgggtgatctgggtatgaataccgtggttgtcggcacgaggatggcgatcgctggtacggacccgagcgcgcagaatgcggtgaatgctgtttatatggtgtttacctttgctgggcagttatttggcactctggtggggaatgttttatatgcgaggggaggttggatctggagcggtgcattgaatattactcaactggggcttgcggtgctgttgttaattgcaagggggccacacgagaaaggctgggttggctggaggggtgggtggaatttgaggaagcaaagtgagacacctggagctggcgcgagggtggaggatcgcgagaaaggaaatgtaggaggcgacgaaagcacgggagaatctggcaaggatggcacggagaattga

SEQ ID NO: 29395 - protein, 474 aa, Muscodor strobelii
  misc_feature: SGI Peptide ID NO. 570095
  misc_feature (49)..(388): Pfam Id: PF07690 Pfam Desc: Major Facilitator Superfamily
  misc_feature (4)..(472): NCBI GI: 242799714 Blast Desc: conserved [Talaromyces stipitatus ATCC 10500] gi|218716782|gb|EED16203.1| conserved [Talaromyces stipitatus ATCC 10500]
  misc_feature (11)..(442): NCBI GI: 115443228 Blast Desc: [Aspergillus terreus NIH2624] gi|114188290|gb|EAU29990.1| [Aspergillus terreus NIH2624]
  misc_feature (4)..(439): NCBI GI: 255941074 Blast Desc: Pc16g09960 [Penicillium chrysogenum Wisconsin 54-1255] gi|211585929|emb|CAP93666.1| Pc16g09960 [Penicillium chrysogenum Wisconsin 54-1255]
  misc_feature (3)..(467): NCBI GI: 259488015 Blast Desc: TPA: conserved [Aspergillus nidulans FGSC A4]
  misc_feature (24)..(455): NCBI GI: 212541090 Blast Desc: conserved [Penicillium marneffei ATCC 18224] gi|210067999|gb|EEA22091.1| conserved [Penicillium marneffei ATCC 18224]
  misc_feature (3)..(467): NCBI GI: 67524243 Blast Desc: AN2579.2 [Aspergillus nidulans FGSC A4] gi|40745528|gb|EAA64684.1| AN2579.2 [Aspergillus nidulans FGSC A4]
  misc_feature (2)..(455): NCBI GI: 46125965 Blast Desc: FG07360.1 [Gibberella zeae PH-1]
  misc_feature (4)..(456): NCBI GI: 256732642 Blast Desc: NECHADRAFT_100067 [Nectria haematococca mpVI 77-13-4]
  misc_feature (12)..(470): NCBI GI: 171676778 Blast Desc: protein product [Podospora anserina] gi|170936456|emb|CAP61113.1| protein product [Podospora anserina]
  misc_feature (53)..(470): NCBI GI: 164424366 Blast Desc: NCU07343 [Neurospora crassa OR74A] gi|157070483|gb|EAA33265.2| conserved [Neurospora crassa OR74A]
MATESSDGESSEKTTRTAGFVRHLTWTPSWLRWDPDGDHELTWGMNVLFGLTSALTVANLYYTHPILNVLADDFEVSYERAALIPSLTQAGYAIGLFFIIPLGDILRRRHLVLSLIFITSIIWLGSTLTTSFSAFLALSFITGILTVTPQLMFPLVVTYAAPARRATMTSVIMSGVVFGILVARLLSGVITQYTSWRIVYYLAFGLQLALFSALFLCMKDYPIARPGTSYPALLRKIVCLPFRKAELLQMSLIAFLVMGMFTSFWTTLTFQLADVFHLSTLVIGLFALIGIAPVILNPIVSRVLTSRIHTHGTLLISLLFTEAVILVGTFVGAFSLAGPVLWAFLGDLGMNTVVVGTRMAIAGTDPSAQNAVNAVYMVFTFAGQLFGTLVGNVLYARGGWIWSGALNITQLGLAVLLLIARGPHEKGWVGWRGGWNLRKQSETPGAGARVEDREKGNVGGDESTGESGKDGTEN

SEQ ID NO: 29396 - DNA, 1763 bp, Muscodor strobelii
  misc_feature: SGI EST ID NO. CUFF.69542.0
  misc_feature: Variant of the nucleotide sequence at SEQ ID NO 29394
cgcctttctccccattgagagcctcacttttttgtttgttcttggaaatggcttttcggacttaagtaacgtccattcgtctcctatactgccttccacgtttgtcgtttttgatatcatcaatgtattgatttgactataaaggccccttctccagcatcccaggagacactttgcttggcaacgtcggtcttcgagacggccaacagatacttgcgaaatggctaccgagtcgagcgatggagaatcctccgagaagaccaccagaacggcgggcttcgttcgccatctcacttggacaccctcttggctaaggtgggatcccgatggcgatcatgagttgacttgggggatgaatgtgctgtttgggttgacaagtgcattaaccgtcgcaaatctctactatacgcacccaatcctcaacgttttggcagatgacttcgaagtctcgtacgaacgagcagctctcataccctcgctgacacaagctgggtatgcgatcgggctgttcttcatcatacctttaggcgatatccttaggcgacgccatttggtcttgagtctaatcttcatcacttctatcatctggctaggaagcaccctcacaacatccttttccgcctttctcgccctctcattcataaccggtatcctaaccgtaacgcctcaactaatgttcccactcgtcgtaacctatgcggcgccagcccgccgcgcaacaatgacctctgtaattatgtcaggcgtcgtcttcgggatcctcgtcgcgcgtctcctttccggtgtcatcacacaatacaccagttggcgcatcgtttactacctagcctttggattgcagctcgctctattctctgccttattcctgtgcatgaaggattaccccatcgccagacctggaacgagttatcctgcgttgttgaggaagatcgtctgtctgccgttcaggaaagctgaattgctacagatgagcttgattgcattcttggtcatgggcatgttcaccagtttctggacgacgcttacgttccaactcgcggatgtctttcacctttcgacacttgtcattgggttgttcgcattgatcggaattgcgcccgtgattttgaacccgatcgtttcgagagtcctgacgagtaggattcatacccatggtactctgcttatctctctactctttaccgaagctgtgattttggttggtacatttgtcggagctttcagtctggcgggtccggtgctttgggcgttcttgggtgatctgggtatgaataccgtggttgtcggcacgaggatggcgatcgctggtacggacccgagcgcgcagaatgcggtgaatgctgtttatatggtgtttacctttgctgggcagttatttggcactctggtggggaatgttttatatgcgaggggaggttggatctggagcggtgcattgaatattactcaactggggcttgcggtgctgttgttaattgcaagggggccacacgagaaaggctgggttggctggaggggtgggtggaatttgaggaagcaaagtgagacacctggagctggcgcgagggtggaggatcgcgagaaaggaaatgtaggaggcgacgaaagcacgggagaatctggcaaggatggcacggagaattgacgataaccccacgagcgtggtagtaagagaatgaaatgaatatttcactactaaaatcttgaatcctcacacatgacgctgttaagcattcccagtgtagtcaagaatactatctttc

SEQ ID NO: 29397 - DNA, 1467 bp, Muscodor strobelii
  misc_feature: SGI cDNA ID NO. 570096
  misc_feature: Encodes the peptide sequence at SEQ ID NO 29398
atggacaagttcctacgcgccggagagcccaacggccatcctgattttgcgttcaaagcgatcaatgaggctctcggatgcccgccactcatgctcatggaccttcgcccaattggaccggccatggtcattgtgagaagccatgaagtagctgagcagattactaaaacgcagaaattgtttccttatagcattcccaagatgcctgatgacccaatggtgcaccttactggtcgctcttctatcttgatcacggaaggggaagggtggaaacaaatgcgcaaacgtttcggcgcaggcttcgcacaccaacatctcatgacactacttccgcagattgtcgaaaaatcatttacgttacttggcaatctcgacaaatttgccgagactggcaatactttctcactagtggacctagctagcagactgactttcgatatcatcaccagtgtcgcgatggatgtcgatttccattctcaaaacctcgatcaggagcaacatgagttcgtcgaagcctatcatgagcttttcgagacgtatgccactgcagaaatggatctgcctacttacctcacgcctttcctcgaacggaagcgcaaagaacttgcgaagcagatcaggagcaagcttgcatcgattgtacagaacgcatcagataccaataccaagtcgcggagcattctatctctggctcttcaagatgaacctcgtgcaatgacacctcaagctattgaagaagcgtgtgatcaattgggtacatttaccttcgccgggcacgatacgaccagcgtggtgctctcgtggctgttctacgaactatcacgcacacctcgtgctttacagactgtgcgcgaggaactcaacggcctttttggcagtgaccctgatcccgccgccctccgagacaaattactatcgccggaaggtaaggtctgtctaagtaacatgaagtacatctcggcagcgatcaaagaaaccctgcgactctggtctcccgcaggcacagcccgatacatgcagctaggctcaaacttcaatgtcactacatccgatggtacgtataatcttgatggtgtgatgatatacaactgccacactctcattcagcgcgaccctgaagtctatggagacactgcaaattacttcgtgcctgaacgctggctgaagggtgacgacaatattccaacttcagcttggcggcctttcgagaggggtccgcggaactgtataggccaggagctcgcagatatcgaggcgcggattgttgtcgcgcctgttgcgaggcggtatgattttatcaaggtcggacttggcgaatttgagcttgatggaactagcaaccctgtgttagacgagaaatgccgctataaagtgatgtctgagatgtatccgacgcgaaaagttacaccgaaaccagtagagggaatgatgatgaaagtgaagctcagaggccagtctttagattag

SEQ ID NO: 29398 - protein, 488 aa, Muscodor strobelii
  misc_feature: SGI Peptide ID NO. 570096
  misc_feature (10)..(458): Pfam Id: PF00067 Pfam Desc: Cytochrome P450
  misc_feature (250)..(329): Pfam Id: PF00067 Pfam Desc: Cytochrome P450
  misc_feature (358)..(432): Pfam Id: PF00067 Pfam Desc: Cytochrome P450
  misc_feature (13)..(464): NCBI GI: 256724246 Blast Desc: NECHADRAFT_97703 [Nectria haematococca mpVI 77-13-4]
  misc_feature (8)..(479): NCBI GI: 116200542 Blast Desc: CHGG_10816 [Chaetomium globosum CBS 148.51] gi|88175530|gb|EAQ82998.1| CHGG_10816 [Chaetomium globosum CBS 148.51]
  misc_feature (1)..(482): NCBI GI: 115401374 Blast Desc: [Aspergillus terreus NIH2624] gi|114190216|gb|EAU31916.1| [Aspergillus terreus NIH2624]
  misc_feature (15)..(482): NCBI GI: 145239211 Blast Desc: An08g01340 [Aspergillus niger] gi|134076756|emb|CAK39815.1| protein product [Aspergillus niger]
  misc_feature (1)..(463): NCBI GI: 159128346 Blast Desc: cytochrome P450 monooxygenase, [Aspergillus fumigatus A1163]
  misc_feature (1)..(463): NCBI GI: 146323181 Blast Desc: cytochrome P450 monooxygenase [Aspergillus fumigatus Af293] gi|129556505|gb|EAL86483.2| cytochrome P450 monooxygenase, [Aspergillus fumigatus Af293]
  misc_feature (42)..(482): NCBI GI: 119473955 Blast Desc: Cytochrome P450 oxidoreductase, [Neosartorya fischeri NRRL 181] gi|119407006|gb|EAW16956.1| Cytochrome P450 oxidoreductase, [Neosartorya fischeri NRRL 181]
  misc_feature (15)..(483): NCBI GI: 261356973 Blast Desc: cytochrome P450 52A11 [Verticillium albo-atrum VaMs.102]
  misc_feature (1)..(482): NCBI GI: 255941984 Blast Desc: Pc16g14640 [Penicillium chrysogenum Wisconsin 54-1255] gi|211586384|emb|CAP94134.1| Pc16g14640 [Penicillium chrysogenum Wisconsin 54-1255]
  misc_feature (21)..(481): NCBI GI: 242827237 Blast Desc: cytochrome P450 monooxygenase, [Talaromyces stipitatus ATCC 10500] gi|218712047|gb|EED11475.1| cytochrome P450 monooxygenase, [Talaromyces stipitatus ATCC 10500]
  misc_feature (79)..(432): SWISSPROT Homolog: EC 1.14.13.97 Taurochenodeoxycholate 6-alpha-hydroxylase
  misc_feature (79)..(432): SWISSPROT Homolog: EC 1.14.13.67 Quinine 3-monooxygenase
  misc_feature (79)..(432): SWISSPROT Homolog: EC 1.14.13.32 Albendazole monooxygenase
MDKFLRAGEPNGHPDFAFKAINEALGCPPLMLMDLRPIGPAMVIVRSHEVAEQITKTQKLFPYSIPKMPDDPMVHLTGRSSILITEGEGWKQMRKRFGAGFAHQHLMTLLPQIVEKSFTLLGNLDKFAETGNTFSLVDLASRLTFDIITSVAMDVDFHSQNLDQEQHEFVEAYHELFETYATAEMDLPTYLTPFLERKRKELAKQIRSKLASIVQNASDTNTKSRSILSLALQDEPRAMTPQAIEEACDQLGTFTFAGHDTTSVVLSWLFYELSRTPRALQTVREELNGLFGSDPDPAALRDKLLSPEGKVCLSNMKYISAAIKETLRLWSPAGTARYMQLGSNFNVTTSDGTYNLDGVMIYNCHTLIQRDPEVYGDTANYFVPERWLKGDDNIPTSAWRPFERGPRNCIGQELADIEARIVVAPVARRYDFIKVGLGEFELDGTSNPVLDEKCRYKVMSEMYPTRKVTPKPVEGMMMKVKLRGQSLD

SEQ ID NO: 29399 - DNA, 569 bp, Muscodor strobelii
  misc_feature: SGI EST ID NO. CUFF.69551.0
  misc_feature: Variant of the nucleotide sequence at SEQ ID NO 29397
gcctatcatgagcttttcgagacgtatgccactgcagaaatggatctgcctacttacctcacgcctttcctcgaacggaagcgcaaagaacttgcgaagcagatcaggagcaagcttgcatcgattgtacagaacgcatcagataccaataccaagtcgcggagcattctatctctggctcttcaagatgaacctcgtgcaatgacacctcaagctattgaagaagcgtgtgatcaattgggtacatttaccttcgccgggcacgatacgaccagcgtggtgctctcgtggctgttctacgaactatcacgcacacctcgtgctttacagactgtgcgcgaggaactcaacggcctttttggcagtgaccctgatcccgccgccctccgagacaaattactatcgccggaaggtaaggtctgtctaagtaacatgaagtacatctcggcagcgatcaaagaaaccctgcgactctggtctcccgcaggcacagcccgatacatgcagctaggctcaaacttcaatgtcactacatccgatggtacgtataatcttgatggtgtgatgat

SEQ ID NO: 29400 - DNA, 1605 bp, Muscodor strobelii
  misc_feature: SGI cDNA ID NO. 570097
  misc_feature: Encodes the peptide sequence at SEQ ID NO 29401
atgccattggcattgatatttggcgccgccgtggtgctcctacttcatctgtatacaaagcttcgctataaaaggctccagcaatatgcacacttgcctcaaatgccgacatcacttgctctgggtcacttgtcaataatggacaagttcctacgcgccggagagcccaacggccatcctgattttgcgttcaaagcgatcaatgaggctctcggatgcccgccactcatgctcatggaccttcgcccaattggaccggccatggtcattgtgagaagccatgaagtagctgagcagattactaaaacgcagaaattgtttccttatagcattcccaagatgcctgatgacccaatggtgcaccttactggtcgctcttctatcttgatcacggaaggggaagggtggaaacaaatgcgcaaacgtttcggcgcaggcttcgcacaccaacatctcatgacactacttccgcagattgtcgaaaaatcatttacgttacttggcaatctcgacaaatttgccgagactggcaatactttctcactagtggacctagctagcagactgactttcgatatcatcaccagtgtcgcgatggatgtcgatttccattctcaaaacctcgatcaggagcaacatgagttcgtcgaagcctatcatgagcttttcgagacgtatgccactgcagaaatggatctgcctacttacctcacgcctttcctcgaacggaagcgcaaagaacttgcgaagcagatcaggagcaagcttgcatcgattgtacagaacgcatcagataccaataccaagtcgcggagcattctatctctggctcttcaagatgaacctcgtgcaatgacacctcaagctattgaagaagcgtgtgatcaattgggtacatttaccttcgccgggcacgatacgaccagcgtggtgctctcgtggctgttctacgaactatcacgcacacctcgtgctttacagactgtgcgcgaggaactcaacggcctttttggcagtgaccctgatcccgccgccctccgagacaaattactatcgccggaaggtaaggtctgtctaagtaacatgaagtacatctcggcagcgatcaaagaaaccctgcgactctggtctcccgcaggcacagcccgatacatgcagctaggctcaaacttcaatgtcactacatccgatggtacgtataatcttgatggtgtgatgatatacaactgccacactctcattcagcgcgaccctgaagtctatggagacactgcaaattacttcgtgcctgaacgctggctgaagggtgacgacaatattccaacttcagcttggcggcctttcgagaggggtccgcggaactgtataggccaggagctcgcagatatcgaggcgcggattgttgtcgcgcctgttgcgaggcggtatgattttatcaaggtcggacttggcgaatttgagcttgatggaactagcaaccctgtgttagacgagaaatgccgctataaagtgatgtctgagatgtatccgacgcgaaaagttacaccgaaaccagtagagggaatgatgatgaaagtgaagctcagaggccagtctttagattag

SEQ ID NO: 29401 - protein, 534 aa, Muscodor strobelii
  misc_feature: SGI Peptide ID NO. 570097
  misc_feature (36)..(504): Pfam Id: PF00067 Pfam Desc: Cytochrome P450
  misc_feature (296)..(375): Pfam Id: PF00067 Pfam Desc: Cytochrome P450
  misc_feature (404)..(478): Pfam Id: PF00067 Pfam Desc: Cytochrome P450
  misc_feature (5)..(510): NCBI GI: 256724246 Blast Desc: NECHADRAFT_97703 [Nectria haematococca mpVI 77-13-4]
  misc_feature (1)..(528): NCBI GI: 115401374 Blast Desc: [Aspergillus terreus NIH2624] gi|114190216|gb|EAU31916.1| [Aspergillus terreus NIH2624]
  misc_feature (16)..(528): NCBI GI: 145239211 Blast Desc: An08g01340 [Aspergillus niger] gi|134076756|emb|CAK39815.1| protein product [Aspergillus niger]
  misc_feature (16)..(525): NCBI GI: 116200542 Blast Desc: CHGG_10816 [Chaetomium globosum CBS 148.51] gi|88175530|gb|EAQ82998.1| CHGG_10816 [Chaetomium globosum CBS 148.51]
  misc_feature (1)..(528): NCBI GI: 255941984 Blast Desc: Pc16g14640 [Penicillium chrysogenum Wisconsin 54-1255] gi|211586384|emb|CAP94134.1| Pc16g14640 [Penicillium chrysogenum Wisconsin 54-1255]
  misc_feature (9)..(529): NCBI GI: 261356973 Blast Desc: cytochrome P450 52A11 [Verticillium albo-atrum VaMs.102]
  misc_feature (12)..(509): NCBI GI: 159128346 Blast Desc: cytochrome P450 monooxygenase, [Aspergillus fumigatus A1163]
  misc_feature (12)..(509): NCBI GI: 146323181 Blast Desc: cytochrome P450 monooxygenase [Aspergillus fumigatus Af293] gi|129556505|gb|EAL86483.2| cytochrome P450 monooxygenase, [Aspergillus fumigatus Af293]
  misc_feature (88)..(528): NCBI GI: 119473955 Blast Desc: Cytochrome P450 oxidoreductase, [Neosartorya fischeri NRRL 181] gi|119407006|gb|EAW16956.1| Cytochrome P450 oxidoreductase, [Neosartorya fischeri NRRL 181]
  misc_feature (3)..(528): NCBI GI: 39957517 Blast Desc: MGG_09179 [Magnaporthe grisea 70-15] gi|145013386|gb|EDJ98027.1| MGG_09179 [Magnaporthe grisea 70-15]
  misc_feature (125)..(478): SWISSPROT Homolog: EC 1.14.13.97 Taurochenodeoxycholate 6-alpha-hydroxylase
  misc_feature (125)..(478): SWISSPROT Homolog: EC 1.14.13.67 Quinine 3-monooxygenase
  misc_feature (125)..(478): SWISSPROT Homolog: EC 1.14.13.32 Albendazole monooxygenase
MPLALIFGAAVVLLLHLYTKLRYKRLQQYAHLPQMPTSLALGHLSIMDKFLRAGEPNGHPDFAFKAINEALGCPPLMLMDLRPIGPAMVIVRSHEVAEQITKTQKLFPYSIPKMPDDPMVHLTGRSSILITEGEGWKQMRKRFGAGFAHQHLMTLLPQIVEKSFTLLGNLDKFAETGNTFSLVDLASRLTFDIITSVAMDVDFHSQNLDQEQHEFVEAYHELFETYATAEMDLPTYLTPFLERKRKELAKQIRSKLASIVQNASDTNTKSRSILSLALQDEPRAMTPQAIEEACDQLGTFTFAGHDTTSVVLSWLFYELSRTPRALQTVREELNGLFGSDPDPAALRDKLLSPEGKVCLSNMKYISAAIKETLRLWSPAGTARYMQLGSNFNVTTSDGTYNLDGVMIYNCHTLIQRDPEVYGDTANYFVPERWLKGDDNIPTSAWRPFERGPRNCIGQELADIEARIVVAPVARRYDFIKVGLGEFELDGTSNPVLDEKCRYKVMSEMYPTRKVTPKPVEGMMMKVKLRGQSLD

SEQ ID NO: 29402 - DNA, 569 bp, Muscodor strobelii; identical to SEQ ID NO: 29399
  misc_feature: SGI EST ID NO. CUFF.69551.0
  misc_feature: Variant of the nucleotide sequence at SEQ ID NO 29400

SEQ ID NO: 29403 - DNA, 324 bp, Muscodor strobelii
  misc_feature: SGI cDNA ID NO. 570098
  misc_feature: Encodes the peptide sequence at SEQ ID NO 29404
atgctcagcatgctctttgtctcacgctccgcctctcgccgacagagagtgtcggaccttgaggctcaacagcggaaccttgagggatcgcgtattgcctcgttgtttgcactcgtggccctggtcctcgccgccgatcagcccataatgttccttacctccatcatctcggtctcgattgatcttctacgcactatcggtcccgacggtgtcttcgtcacaagcagcaacactgaaggcagaacgtcaagtctccttattcacgatctctggccaagtcttcaatgtccacgacggcaagcgcagaggcatcagtctctttga

SEQ ID NO: 29404 - protein, 107 aa, Muscodor strobelii
  misc_feature: SGI Peptide ID NO. 570098
MLSMLFVSRSASRRQRVSDLEAQQRNLEGSRIASLFALVALVLAADQPIMFLTSIISVSIDLLRTIGPDGVFVTSSNTEGRTSSLLIHDLWPSLQCPRRQAQRHQSL

SEQ ID NO: 29405 - DNA, 1437 bp, Muscodor strobelii
  misc_feature: SGI cDNA ID NO. 570099
  misc_feature: Encodes the peptide sequence at SEQ ID NO 29406
atggacgcagcaggggatatgccatttatcctatccacaggcaagccggataagaaatcggatgtatccgaacgcaaactcatccgacgacatgtgatgatcgggaagaaccgtggtaaagtctttccaaacagaaagaagcctagcaagattccagacaccgaacaatcagttggaagtgtagagaccaggaagctgtatatccatcctcgagcggtggcctgcgagtctcctcgtagagtcggcggcgagctgtcgtgtgtggcgttgggagatagcgtcgacacatctgttgtagagactgtaatacaattcactaactttgccaagactgcaatgtttccacttgagccctgcatcaacttccccaaaaaggacgtgacttggctcgagccgatgctaagagatgctgctcatctacatacgatgatattcactactcatagcttcttcgacatgattcgatttgacatgcagaagcccgttgaccagtctggctccccgcactatgccaaggcaatgaaacttctgcgggagaggatcgcaggagaaaacaccgacgacatactaaagaagtctacgctgtcgatcatcatatctctagcaatgcacgctttgctacaaggcgaacacgaagctgctcattaccatgtcttaggcctcaagcgcattgtcgaactacgtgggggcttgcgaccactggtattgcattcgcccaatctgctgatggaacttctgagaacggatatcgcattagcggtccatgctgatagaagccctgtattcttccaagacgcattccgagatccaccttggccgtatccaagagaagtgttgacagaggggcctatcgaggacttcgctcaatcgtcttcttcaacctggtccggctcgcgatttgttggcttagactctgaggttacaagagcgtggagggctcttgaagtattctcgtcccaactgaacaatgcgctgaagacaaaaacgaagctttcgaaagaaatattactcgagatcatcgtttcaagcatgtaccgtcttattgcgatgaaattccctctaggaagcctgagcgagatgatgcgacaagcccttttagcgtacggatatgccactttcattcactggtcaaaccacatacggcctgtaggaggtacgtcgtatcccgaaacctatcgacaatgcatcattcgattcgagcaagccggcggttcaccccgcatcatattatgggcgttgatgataggaataaatgcaatatttacagatgaggacatggagtggctagatccaatgttgcgaagtcacattgacctgtatggacggggcacacttgcaggaacgaagatctcactgcatgggttcatgtgggttgacttcttacacgatagaagcgtaaggcgtgtatttgcgcaactatatcccgatactatatag

SEQ ID NO: 29406 - protein, 478 aa, Muscodor strobelii
  misc_feature: SGI Peptide ID NO. 570099
  misc_feature (4)..(477): NCBI GI: 212529582 Blast Desc: conserved [Penicillium marneffei ATCC 18224] gi|210074346|gb|EEA28433.1| conserved [Penicillium marneffei ATCC 18224]
  misc_feature (3)..(476): NCBI GI: 145256372 Blast Desc: An19g00360 [Aspergillus niger CBS 513.88] gi|134084771|emb|CAK47359.1| protein product [Aspergillus niger]
  misc_feature (81)..(463): NCBI GI: 145240003 Blast Desc: An08g05310 [Aspergillus niger] gi|134077162|emb|CAK45503.1| protein product [Aspergillus niger]
  misc_feature (3)..(473): NCBI GI: 256730301 Blast Desc: NECHADRAFT_45111 [Nectria haematococca mpVI 77-13-4]
  misc_feature (15)..(470): NCBI GI: 256727322 Blast Desc: NECHADRAFT_76080 [Nectria haematococca mpVI 77-13-4]
  misc_feature (1)..(470): NCBI GI: 239611353 Blast Desc: conserved [Ajellomyces dermatitidis ER-3]
  misc_feature (1)..(470): NCBI GI: 261205392 Blast Desc: conserved [Ajellomyces dermatitidis SLH14081] gi|239592492|gb|EEQ75073.1| conserved [Ajellomyces dermatitidis SLH14081]
  misc_feature (19)..(462): NCBI GI: 171688826 Blast Desc: protein product [Podospora anserina] gi|170944375|emb|CAP70485.1| protein product [Podospora anserina]
  misc_feature (8)..(470): NCBI GI: 119479299 Blast Desc: NFIA_077140 [Neosartorya fischeri NRRL 181] gi|119407832|gb|EAW17781.1| NFIA_077140 [Neosartorya fischeri NRRL 181]
  misc_feature (9)..(463): NCBI GI: 256734956 Blast Desc: NECHADRAFT_75734 [Nectria haematococca mpVI 77-13-4]
MDAAGDMPFILSTGKPDKKSDVSERKLIRRHVMIGKNRGKVFPNRKKPSKIPDTEQSVGSVETRKLYIHPRAVACESPRRVGGELSCVALGDSVDTSVVETVIQFTNFAKTAMFPLEPCINFPKKDVTWLEPMLRDAAHLHTMIFTTHSFFDMIRFDMQKPVDQSGSPHYAKAMKLLRERIAGENTDDILKKSTLSIIISLAMHALLQGEHEAAHYHVLGLKRIVELRGGLRPLVLHSPNLLMELLRTDIALAVHADRSPVFFQDAFRDPPWPYPREVLTEGPIEDFAQSSSSTWSGSRFVGLDSEVTRAWRALEVFSSQLNNALKTKTKLSKEILLEIIVSSMYRLIAMKFPLGSLSEMMRQALLAYGYATFIHWSNHIRPVGGTSYPETYRQCIIRFEQAGGSPRIILWALMIGINAIFTDEDMEWLDPMLRSHIDLYGRGTLAGTKISLHGFMWVDFLHDRSVRRVFAQLYPDTI

SEQ ID NO: 29407 - DNA, 581 bp, Muscodor strobelii
  misc_feature: SGI EST ID NO. CUFF.69564.0
  misc_feature: Variant of the nucleotide sequence at SEQ ID NO 29405
ccagtcactaactttgccaagactgcaatgtttccacttgagccctgcatcaacttccccaaaaaggacgtgacttggctcgagccgatgctaagagatgctgctcatctacatacgatgatattcactactcatagcttcttcgacatgattcgatttgacatgcagaagcccgttgaccagtctggctccccgcactatgccaaggcaatgaaacttctgcgggagaggatcgcaggagaaaacaccgacgacatactaaagaagtctacgctgtcgatcatcatatctctagcaatgcacgctttgctacaaggcgaacacgaagctgctcattaccatgtcttaggcctcaagcgcattgtcgaactacgtgggggcttgcgaccactggtattgcattcgcccaatctgctgatggaacttctgagaacggatatcgcattagcggtccatgctgatagaagccctgtattcttccaagacgcattccgagatccaccttggccgtatccaagagaagtgttgacagaggggcctatcgaggacttcgctcaatcgtcttcttcaacctggtccgg

SEQ ID NO: 29408 - DNA, 1440 bp, Muscodor strobelii
  misc_feature: SGI cDNA ID NO. 570100
  misc_feature: Encodes the peptide sequence at SEQ ID NO 29409
atgctctctgcctcaggggatatgccatttatcctatccacaggcaagccggataagaaatcggatgtatccgaacgcaaactcatccgacgacatgtgatgatcgggaagaaccgtggtaaagtctttccaaacagaaagaagcctagcaagattccagacaccgaacaatcagttggaagtgtagagaccaggaagctgtatatccatcctcgagcggtggcctgcgagtctcctcgtagagtcggcggcgagctgtcgtgtgtggcgttgggagatagcgtcgacacatctgttgtagagactgtaatacaattcactaactttgccaagactgcaatgtttccacttgagccctgcatcaacttccccaaaaaggacgtgacttggctcgagccgatgctaagagatgctgctcatctacatacgatgatattcactactcatagcttcttcgacatgattcgatttgacatgcagaagcccgttgaccagtctggctccccgcactatgccaaggcaatgaaacttctgcgggagaggatcgcaggagaaaacaccgacgacatactaaagaagtctacgctgtcgatcatcatatctctagcaatgcacgctttgctacaaggcgaacacgaagctgctcattaccatgtcttaggcctcaagcgcattgtcgaactacgtgggggcttgcgaccactggtattgcattcgcccaatctgctgatggaacttctgagaacggatatcgcattagcggtccatgctgatagaagccctgtattcttccaagacgcattccgagatccaccttggccgtatccaagagaagtgttgacagaggggcctatcgaggacttcgctcaatcgtcttcttcaacctggtccggctcgcgatttgttggcttagactctgaggttacaagagcgtggagggctcttgaagtattctcgtcccaactgaacaatgcgctgaagacaaaaacgaagctttcgaaagaaatattactcgagatcatcgtttcaagcatgtaccgtcttattgcgatgaaattccctctaggaagcctgagcgagatgatgcgacaagcccttttagcgtacggatatgccactttcattcactggtcaaaccacatacggcctgtaggaggtacgtcgtatcccgaaacctatcgacaatgcatcattcgattcgagcaagccggcggttcaccccgcatcatattatgggcgttgatgataggaataaatgcaatatttacagatgaggacatggagtggctagatccaatgttgcgaagtcacattgacctgtatggacggggcacacttgcaggaacgaagatctcactgcatgggttcatgtgggttgacttcttacacgatagaagcgtaaggcgtgtatttgcgcaactatatcccgatactatatag

SEQ ID NO: 29409 - protein, 479 aa, Muscodor strobelii
  misc_feature: SGI Peptide ID NO. 570100
  misc_feature (5)..(478): NCBI GI: 212529582 Blast Desc: conserved [Penicillium marneffei ATCC 18224] gi|210074346|gb|EEA28433.1| conserved [Penicillium marneffei ATCC 18224]
  misc_feature (4)..(477): NCBI GI: 145256372 Blast Desc: An19g00360 [Aspergillus niger CBS 513.88] gi|134084771|emb|CAK47359.1| protein product [Aspergillus niger]
  misc_feature (82)..(464): NCBI GI: 145240003 Blast Desc: An08g05310 [Aspergillus niger] gi|134077162|emb|CAK45503.1| protein product [Aspergillus niger]
  misc_feature (3)..(474): NCBI GI: 256730301 Blast Desc: NECHADRAFT_45111 [Nectria haematococca mpVI 77-13-4]
  misc_feature (16)..(471): NCBI GI: 256727322 Blast Desc: NECHADRAFT_76080 [Nectria haematococca mpVI 77-13-4]
  misc_feature (8)..(471): NCBI GI: 239611353 Blast Desc: conserved [Ajellomyces dermatitidis ER-3]
  misc_feature (8)..(471): NCBI GI: 261205392 Blast Desc: conserved [Ajellomyces dermatitidis SLH14081] gi|239592492|gb|EEQ75073.1| conserved [Ajellomyces dermatitidis SLH14081]
  misc_feature (20)..(463): NCBI GI: 171688826 Blast Desc: protein product [Podospora anserina] gi|170944375|emb|CAP70485.1| protein product [Podospora anserina]
  misc_feature (9)..(471): NCBI GI: 119479299 Blast Desc: NFIA_077140 [Neosartorya fischeri NRRL 181] gi|119407832|gb|EAW17781.1| NFIA_077140 [Neosartorya fischeri NRRL 181]
  misc_feature (4)..(248): NCBI GI: 238505797 Blast Desc: conserved [Aspergillus flavus NRRL3357] gi|220690217|gb|EED46567.1| conserved [Aspergillus flavus NRRL3357]
MLSASGDMPFILSTGKPDKKSDVSERKLIRRHVMIGKNRGKVFPNRKKPSKIPDTEQSVGSVETRKLYIHPRAVACESPRRVGGELSCVALGDSVDTSVVETVIQFTNFAKTAMFPLEPCINFPKKDVTWLEPMLRDAAHLHTMIFTTHSFFDMIRFDMQKPVDQSGSPHYAKAMKLLRERIAGENTDDILKKSTLSIIISLAMHALLQGEHEAAHYHVLGLKRIVELRGGLRPLVLHSPNLLMELLRTDIALAVHADRSPVFFQDAFRDPPWPYPREVLTEGPIEDFAQSSSSTWSGSRFVGLDSEVTRAWRALEVFSSQLNNALKTKTKLSKEILLEIIVSSMYRLIAMKFPLGSLSEMMRQALLAYGYATFIHWSNHIRPVGGTSYPETYRQCIIRFEQAGGSPRIILWALMIGINAIFTDEDMEWLDPMLRSHIDLYGRGTLAGTKISLHGFMWVDFLHDRSVRRVFAQLYPDTI

SEQ ID NO: 29410 - DNA, 581 bp, Muscodor strobelii; identical to SEQ ID NO: 29407
  misc_feature: SGI EST ID NO. CUFF.69564.0
  misc_feature: Variant of the nucleotide sequence at SEQ ID NO 29408

SEQ ID NO: 29411 - DNA, 417 bp, Muscodor strobelii
  misc_feature: SGI cDNA ID NO. 570101
  misc_feature: Reduced expression when VOC is produced
  misc_feature: Encodes the peptide sequence at SEQ ID NO 29412
atgatcaccggcatacatcacgtcaacctcgtcgtcccacctaacacgttggaggacgcagttgcgttctacggggaaacactcggtctcaaagagcgggcggtgcctgagcttcagaaaggcacgctcaaatggttcgacatcggaacgtcaggtcaacaaattcacatcgcgtttggaaagccagaagacttttcgttcgactctgcaaggcacccatgcttccggcttggcgacggcgaacagctgctagagatgcggcgtcgcatctttgaacacctacaacgcggaggggtgggagctcccaaggctgccgacaagccaggggaagaaaatagtggtgagaagggcaaagaataccctcagcgtttcttcgctagagattacgccggaaacagactcgagtttacgttgtga

SEQ ID NO: 29412 - protein, 138 aa, Muscodor strobelii
  misc_feature: SGI Peptide ID NO. 570101
  misc_feature (4)..(52): Pfam Id: PF00903 Pfam Desc: Glyoxalase/Bleomycin resistance protein/Dioxygenase superfamily
  misc_feature (1)..(138): NCBI GI: 169598083 Blast Desc: SNOG_01840 [Phaeosphaeria nodorum SN15] gi|111070369|gb|EAT91489.1| SNOG_01840 [Phaeosphaeria nodorum SN15]
  misc_feature (1)..(138): NCBI GI: 242779831 Blast Desc: ubiE/COQ5 methyltransferase, [Talaromyces stipitatus ATCC 10500] gi|218719615|gb|EED19034.1| ubiE/COQ5 methyltransferase, [Talaromyces stipitatus ATCC 10500]
  misc_feature (1)..(138): NCBI GI: 212526024 Blast Desc: glyoxalase family protein, [Penicillium marneffei ATCC 18224] gi|210072567|gb|EEA26654.1| glyoxalase family protein, [Penicillium marneffei ATCC 18224]
  misc_feature (1)..(138): NCBI GI: 255935607 Blast Desc: Pc13g03940 [Penicillium chrysogenum Wisconsin 54-1255] gi|211583450|emb|CAP91463.1| Pc13g03940 [Penicillium chrysogenum Wisconsin 54-1255]
  misc_feature (1)..(138): NCBI GI: 67901586 Blast Desc: AN7780.2 [Aspergillus nidulans FGSC A4] gi|40742378|gb|EAA61568.1| AN7780.2 [Aspergillus nidulans FGSC A4] gi|259484132|tpe|CBF80091.1| TPA: glyoxalase family protein,
  misc_feature (1)..(138): NCBI GI: 145242008 Blast Desc: An09g03330 [Aspergillus niger] gi|134078193|emb|CAK40273.1| protein product [Aspergillus niger]
  misc_feature (8)..(138): NCBI GI: 164426953 Blast Desc: NCU11253 [Neurospora crassa OR74A] gi|157071545|gb|EDO65262.1| conserved [Neurospora crassa OR74A]
  misc_feature (1)..(138): NCBI GI: 121706352 Blast Desc: glyoxalase family protein, [Aspergillus clavatus NRRL 1] gi|119399585|gb|EAW10013.1| glyoxalase family protein, [Aspergillus clavatus NRRL 1]
  misc_feature (1)..(138): NCBI GI: 169777171 Blast Desc: [Aspergillus oryzae RIB40] gi|238494288|ref|XP_002378380.1| glyoxalase family protein, [Aspergillus flavus NRRL3357] gi|83771788|dbj|BAE61918.1| protein
  misc_feature (1)..(138): NCBI GI: 70998793 Blast Desc: glyoxalase family protein [Aspergillus fumigatus Af293] gi|66851755|gb|EAL92080.1| glyoxalase family protein, [Aspergillus fumigatus Af293] gi|159127136|gb|EDP52251.1| family
  misc_feature: Useful for introducing or modulating the production of volatile compounds
MITGIHHVNLVVPPNTLEDAVAFYGETLGLKERAVPELQKGTLKWFDIGTSGQQIHIAFGKPEDFSFDSARHPCFRLGDGEQLLEMRRRIFEHLQRGGVGAPKAADKPGEENSGEKGKEYPQRFFARDYAGNRLEFTL

SEQ ID NO: 29413 - DNA, 1228 bp, Muscodor strobelii
  misc_feature: SGI EST ID NO. CUFF.69572.0
  misc_feature: Variant of the nucleotide sequence at SEQ ID NO 29411
gctgaagcctcatttcagcctcagatatgacgacgggtcgcttgactaaagagctggtcagcataagaactcgttcgccgatgcgcaaacttggagtaatttcgaaagaggcgatttccgccggaagatgcttctgccgactacctggttccgatctcgtctccccacttcgcgaatcgtgttgcgtagccaacccttaaatttaaccccgcgatgagttggagagcatcgtgagcgccgtttctcggatctcaacattgccagattcaacaatcagattatttgactactacttcacagacacgacacgcaaagatgatcaccggcatacatcacgtcaacctcgtcgtcccacctaacacgttggaggacgcagttgcgttctacggggaaacactcggtctcaaagagcgggcggtgcctgagcttcagaaaggcacgctcaaatggttcgacatcggaacgtcaggtcaacaaattcacatcgcgtttggaaagccagaagacttttcgttcgactctgcaaggcacccatgcttccggcttggcgacggcgaacagctgctagagatgcggcgtcgcatctttgaacacctacaacgcggaggggtgggagctcccaaggctgccgacaagccaggggaagaaaatagtggtgagaagggcaaagaataccctcagcgtttcttcgctagagattacgccggaaacagactcgagtttacgttgtgatcgatataagaggtccagtgaacactaccatgcaacgcacgggatggattactgaagaggcgaacgtgctgcgacattatgggatcatccttgcagcagggttacagaagaggagcataagcggcccgagaacagtgaaattggctaccgccttttgcggacgaagcccaatggaatcatcatgcgtgacgcgagttcactgtgataattcggatttcatgattggctcttcaacggagatggttatgacagggcatagagcgatgctgacatatacctaaaaggtacatcgctcacgtcgctcacgtatgactatatccaattcaacacgatattcgaaataaagatgccattcggtttgatgttaccgtagtcttcggtcttgttgattgccaaactacttgaagtaagcttggttccgcacatatgatgaactaagttcaacctagtaagtagtcttttccaaggactctcatgagtaaatatagtatgtcgc

SEQ ID NO: 29414 - DNA, 453 bp, Muscodor strobelii
  misc_feature: SGI cDNA ID NO. 570102
  misc_feature: Encodes the peptide sequence at SEQ ID NO 29415
atgtcgagctttacagcgatcaacagtccggcatccatgaagccagatgcctgggctagcacagatgccgttctcttccttgcgggagccaggccggtatcctctagcccgaaaaaaaggagcaacacagcccaagagaaagccaaggccgaccgcttgttaccattgggtaactccccggaagacctagaggcctgccccggtacgcctgcgaagacaatctgccgccagtcacgcgatggcgtttatgttgccaaggacccaatcagcttcaactccttcaagtgtgaccactgcatccgccacaagaagagctgcagcttcagcgcttccaatcccggcctcgactacgacgccgaaatcatcaggctgggcctagaggacgaaaagaagaagctccaagccgcggaaaagcgcagacagacgaacgccaaaaggaaagcgcaaccttga

SEQ ID NO: 29415 - protein, 150 aa, Muscodor strobelii
  misc_feature: SGI Peptide ID NO. 570102
MSSFTAINSPASMKPDAWASTDAVLFLAGARPVSSSPKKRSNTAQEKAKADRLLPLGNSPEDLEACPGTPAKTICRQSRDGVYVAKDPISFNSFKCDHCIRHKKSCSFSASNPGLDYDAEIIRLGLEDEKKKLQAAEKRRQTNAKRKAQP

SEQ ID NO: 29416 - DNA, 1410 bp, Muscodor strobelii
  misc_feature: SGI cDNA ID NO. 570103
  misc_feature: Encodes the peptide sequence at SEQ ID NO 29417
atggtgaaagccagccacaaggaattcgagtttgtcatacaggaaccgaatgcgaaactatcgcgagagaatcattccaagatccgacgacatgccacgaaagcggttgttgcagcgcgtcgcaaagacgatccactatacccgctgttgcagcccctgcctctatctgatctcgaattcttgctgagtgactgtgggatgactcacatcgattgctctgctcttgcttcgatacatctaggagatatgtatgctgactttccattgctttggttggacctggctaatgcgccaacggtactacccagcgcggccgggctgcttaagtcagaccctagtcaactgaagtctgttctatcgtgtcggcagcggtcgtacttctccttcataccggctcgcttcggtaaagtcgctgttctcgacgatgctttttgtgctttgattacgcttgcacactctcttgttgcctcgggtcaggcgacgcgtccccaggttgtatttgagcattatgggaaagctctccgtagccttcagtccgcagtcaacgaccccaatagtcgttacgccccagaaacgctatgcgcggttggaatcttagcattgttcgaggtcttgaatccatcaagcatcaagctctggaatcagcacatagatggcgcctcccgcttgatccaagctagaggtccagaccgttttttatcagacttcgatggatcattgttgacaacactaggttctcccatttgcgccaatgctcttcttacgggtcagcaatgtttccttgctactccaccttggcaagagaccctagccagcctgatcaacccagaagagatattcacagagcgctcatcactttcagtgaccaacttaatgttgatgagcaaagtaggcggaatgaagaaagagacaggagatatcatctatgctcatggtcgtggggagccagtgaatactgatgatttagtccgtcgactacgcgagcatcgagcacgagaaataacatggcggcgtgactacaatatggcgctgttacttgccgtggagtcttacatctttcagggagagaaggaattcgacaaacgctatgagttacttgggatgcattatgtcatgcgcatatttgtcaaccggttcctttgttgcctcgtctccaaggactgctcatacctcgaggacgaagtcctcaattctgctgtagagctgaggctattacatgacacattgatgcagcataatagcgctcattaccgtgcaggctggtttctaacacagaaagtgattatcgccaatctagtgtttgcaacacacgacgactatattgaggttgatagagaagacccaatcgcggatgttgcgacgtgggaaaggttcactatgtgccactacgacgacattgtcgggaactga

SEQ ID NO: 29417 - protein, 469 aa, Muscodor strobelii
  misc_feature: SGI Peptide ID NO. 570103
  misc_feature (133)..(362): NCBI GI: 156054402 Blast Desc: SS1G_06049 [Sclerotinia sclerotiorum 1980] gi|154703829|gb|EDO03568.1| SS1G_06049 [Sclerotinia sclerotiorum 1980]
  misc_feature (103)..(248): NCBI GI: 67527863 Blast Desc: AN4181.2 [Aspergillus nidulans FGSC A4] gi|40740090|gb|EAA59280.1| [Aspergillus nidulans FGSC A4] gi|259481220|tpe|CBF74542.1| TPA: conserved [Aspergillus nidulans
  misc_feature (125)..(270): NCBI GI: 238487492 Blast Desc: conserved [Aspergillus flavus NRRL3357] gi|220699863|gb|EED56202.1| conserved [Aspergillus flavus NRRL3357]
  misc_feature (126)..(268): NCBI GI: 242811484 Blast Desc: TSTA_097760 [Talaromyces stipitatus ATCC 10500] gi|218714097|gb|EED13520.1| TSTA_097760 [Talaromyces stipitatus ATCC 10500]
  misc_feature (170)..(274): NCBI GI: 115402561 Blast Desc: [Aspergillus terreus NIH2624] gi|114189203|gb|EAU30903.1| [Aspergillus terreus NIH2624]
  misc_feature (126)..(270): NCBI GI: 115400009 Blast Desc: [Aspergillus terreus NIH2624] gi|114191259|gb|EAU32959.1| [Aspergillus terreus NIH2624]
  misc_feature (128)..(367): NCBI GI: 121705914 Blast Desc: conserved [Aspergillus clavatus NRRL 1] gi|119399366|gb|EAW09794.1| conserved [Aspergillus clavatus NRRL 1]
  misc_feature (108)..(380): NCBI GI: 242779275 Blast Desc: conserved [Talaromyces stipitatus ATCC 10500] gi|218723030|gb|EED22448.1| conserved [Talaromyces stipitatus ATCC 10500]
  misc_feature (170)..(331): NCBI GI: 115387219 Blast Desc: conserved [Aspergillus terreus NIH2624] gi|114195199|gb|EAU36899.1| conserved [Aspergillus terreus NIH2624]
  misc_feature (133)..(297): NCBI GI: 256733256 Blast Desc: NECHADRAFT_38808 [Nectria haematococca mpVI 77-13-4]
MVKASHKEFEFVIQEPNAKLSRENHSKIRRHATKAVVAARRKDDPLYPLLQPLPLSDLEFLLSDCGMTHIDCSALASIHLGDMYADFPLLWLDLANAPTVLPSAAGLLKSDPSQLKSVLSCRQRSYFSFIPARFGKVAVLDDAFCALITLAHSLVASGQATRPQVVFEHYGKALRSLQSAVNDPNSRYAPETLCAVGILALFEVLNPSSIKLWNQHIDGASRLIQARGPDRFLSDFDGSLLTTLGSPICANALLTGQQCFLATPPWQETLASLINPEEIFTERSSLSVTNLMLMSKVGGMKKETGDIIYAHGRGEPVNTDDLVRRLREHRAREITWRRDYNMALLLAVESYIFQGEKEFDKRYELLGMHYVMRIFVNRFLCCLVSKDCSYLEDEVLNSAVELRLLHDTLMQHNSAHYRAGWFLTQKVIIANLVFATHDDYIEVDREDPIADVATWERFTMCHYDDIVGN

SEQ ID NO: 29418 - DNA, 3420 bp, Muscodor strobelii
  misc_feature: SGI EST ID NO. CUFF.69599.0
  misc_feature: Variant of the nucleotide sequence at SEQ ID NO 29416
ttcaaattactcccaagtcttcaacattgcaggatcggtatgtgatcagaccccttctcctttctacgaggaagttagggatatagggttcgcataacaatttaaatatgcgctcgtaagggtgccttactctcttcataatctcgtgctccacgaaggccaacaccaggaacgtacagccagcgggttccacgggccctgctggctgaagtcgatgtttatcaatcacaatcatggtgaaagccagccacaaggaattcgagtttgtcatacaggaaccgaatgcgaaactatcgcgagagaatcattccaagatccgacgacatgccacgaaagcggttgttgcagcgcgtcgcaaagacgatccactatacccgctgttgcagcccctgcctctatctgatctcgaattcttgctgagtgactgtgggatgactcacatcgattgctctgctcttgcttcgatacatctaggagatatgtatgctgactttccattgctttggttggacctggctaatgcgccaacggtactacccagcgcggccgggctgcttaagtcagaccctagtcaactgaagtctgttctatcgtgtcggcagcggtcgtacttctccttcataccggctcgcttcggtaaagtcgctgttctcgacgatgctttttgtgctttgattacgcttgcacactctcttgttgcctcgggtcaggcgacgcgtccccaggttgtatttgagcattatgggaaagctctccgtagccttcagtccgcagtcaacgaccccaatagtcgttacgccccagaaacgctatgcgcggttggaatcttagcattgttcgaggtcttgaatccatcaagcatcaagctctggaatcagcacatagatggcgcctcccgcttgatccaagctagaggtccagaccgttttttatcagacttcgatggatcattgttgacaacactaggttctcccatttgcgccaatgctcttcttacgggtcagcaatgtttccttgctactccaccttggcaagagaccctagccagcctgatcaacccagaagagatattcacagagcgctcatcactttcagtgaccaacttaatgttgatgagcaaagtaggcggaatgaagaaagagacaggagatatcatctatgctcatggtcgtggggagccagtgaatactgatgatttagtccgtcgactacgcgagcatcgagcacgagaaataacatggcggcgtgactacaatatggcgctgttacttgccgtggagtcttacatctttcagggagagaaggaattcgacaaacgctatgagttacttgggatgcattatgtcatgcgcatatttgtcaaccggttcctttgttgcctcgtctccaaggactgctcatacctcgaggacgaagtcctcaattctgctgtagagctgaggctattacatgacacattgatgcagcataatagcgctcattaccgtgcaggctggtttctaacacagaaagtgattatcgccaatctagtgtttgcaacacacgacgactatattgaggttgatagagaagacccaatcgcggatgttgcgacgtgggaaaggttcactatgtggtgcgatataaggggactggcagatcagagctgactagagaaactcatagggtacctcacgtattccgaaactacagatcgcgctacccctatatatcaagctcaagctaagcttgtttagccactacgacgacattgtcgggaactgatctaccccaccagccccaagtaaaggagcccaaccggctctgtcttgaacggacatctcgatactgggtccattggtgttaagatcatccatgtcatccagaatcctgccttgaactagtctgtcgccgacgtcgcctccgaagctgtcgccgtatcggtataatgctgtacctacgactcaatttgcccgtctgctaccactgcaggtctcggaggtcagtctcagaggctcgacagaccgcatttgccgtaaaagaagttggtgatctgccactatggtgatcttcttaggtcgtcccgtattagaggatccatcactcgagacgacagtgataagggagtaggtcggattgatgtaatgctggcatgtcgagcaatggcaaagcgtctagaatggttcagcaatattccctacgatatccaacctatagtcgaattacgtttgttcgacgcaccgttagtttcaccacatcgtccaaagaacctggattacaccatagaggcaacgtcagtcggcatgttctggaaacgttagataactcgattatcaacggaaattgatagcttgactggcggaaggtgatttcggtacattgaagctcaatacggtggacttagagcaaaagacaagcgcagatacatacacatgttccgctagttaccttcactaatttccaaacagggaagagttgtttgtcacaatgtcgcttgaataagaatctgccgaactctggcaattatcggctcttgggcccactgattgtcgatgccatctgtttaggaatctgccctcgaacatgctgacaacagatacatctacttgaatgagtacataagacaactagtgggtcggtacgctgtttcgcagatcgtatctcaagcaaaggacagcgagactaagcaatatcatggacctaagcatgtttagttgattaataggcgactatctcacgtctcaatgtcactcttgcgccacataacccatatatcacataatttggctgtctgcctttgcaagatacaatccgcttgtagacaccgaaccgtcgagacttggaacttgtgtctaacagttgtgctaggcctcggcttgcaattatcatgaaagtgaaagattggggaaagccttctcacaggcgaggtaccgacctgatcttggtgccaaactcgatcaattctaggcttagtgactacaagatcgactgataatcaattgcagtccagttcgcattctggaattcaagtttccgtgtcgatactctcgtagatgggcacataccgaattgggacgggatgattacatccagatgccgatagatcgcctgcgcgacaggaacgtgaccaatgaggaagaagttcagtaatcgcagtgttcaaaatttgaatgcaggtttgtggccgtcagctcaagaatacaaatttgcgagtaaccaagtatataattcggttggtgacctccttcaatggcagtagtagcttgggggtgcctgctctatctttactccgatcagttcttacgacatattacatttctcaaattaatcctcaagactcataatcgacaatggccggtacttggcccgctcccccctcttgggctaccctattcgacaagaatcgcgtttacgcgcaaactaagcacaagccgaagccgc

SEQ ID NO: 29419 - DNA, 573 bp, Muscodor strobelii
  misc_feature: SGI cDNA ID NO. 570104
  misc_feature: Encodes the peptide sequence at SEQ ID NO 29420
atggccggtacttggcccgctcccccctcttgggctaccctattcgacaagaatcgcgtttacgcgcaaactaagcacaagccgaagccgcatctttcggagttacaagatgttggctttgcgccgccaagtgtcttcatcattggctttgtagacccccgagcttctccagagcagtatcttgatcttgaaggaggcgaggcattcgtgacgcgaaacctcggagggcgcttcccgcaaagtatcgaggacctgctcttcgtcgagcagatcaccaaaggacaagccgtcaaagaagtcatcattatacaccacactgattgcgggttaactcgcctgacggaggctgaggtcaaagggaattggaaggcaatgtacccacagcttgcaggtcacatagatgctctccgcgtccctacatacgacggcagttcatttgagaaacaccgagagaccatgctgatggatcttagggcttttaaagcttcgccgctcattcgacaggagctcaaggacaacgttaaaggatacctcctcaacatcaagaccggtgaacttaccgctatgaactag

SEQ ID NO: 29420 - protein, 190 aa, Muscodor strobelii
  misc_feature: SGI Peptide ID NO. 570104
  misc_feature (38)..(190): Pfam Id: PF00484 Pfam Desc: Carbonic anhydrase
  misc_feature (5)..(190): NCBI GI: 242783861 Blast Desc: conserved [Talaromyces stipitatus ATCC 10500] gi|218720418|gb|EED19837.1| conserved [Talaromyces stipitatus ATCC 10500]
  misc_feature (22)..(186): NCBI GI: 242789964 Blast Desc: conserved [Talaromyces stipitatus ATCC 10500] gi|218718058|gb|EED17478.1| conserved [Talaromyces stipitatus ATCC 10500]
  misc_feature (5)..(189): NCBI GI: 212545609 Blast Desc: conserved [Penicillium marneffei ATCC 18224] gi|210064478|gb|EEA18573.1| conserved [Penicillium marneffei ATCC 18224]
  misc_feature (22)..(190): NCBI GI: 115385651 Blast Desc: ATEG_10070 [Aspergillus terreus NIH2624] gi|114187819|gb|EAU29519.1| ATEG_10070 [Aspergillus terreus NIH2624]
  misc_feature (42)..(190): NCBI GI: 256722981 Blast Desc: [Nectria haematococca mpVI 77-13-4]
  misc_feature (42)..(186): NCBI GI: 162449584 Blast Desc: carbonate hydratase [Sorangium cellulosum 'So ce 56'] gi|161160166|emb|CAN91471.1| carbonate hydratase [Sorangium cellulosum 'So ce 56']
  misc_feature (42)..(187): NCBI GI: 46114256 Blast Desc: FG02970.1 [Gibberella zeae PH-1]
  misc_feature (42)..(186): NCBI GI: 256723746 Blast Desc: NECHADRAFT_97324 [Nectria haematococca mpVI 77-13-4]
  misc_feature (42)..(190): NCBI GI: 212527820 Blast Desc: carbonic anhydrase, [Penicillium marneffei ATCC 18224] gi|210073465|gb|EEA27552.1| carbonic anhydrase, [Penicillium marneffei ATCC 18224]
  misc_feature (41)..(184): NCBI GI: 256720674 Blast Desc: NECHADRAFT_85616 [Nectria haematococca mpVI 77-13-4]
  misc_feature (14)..(190): SWISSPROT Homolog: EC 4.2.1.1 Carbonate dehydratase
MAGTWPAPPSWATLFDKNRVYAQTKHKPKPHLSELQDVGFAPPSVFIIGFVDPRASPEQYLDLEGGEAFVTRNLGGRFPQSIEDLLFVEQITKGQAVKEVIIIHHTDCGLTRLTEAEVKGNWKAMYPQLAGHIDALRVPTYDGSSFEKHRETMLMDLRAFKASPLIRQELKDNVKGYLLNIKTGELTAMN

SEQ ID NO: 29421 - DNA, 2051 bp, Muscodor strobelii
  misc_feature: SGI EST ID NO. CUFF.69677.0
  misc_feature: Variant of the nucleotide sequence at SEQ ID NO 29419
cgtcgagcagatcaccaaaggacaagccgtcaaagaagtcatcattatacaccacactgattgcgggttaactcgcctgacggaggctgaggtcaaagggaattggaaggcaatgtacccacagcttgcaggtcacatagatgctctccgcgtccctacatacgacggcagttcatttgagaaacaccgagagaccatgctgatggatcttagggcttttaaagcttcgccgctcattcgacaggagctcaaggacaacgttaaaggatacctcctcaacatcaagaccggtgaacttaccgctatgaactaggcaccgggagtattagtgccgcgttcttacaatcgcatcgcacggacatctgttcagacctgaacgttatttgaacctcggtcaccaagccgcagggaagtggataacgcaaagctgaacggccgactcgcagttactcatagagtatgatattatcagacagtccttaacccaagcaaactctttcattctttcgagccgaggtcgtgcaggcgccccttgaatgcaatgttgaacctttcctctttgagcctgaaagcgtccggaaaccaatcgcgtagctcatcatcatctcggcctcgcatcatctcaactaaactccttgcacacatccagcataacaccattccgtggccttgaaaccccgctgcgatccagagattcttctggccaggcatctcgcccacaaaggggagcccatctgggccgtatcccataatacctgtccattgcttgcgaatgcgctcctcggtctggtcttcgccccaattcctcccgaagtagttcggcaaagtatcgtagagtccttgcatgatgtctgcgtccgcatcagtatcatccgtggtcccatactcacctaacgcatcgttctgagcgttgaccaactgcccaccgatgatgatatcccccgcaaagtctacgcccctcggtcgcggaaccatgtagtcataaccgccttcatagaggaagctgtacgtgtacggtaacccatgtttcggcatattgagtcctggtctctgggctgtaacgtgaccgcgaagcggaatgatgacaccttgaaatttttccaacagatgcgctgtatatccattggtagccatgactaatctgttagcgctgattgcgcccctgggcgtttcgattttccaacgcccgtcgggaagctgctctacgctagtcgcaggggtattcgtctgcaaattaagaccttttgctagacaaagcttcaggactccgatcgtgaacttataggcatgtatacttcctgcttcgtacgagatcccgccactgacaccttcatctcctccgtcgccgcaatagaagcgtgtgcgaacttctccaggtgtatgaatatcgtagatagatgcatcatgaccaggaagagcattttgtagcgccttgacagattcttggtccgtttcccagagcttcgatccgtatatgatgtctaccgtcgtgcacgggttgctctcacaatctataccatgctcctttgcgaatgcatgcacagcgcgaatattggcgagctcgagacgcgctatcttggcagcttccattgtaccgtgttctcgctgatgatgcacaaatgatcgatatgaagccgctttcgtatgcccgcctgtgagacggcattagctttgagggtagtaagatgaggagtgagcgtggcaccattccgtccagttgcgccagagcttgcctgacgcgcctcgagcatgacgatatcctgagaaacgtcattttcaagcagattcaatgcgattcctgcacccgttattccactaccaatgatgacacaatttgcttcaatgggtagtgatgctgttgaccgtaagtctgctatgtcctcgggatcttgctgccagtagctgatggtagggttgtctctaggcagagtaacaggtatcgcaacgcgttcttccattgctccgctgcagcagcaaaaacaggcaagaaaactagctcaaggaacaagggaaaaaagcagaggtgatatattatcggcgcagatgtcgac

SEQ ID NO: 29422 - DNA, 1407 bp, Muscodor strobelii
  misc_feature: SGI cDNA ID NO. 570105
  misc_feature: Encodes the peptide sequence at SEQ ID NO 29423
atggaagaacgcgttgcgatacctgttactctgcctagagacaaccctaccatcagctactggcagcaagatcccgaggacatagcagacttacggtcaacagcatcactacccattgaagcaaattgtgtcatcattggtagtggaataacgggtgcaggaatcgcattgaatctgcttgaaaatgacgtttctcaggatatcgtcatgctcgaggcgcgtcaggcaagctctggcgcaactggacggaatggcgggcatacgaaagcggcttcatatcgatcatttgtgcatcatcagcgagaacacggtacaatggaagctgccaagatagcgcgtctcgagctcgccaatattcgcgctgtgcatgcattcgcaaaggagcatggtatagattgtgagagcaacccgtgcacgacggtagacatcatatacggatcgaagctctgggaaacggaccaagaatctgtcaaggcgctacaaaatgctcttcctggtcatgatgcatctatctacgatattcatacacctggagaagttcgcacacgcttctattgcggcgacggaggagatgaaggtgtcagtggcgggatctcgtacgaagcaggaagtatacatgcctataagttcacgatcggagtcctgaagctttgtctagcaaaaggtcttaatttgcagacgaatacccctgcgactagcgtagagcagcttcccgacgggcgttggaaaatcgaaacgcccaggggcgcaatcagcgctaacagattagtcatggctaccaatggatatacagcgcatctgttggaaaaatttcaaggtgtcatcattccgcttcgcggtcacgttacagcccagagaccaggactcaatatgccgaaacatgggttaccgtacacgtacagcttcctctatgaaggcggttatgactacatggttccgcgaccgaggggcgtagactttgcgggggatatcatcatcggtgggcagttggtcaacgctcagaacgatgcgttaggtgagtatgggaccacggatgatactgatgcggacgcagacatcatgcaaggactctacgatactttgccgaactacttcgggaggaattggggcgaagaccagaccgaggagcgcattcgcaagcaatggacaggtattatgggatacggcccagatgggctcccctttgtgggcgagatgcctggccagaagaatctctggatcgcagcggggtttcaaggccacggaatggtgttatgctggatgtgtgcaaggagtttagttgagatgatgcgaggccgagatgatgatgagctacgcgattggtttccggacgctttcaggctcaaagaggaaaggttcaacattgcattcaaggggcgcctgcacgacctcggctcgaaagaatga

SEQ ID NO: 29423 - protein, 468 aa, Muscodor strobelii
  misc_feature: SGI Peptide ID NO. 570105
  misc_feature (42)..(429): Pfam Id: PF01266 Pfam Desc: FAD dependent oxidoreductase
  misc_feature (1)..(462): NCBI GI: 85097540 Blast Desc: NCU05500 [Neurospora crassa OR74A] gi|28921954|gb|EAA31226.1| [Neurospora crassa OR74A]
  misc_feature (1)..(468): NCBI GI: 119183997 Blast Desc: CIMG_06865 [Coccidioides immitis RS]
  misc_feature (1)..(468): NCBI GI: 240109762 Blast Desc: FAD dependent oxidoreductase family protein [Coccidioides posadasii C735 delta SOWgp]
  misc_feature (1)..(449): NCBI GI: 225558255 Blast Desc: conserved [Ajellomyces capsulatus G186AR]
  misc_feature (1)..(461): NCBI GI: 171681816 Blast Desc: protein product [Podospora anserina] gi|170940867|emb|CAP66517.1| protein product [Podospora anserina]
  misc_feature (1)..(453): NCBI GI: 225679524 Blast Desc: conserved [Paracoccidioides brasiliensis Pb03]
  misc_feature (1)..(415): NCBI GI: 258570595 Blast Desc: conserved [Uncinocarpus reesii 1704] gi|237904371|gb|EEP78772.1| conserved [Uncinocarpus reesii 1704]
  misc_feature (1)..(415): NCBI GI: 238838687 Blast Desc: conserved [Microsporum canis CBS 113480]
  misc_feature (1)..(448): NCBI GI: 261201662 Blast Desc: FAD dependent oxidoreductase [Ajellomyces dermatitidis SLH14081] gi|239590142|gb|EEQ72723.1| FAD dependent oxidoreductase [Ajellomyces dermatitidis SLH14081]
  misc_feature (1)..(448): NCBI GI: 239611855 Blast Desc: FAD dependent oxidoreductase [Ajellomyces dermatitidis ER-3]
  misc_feature (203)..(417): SWISSPROT Homolog: EC 1.5.99.2 Dimethylglycine dehydrogenase
MEERVAIPVTLPRDNPTISYWQQDPEDIADLRSTASLPIEANCVIIGSGITGAGIALNLLENDVSQDIVMLEARQASSGATGRNGGHTKAASYRSFVHHQREHGTMEAAKIARLELANIRAVHAFAKEHGIDCESNPCTTVDIIYGSKLWETDQESVKALQNALPGHDASIYDIHTPGEVRTRFYCGDGGDEGVSGGISYEAGSIHAYKFTIGVLKLCLAKGLNLQTNTPATSVEQLPDGRWKIETPRGAISANRLVMATNGYTAHLLEKFQGVIIPLRGHVTAQRPGLNMPKHGLPYTYSFLYEGGYDYMVPRPRGVDFAGDIIIGGQLVNAQNDALGEYGTTDDTDADADIMQGLYDTLPNYFGRNWGEDQTEERIRKQWTGIMGYGPDGLPFVGEMPGQKNLWIAAGFQGHGMVLCWMCARSLVEMMRGRDDDELRDWFPDAFRLKEERFNIAFKGRLHDLGSKE

SEQ ID NO: 29424 - DNA, 2043 bp, Muscodor strobelii
  misc_feature: SGI EST ID NO. CUFF.69678.1
  misc_feature: Variant of the nucleotide sequence at SEQ ID NO 29422
gtcgacatctgcgccgataatatatcacctctgcttttttcccttgttccttgagctagttttcttgcctgtttttgctgctgcagcggagcaatggaagaacgcgttgcgatacctgttactctgcctagagacaaccctaccatcagctactggcagcaagatcccgaggacatagcagacttacggtcaacagcatcactacccattgaagcaaattgtgtcatcattggtagtggaataacgggtgcaggaatcgcattgaatctgcttgaaaatgacgtttctcaggatatcgtcatgctcgaggcgcgtcaggcaagctctggcgcaactggacggaatggcgggcatacgaaagcggcttcatatcgatcatttgtgcatcatcagcgagaacacggtacaatggaagctgccaagatagcgcgtctcgagctcgccaatattcgcgctgtgcatgcattcgcaaaggagcatggtatagattgtgagagcaacccgtgcacgacggtagacatcatatacggatcgaagctctgggaaacggaccaagaatctgtcaaggcgctacaaaatgctcttcctggtcatgatgcatctatctacgatattcatacacctggagaagttcgcacacgcttctattgcggcgacggaggagatgaaggtgtcagtggcgggatctcgtacgaagcaggaagtatacatgcctataagttcacgatcggagtcctgaagctttgtctagcaaaaggtcttaatttgcagacgaatacccctgcgactagcgtagagcagcttcccgacgggcgttggaaaatcgaaacgcccaggggcgcaatcagcgctaacagattagtcatggctaccaatggatatacagcgcatctgttggaaaaatttcaaggtgtcatcattccgcttcgcggtcacgttacagcccagagaccaggactcaatatgccgaaacatgggttaccgtacacgtacagcttcctctatgaaggcggttatgactacatggttccgcgaccgaggggcgtagactttgcgggggatatcatcatcggtgggcagttggtcaacgctcagaacgatgcgttaggtgagtatgggaccacggatgatactgatgcggacgcagacatcatgcaaggactctacgatactttgccgaactacttcgggaggaattggggcgaagaccagaccgaggagcgcattcgcaagcaatggacaggtattatgggatacggcccagatgggctcccctttgtgggcgagatgcctggccagaagaatctctggatcgcagcggggtttcaaggccacggaatggtgttatgctggatgtgtgcaaggagtttagttgagatgatgcgaggccgagatgatgatgagctacgcgattggtttccggacgctttcaggctcaaagaggaaaggttcaacattgcattcaaggggcgcctgcacgacctcggctcgaaagaatgaaagagtttgcttgggttaaggactgtctgataatatcatactctatgagtaactgcgagtcggccgttcagctttgcgttatccacttccctgcggcttggtgaccgaggttcaaataacgttcaggtctgaacagatgtccgtgcgatgcgattgtaagaacgcggcactaatactcccggtgcctagttcatagcggtaagttcaccggtcttgatgttgaggaggtatcctttaacgttgtccttgagctcctgtcgaatgagcggcgaagctttaaaagccctaagatccatcagcatggtctctcggtgtctgcagatgcgattcttcattagcattctgtcgtaactaacagacatcgttgtcttggtacttacttctcaaatgaactgccgtcgtatgtagggacgcggagagcatctatgtgacctgcaagctgtgggtacattgccttccaattccctttgacctcagcctccgtcaggcgagttaacccgcaatctggtgacattatgagcgcttgggactagtgacaagcgg

SEQ ID NO: 29425 - DNA, 288 bp, Muscodor strobelii
  misc_feature: SGI cDNA ID NO. 570106
  misc_feature: Encodes the peptide sequence at SEQ ID NO 29426
atggcctctcccgctgtcacttctaacccgctgaaaaacaatgtttacgactcagactcctcagatggacaggctcggggcggccgtcgtcttccaaacggacttgctcaggctatacccacctcagtcggtttatcacagccagccggacaacttcttaaaggtgcgacggacgacaacggcaaccagaaatctgctgctcttttagtcggtattaaactagacctagaggccgaggtacaccttactgctcgggtccgtggcgatatatgtgttggactttactag

SEQ ID NO: 29426 - protein, 95 aa, Muscodor strobelii
  misc_feature: SGI Peptide ID NO. 570106
  misc_feature (11)..(95): NCBI GI: 46136623 Blast Desc: FG09827.1 [Gibberella zeae PH-1]
  misc_feature (16)..(95): NCBI GI: 256726990 Blast Desc: NECHADRAFT_76528 [Nectria haematococca mpVI 77-13-4]
  misc_feature (8)..(95): NCBI GI: 189191050 Blast Desc: conserved [Pyrenophora tritici-repentis Pt-1C-BFP] gi|187973470|gb|EDU40969.1| conserved [Pyrenophora tritici-repentis Pt-1C-BFP]
  misc_feature (16)..(95): NCBI GI: 169622156 Blast Desc: SNOG_14294 [Phaeosphaeria nodorum SN15] gi|160704712|gb|EAT78165.2| SNOG_14294 [Phaeosphaeria nodorum SN15]
  misc_feature (50)..(95): NCBI GI: 145608100 Blast Desc: [Magnaporthe grisea 70-15] gi|145015602|gb|EDK00092.1| [Magnaporthe grisea 70-15]
  misc_feature (40)..(95): NCBI GI: 154301014 Blast Desc: [Botryotinia fuckeliana B05.10] gi|150856393|gb|EDN31585.1| [Botryotinia fuckeliana B05.10]
  misc_feature (19)..(94): NCBI GI: 134108776 Blast Desc: CNBB5670 [Cryptococcus neoformans var. neoformans B-3501A] gi|50259724|gb|EAL22394.1| CNBB5670 [Cryptococcus neoformans var. neoformans B-3501A]
  misc_feature (29)..(94): NCBI GI: 58268006 Blast Desc: CNE04660 [Cryptococcus neoformans var. neoformans JEC21] gi|134112435|ref|XP_775193.1| CNBE4660 [Cryptococcus neoformans var. neoformans B-3501A] gi|50257845|gb|EAL20546.1|
MASPAVTSNPLKNNVYDSDSSDGQARGGRRLPNGLAQAIPTSVGLSQPAGQLLKGATDDNGNQKSAALLVGIKLDLEAEVHLTARVRGDICVGLY

SEQ ID NO: 29427 - DNA, 765 bp, Muscodor strobelii
  misc_feature: SGI EST ID NO. CUFF.69621.0
  misc_feature: Variant of the nucleotide sequence at SEQ ID NO 29425
gcgctttgatgcctgtcacaggggatctcggagacatttagcactagatcgccataacaaggcctataagactaggtcagcgacccctcgctcaggtatatcgtcccatttgatcgaacgactcttttgaggagtcgggaaaggcaaagactgtcacatcgctgacaatgcgtgccaagacaaacctgtcaggagaaatatgttctgagaaagggaataaggcttcgttgcaaatggatacctatatccgacaaaatggcctctcccgctgtcacttctaacccgctgaaaaacaatgtttacgactcagactcctcagatggacaggctcggggcggccgtcgtcttccaaacggacttgctcaggctatacccacctcagtcggtttatcacagccagccggacaacttcttaaaggtgcgacggacgacaacggcaaccagaaatctgctgctcttttagtcggtattaaactagacctagaggccgaggtacaccttactgctcgggtccgtggcgatatatgtgttggactttactagccgcctcgacatgaaggatctattcagagatttctaagaattttaaagtggctgaaaaatggatataggggccgacatttcccataccgaccttgagtctaaatacacatgaagaagtaagacacatttggaggttggcattagacttccaaggtccggtacagccagcacagcagtaatatgtttgtagagtctaagtatgtcttcaataggcctttttcc

SEQ ID NO: 29428 - DNA, 1209 bp, Muscodor strobelii
  misc_feature: SGI cDNA ID NO. 570107
  misc_feature: Encodes the peptide sequence at SEQ ID NO 29429
atgcataagcgtgctctacacgacagaaccatcagcgacattatagcggaagctcttggtagaacagagatccaagaggccctgaaagaatcgtgtcgcgacaaaacagccgagcaggtcgcttatgaagccactatggcgttacctatgctacttgccttgacaatttgtcccgcactgttaggcactcaagaggctattcgccaaagtcaatcgaaaaacaagcgcgaagaacaccgagcacgccgatgcaatctggtagtgtcatgtgtgaaggaatcaattcgaagtcgagacataaatggaaaattggttgttttaaaggacaacaaattatggataggcagctccaagccagcatcaggcaacgacgatacagaatctgacgacggctatcctttctcgggatacttcttgccgtatccagataccaaatatgaaggcttggttagcaccattagcgatgaaccaccaatgcttaattggatatatgttgataaagatacgtatgaagtcaagtacggccttcgagtggatgcgcaggcgcatttgactgggccgtttgactgcacaagacaggatcgacgcatgtcactggaatgctgggaaggatttgttgcagttgagacttatccaggattatggtccttatacttcgatcgagacgatgatggattagtctccaaggttccgatgggcacgagagtgcttgaagtcgaactcactcggcgagaaaagaaagagcacaagccaaagccagatccgaatgaagaacagacgctagagcagatgtttaaacgacataaggagcagtcagagagacaggaagaagaacatagcgaatttcttcacggcaagaatcctgcccaatctcgagaaacgtcagcaccggcggatctcgaattcaagactaacagcgcaagtggagtgcagacaaaggatgctgattcgtccgcgtccagcatcaacttagatctgttgaagtttaacagtagagctcgggtaggtgctcaagggcttaagctcgatacaacagcaccaacagctacatctccaagcatgagctcggatagatcaatgacgcttgacgaagcaccatctctaacctcagcaagctcggttggtgtggatgatacggtgacttggtcatcgcagtatcctggttcactgtataaaaagccgatcgtagaagactgcactgattattaa

SEQ ID NO: 29429 - protein, 402 aa, Muscodor strobelii
  misc_feature: SGI Peptide ID NO. 570107
  misc_feature (20)..(398): NCBI GI: 46136621 Blast Desc: FG09826.1 [Gibberella zeae PH-1]
  misc_feature (21)..(398): NCBI GI: 256727567 Blast Desc: NECHADRAFT_34160 [Nectria haematococca mpVI 77-13-4]
  misc_feature (46)..(277): NCBI GI: 169622154 Blast Desc: SNOG_14293 [Phaeosphaeria nodorum SN15] gi|111057044|gb|EAT78164.1| SNOG_14293 [Phaeosphaeria nodorum SN15]
  misc_feature (46)..(250): NCBI GI: 189191052 Blast Desc: conserved [Pyrenophora tritici-repentis Pt-1C-BFP] gi|187973471|gb|EDU40970.1| conserved [Pyrenophora tritici-repentis Pt-1C-BFP]
  misc_feature (50)..(253): NCBI GI: 154301012 Blast Desc: BC1G_10644 [Botryotinia fuckeliana B05.10] gi|150856392|gb|EDN31584.1| BC1G_10644 [Botryotinia fuckeliana B05.10]
  misc_feature (46)..(258): NCBI GI: 189196404 Blast Desc: conserved [Pyrenophora tritici-repentis Pt-1C-BFP] gi|187980419|gb|EDU47045.1| conserved [Pyrenophora tritici-repentis Pt-1C-BFP]
  misc_feature (21)..(247): NCBI GI: 119179488 Blast Desc: CIMG_08489 [Coccidioides immitis RS]
  misc_feature (46)..(247): NCBI GI: 240110123 Blast Desc: CPC735_061550 [Coccidioides posadasii C735 delta SOWgp]
  misc_feature (46)..(247): NCBI GI: 258564927 Blast Desc: conserved [Uncinocarpus reesii 1704] gi|237906909|gb|EEP81310.1| conserved [Uncinocarpus reesii 1704]
  misc_feature (59)..(248): NCBI GI: 145608096 Blast Desc: MGG_12712 [Magnaporthe grisea 70-15] gi|145015600|gb|EDK00090.1| MGG_12712 [Magnaporthe grisea 70-15]
MHKRALHDRTISDIIAEALGRTEIQEALKESCRDKTAEQVAYEATMALPMLLALTICPALLGTQEAIRQSQSKNKREEHRARRCNLVVSCVKESIRSRDINGKLVVLKDNKLWIGSSKPASGNDDTESDDGYPFSGYFLPYPDTKYEGLVSTISDEPPMLNWIYVDKDTYEVKYGLRVDAQAHLTGPFDCTRQDRRMSLECWEGFVAVETYPGLWSLYFDRDDDGLVSKVPMGTRVLEVELTRREKKEHKPKPDPNEEQTLEQMFKRHKEQSERQEEEHSEFLHGKNPAQSRETSAPADLEFKTNSASGVQTKDADSSASSINLDLLKFNSRARVGAQGLKLDTTAPTATSPSMSSDRSMTLDEAPSLTSASSVGVDDTVTWSSQYPGSLYKKPIVEDCTDY

SEQ ID NO: 29430 - DNA, 894 bp, Muscodor strobelii
  misc_feature: SGI cDNA ID NO. 570108
  misc_feature: Elevated expression when VOC is produced
  misc_feature: Encodes the peptide sequence at SEQ ID NO 29431
atgtcggaccgaacaagcgccctcttcgctggccctgtatggcagtcgagcgaattctccgtaacggatggtagcccttcgacgtattcgcacaactcgttcgacaatgcacagttcgatatcgagaaaggtggcttcacgaagaccgagaccaacaacaatgtgtcaatgccgcccgagctgttcgaaaaactctatctgacacctaaggtgccgcatcccagtcctaatattcgaaaatttgccaacccgacacctctcggctttgttgggttcgtcatatcgacgttcaccttctcctctattctactgggcttcggtggtgctagcggattgtcgcctgttgttggcatcttccttttcaccggacctgttctactgttcgttgctatgatcttcgagtggatcatgggcaatttcttccctatgatggtcatgggcctgtttactgttttctggctctcctttggtctcatcaacttacctacactcgaacttggctcgccgtttgcgtcctcgactgatccaactggtctctcttcgcaaggatacaacgctgcaattgcgatataccttgttgtttggggtttcgctttgttcacctttttcatcttcacactcaagatcaacgccgtcttcgccactctattcttcattgtgagcattggtgcttggttattgggagccgcatacttcaaggtctcttggggcgattacgaaagcgcaatgatgttacagaaggctggggcatcactattattcgtagacggtgtcttaggttggtacgcatgcttcagcatgatggcatacgagatgcgtctccctatcaatctaccagtcggcgatctcagccacttctggccaagaaccgacgtggaagcgaaacacgagtaa

SEQ ID NO: 29431 - protein, 297 aa, Muscodor strobelii
  misc_feature: SGI Peptide ID NO. 570108
  misc_feature (42)..(247): NCBI GI: 171683171 Blast Desc: protein product [Podospora anserina] gi|170941545|emb|CAP67197.1| protein product [Podospora anserina]
  misc_feature (32)..(293): NCBI GI: 189192568 Blast Desc: plasma membrane ammonium transporter (Ato3) [Pyrenophora tritici-repentis Pt-1C-BFP] gi|187974229|gb|EDU41728.1| plasma membrane ammonium transporter
  misc_feature (40)..(293): NCBI GI: 116193981 Blast Desc: CHGG_06708 [Chaetomium globosum CBS 148.51] gi|88182621|gb|EAQ90089.1| CHGG_06708 [Chaetomium globosum CBS 148.51]
  misc_feature (22)..(293): NCBI GI: 169625228 Blast Desc: SNOG_15881 [Phaeosphaeria nodorum SN15] gi|111055599|gb|EAT76719.1| SNOG_15881 [Phaeosphaeria nodorum SN15]
  misc_feature (20)..(296): NCBI GI: 46109396 Blast Desc: FG01580.1 [Gibberella zeae PH-1] gi|224775787|tpg|DAA06465.1| TPA_inf: GPR1/FUN34/YaaH-class plasma membrane protein [Gibberella zeae]
  misc_feature (16)..(284): NCBI GI: 224775803 Blast Desc: TPA: TPA_inf: GPR1/FUN34/YaaH-class plasma membrane protein [Phaeosphaeria nodorum]
  misc_feature (32)..(296): NCBI GI: 224775795 Blast Desc: TPA: TPA_inf: GPR1/FUN34/YaaH-class plasma membrane protein [Gibberella moniliformis]
  misc_feature (20)..(297): NCBI GI: 256730555 Blast Desc: [Nectria haematococca mpVI 77-13-4]
  misc_feature (32)..(296): NCBI GI: 224775791 Blast Desc: TPA: TPA_inf: GPR1/FUN34/YaaH-class plasma membrane protein [Fusarium oxysporum f. sp. lycopersici 4286]
  misc_feature (49)..(289): NCBI GI: 90110826 Blast Desc: TPA: TPA_inf: AlcS [Aspergillus fumigatus]
  misc_feature: Useful for introducing or modulating the production of volatile compounds
MSDRTSALFAGPVWQSSEFSVTDGSPSTYSHNSFDNAQFDIEKGGFTKTETNNNVSMPPELFEKLYLTPKVPHPSPNIRKFANPTPLGFVGFVISTFTFSSILLGFGGASGLSPVVGIFLFTGPVLLFVAMIFEWIMGNFFPMMVMGLFTVFWLSFGLINLPTLELGSPFASSTDPTGLSSQGYNAAIAIYLVVWGFALFTFFIFTLKINAVFATLFFIVSIGAWLLGAAYFKVSWGDYESAMMLQKAGASLLFVDGVLGWYACFSMMAYEMRLPINLPVGDLSHFWPRTDVEAKHE

SEQ ID NO: 29432 - DNA, 2269 bp, Muscodor strobelii
  misc_feature: SGI EST ID NO. CUFF.69704.1
  misc_feature: Variant of the nucleotide sequence at SEQ ID NO 29430
cgggtcgtcgcttataagagaaggaatttcctacttttatttcctgccggtgatgtgatcttttcaccgatgcgctattgacctacagaaacacattttactgagcagctgcattcaccgtctagggcgccaaaggtgtcgctctcacgtcgaaacttatcgcacataagtcatgtctatcatttgccattttgaatattttgatatgaagacccggtagggaacagacctgggagccttccgacacaatgagttcatcgtgatatgggttcttttcaattggccgaggttatggaatgattagatcacagtacggagactaacctgacaatatttgctctcccagtcgatactcgagcaatcaacgatgcacttaaatcactctcgacattcgaacagaactacactcgacgctgaagggtgctgaagggtgtggtgctgactcttcgtggtggcggtgcggggtctgcggcgcactcatggttgctgccgggccggcgtcctactatcggcgttatggagaacagtaagccccagacgaccaaacgactgggtggtcagatcgacttcttctcgaatcccgaatggtgcgtcgaaaggatctgccgaccccagatcttccaaatcgcattcgaatcacagggcccatttgaccaaccggaggctctgtatctcttctaacctacaaaaataggtgcttggccacatggcactgcacctgtcccaggcctcgacacctagcgtggctacaggctgaaacaagacacatgcacgcactttggagccatgactggagagacctgtatagaaacgggagagccgagagcgttgatttgagttggcgtgagccgagtgctgcttggtagtaagagtcgctcaaactaccacacgatatgatggccgtctggaggtcggagaatacgtcatttttcacctcttggaatgacaagggcttatatcaaataatgttttgtttcaagatatatgtagggttcctgcactatcctttgatatcaatgcaactgctctttgcccgacagaagttgtctaggtaactgatctactggctctgaaatgaaacccaatatgtcggaccgaacaagcgccctcttcgctggccctgtatggcagtcgagcgaattctccgtaacggatggtagcccttcgacgtattcgcacaactcgttcgacaatgcacagttcgatatcgagaaaggtggcttcacgaagaccgagaccaacaacaatgtgtcaatgccgcccgagctgttcgaaaaactctatctgacacctaaggtgccgcatcccagtcctaatattcgaaaatttgccaacccgacacctctcggctttgttgggttcgtcatatcgacgttcaccttctcctctattctactgggcttcggtggtgctagcggattgtcgcctgttgttggcatcttccttttcaccggacctgttctactgttcgttgctatgatcttcgagtggatcatgggcaatttcttccctatgatggtcatgggcctgtttactgttttctggctctcctttggtctcatcaacttacctacactcgaacttggctcgccgtttgcgtcctcgactgatccaactggtctctcttcgcaaggatacaacgctgcaattgcgatataccttgttgtttggggtttcgctttgttcacctttttcatcttcacactcaagatcaacgccgtcttcgccactctattcttcattgtgagcattggtgcttggttattgggagccgcatacttcaaggtctcttggggcgattacgaaagcgcaatgatgttacagaaggctggggcatcactattattcgtagacggtgtcttaggttggtacgcatgcttcagcatgatggcatacgagatgcgtctccctatcaatctaccagtcggcgatctcagccacttctggccaagaaccgacgtggaagcgaaacacgagtaatgaagacaaatgagaagagcaggtttttaggcgtcagaaaatacatgggttgcatatagcgttgcgttgatggtatgtgggagttcggagttatcctttcataaacgtttatctgtacaaaagaacgactctgcacgaaagatgtcttaaattccacgcttgaactaattgtctcaatgtgaagttataaggatctaccaatataaacacaaccttctaaggttatcccataccttgtggtaggagagcagctcccaggacataattcgcagacctaaaataagtcgac

SEQ ID NO: 29433 - DNA, 801 bp, Muscodor strobelii
  misc_feature: SGI cDNA ID NO. 570109
  misc_feature: Encodes the peptide sequence at SEQ ID NO 29434
atgaaaattcccgcaaaagtggttcttgtaactggcgccactaatggggttggatacgagacgatcaaggcatttcttcaatctgaaaatccctatcattgtataataggaagtcgattgatagaaaagggcgaagcggtgctccaaaaaattcgagaagaatgtccaggcgtaaacaacactgttgacatggttcagctagatgtaactagcgactcgtccatcgaggcggccttccagactgtgcagaatgtccatggccgcgtcgatattctcattcacaatgcgggtgctggcttcgatggagaatttgttcgaggcaaaatgtcattgcgcgaatatttcaatagagcatacgatgtaaacgtgtctggcgcgcaagttcttacttggacattcgtcccgctgttactcaaatcacgcgacccccgtgtgatgtttctagctggattgtcgatgatgacacaggcggctgaatcatactttccaactccgccacaaccagccggttggccgaaaaaaattggattcgaaacgatcggatacaggtgcagtaagacggcaatgaatatgatgatgctagattggaatcataagctcaaggaagatggcgtaaaggtattcagtgtggcgccaggcttctgtgctacagatttaggtggcatggggcctgagacgatgcaggcaatgggtgccgtccatccaagtgagggaggacaaagacttctcgcagtggccgagggaaatcgtgacgcagatacgggaaaagtcctcgataaagttgggtttctgccatggtga

SEQ ID NO: 29434 - protein, 266 aa, Muscodor strobelii
  misc_feature: SGI Peptide ID NO. 570109
  misc_feature (6)..(160): Pfam Id: PF00106 Pfam Desc: short chain dehydrogenase
  misc_feature (7)..(266): NCBI GI: 154312445 Blast Desc: BC1G_05825 [Botryotinia fuckeliana B05.10] gi|150849926|gb|EDN25119.1| BC1G_05825 [Botryotinia fuckeliana B05.10]
  misc_feature (5)..(266): NCBI GI: 238497055 Blast Desc: short-chain dehydrogenase, [Aspergillus flavus NRRL3357] gi|220694643|gb|EED50987.1| short-chain dehydrogenase, [Aspergillus flavus NRRL3357]
  misc_feature (5)..(266): NCBI GI: 169774407 Blast Desc: [Aspergillus oryzae RIB40] gi|83769534|dbj|BAE59669.1| protein product [Aspergillus oryzae]
  misc_feature (7)..(265): NCBI GI: 259480750 Blast Desc: TPA: conserved [Aspergillus nidulans FGSC A4]
  misc_feature (7)..(258): NCBI GI: 67902024 Blast Desc: AN7999.2 [Aspergillus nidulans FGSC A4] gi|40739612|gb|EAA58802.1| AN7999.2 [Aspergillus nidulans FGSC A4]
  misc_feature (6)..(235): NCBI GI: 115437978 Blast Desc: conserved [Aspergillus terreus NIH2624] gi|114188763|gb|EAU30463.1| conserved [Aspergillus terreus NIH2624]
  misc_feature (6)..(266): NCBI GI: 261361281 Blast Desc: conserved [Verticillium albo-atrum VaMs.102]
  misc_feature (5)..(266): NCBI GI: 67524025 Blast Desc: AN2469.2 [Aspergillus nidulans FGSC A4] gi|40744631|gb|EAA63787.1| AN2469.2 [Aspergillus nidulans FGSC A4] gi|259487890|tpe|CBF86922.1| TPA: short chain dehydrogenase,
  misc_feature (6)..(266): NCBI GI: 46126983 Blast Desc: FG07869.1 [Gibberella zeae PH-1]
  misc_feature (6)..(266): NCBI GI: 256724418 Blast Desc: NECHADRAFT_105729 [Nectria haematococca mpVI 77-13-4]
  misc_feature (1)..(258): SWISSPROT Homolog: EC 1.1.1.100 3-oxoacyl-[acyl-carrier-protein] reductase
MKIPAKVVLVTGATNGVGYETIKAFLQSENPYHCIIGSRLIEKGEAVLQKIREECPGVNNTVDMVQLDVTSDSSIEAAFQTVQNVHGRVDILIHNAGAGFDGEFVRGKMSLREYFNRAYDVNVSGAQVLTWTFVPLLLKSRDPRVMFLAGLSMMTQAAESYFPTPPQPAGWPKKIGFETIGYRCSKTAMNMMMLDWNHKLKEDGVKVFSVAPGFCATDLGGMGPETMQAMGAVHPSEGGQRLLAVAEGNRDADTGKVLDKVGFLPW

SEQ ID NO: 29435 - DNA, 807 bp, Muscodor strobelii
  misc_feature: SGI cDNA ID NO. 570110
  misc_feature: Encodes the peptide sequence at SEQ ID NO 29436
atggagaacgaccaggagcagatggcccctttggcggcgggagctggtcccatcattacacttcactgcaatacgccaaaattcagcctacctagtggtgtcccgttcgtcatgaaggtggaaatccagctaaagatgatgggtcttaattatcgaaaggatgccgagtcgtacatggcgagcggccaggacaatcggcccaagggcaagctgccctatataaccgacggcgacgttactattgccgactcacacttcatccgtcttcatttagagaaaaagtttagtaaagacctcgacgccggtctgactgacctacagaaggctacggcttggagtgcggaacgccttgtcgaggacagtctatactgggcaatggtccactctcgctttttctttgatcataattttcagaaggggccggctcgtttctttgatcacctgcccgttgagcaacaagcctccatgcgccactcgatccgtgagcgagtgttcgaacaactacactcgcagggtctgggtagacatagccccgaggaaatactcgacatcgccagccgagggtactgggcactcgcgcagatcattggagaccagccgttcctgacgggagaccgaccctgtggcgcagatgccagcgtttttgcccagcttgcaagcgtgatgactgatttcttcgattcaaaggtgcgagatgccgcgctcgcccatcctaacctagtgcaatatcacgatcggatgatgagtatgttttatccagagtatctcaagcctactgcgctcagtcacaatacacaacaacggtaa

SEQ ID NO: 29436 - protein, 268 aa, Muscodor strobelii
  misc_feature: SGI Peptide ID NO. 570110
  misc_feature (18)..(255): NCBI GI: 167647512 Blast Desc: glutathione S-transferase [Caulobacter sp. K31] gi|167349942|gb|ABZ72677.1| glutathione S-transferase [Caulobacter sp. K31]
  misc_feature (18)..(255): NCBI GI: 162457164 Blast Desc: glutathione S-transferase [Sorangium cellulosum 'So ce 56'] gi|161167746|emb|CAN99051.1| glutathione S-transferase [Sorangium cellulosum 'So ce 56']
  misc_feature (18)..(255): NCBI GI: 27382960 Blast Desc: glutathione S-transferase [Bradyrhizobium japonicum USDA 110] gi|27356133|dbj|BAC53114.1| bll7849 [Bradyrhizobium japonicum USDA 110]
  misc_feature (18)..(255): NCBI GI: 94310082 Blast Desc: glutathione S-transferase [Ralstonia metallidurans CH34] gi|93353934|gb|ABF08023.1| glutathione S-transferase [Ralstonia metallidurans CH34]
  misc_feature (18)..(255): NCBI GI: 146338057 Blast Desc: BRADO0952 [Bradyrhizobium sp. ORS278] gi|146190863|emb|CAL74868.1| conserved [Bradyrhizobium sp. ORS278]
  misc_feature (18)..(254): NCBI GI: 113867335 Blast Desc: glutathione S-transferase-like protein [Ralstonia eutropha H16] gi|113526111|emb|CAJ92456.1| Glutathione S-transferase-like protein [Ralstonia eutropha H16]
  misc_feature (18)..(268): NCBI GI: 73540951 Blast Desc: glutathione S-transferase [Ralstonia eutropha JMP134] gi|72118364|gb|AAZ60627.1| glutathione S-transferase [Ralstonia eutropha JMP134]
  misc_feature (18)..(255): NCBI GI: 148258306 Blast Desc: BBta_7102 [Bradyrhizobium sp. BTAi1] gi|146410479|gb|ABQ38985.1| BBta_7102 [Bradyrhizobium sp. BTAi1]
  misc_feature (18)..(254): NCBI GI: 194289351 Blast Desc: conserved , Metaxin-like protein [Cupriavidus taiwanensis] gi|193223186|emb|CAQ69191.1| conserved , Metaxin-like protein [Cupriavidus taiwanensis]
  misc_feature (16)..(253): NCBI GI: 221235332 Blast Desc: CCNA_02396 [Caulobacter crescentus NA1000] gi|220964505|gb|ACL95861.1| membrane associated protein [Caulobacter crescentus NA1000]
MENDQEQMAPLAAGAGPIITLHCNTPKFSLPSGVPFVMKVEIQLKMMGLNYRKDAESYMASGQDNRPKGKLPYITDGDVTIADSHFIRLHLEKKFSKDLDAGLTDLQKATAWSAERLVEDSLYWAMVHSRFFFDHNFQKGPARFFDHLPVEQQASMRHSIRERVFEQLHSQGLGRHSPEEILDIASRGYWALAQIIGDQPFLTGDRPCGADASVFAQLASVMTDFFDSKVRDAALAHPNLVQYHDRMMSMFYPEYLKPTALSHNTQQR

SEQ ID NO: 29437 - DNA, 2703 bp, Muscodor strobelii
  misc_feature: SGI EST ID NO. CUFF.69647.0
  misc_feature: Variant of the nucleotide sequence at SEQ ID NO 29435
ccgacgggctcggcaaaaacgtgtcgctatccatcctgcctattatataagcttactacacaagctattatacaattatccgtactacttaacgctaaatctagataaaaattgaaagttctcacctggtataaccatcattgcggggcagaggctgcggattacgcctctgcttttcgacacatcttagaaatacagcaaacccttatcacctcaatactactcattcgtcaaacattgttcgaccgataccagttcccgatggagaacgaccaggagcagatggcccctttggcggcgggagctggtcccatcattacacttcactgcaatacgccaaaattcagcctacctagtggtgtcccgttcgtcatgaaggtggaaatccagctaaagatgatgggtcttaattatcgaaaggatgccgagtcgtacatggcgagcggccaggacaatcggcccaagggcaagctgccctatataaccgacggcgacgttactattgccgactcacacttcatccgtcttcatttagagaaaaagtttagtaaagacctcgacgccggtctgactgacctacagaaggctacggcttggagtgcggaacgccttgtcgaggacagtctatactgggcaatggtccactctcgctttttctttgatcataattttcagaaggggccggctcgtttctttgatcacctgcccgttgagcaacaactcattccttagcctgcgagtataccatagcagcgggagggcgtagaatcaccatctaggtattgaccgcttaagcaggcctccatgcgccactcgatccgtgagcgagtgttcgaacaactacactcgcagggtctgggtagacatagccccgaggaaatactcgacatcgccagccgagggtactgggcactcgcgcagatcattggagaccagccgttcctgacgggagaccgaccctgtggcgcagatgccagcgtttttgcccagcttgcaagcgtgatgactgatttcttcgattcaaaggtgcgagatgccgcgctcgcccatcctaacctagtgcaatatcacgatcggatgatgagtatgttttatccagagtatctcaagcctactgcgctcagtcacaatacacaacaacggtaaaaaccggggatgagaatcttcgaacatagatcatagaacacgggcacgtcgggttttaaacctttcatctttgtgatatactgtaatactatactttgtccgttccctcgagaaacctgttgcacgtgtatctgctatttccgatgcgacgctaatgaaaattgtcaccctagcctgaaataaaagaaatatccctaacccgtgatccctcattcgctatgtgaatccgatcaaccccgccttgctctgaaatcaatgccaatataatgaaataccgtacttggttaagctcccatagccaacccattggagcactttgctttacaagaacaccctctagaacccatcccaatcaaagttgtcaaaatcgaaagaatcgttaacgccactatgatgatgctcattgaccattttcatgactgcggcccaatcctcgtccataggagatgggctatcatcctgcgggtcggggctactgattgtcggcttcttctcagtttgtacaacgtcctggttgactgccaaggtaatgatcgcttcgttgtttgtaccgatagattgatcagtcgtttccagcttggcatcggtccactcgacagattcgtcattgagtacactagcatcaaaatgctcagtagctttatactcctcgctgacaaattgactgattagagcattcgattctgtctcgttgtcgtggataaggactggcatcctatcagaaacatcgacctgctccgcttgaaccgtgggttgttgagttggctgagctttggcatgtcttttctgtgtctgttgaggcatattctgaacaatgacggctttgtcatcggagacattggcttgcttgattgactccatggccgcgggtaccttttgattccgaactggtgctttctcgggtgacttggacgccttggctatctccacaggcggctgagttgacaacgttttcgccggccctgtctgaatctgcttcggaataccatgatgcatatgagccttgggcgcagccactggagctggtatattgagcagagttgctgcttgctccttctggtaatgatccagtctagagttgtgcgcttgggtctgatacgtggctgcctgcgtcggctgaattagcgcctgaccattctggtcctgttgccatattccgcgcggagcacgagtggtttgggccgctgcggtgactggacgagctgagtgcgtggccagtggcccttcttgaccttgcacaggcagggcaccagaagtctggaagttctgcgactcctgaatgatcgttggaccttgttgaatgggcacttgttgctttcgattctggctcagcatatcgttgtcaatgctgacgtgttgagtcaccgcaacggccggttgagtcgatggaagagcaatcagctggcctggcattccaccataatgggttcccttctgggttgtttgaatgctcattcgagatgactgtacgccactttgtctgttctgcatagctatcgttccgtagagcggtgtcattccgtgagatacgttcatctcagtagaaggtgtaattcg

SEQ ID NO: 29438 - DNA, 1275 bp, Muscodor strobelii
  misc_feature: SGI cDNA ID NO. 570111
  misc_feature: Encodes the peptide sequence at SEQ ID NO 29439
atgcaagagcaagcgcagctcccaattattcaccagcagatgatgactactgcgcgaattacaccttctactgagatgaacgtatctcacggaatgacaccgctctacggaacgatagctatgcagaacagacaaagtggcgtacagtcatctcgaatgagcattcaaacaacccagaagggaacccattatggtggaatgccaggccagctgattgctcttccatcgactcaaccggccgttgcggtgactcaacacgtcagcattgacaacgatatgctgagccagaatcgaaagcaacaagtgcccattcaacaaggtccaacgatcattcaggagtcgcagaacttccagacttctggtgccctgcctgtgcaaggtcaagaagggccactggccacgcactcagctcgtccagtcaccgcagcggcccaaaccactcgtgctccgcgcggaatatggcaacaggaccagaatggtcaggcgctaattcagccgacgcaggcagccacgtatcagacccaagcgcacaactctagactggatcattaccagaaggagcaagcagcaactctgctcaatataccagctccagtggctgcgcccaaggctcatatgcatcatggtattccgaagcagattcagacagggccggcgaaaacgttgtcaactcagccgcctgtggagatagccaaggcgtccaagtcacccgagaaagcaccagttcggaatcaaaaggtacccgcggccatggagtcaatcaagcaagccaatgtctccgatgacaaagccgtcattgttcagaatatgcctcaacagacacagaaaagacatgccaaagctcagccaactcaacaacccacggttcaagcggagcaggtcgatgtttctgataggatgccagtccttatccacgacaacgagacagaatcgaatgctctaatcagtcaatttgtcagcgaggagtataaagctactgagcattttgatgctagtgtactcaatgacgaatctgtcgagtggaccgatgccaagctggaaacgactgatcaatctatcggtacaaacaacgaagcgatcattaccttggcagtcaaccaggacgttgtacaaactgagaagaagccgacaatcagtagccccgacccgcaggatgatagcccatctcctatggacgaggattgggccgcagtcatgaaaatggtcaatgagcatcatcatagtggcgttaacgattctttcgattttgacaactttgattgggatgggttctag

SEQ ID NO: 29439 - protein, 424 aa, Muscodor strobelii
  misc_feature: SGI Peptide ID NO. 570111
MQEQAQLPIIHQQMMTTARITPSTEMNVSHGMTPLYGTIAMQNRQSGVQSSRMSIQTTQKGTHYGGMPGQLIALPSTQPAVAVTQHVSIDNDMLSQNRKQQVPIQQGPTIIQESQNFQTSGALPVQGQEGPLATHSARPVTAAAQTTRAPRGIWQQDQNGQALIQPTQAATYQTQAHNSRLDHYQKEQAATLLNIPAPVAAPKAHMHHGIPKQIQTGPAKTLSTQPPVEIAKASKSPEKAPVRNQKVPAAMESIKQANVSDDKAVIVQNMPQQTQKRHAKAQPTQQPTVQAEQVDVSDRMPVLIHDNETESNALISQFVSEEYKATEHFDASVLNDESVEWTDAKLETTDQSIGTNNEAIITLAVNQDVVQTEKKPTISSPDPQDDSPSPMDEDWAAVMKMVNEHHHSGVNDSFDFDNFDWDGF

SEQ ID NO: 29440 - DNA, 891 bp, Muscodor strobelii
  misc_feature: SGI cDNA ID NO. 570112
  misc_feature: Encodes the peptide sequence at SEQ ID NO 29441
atgtttcaagcaccttctgttcctgcatggaaccctcagaatccggcgagcatggtccaacctgctcatggtatgcctacacaggtaccacaacagattctagatgttagatatgatcatcaaggccaacgcccaaatcccaactctgaacatcccacctactcctctgcgcctggttacgcgcctgcacttcatcgagacacattcattacaccccaccaaggcttcccgctacttcagaatcaccagtttcctcacacggttggtcaccaaagctctcatagacaggagcctcaagggaagaactctcatacgctcgatggacccaccgcgtcctccaactcttggaaccagcctactagtcatcgcatttacagccatccacagcatccctctttccaagccaaccgcatgagtgggggtacgcgtcccagcatcaccaactgcaaccaaataccggcatacttttcccaaagcaagccgattgcggctgctgctccttcgcagcagccactagggccgcaatatcatgctccgcccagtgatgctgccttccctttcaatcccctgccgcttccgctgccgccgtattgccagtccaatccgaccgcgcccaacctcccgagcgcacatcatcagagtgatataggacaggtcgcaactctactcaatagtaacaagtcttcagtggatcccaactctcgacagtcattgtcacaacccatgtgccaaatgattcagccaagagtcgcacgctatcaagctccgacaatacaccaaacccccacagatggacaaatgccgcttctcaactcgaatgtccagcttgctagaggcaacaagagacagtacgactcattcgccgagaatcaaacagttgcctacggatag

SEQ ID NO: 29441 - protein, 296 aa, Muscodor strobelii
  misc_feature: SGI Peptide ID NO. 570112
MFQAPSVPAWNPQNPASMVQPAHGMPTQVPQQILDVRYDHQGQRPNPNSEHPTYSSAPGYAPALHRDTFITPHQGFPLLQNHQFPHTVGHQSSHRQEPQGKNSHTLDGPTASSNSWNQPTSHRIYSHPQHPSFQANRMSGGTRPSITNCNQIPAYFSQSKPIAAAAPSQQPLGPQYHAPPSDAAFPFNPLPLPLPPYCQSNPTAPNLPSAHHQSDIGQVATLLNSNKSSVDPNSRQSLSQPMCQMIQPRVARYQAPTIHQTPTDGQMPLLNSNVQLARGNKRQYDSFAENQTVAYG

SEQ ID NO: 29442 - DNA, 1238 bp, Muscodor strobelii
  misc_feature: SGI EST ID NO. CUFF.69650.0
  misc_feature: Variant of the nucleotide sequence at SEQ ID NO 29440
cttctatcccaggcatcctgcaagcgaaacagcagctgtcaatggagtggaattctctatctgcagtgccataaaatatatataagccttgccctcccagtaattctcttgactgtgatttcattgctctgcttctcaacaagcgccatcgcgcctgccccccgcacactcataccacctacctccaacttcgtcatctttcgtccttcaccggcgccgactatctacatcgtcaaacactaccactcgtcttcaccgtctactttctctatcgacattcgttcatctgttcccattagagtcacttggtagtgggcatccgcaaccgctattacaagcacacttgtgcagttgtgatccacgatgtttcaagcaccttctgttcctgcatggaaccctcagaatccggcgagcatggtccaacctgctcatggtatgcctacacaggtaccacaacagattctagatgttagatatgatcatcaaggccaacgcccaaatcccaactctgaacatcccacctactcctctgcgcctggttacgcgcctgcacttcatcgagacacattcattacaccccaccaaggcttcccgctacttcagaatcaccagtttcctcacacggttggtcaccaaagctctcatagacaggagcctcaagggaagaactctcatacgctcgatggacccaccgcgtcctccaactcttggaaccagcctactagtcatcgcatttacagccatccacagcatccctctttccaagccaaccgcatgagtgggggtacgcgtcccagcatcaccaactgcaaccaaataccggcatacttttcccaaagcaagccgattgcggctgctgctccttcgcagcagccactagggccgcaatatcatgctccgcccagtgatgctgccttccctttcaatcccctgccgcttccgctgccgccgtattgccagtccaatccgaccgcgcccaacctcccgagcgcacatcatcagagtgatataggacaggtcgcaactctactcaatagtaacaagtcttcagtggatcccaactctcgacagtcattgtcacaacccatgtgccaaatgattcagccaagagtcgcacgctatcaagctccgacaatacaccaaacccccacagatggacaaatgccgcttctcaactcgaatgtccagcttgctagaggcaacaagagacagtacgactcattcgccgagaatcaaac

SEQ ID NO: 29443 - DNA, 909 bp, Muscodor strobelii
  misc_feature: SGI cDNA ID NO. 570113
  misc_feature: Encodes the peptide sequence at SEQ ID NO 29444
atggaaccctacacttccgtcaagatatcacggatgctgaacttcgcctctgcaccaattccacttcccagctttgacgaattggcaaaagtggtggaggacctggcgccagaacaggttttagtccgagaacaagaccgccttgtattcaagcatagtgacaagtttgtggtcaaattcggtaaggcagttagtctccttgaaggcgaaaacatgctaattgtacaacaatacactcgtattccagtcccagctctatacgccatgtaccacgatgagccaagcgacattaaagccctcgtggtcgaattcattccgggtaagacacttctcgagtgctatcatcgtctgagtgattcgtacaagtcatcgataggagcccagctaagatctcacgtcgccgatctacgcacgattccatcgccaaatttttatgggcgtctcggaaatcatccattcctggctttatcgtgggttttcaaagagcaggcaggaccattcttttcagccgaaggattcctcgacgcctacttcagagcgcagttcacaaacctcgatcggtcaggtcaatttatgattgaccaaatgaaagcacagttcctcaagctctctgagaatcatcatgcgccagtattttcgcatgcagatctccaagcaaagaatatcatgcttcgcgatgacggttcactgtgtataatcgactgggaaagtgctgccttctaccctgagtacttcgaattcttcgtctatggcactttcgatattgcgtccgcaggtctacctaggggttactacgatcccattctggatttcgaggaaatggtatcgcttatcaagaagatttggggcacgttcagtgagattaggaacaaagacactaatgaaaatgctcatgacaaagatcattag

SEQ ID NO: 29444 - protein, 302 aa, Muscodor strobelii
  misc_feature: SGI Peptide ID NO. 570113
  misc_feature (202)..(236): Pfam Id: PF01633 Pfam Desc: Choline/ethanolamine kinase
  misc_feature (16)..(249): NCBI GI: 261201950 Blast Desc: phosphotransferase enzyme family protein [Ajellomyces dermatitidis SLH14081] gi|239590286|gb|EEQ72867.1| phosphotransferase enzyme family protein [Ajellomyces SLH14081]
  misc_feature (1)..(247): NCBI GI: 261354367 Blast Desc: phosphotransferase enzyme family protein [Verticillium albo-atrum VaMs.102]
  misc_feature (19)..(249): NCBI GI: 154287554 Blast Desc: conserved [Ajellomyces capsulatus NAm1] gi|150408213|gb|EDN03754.1| conserved [Ajellomyces capsulatus NAm1]
  misc_feature (19)..(247): NCBI GI: 116198711 Blast Desc: CHGG_07511 [Chaetomium globosum CBS 148.51] gi|88178790|gb|EAQ86258.1| CHGG_07511 [Chaetomium globosum CBS 148.51]
  misc_feature (11)..(249): NCBI GI: 225561814 Blast Desc: phosphotransferase enzyme family protein [Ajellomyces capsulatus G186AR]
  misc_feature (16)..(249): NCBI GI: 239611998 Blast Desc: phosphotransferase enzyme family protein [Ajellomyces dermatitidis ER-3]
  misc_feature (19)..(247): NCBI GI: 116201007 Blast Desc: CHGG_08388 [Chaetomium globosum CBS 148.51] gi|88176906|gb|EAQ84374.1| CHGG_08388 [Chaetomium globosum CBS 148.51]
  misc_feature (40)..(249): NCBI GI: 119195733 Blast Desc: CIMG_02241 [Coccidioides immitis RS]
  misc_feature (20)..(247): NCBI GI: 67901978 Blast Desc: AN7976.2 [Aspergillus nidulans FGSC A4] gi|40740440|gb|EAA59630.1| AN7976.2 [Aspergillus nidulans FGSC A4] gi|259480726|tpe|CBF73633.1| TPA: conserved [Aspergillus FGSC
  misc_feature (46)..(259): NCBI GI: 46114728 Blast Desc: FG03206.1 [Gibberella zeae PH-1]
MEPYTSVKISRMLNFASAPIPLPSFDELAKVVEDLAPEQVLVREQDRLVFKHSDKFVVKFGKAVSLLEGENMLIVQQYTRIPVPALYAMYHDEPSDIKALVVEFIPGKTLLECYHRLSDSYKSSIGAQLRSHVADLRTIPSPNFYGRLGNHPFLALSWVFKEQAGPFFSAEGFLDAYFRAQFTNLDRSGQFMIDQMKAQFLKLSENHHAPVFSHADLQAKNIMLRDDGSLCIIDWESAAFYPEYFEFFVYGTFDIASAGLPRGYYDPILDFEEMVSLIKKIWGTFSEIRNKDTNENAHDKDH

SEQ ID NO: 29445 - DNA, 1290 bp, Muscodor strobelii
  misc_feature: SGI cDNA ID NO. 570114
  misc_feature: Encodes the peptide sequence at SEQ ID NO 29446
atgtcttcgaactctttcatcattaaggacgtccttctttacactggtcatgagtttattccagatggcttcgtcgtggtgaaaaatggtaacattgctaccgtcggcactggcaacccacctgccggatctggtcttgccgtcatttcgaagcctgggtacactgtaataccagggctcattgattcgcacattcatgggcttgagggagaccttgcaagtctcgaacaacctctgcgatttggcgtcactactgtttgcgacttgcacaatgcgcccagatacctcgagaagttggccaaagcagcccaagagtctaagacgaaaggaaggtatgcagacttcaagcacgtaggactaggagctatggtcaaaggtggatggccagaacccgtcatccggaaagaagccaagagccacggccatcccgaggaggttatcgacaggatctttgacacttggcccaaactcactgctgcttcggaggcagcgccctatgtggcggaacaggtcgcgagaggtgcttccatgatcaaattatttcaggaagatgggagcactatgtcaatggaacttcccgtcccgactcttgaaattcagagggctgtcgtggatgcagctcatgcgcacgggctacccgccatcggccatgctcttagctaccaaggcgcgatgatcttactagaagccggcgtcggtgggctaacgcacatattccttgagaaagcaccaaatgacgaatgggtacagatcatgaagcagaataatgtccattgtaaccccacactggcctgtggcttgtcactaaagggccaagcagacgagcaacagcgacgctggactcaagatccttttgctcaggagatgctgcttaagtgcgagcccaagggaaacataggccttgcggcgggctgccaacatgcggacgctggacacgccctcgagaacgtgaaggctctgtatcgggctggcgttccattaatcgtcggctcggatgctgctggtaccgaaattggctgtcagtatggacttggagtgcacatggagatgcatcgtatgattcacgaggttcggatgaaggtagaagatgttttgcgaggcgctacgtcgttgaccgctgagcgctttggcttcaaggaccgtggctcgatcacagagggcgcattggctgatctggtcctcatcgaaggcgacgtaaggaaaagcttggcgaataaagagaatctctgcctcccaatcaagggtgtctggcgagaaggagttttcgctgaagcttatagttccttgtaa

SEQ ID NO: 29446 - protein, 429 aa, Muscodor strobelii
  misc_feature: SGI Peptide ID NO. 570114
  misc_feature (55)..(396): Pfam Id: PF01979 Pfam Desc: Amidohydrolase family
  misc_feature (55)..(394): Pfam Id: PF07969 Pfam Desc: Amidohydrolase family
  misc_feature (348)..(396): Pfam Id: PF01979 Pfam Desc: Amidohydrolase family
  misc_feature (55)..(93): Pfam Id: PF01979 Pfam Desc: Amidohydrolase family
  misc_feature (2)..(426): NCBI GI: 46124111 Blast Desc: FG06433.1 [Gibberella zeae PH-1]
  misc_feature (4)..(427): NCBI GI: 169597347 Blast Desc: SNOG_01459 [Phaeosphaeria nodorum SN15] gi|111069988|gb|EAT91108.1| SNOG_01459 [Phaeosphaeria nodorum SN15]
  misc_feature (1)..(324): NCBI GI: 242763252 Blast Desc: conserved [Talaromyces stipitatus ATCC 10500] gi|218723734|gb|EED23151.1| conserved [Talaromyces stipitatus ATCC 10500]
  misc_feature (3)..(421): NCBI GI: 348315 Blast Desc: conserved [Talaromyces stipitatus ATCC 10500] gi|218723734|gb|EED23151.1| conserved [Talaromyces stipitatus ATCC 10500]
  misc_feature (89)..(427): NCBI GI: 189193141 Blast Desc: aryldialkylphosphatase [Pyrenophora tritici-repentis Pt-1C-BFP] gi|187978473|gb|EDU45099.1| aryldialkylphosphatase [Pyrenophora tritici-repentis Pt-1C-BFP]
  misc_feature (1)..(420): NCBI GI: 284990963 Blast Desc: amidohydrolase [Geodermatophilus obscurus DSM 43160] gi|284064208|gb|ADB75146.1| amidohydrolase [Geodermatophilus obscurus DSM 43160]
  misc_feature (5)..(420): NCBI GI: 6141557 Blast Desc: organophosphorus insecticide hydrolase [Arthrobacter sp.]
  misc_feature (5)..(420): NCBI GI: 256387104 Blast Desc: organophosphorus insecticide hydrolase [Arthrobacter sp. scl-2]
  misc_feature (4)..(420): NCBI GI: 256667920 Blast Desc: StAA4_12265 [Streptomyces sp. AA4]
  misc_feature (7)..(421): NCBI GI: 271966265 Blast Desc: amidohydrolase [Streptosporangium roseum DSM 43021] gi|270509440|gb|ACZ87718.1| amidohydrolase [Streptosporangium roseum DSM 43021]
MSSNSFIIKDVLLYTGHEFIPDGFVVVKNGNIATVGTGNPPAGSGLAVISKPGYTVIPGLIDSHIHGLEGDLASLEQPLRFGVTTVCDLHNAPRYLEKLAKAAQESKTKGRYADFKHVGLGAMVKGGWPEPVIRKEAKSHGHPEEVIDRIFDTWPKLTAASEAAPYVAEQVARGASMIKLFQEDGSTMSMELPVPTLEIQRAVVDAAHAHGLPAIGHALSYQGAMILLEAGVGGLTHIFLEKAPNDEWVQIMKQNNVHCNPTLACGLSLKGQADEQQRRWTQDPFAQEMLLKCEPKGNIGLAAGCQHADAGHALENVKALYRAGVPLIVGSDAAGTEIGCQYGLGVHMEMHRMIHEVRMKVEDVLRGATSLTAERFGFKDRGSITEGALADLVLIEGDVRKSLANKENLCLPIKGVWREGVFAEAYSSL

SEQ ID NO: 29447 - DNA, 1583 bp, Muscodor strobelii
  misc_feature: SGI EST ID NO. CUFF.69660.0
  misc_feature: Variant of the nucleotide sequence at SEQ ID NO 29445
gtccaaagtctcacgcatatcaaatctgaagtcatgtcttcgaactctttcatcattaaggacgtccttctttacactggtcatgagtttattccagatggcttcgtcgtggtgaaaaatggtaacattgctaccgtcggcactggcaacccacctgccggatctggtcttgccgtcatttcgaagcctgggtacactgtaataccagggctcattgattcgcacattcatgggcttgagggagaccttgcaagtctcgaacaacctctgcgatttggcgtcactactgtttgcgacttgcacaatgcgcccagatacctcgagaagttggccaaagcagcccaagagtctaagacgaaaggaaggtatgcagacttcaagcacgtaggactaggagctatggtcaaaggtggatggccagaacccgtcatccggaaagaagccaagagccacggccatcccgaggaggtaagaacaactgttccgagttgcgacaattttgctcacgacacgcgtcccacaataggttatcgacaggatctttgacacttggcccaaactcactgctgcttcggaggcagcgccctatgtggcggaacaggtcgcgagaggtgcttccatgatcaaattatttcaggaagatgggagcactatgtcaatggaacttcccgtcccgactcttgaaattcagagggctgtcgtggatgcagctcatgcgcacgggctacccgccatcggccatgctcttagctaccaaggcgcgatgatcttactagaagccggcgtcggtgggctaacgcacatattccttgagaaagcaccaaatgacgaatgggtacagatcatgaagcagaataatgtccattgtaaccccacactggcctgtggcttgtcactaaagggccaagcagacgagcaacagcgacgctggactcaagatccttttgctcaggagatgctgcttaagtgcgagcccaagggaaacataggccttgcggcgggctgccaacatgcggacgctggacacgccctcgagaacgtgaaggctctgtatcgggctggcgttccattaatcgtcggctcggatgctgctggtaccgaaattggctgtcagtatggacttggagtgcacatggagatgcatcgtatgattcacgaggttcggatgaaggtagaagatgttttgcgaggcgctacgtcgttgaccgctgagcgctttggcttcaaggaccgtggctcgatcacagagggcgcattggctgatctggtcctcatcgaaggcgacgtaaggaaaagcttggcgaataaagagaatctctgcctcccaatcaagggtgtctggcgagaaggagttttcgctgaagcttatagttccttgtaaagcggttacttcataattagtataccgtgaatgctagatgaacgattgagcaatatgtttttgaaatgaattgtcgactctctccccttggaatcttcgcccttgaatatcattgcgtttgcttgcatacaggtcgatcgtgtaaatattctattcctttttatctcagacaaacaaaactcagtctctgtcctgatagaag

SEQ ID NO: 29448 - DNA, 4284 bp, Muscodor strobelii
  misc_feature: SGI cDNA ID NO. 570115
  misc_feature: Encodes the peptide sequence at SEQ ID NO 29449
atgagttcggtaaagaagaagccaagtgaagctcactggctcgagcagaagtcatttattcgacgtatgtatctttttgaggaccttccgctcacatccattgtcaaagggttggcaagcgcgggcttcgaagttgagcaacaccagctcgagtacaaacttaagaaatggggatttaagaaaaatatcgataagaaaacttggatttccattgatgatcgtgtcgagaaacgaaagcgggatggtaaagacagtgatgtgatatacttaggcaagcgcttgaagcgagagacagtcattaaggagacgaagcgacaccgagaccagtctgcccttgcttacatgaatcgaagaaagggcgtgttggctagcttagatagccctcaaattggccccgaagttgcagtctgcaccccaccacccgtacgaatggaatttgaatggcctgctaccttgccgtgggttgacttctcgattagggcattgccaaacattttcaacctttgtacacagatgccttcggaaagcgccgcgactgcctacaaagtctgggcagctgctctgtgcctaacgaaaacgacaagacaaggtggctcgcaaatcggcgtctcgatgttagcggacctgataggaagaacgatgcccgaagcctatccgcaagagcacgtccagcgtgcgtctgctctacttcatggagctgcggatgactccctttacgagtatctgtcgatgattgtgtgtggtacatccaacaacactttagacattcatcgtgacaatggggagtggggtattattatgacaatgcttcgagatagcggcatgttgagacgcaagttggaccttaaacagtttcgcagtctgaccattgatgcttttatggagaatctgtatacggccatgagcttaaaaatcattacacgttctggagacgaagatgaagctgtgataatactcaaatggctcctggactctggtctttgccctaattgggcggcaaagcgcttttggttggagctcactgatgggcattgtagtggcaacccggctcaagaacagctcatagtctatgtgatggaggatttactaaatcgaggcgtcgatgctgatttagaatactcaagctactgttctggtcatcatttcaccatgctcgagatgatgttaagcccccctcgagtcttacatcgactaagcaaacgttttcgttctcggatggttgagctcctcgttcaacacgacaaaccgatgaatacaagtcgccccgctgtcgtctctgtgcttctgagcggagcagcaggactgagtctttcagcaatacgacacatattagcaaaggtctcagcccagaatccatcaatcccgttggctaggttcatcacgagagcggtcttagatgcagctgccgccgaaggaaacgacgatgtcatttgcttcttacatgaaataagtaacacaatgacagtcgatcaaaatgacaccgcgccattgtgtgctgcagtacggtttggtcattttagcacgtgtgagcttgttctctccttgtggcccacacaactgcatactagctctaagttgcattctggtccgctccatattgcctgccgcaatgcgaaccctgagatcgtacaattattaatagagaaaggggccaatgtgaatgagtccgtcagttcgatatcaggcgaagacgcagacttaatactgggcgacttagacttaccatttgaatggacgccgttatcgatggtccttgaccttcatcatgatgataactttgacttattagtacagcagaaccgcaactcggaacgacttaaatgcgctgctttgttgatccgggccggagcaaagcttacgggcaatgaagtcaatttggcggcaaaccacttgcatcctgagctgctgtctgcagctttagagggcggcgctgaatcaaatgagcacagcaccaaccaggagcggagttcccttcaactcgcgctttgggcagcagctccaagtgagagcaagcaggatgaccgagttgaagttgttgagctcttgctgcgaactggtgcaaaagtcgaaatagaggactttattgctctcttgaccatcagggattttacaattgcaaaagttctgctaagatatattcgaagtgaaatggatgatttagactccactcggtatgacactcatgtcatacattgcaactcaaagctcgagcaggaacagtttccatacagcgcggcggcgctttgctttgcaatcaaagccagggataatgagatgatacagcaatgcttgttctttcacgaattttatggaacaagaaactcattaaatactacggcgatcgccctagccgcagagtcgggcgatttggaccttcttggtaggctgttaagccagtgcgaataccaaccgtctgggctgcttccgctagacggaattatgttaaaagagatctgccctaatcactccggaaacccctgcgacggagtcatatgggggagcccgctggcttcgattgcggcggatcgaagtattgaagctttagcatgcaccgagctcattagagctgggttccgcccagacatgcttacatgggctatagcagcccattgcaacaactgctctgttatccaaacgatgatttcgtgcggtcaacgttacgttacatatggcggatttgtcagaacgccgttactgttgggcattgggcatcgtaatagagaactagtgagactcttggtagacgcgggagtcgacgtcaacggggataataaggagtcaggctcgccaattcgcaaagcagtatatggacaatatgaagaagtagtggacagcctcctggatgcgggcgcaaatgtgtcagagcttcttccagacataatccgacaaggccttcaaaacattgcttaccgaatcatcgacgctggagacaaactaactagcaatgagaaggagctggctttgcaagaagccgtagagtcgaatcaattggatatattaaatcgtcttctcgatgctggcgcggacgcgaaagcaacaggtctcctctggtcggctataaaccaccacaggggttgtgcagagaaatctaaatcttgtcttgtagatagacatgacggacacgacgatcattgcctcaaacgagccctggaaacgagacgactgagtgtcgtgcagcgtcttatggaagcaggcgcagacgtaaatacatcgggctgcctctggaaggccgtgcacattggcgacttgaacctcatcaaccatctgcttaaaaccggtgcggatgtgaacgcatccaaatgcctgttggaagcaataaggcaatgtcaaggcgatctggaaatcatcgagcgtctcctgcaagcgggagctaatgctaatatgtacggttgcctcaaactagctgtacagacaagatgtctaagtgtggttgaacgtattcttgaagcgggcgcagacccaaaagagccgattgtgctctggcaagcagcgtgccaggaaaattgggacattgtaggccgtctgcttgagcttggcgcgaagccaaacggagaaaagtatgacttctggaaaattgcaaagaatgatcgcctggacattgttgacggtcttgtcgcagctggcgctgacctaaatagaggagaaccaaactgcctgtgcgaagcagtaaagaatgaccgattggacctcgttgatcatttctacgaagctggggtagatatcaatccaacaggctacctttcaatagatcacggtcgctcacctatccaagttgctgtgtcctatggccatacacatattgtgagccgcctggtcgagctgggcgcagatatcaattcacctccggcaccatggggtggcgcaacagcattgcagcttgcagctatacaaggtcatctgggtctcgctaggtacttgattgatcgcggcgcgctcgtcgatgctgtgccggcaaggacttatgggagaactgccctccaaggagccgcagagcatggacggctcgatatgctggaatttttgctggctaatggtgcttcaacaacgggagcctggcgcagtcgtttcgtcgaggcggttgaactggccctccgtggaggtttctgttctgcagcgaagctattgaagcaggcatcagactggtcggaagaagacgagacgctcctagaaagcgttgatccggattttgatagtgatgtcgagagtaactatgacagtgatggtgatagcggcagtgatgatctctatttccctacccgtaaactcactcgtccaaagcactga

SEQ ID NO: 29449 - protein, 1427 aa, Muscodor strobelii
  misc_feature: SGI Peptide ID NO. 570115
  misc_feature (1251)..(1283): Pfam Id: PF00023 Pfam Desc: Ankyrin repeat
  misc_feature (526)..(558): Pfam Id: PF00023 Pfam Desc: Ankyrin repeat
  misc_feature (1286)..(1318): Pfam Id: PF00023 Pfam Desc: Ankyrin repeat
  misc_feature (530)..(554): Pfam Id: PF00023 Pfam Desc: Ankyrin repeat
  misc_feature (1321)..(1347): Pfam Id: PF00023 Pfam Desc: Ankyrin repeat
  misc_feature (47)..(1031): NCBI GI: 256730275 Blast Desc: NECHADRAFT_82615 [Nectria haematococca mpVI 77-13-4]
  misc_feature (302)..(1349): NCBI GI: 242816359 Blast Desc: multiple ankyrin repeats single kh domain protein, [Talaromyces stipitatus ATCC 10500] gi|218715100|gb|EED14523.1| multiple ankyrin repeats single kh domain protein, [Talaromyces
  misc_feature (857)..(1375): NCBI GI: 242760147 Blast Desc: Pfs, NACHT and Ankyrin domain protein [Talaromyces stipitatus ATCC 10500] gi|218723125|gb|EED22542.1| Pfs, NACHT and Ankyrin domain protein [Talaromyces stipitatus ATCC 10500]
  misc_feature (465)..(1387): NCBI GI: 72134394 Blast Desc: : similar to ankyrin 2,3/unc44, partial [Strongylocentrotus purpuratus] gi|115755843|ref|XP_001199940.1| : similar to ankyrin 2,3/unc44, partial [Strongylocentrotus
  misc_feature (864)..(1367): NCBI GI: 212532817 Blast Desc: multiple ankyrin repeats single kh domain protein, [Penicillium marneffei ATCC 18224] gi|210071929|gb|EEA26018.1| multiple ankyrin repeats single kh domain protein, [Penicillium
  misc_feature (868)..(1377): NCBI GI: 242760147 Blast Desc: Pfs, NACHT and Ankyrin domain protein [Talaromyces stipitatus ATCC 10500] gi|218723125|gb|EED22542.1| Pfs, NACHT and Ankyrin domain protein [Talaromyces stipitatus ATCC 10500]
  misc_feature (868)..(1380): NCBI GI: 242816359 Blast Desc: multiple ankyrin repeats single kh domain protein, [Talaromyces stipitatus ATCC 10500] gi|218715100|gb|EED14523.1| multiple ankyrin repeats single kh domain protein, [Talaromyces
  misc_feature (868)..(1380): NCBI GI: 242816359 Blast Desc: multiple ankyrin repeats single kh domain protein, [Talaromyces stipitatus ATCC 10500] gi|218715100|gb|EED14523.1| multiple ankyrin repeats single kh domain protein, [Talaromyces
  misc_feature (868)..(1375): NCBI GI: 212532817 Blast Desc: multiple ankyrin repeats single kh domain protein, [Penicillium marneffei ATCC 18224] gi|210071929|gb|EEA26018.1| multiple ankyrin repeats single kh domain protein, [Penicillium
  misc_feature (903)..(1380): NCBI GI: 242816359 Blast Desc: multiple ankyrin repeats single kh domain protein, [Talaromyces stipitatus ATCC 10500] gi|218715100|gb|EED14523.1| multiple ankyrin repeats single kh domain protein, [Talaromyces
MSSVKKKPSEAHWLEQKSFIRRMYLFEDLPLTSIVKGLASAGFEVEQHQLEYKLKKWGFKKNIDKKTWISIDDRVEKRKRDGKDSDVIYLGKRLKRETVIKETKRHRDQSALAYMNRRKGVLASLDSPQIGPEVAVCTPPPVRMEFEWPATLPWVDFSIRALPNIFNLCTQMPSESAATAYKVWAAALCLTKTTRQGGSQIGVSMLADLIGRTMPEAYPQEHVQRASALLHGAADDSLYEYLSMIVCGTSNNTLDIHRDNGEWGIIMTMLRDSGMLRRKLDLKQFRSLTIDAFMENLYTAMSLKIITRSGDEDEAVIILKWLLDSGLCPNWAAKRFWLELTDGHCSGNPAQEQLIVYVMEDLLNRGVDADLEYSSYCSGHHFTMLEMMLSPPRVLHRLSKRFRSRMVELLVQHDKPMNTSRPAVVSVLLSGAAGLSLSAIRHILAKVSAQNPSIPLARFITRAVLDAAAAEGNDDVICFLHEISNTMTVDQNDTAPLCAAVRFGHFSTCELVLSLWPTQLHTSSKLHSGPLHIACRNANPEIVQLLIEKGANVNESVSSISGEDADLILGDLDLPFEWTPLSMVLDLHHDDNFDLLVQQNRNSERLKCAALLIRAGAKLTGNEVNLAANHLHPELLSAALEGGAESNEHSTNQERSSLQLALWAAAPSESKQDDRVEVVELLLRTGAKVEIEDFIALLTIRDFTIAKVLLRYIRSEMDDLDSTRYDTHVIHCNSKLEQEQFPYSAAALCFAIKARDNEMIQQCLFFHEFYGTRNSLNTTAIALAAESGDLDLLGRLLSQCEYQPSGLLPLDGIMLKEICPNHSGNPCDGVIWGSPLASIAADRSIEALACTELIRAGFRPDMLTWAIAAHCNNCSVIQTMISCGQRYVTYGGFVRTPLLLGIGHRNRELVRLLVDAGVDVNGDNKESGSPIRKAVYGQYEEVVDSLLDAGANVSELLPDIIRQGLQNIAYRIIDAGDKLTSNEKELALQEAVESNQLDILNRLLDAGADAKATGLLWSAINHHRGCAEKSKSCLVDRHDGHDDHCLKRALETRRLSVVQRLMEAGADVNTSGCLWKAVHIGDLNLINHLLKTGADVNASKCLLEAIRQCQGDLEIIERLLQAGANANMYGCLKLAVQTRCLSVVERILEAGADPKEPIVLWQAACQENWDIVGRLLELGAKPNGEKYDFWKIAKNDRLDIVDGLVAAGADLNRGEPNCLCEAVKNDRLDLVDHFYEAGVDINPTGYLSIDHGRSPIQVAVSYGHTHIVSRLVELGADINSPPAPWGGATALQLAAIQGHLGLARYLIDRGALVDAVPARTYGRTALQGAAEHGRLDMLEFLLANGASTTGAWRSRFVEAVELALRGGFCSAAKLLKQASDWSEEDETLLESVDPDFDSDVESNYDSDGDSGSDDLYFPTRKLTRPKH

SEQ ID NO: 29450 - DNA, 1364 bp, Muscodor strobelii
  misc_feature: SGI EST ID NO. CUFF.69669.0
  misc_feature: Variant of the nucleotide sequence at SEQ ID NO 29448
tttgaatggcctgctaccttgccgtgggttgacttctcgattagggcattgccaaacattttcaacctttgtacacagatgccttcggaaagcgccgcgactgcctacaaagtctgggcagctgctctgtgcctaacgaaaacgacaagacaaggtggctcgcaaatcggcgtctcgatgttagcggacctgataggaagaacgatgcccgaagcctatccgcaagagcacgtccagcgtgcgtctgctctacttcatggagctgcggatgactccctttacgagtatctgtcgatgattgtgtgtggtacatccaacaacactttagacattcatcgtgacaatggggagtggggtattattatgacaatgcttcgagatagcggcatgttgagacgcaagttggaccttaaacagtttcgcagtctgaccattgatgcttttatggagaatctgtatacggccatgagcttaaaaatcattacacgttctggagacgaagatgaagctgtgataatactcaaatggctcctggactctggtctttgccctaattgggcggcaaagcgcttttggttggagctcactgatgggcattgtagtggcaacccggctcaagaacagctcatagtctatgtgatggaggatttactaaatcgaggcgtcgatgctgatttagaatactcaagctactgttctggtcatcatttcaccatgctcgagatgatgttaagcccccctcgagtcttacatcgactaagcaaacgttttcgttctcggatggttgagctcctcgttcaacacgacaaaccgatgaatacaagtcgccccgctgtcgtctctgtgcttctgagcggagcagcaggactgagtctttcagcaatacgacacatattagcaaaggtctcagcccagaatccatcaatcccgttggctaggttcatcacgagagcggtcttagatgcagctgccgccgaaggaaacgacgatgtcatttgcttcttacatgaaataagtaacacaatgacagtcgatcaaaatgacaccgcgccattgtgtgctgcagtacggtttggtcattttagcacgtgtgagcttgttctctccttgtggcccacacaactgcatactagctctaagttgcattctggtccgctccatattgcctgccgcaatgcgaaccctgagatcgtacaattattaatagagaaaggggccaatgtgaatgagtccgtcagttcgatatcaggcgaagacgcagacttaatactgggcgacttagacttaccatttgaatggacgccgttatcgatggtccttgaccttcatcatgatgataactttgacttattagtacagcagaa

SEQ ID NO: 29451 - DNA, 744 bp, Muscodor strobelii
  misc_feature: SGI cDNA ID NO. 570116
  misc_feature: Elevated expression when VOC is produced
  misc_feature: Encodes the peptide sequence at SEQ ID NO 29452
atgcaacccatcaaaatctggaacggtcgaccaggtactgggccaaacccgtggaaggtgatcattgtgctcgcccagctggggctaccatacgagcacgtttgggttgactacggcgagatcaaacaagagccttacctctcgctcaacccgaatggacgtcttcccgcgatggttgaccccaacacgggcgtgactctgtttgagtctggcgccattatcaactatatcgtcgacctctacgacaaggagtataagctttcgtatagtcctgacgagctccagaaaaagtatctgttgcagagctggctgatgttccagatgtctggacaaggcccgatgtttgggcagaagatatggttcataaacttccacgtagaagaaaaccttatgacggccatcgagcgatacaagacggaggtggcccgaatctgcggcgtgatcaacggcgtgctggccgcccaacgaaagaaactggctaaatccccagacgaaccggtatggcttgttggggacaaggttacatatgccgacttggctttcgtgccgtggaacacgataattccgttgcagaaagacatggattacgaacatgagtttcccgagtactggcagtggcatcagaatatggtgaacctgccggcggtcaagaaggtactggaggacaaggcggagttcatcaggacgttgaaggataccgcgattgacgttcggaatcgacaggctgatgcgcggaagttgtag

SEQ ID NO: 29452 - protein, 247 aa, Muscodor strobelii
  misc_feature: SGI Peptide ID NO. 570116
  misc_feature (2)..(79): Pfam Id: PF02798 Pfam Desc: Glutathione S-transferase, N-terminal domain
  misc_feature (113)..(214): Pfam Id: PF00043 Pfam Desc: Glutathione S-transferase, C-terminal domain
  misc_feature (14)..(229): NCBI GI: 255936911 Blast Desc: Pc13g10620 [Penicillium chrysogenum Wisconsin 54-1255] gi|211584102|emb|CAP92131.1| Pc13g10620 [Penicillium chrysogenum Wisconsin 54-1255]
  misc_feature (1)..(225): NCBI GI: 145236749 Blast Desc: An06g02010 [Aspergillus niger] gi|134075483|emb|CAK48044.1| protein product [Aspergillus niger]
  misc_feature (14)..(227): NCBI GI: 119467490 Blast Desc: glutathione-s-transferase theta, gst [Neosartorya fischeri NRRL 181] gi|119405703|gb|EAW15654.1| glutathione-s-transferase theta, gst [Neosartorya fischeri NRRL
  misc_feature (1)..(227): NCBI GI: 115399946 Blast Desc: ATEG_06384 [Aspergillus terreus NIH2624] gi|114191228|gb|EAU32928.1| ATEG_06384 [Aspergillus terreus NIH2624]
  misc_feature (1)..(225): NCBI GI: 255931813 Blast Desc: Pc12g06200 [Penicillium chrysogenum Wisconsin 54-1255] gi|134086007|gb|ABO52862.1| glutathione transferase [Penicillium chrysogenum] gi|211582082|emb|CAP80247.1| Pc12g06200 [Penicillium
  misc_feature (1)..(222): NCBI GI: 116179510 Blast Desc: CHGG_00383 [Chaetomium globosum CBS 148.51] gi|88184680|gb|EAQ92148.1| CHGG_00383 [Chaetomium globosum CBS 148.51]
  misc_feature (1)..(231): NCBI GI: 256721835 Blast Desc: NECHADRAFT_54515 [Nectria haematococca mpVI 77-13-4]
  misc_feature (13)..(225): NCBI GI: 258574099 Blast Desc: UREG_00745 [Uncinocarpus reesii 1704] gi|237901497|gb|EEP75898.1| UREG_00745 [Uncinocarpus reesii 1704]
  misc_feature (2)..(224): NCBI GI: 156063600 Blast Desc: SS1G_01918 [Sclerotinia sclerotiorum 1980] gi|154697252|gb|EDN96990.1| SS1G_01918 [Sclerotinia sclerotiorum 1980]
  misc_feature (1)..(222): NCBI GI: 240105962 Blast Desc: Glutathione S-transferase, [Coccidioides posadasii C735 delta SOWgp]
  misc_feature (14)..(225): SWISSPROT Homolog: EC 2.5.1.18 Glutathione transferase
  misc_feature: Useful for introducing or modulating the production of volatile compounds
MQPIKIWNGRPGTGPNPWKVIIVLAQLGLPYEHVWVDYGEIKQEPYLSLNPNGRLPAMVDPNTGVTLFESGAIINYIVDLYDKEYKLSYSPDELQKKYLLQSWLMFQMSGQGPMFGQKIWFINFHVEENLMTAIERYKTEVARICGVINGVLAAQRKKLAKSPDEPVWLVGDKVTYADLAFVPWNTIIPLQKDMDYEHEFPEYWQWHQNMVNLPAVKKVLEDKAEFIRTLKDTAIDVRNRQADARKL

SEQ ID NO: 29453 - DNA, 1198 bp, Muscodor strobelii
  misc_feature: SGI EST ID NO. CUFF.69681.0
  misc_feature: Variant of the nucleotide sequence at SEQ ID NO 29451
tcgctctcagatattgcaattgactatatatcaatatcgccagaccctatcatcagatggttgaactgcaagtcatcatagtcaatttcaatacgaaaaagccccccgtataaaacccagtctcatatcagcttcacgaacaaaaacgccatgcaacccatcaaaatctggaacggtcgaccaggtactgggccaaacccgtggaaggtgatcattgtgctcgcccagctggggctaccatacgagcacgtttgggttgactacggcgagatcaaacaagagccttacctctcgctcaacccgaatggacgtcttcccgcgatggttgaccccaacacgggcgtgactctgtttgagtctggcgccattatcaactatatcgtcgacctctacgacaaggagtataagctttcgtatagtcctgacgagctccagaaaaagtatctgttgcagagctggctgatgttccagatgtctggacaaggcccgatgtttgggcagaagatatggttcataaacttccacgtagaagaaaaccttatgacggccatcgagcgatacaagacggaggtggcccgaatctgcggcgtgatcaacggcgtgctggccgcccaacgaaagaaactggctaaatccccagacgaaccggtatggcttgttggggacaaggttacatatgccgacttggctttcgtgccgtggaacacgataattccgttgcagaaagacatggattacgaacatgagtttcccgagtactggcagtggcatcagaatatggtgaacctgccggcggtcaagaaggtactggaggacaaggcggagttcatcaggacgttgaaggataccgcgattgacgttcggaatcgacaggctgatgcgcggaagttgtagatgcactcaatacatgtcggctaagagacgcgctttgatacaagggctcggtgtggacttccaattattcagagtgctgagtatgtgcttgaagatggttgttaattgggcattgacgtcatcttggaatgaaagatgaatactaagtatgtaccttaccttcatgttgacttacgctagattgcatacgtctttcctcaaagccgtatcaattcgggcaaaaaataaccatcaacacataaaagagttgcgatcgtttcaaatatctacatagctcttatattgtagcttaagagagccatgc

SEQ ID NO: 29454 - DNA, 2973 bp, Muscodor strobelii
  misc_feature: SGI cDNA ID NO. 570117
  misc_feature: Encodes the peptide sequence at SEQ ID NO 29455
atgccgggccgagtcaccgccaacggagagcagacgtcacaagatgcagactctcagcataccaccgctcctgctgtcggcgcacccgcaacgaccagccccacgatgaggaagcattccgacaaagaagacgtcttggtcgagtccagacggcaggcgacgcagtgcccaacgcccccgaccgaccccttccctgacttggacgccgacaccgactcgggcgtcgacctggccggcaggagaatggacttccaagaatcaggacaggttgcagcacaggcagccggtgtaacgaccaagccccgggcaccctcctcgtccgccaaagggagcagccacgagagcgttaggaaactctcggcctcccagatgcaggccctcgccgcggcgcccgactcgctgcccaccgccgtcctccccgcccacgactaccacgcctaccacgactaccctctgtctgccggcgccgctgacgacgccgcccgtccctccatggccgaccagatgcacaacggcctgcactcgtcgcccctggacaagcccgactcactgcccactgacggtgctgtccgcttgaacaaagctcctcctcctcctcgccgcaccgctgccgacttccaacgaccccctccctcttcacgaaccctctcgacaccccctatcaacagaaagtcttcgtcttccgccgtccccatgacacacccagcccacaaccgccgaaactcctttaatcctctccccagaccagctccgctcaacctcaacactcaaaaccatgtcccgcaacaagcgtccaccaagccttcgcccgcccagccagcctcggaaacaccgaatccccctccgaccgagcctttgcttcctacgatacccctgccgcccatgtcccttcctacgcatttacagctcgagttggctggtcagcggcccagtcctttgtacatacatcatgacccatccgccgacgagccctacgagtccagcgcagtcaagttcgagcgtctgctcaactctttgctcctgcccccttatctagagcaagtcatgtatttcggcaccctggcctgcttcgatgcctggctatatactttcacaatcctccccatgcgcttcgtgtccgcgctgggcgtcctgattcgatggtggctgtatctgctgtggaaggagatcaagtgggttgtcggttatgtctggttcggcttgggccggctgtggaggagaggccgaagaggcaggtcgaggtctcgcgatcgggcggacagcagccaggtcacgagcgaggccgagaggagtcagagccgcccgcgaggcaccagctcaagccagaaagtgcaacagaacggcacggccagattccgcactggctccgacgctgttgtcaactccgcaaacaacggagagcctcagcggtcgacggccaacggagcatttcaccctcccaagcacgttatgccgagatcggcgcagtttcgacatcgtaggacgaagtcaatgccctcgaatctcacctcctttaataaagccgatctcctgcagggtgctcttctcatctgcagctccatggctctgatgaacctcgacgccagccgcatgtaccacttcatccgtgcacagtcttccatgaagctttacgtcatatacaatatcctcgaggtcgccgatcgcctcctcggagccattggccaggacatcttggagtgtctcttcagctccgagacgctatctaggaacagctccggcagatccaaagtcctcctgccctttggcatgttcatattatcactaatatacaatgtcatccacacatggtgtttgttctatcaggtcatcactctgaatgtcgccgtcaattcttattccaattcactcttgaccctgctcatatccaaccaattcgtggagatcaagggaagcgttttcaagaagatagaaaaggagaacttgttccagctcacctgctcagacgtggtcgagaggttccagacttgtattattctactcattatcggcatgcgaaacatcgttgaggtcggaggcttgtccatacctcaaagcacctttaatccggagggagggttttctgcagggcccaagcattccaactcgatattacccgcaagctttactgtcttgcccgcctggcttcagtccatggaggttctttcgcccttcatcatcgtcatcggcatcgagatgctggtggactggattaagcacgcttacatcaataagttcaacaacgtcaagcccagactctacagacgcatgctggacattctctgcaaggactattatacaaatgcattttcagcgtcttcattaagccgtcgcctgggcttacccgtgatacccctttcttgcttgtttatccgcgcgtccgttcaagtctatcacatgttcctcgccacgcatgtaccctcccccatccccacctcaacgacagaactatctgttgaatcatcgacaccatcgtccgctgctatggttgctgcctttgagcatctcgacaccctcattcgtcacgctctgggccgtgccgtgtacgcacataatactccatcggaaaatccctggtggtctttctccacagacgacgccatcgcccttctcaccatggttgttttcttcttcctggcctgggtcgtactgctgatagtcaagcttctgctcggcatggtgttactccggtattctcatcgtcgttactcactcatgaaagccaaggaacacgctattgcgacgggccaagcggaacacgaaaatttcttcacagacgggagacgcattgggtcttggggtgccgtagagatcggcgatgagcggaggaaggttctatatgacgatgatcccgatggtctcaaggctatgcgtgatagagagagaaagacggctgcgaaggcgcaggagaggggcaaggatgatgggctggcgaaggtcagtcggtatgagttgtcggggaagaggatctggtag

SEQ ID NO: 29455 - protein, 990 aa, Muscodor strobelii
  misc_feature: SGI Peptide ID NO. 570117
  misc_feature (498)..(906): Pfam Id: PF05346 Pfam Desc: Eukaryotic membrane protein family
  misc_feature (588)..(683): Pfam Id: PF05346 Pfam Desc: Eukaryotic membrane protein family
  misc_feature (502)..(579): Pfam Id: PF05346 Pfam Desc: Eukaryotic membrane protein family
  misc_feature (707)..(804): Pfam Id: PF05346 Pfam Desc: Eukaryotic membrane protein family
  misc_feature (43)..(990): NCBI GI: 171682954 Blast Desc: protein product [Podospora anserina] gi|170941436|emb|CAP67087.1| protein product [Podospora anserina]
  misc_feature (21)..(990): NCBI GI: 116203305 Blast Desc: CHGG_09537 [Chaetomium globosum CBS 148.51] gi|88178055|gb|EAQ85523.1| CHGG_09537 [Chaetomium globosum CBS 148.51]
  misc_feature (105)..(963): NCBI GI: 46110701 Blast Desc: FG02232.1 [Gibberella zeae PH-1]
  misc_feature (83)..(990): NCBI GI: 256724913 Blast Desc: NECHADRAFT_91490 [Nectria haematococca mpVI 77-13-4]
  misc_feature (90)..(990): NCBI GI: 261361488 Blast Desc: transmembrane anterior posterior transformation 1 [Verticillium albo-atrum VaMs.102]
  misc_feature (99)..(990): NCBI GI: 164424495 Blast Desc: NCU07125 [Neurospora crassa OR74A] gi|157070538|gb|EAA31072.2| conserved [Neurospora crassa OR74A]
  misc_feature (107)..(990): NCBI GI: 156060055 Blast Desc: SS1G_02165 [Sclerotinia sclerotiorum 1980] gi|154699574|gb|EDN99312.1| SS1G_02165 [Sclerotinia sclerotiorum 1980]
  misc_feature (66)..(990): NCBI GI: 145612934 Blast Desc: MGG_08332 [Magnaporthe grisea 70-15] gi|145020020|gb|EDK04248.1| MGG_08332 [Magnaporthe grisea 70-15]
  misc_feature (111)..(990): NCBI GI: 189190894 Blast Desc: PTRG_01453 [Pyrenophora tritici-repentis Pt-1C-BFP] gi|187973392|gb|EDU40891.1| PTRG_01453 [Pyrenophora tritici-repentis Pt-1C-BFP]
  misc_feature (96)..(990): NCBI GI: 240278103 Blast Desc: DUF747 domain-containing protein [Ajellomyces capsulatus H143]
MPGRVTANGEQTSQDADSQHTTAPAVGAPATTSPTMRKHSDKEDVLVESRRQATQCPTPPTDPFPDLDADTDSGVDLAGRRMDFQESGQVAAQAAGVTTKPRAPSSSAKGSSHESVRKLSASQMQALAAAPDSLPTAVLPAHDYHAYHDYPLSAGAADDAARPSMADQMHNGLHSSPLDKPDSLPTDGAVRLNKAPPPPRRTAADFQRPPPSSRTLSTPPINRKSSSSAVPMTHPAHNRRNSFNPLPRPAPLNLNTQNHVPQQASTKPSPAQPASETPNPPPTEPLLPTIPLPPMSLPTHLQLELAGQRPSPLYIHHDPSADEPYESSAVKFERLLNSLLLPPYLEQVMYFGTLACFDAWLYTFTILPMRFVSALGVLIRWWLYLLWKEIKWVVGYVWFGLGRLWRRGRRGRSRSRDRADSSQVTSEAERSQSRPRGTSSSQKVQQNGTARFRTGSDAVVNSANNGEPQRSTANGAFHPPKHVMPRSAQFRHRRTKSMPSNLTSFNKADLLQGALLICSSMALMNLDASRMYHFIRAQSSMKLYVIYNILEVADRLLGAIGQDILECLFSSETLSRNSSGRSKVLLPFGMFILSLIYNVIHTWCLFYQVITLNVAVNSYSNSLLTLLISNQFVEIKGSVFKKIEKENLFQLTCSDVVERFQTCIILLIIGMRNIVEVGGLSIPQSTFNPEGGFSAGPKHSNSILPASFTVLPAWLQSMEVLSPFIIVIGIEMLVDWIKHAYINKFNNVKPRLYRRMLDILCKDYYTNAFSASSLSRRLGLPVIPLSCLFIRASVQVYHMFLATHVPSPIPTSTTELSVESSTPSSAAMVAAFEHLDTLIRHALGRAVYAHNTPSENPWWSFSTDDAIALLTMVVFFFLAWVVLLIVKLLLGMVLLRYSHRRYSLMKAKEHAIATGQAEHENFFTDGRRIGSWGAVEIGDERRKVLYDDDPDGLKAMRDRERKTAAKAQERGKDDGLAKVSRYELSGKRIW

SEQ ID NO: 29456 - DNA, 3536 bp, Muscodor strobelii
  misc_feature: SGI EST ID NO. CUFF.69694.0
  misc_feature: Variant of the nucleotide sequence at SEQ ID NO 29454
caaaccttggtcgtggttgattcaacctcagctcctccaacttatgatagtataaccagcagcggcgacagcatcgaggaccacatctgtacataggtcgtgtttgagtagtggcacatacgcccggatttcaagttatccatcccttcgctgtgcaatatcacatccccacctgcgtccacactggcggccaacgcattcattgatccgatcccattccgacggaccggccacgactccctttgactcgacttccgctcgacttaaagcgacaatgcccacctcacaacatatctaatatcaatgaccctctcatgagcacccgtatgatgccgggccgagtcaccgccaacggagagcagacgtcacaagatgcagactctcagcataccaccgctcctgctgtcggcgcacccgcaacgaccagccccacgatgaggaagcattccgacaaagaagacgtcttggtcgagtccagacggcaggcgacgcagtgcccaacgcccccgaccgaccccttccctgacttggacgccgacaccgactcgggcgtcgacctggccggcaggagaatggacttccaagaatcaggacaggttgcagcacaggcagccggtgtaacgaccaagccccgggcaccctcctcgtccgccaaagggagcagccacgagagcgttaggaaactctcggcctcccagatgcaggccctcgccgcggcgcccgactcgctgcccaccgccgtcctccccgcccacgactaccacgcctaccacgactaccctctgtctgccggcgccgctgacgacgccgcccgtccctccatggccgaccagatgcacaacggcctgcactcgtcgcccctggacaagcccgactcactgcccactgacggtgctgtccgcttgaacaaagctcctcctcctcctcgccgcaccgctgccgacttccaacgaccccctccctcttcacgaaccctctcgacaccccctatcaacagaaagtcttcgtcttccgccgtccccatgacacacccagcccacaaccgccgaaactcctttaatcctctccccagaccagctccgctcaacctcaacactcaaaaccatgtcccgcaacaagcgtccaccaagccttcgcccgcccagccagcctcggaaacaccgaatccccctccgaccgagcctttgcttcctacgatacccctgccgcccatgtcccttcctacgcatttacagctcgagttggctggtcagcggcccagtcctttgtacatacatcatgacccatccgccgacgagccctacgagtccagcgcagtcaagttcgagcgtctgctcaactctttgctcctgcccccttatctagagcaagtcatgtatttcggcaccctggcctgcttcgatgcctggctatatactttcacaatcctccccatgcgcttcgtgtccgcgctgggcgtcctgattcgatggtggctgtatctgctgtggaaggagatcaagtgggttgtcggttatgtctggttcggcttgggccggctgtggaggagaggccgaagaggcaggtcgaggtctcgcgatcgggcggacagcagccaggtcacgagcgaggccgagaggagtcagagccgcccgcgaggcaccagctcaagccagaaagtgcaacagaacggcacggccagattccgcactggctccgacgctgttgtcaactccgcaaacaacggagagcctcagcggtcgacggccaacggagcatttcaccctcccaagcacgttatgccgagatcggcgcagtttcgacatcgtaggacgaagtcaatgccctcgaatctcacctcctttaataaagccgatctcctgcagggtgctcttctcatctgcagctccatggctctgatgaacctcgacgccagccgcatgtaccacttcatccgtgcacagtcttccatgaagctttacgtcatatacaatatcctcgaggtcgccgatcgcctcctcggagccattggccaggacatcttggagtgtctcttcagctccgagacgctatctaggaacagctccggcagatccaaagtcctcctgccctttggcatgttcatattatcactaatatacaatgtcatccacacatggtgtttgttctatcaggtcatcactctgaatgtcgccgtcaattcttattccaattcactcttgaccctgctcatatccaaccaattcgtggagatcaagggaagcgttttcaagaagatagaaaaggagaacttgttccagctcacctgctcagacgtggtcgagaggttccagacttgtattattctactcattatcggcatgcgaaacatcgttgaggtcggaggcttgtccatacctcaaagcacctttaatccggagggagggttttctgcagggcccaagcattccaactcgatattacccgcaagctttactgtcttgcccgcctggcttcagtccatggaggttctttcgcccttcatcatcgtcatcggcatcgagatgctggtggactggattaagcacgcttacatcaataagttcaacaacgtcaagcccagactctacagacgcatgctggacattctctgcaaggactattatacaaatgcattttcagcgtcttcattaagccgtcgcctgggcttacccgtgatacccctttcttgcttgtttatccgcgcgtccgttcaagtctatcacatgttcctcgccacgcatgtaccctcccccatccccacctcaacgacagaactatctgttgaatcatcgacaccatcgtccgctgctatggttgctgcctttgagcatctcgacaccctcattcgtcacgctctgggccgtgccgtgtacgcacataatactccatcggaaaatccctggtggtctttctccacagacgacgccatcgcccttctcaccatggttgttttcttcttcctggcctgggtcgtactgctgatagtcaagcttctgctcggcatggtgttactccggtattctcatcgtcgttactcactcatgaaagccaaggaacacgctattgcgacgggccaagcggaacacgaaaatttcttcacagacgggagacgcattgggtcttggggtgccgtagagatcggcgatgagcggaggaaggttctatatgacgatgatcccgatggtctcaaggctatgcgtgatagagagagaaagacggctgcgaaggcgcaggagaggggcaaggatgatgggctggcgaaggtcagtcggtatgagttgtcggggaagaggatctggtagtcgggtccatatagatataattgcattcggtatggcgcataggtctaatgcatgcggagattttgcttagttcttctgtatcttgttacacgtggcagctgttaggcagtgaaagtagcgataacgctatcatgacaatatcatagccagtgaaacgtcttcctgtcaggcatgtatgaagagatcatcttgagatgtctggagctcgtttgcaagttcctacgtagaggtccc

SEQ ID NO: 29457 - DNA, 477 bp, Muscodor strobelii
  misc_feature: SGI cDNA ID NO. 570118
  misc_feature: Elevated expression when VOC is produced
  misc_feature: Encodes the peptide sequence at SEQ ID NO 29458
atgttgtcatccattcagctcttatcaatcctcctccttgcggcacctctcaatgcccacccgacagccatctcatcaacctcatcacaaaccaccgaacaatgcaccctcaatctaaaaactactcaatcctcttcttctaacaccaactccgatctcaaagtcaacctcggtctcttcttcgcaaacaataccgtgatccccgtcgccagcgcagcgatcacgaaatccgtcctccagggtggatcactccagacaggagccttcgcctcaaatgcagatgtaacggccaaaacgctacagatcgacttcgcggatcctcaagtagtcgattttacttacggggcgttgaaatggagtacgaaggataatgtcgcttcgaaggagaaaccgttttgcttcgagcctgagataggtggtgaggataaagatgaggatactgtggagaagacgttcgattgccagtttcaatgttag

SEQ ID NO: 29458 - protein, 158 aa, Muscodor strobelii
  misc_feature: SGI Peptide ID NO. 570118
  misc_feature: Useful for introducing or modulating the production of volatile compounds
MLSSIQLLSILLLAAPLNAHPTAISSTSSQTTEQCTLNLKTTQSSSSNTNSDLKVNLGLFFANNTVIPVASAAITKSVLQGGSLQTGAFASNADVTAKTLQIDFADPQVVDFTYGALKWSTKDNVASKEKPFCFEPEIGGEDKDEDTVEKTFDCQFQC

SEQ ID NO: 29459 - DNA, 846 bp, Muscodor strobelii
  misc_feature: SGI EST ID NO. CUFF.69686.0
  misc_feature: Variant of the nucleotide sequence at SEQ ID NO 29457
gaagttcgcaggaatatgtttgctgcagtctaggtaggtcaggaagatatataaccggacctacctgggttctctcttgcgcattcgttcatgtatgcttcgctacgctcgttcacgtcaagatcttcatattcattcctaataaataacttcaaacttcataaacctaactttcacattttctataatgttgtcatccattcagctcttatcaatcctcctccttgcggcacctctcaatgcccacccgacagccatctcatcaacctcatcacaaaccaccgaacaatgcaccctcaatctaaaaactactcaatcctcttcttctaacaccaactccgatctcaaagtcaacctcggtctcttcttcgcaaacaataccgtgatccccgtcgccagcgcagcgatcacgaaatccgtcctccagggtggatcactccagacaggagccttcgcctcaaatgcagatgtaacggccaaaacgctacagatcgacttcgcggatcctcaagtagtcgattttacttacggggcgttgaaatggagtacgaaggataatgtcgcttcgaaggagaaaccgttttgcttcgagcctgagataggtggtgaggataaagatgaggatactgtggagaagacgttcgattgccagtttcaatgttaggagtaatgcattgacttacgttattgttgtggcactcggtgtttggagttctctgtgtcggcctcgtgttttgggggaaaaggggttggaggggggtgaaatacttttgtgcaccgcgttggttttgatccatactctctgcatgattagttgtcacatcatttcttgcagatcttattcat

SEQ ID NO: 29460 - DNA, 552 bp, Muscodor strobelii
  misc_feature: SGI cDNA ID NO. 570119
  misc_feature: Reduced expression when VOC is produced
  misc_feature: Encodes the peptide sequence at SEQ ID NO 29461
atgccgtccatcccgcccgcggtcctcgcgcgtctccccaacgcacccctccacaccctagtccgcaagcaaaacatttgggccttcttcatcctcctgacctccgcatcgggcgttattctcggtttcgccgtagcgttgaacctcaagaaccctgtcgctcgcccgaacaccacatgcgataatcggagtgatcccatattctggcagattctcgggcaaacaattctgaaggtgctactcgtggtctgtatcttggtccccgtgctgaaggataggagaaatagtgccgtgagaagaacagctgctgttgctgctgaggatgatggaccgcatgcccctggacctgtggaggccgtgttgaggattgggagttatgctattctttttacgtgtgccggggttagtattgtcagtgaggttcttgggttggtcttttatgccactctttgtgggaatgggggctggttggcggatttgcttttgggttgggctgcgagtctcactgctgcggctgttgcggctcagatcgctgttgcgcttgagaagtag

SEQ ID NO: 29461 - protein, 183 aa, Muscodor strobelii
  misc_feature: SGI Peptide ID NO. 570119
  misc_feature: Useful for introducing or modulating the production of volatile compounds
MPSIPPAVLARLPNAPLHTLVRKQNIWAFFILLTSASGVILGFAVALNLKNPVARPNTTCDNRSDPIFWQILGQTILKVLLVVCILVPVLKDRRNSAVRRTAAVAAEDDGPHAPGPVEAVLRIGSYAILFTCAGVSIVSEVLGLVFYATLCGNGGWLADLLLGWAASLTAAAVAAQIAVALEK

SEQ ID NO: 29462 - DNA, 3474 bp, Muscodor strobelii
  misc_feature: SGI EST ID NO. CUFF.69689.0
  misc_feature: Variant of the nucleotide sequence at SEQ ID NO 29460
gcgccgccacaacagggtcgcgtacagaaaccgcttcgcctttaaaaggccaacgcccacttccagccctcttcgttcggagcggcacatctaacggccttgttttacgggcttcagacttacccgccgatcaaggcgcatggggtgatattctccccgcagtcatgggtgcacctgacagtgcttatgggcgacagctggatggcatgggagggggctcctcaagcacgtccaagatttgtgttctcgcgccctcgtcgcgagacgatgcagatgtggacttcacgttcgtgcaagtaggcattcgcgacggtcgactagatcttgcgggaaactgcgggaacatgagcgctatcgtcggacccgtagcatgggactggggctttgcgaagggccagaattttactgacggacaagaagaggccttgatccgcattttcaacacgaatacgtctaagatcatgcattcgagattccgtgtccatgggaccccgccccaatattgttctgtcggcgactacgtcatggacggtgtcccggggacacagagccgaatcactctgagttttgttgatcctgctggggcgaagacaggcaaggcgttaccgacagggaatccggttgacgtgttgaaactaccggacggcacctcaatacgggcgtcgcttgtggatgtatcgaacccgggggtattcgtggctcttgaagagctgctcggcacggatcaccatatttactcacctgccgcaatagagagcaaccaacaactcaaggaacggctcgaaataataagacgcgcgggcgctgcgcgtatgggtctcgatccggacgtggaaagcgtgccgaagattgtgctcgtctatccccctgagaatggcaccgatctcgatctgcgatgcctcgccatgtcgatgggacaggcgcacaaggcagcgccacttacgctgtctctttgcttgggtgctgctacgagcatggacggtactattccggcacaggtctgccgacagaggaaagattcagaagcgacaagaaggcaaaatcactctgtcgtcatcggacaccccagtgggagcgtcgaaatcggagccacaattgagaaaggcaagattgtgtccgcggagctgcatcgaactgcaagggtcatgatgaaaggcgaggtctattactaatttaggcactgccgccagtacctaatgcccgctatttacaccttgccgcgaaatacagaggtaatgaattatggctgacacaggtattgttcttctatccgtcattcttgaatgtgtattaggtaggcggtctctcctcgttacatgcttgcccatctccccaaggccatccatttcttgtggacgatctcccctgactggaatgtaagcgacaaaattgaaaacgatttgtcctaagaatcgcggagtcagcctcttcctttgggcatcatcgaatagggctttatgcagactatagttggcacgccggttttatcttgtcgctgttacgcgatatggaactacgccatgatcagttataaatgacgtacaagcttgtccgtgacgctacctcccatgatgtttccagaacaaaccagcctgaagactcgcttgcacgacaatttggtcttcagttgaacaatagtagtaaggtacttcgaactcatcgactgtttcgacatgaacacgaaaagtctgccggtcatcgggtggggtgccaccctatactgggtttgaaatcactctgggaagagcccatgtccagacgacacctcattattactggtctcgctgagctacctatagccgtttcgtcaaggtgcgatgcgaatagggccaagtggaagaccttaattattgactatgttgcgccatgaaaccctgacaaattctgatgcgatgatcagatctgaaagcatgacggagctatttcaagagattgcctagacactatgtggctacatattcttgcctttcggggcattgtcttctcacactggactgcttcatcgcgacgcttctatgcagtacgcgcttgaaatggaaggggggcgaagtcagtacttgttgggcccgaccgaagagacctctgctcccttcgcgcatagatttaggctgtgctcctcatcttccactacgaaaaagggcccttaccttaggaatagactcccgggccttttatctccatttgacgcgatgagtgtagaacatgggcttttagcaatatcaacaatccgaaaaaatgctttgctatatcatgatgaatgagccgtcacgattagagttgaatcagcgtgagcaacattgggtgaggcgccatgttgtcacgatgataattgggcttgccgctaccgctacgagcacatgtcacagtctccgattacgcttctgtaatcgagctatctcaaaaatggtgatcatctcgctttcattcataccaccgaccggtaacacccaggtagcaaacacatgttcgaggtatgaagcgctgagtgaggagatgacaagcatttaaatgtgaataatcggacatttaatatgagtcaagtactatcttgctatatatgttcaagacttttcataagtctcgacttactcttgatcgcccgtgtctacacagtaccacgacatcaacaaactttaccactgcgcacaactaacttacttcgtttttgttggctgctagcaaactggacaacccaactcctttagttttgaccttcagacctcgaatatctatctacctaccaatcatctcaaacgccctacttaccctatcccgcactctgcaccgtatcgccatctccctcctgaccagcacacccattcttcacgtagctatgccgtccatcccgcccgcggtcctcgcgcgtctccccaacgcacccctccacaccctagtccgcaagcaaaacatttgggccttcttcatcctcctgacctccgcatcgggcgttattctcggtttcgccgtagcgttgaacctcaagaaccctgtcgctcgcccgaacaccacatgcgataatcggagtgatcccatattctggcagattctcgggcaaacaattctgaaggtgctactcgtggtctgtatcttggtccccgtgctgaaggataggagaaatagtgccgtgagaagaacagctgctgttgctgctgaggatgatggaccgcatgcccctggacctgtggaggccgtgttgaggattgggagttatgctattctttttacgtgtgccggggttagtattgtcagtgaggttcttgggttggtcttttatgccactctttgtgggaatgggggctggttggcggatttgcttttgggttgggctgcgagtctcactgctgcggctgttgcggctcagatcgctgttgcgcttgagaagtagagaagtagcgtctttcgttgttgcaatattgtggtatgagggagagaattggagatagagagtcttaacaatgagagtcaatgtttgtg

SEQ ID NO: 29463 - DNA, 1236 bp, Muscodor strobelii
  misc_feature: SGI cDNA ID NO. 570120
  misc_feature: Encodes the peptide sequence at SEQ ID NO 29464
atgtcgacaccaccaccacaatcagcgtcgcaaagctacgttgcgtcccatgctctgcaaccgcgcgccgccacaacagggtcgcgtacagaaaccgcttcgcctttaaaaggccaacgcccacttccagccctcttcgttcggagcggcacatctaacggccttgttttacgggcttcagacttacccgccgatcaaggcgcatggggtgatattctccccgcagtcatgggtgcacctgacagtgcttatgggcgacagctggatggcatgggagggggctcctcaagcacgtccaagatttgtgttctcgcgccctcgtcgcgagacgatgcagatgtggacttcacgttcgtgcaagtaggcattcgcgacggtcgactagatcttgcgggaaactgcgggaacatgagcgctatcgtcggacccgtagcatgggactggggctttgcgaagggccagaattttactgacggacaagaagaggccttgatccgcattttcaacacgaatacgtctaagatcatgcattcgagattccgtgtccatgggaccccgccccaatattgttctgtcggcgactacgtcatggacggtgtcccggggacacagagccgaatcactctgagttttgttgatcctgctggggcgaagacaggcaaggcgttaccgacagggaatccggttgacgtgttgaaactaccggacggcacctcaatacgggcgtcgcttgtggatgtatcgaacccgggggtattcgtggctcttgaagagctgctcggcacggatcaccatatttactcacctgccgcaatagagagcaaccaacaactcaaggaacggctcgaaataataagacgcgcgggcgctgcgcgtatgggtctcgatccggacgtggaaagcgtgccgaagattgtgctcgtctatccccctgagaatggcaccgatctcgatctgcgatgcctcgccatgtcgatgggacaggcgcacaaggcagcgccacttacgctgtctctttgcttgggtgctgctacgagcatggacggtactattccggcacaggtctgccgacagaggaaagattcagaagcgacaagaaggcaaaatcactctgtcgtcatcggacaccccagtgggagcgtcgaaatcggagccacaattgagaaaggcaagattgtgtccgcggagctgcatcgaactgcaagggtcatgatgaaaggcgaggtctattactaa

SEQ ID NO: 29464 - protein, 411 aa, Muscodor strobelii
  misc_feature: SGI Peptide ID NO. 570120
  misc_feature (39)..(411): Pfam Id: PF04303 Pfam Desc: Domain of function (DUF453)
  misc_feature (39)..(410): Pfam Id: PF04303 Pfam Desc: Domain of function (DUF453)
  misc_feature (14)..(409): NCBI GI: 46122215 Blast Desc: FG05485.1 [Gibberella zeae PH-1]
  misc_feature (39)..(411): NCBI GI: 261358263 Blast Desc: methylitaconate delta2-delta3-isomerase [Verticillium albo-atrum VaMs.102]
  misc_feature (40)..(409): NCBI GI: 256729909 Blast Desc: NECHADRAFT_46522 [Nectria haematococca mpVI 77-13-4]
  misc_feature (46)..(409): NCBI GI: 256730005 Blast Desc: NECHADRAFT_94928 [Nectria haematococca mpVI 77-13-4]
  misc_feature (142)..(411): NCBI GI: 116208098 Blast Desc: CHGG_03342 [Chaetomium globosum CBS 148.51] gi|88183939|gb|EAQ91407.1| CHGG_03342 [Chaetomium globosum CBS 148.51]
  misc_feature (39)..(410): NCBI GI: 42524249 Blast Desc: Bd2841 [Bdellovibrio bacteriovorus HD100] gi|39576457|emb|CAE80622.1| conserved [Bdellovibrio bacteriovorus HD100]
  misc_feature (40)..(411): NCBI GI: 148260269 Blast Desc: Acry_1266 [Acidiphilium cryptum JF-5] gi|146401950|gb|ABQ30477.1| methylitaconate delta2-delta3-isomerase [Acidiphilium cryptum JF-5]
  misc_feature (40)..(410): NCBI GI: 73917964 Blast Desc: [Paracoccus pantotrophus]
  misc_feature (29)..(411): NCBI GI: 258564456 Blast Desc: conserved [Uncinocarpus reesii 1704] gi|237908480|gb|EEP82881.1| conserved [Uncinocarpus reesii 1704]
  misc_feature (39)..(411): NCBI GI: 238844916 Blast Desc: DUF453 domain-containing protein [Microsporum canis CBS 113480]
MSTPPPQSASQSYVASHALQPRAATTGSRTETASPLKGQRPLPALFVRSGTSNGLVLRASDLPADQGAWGDILPAVMGAPDSAYGRQLDGMGGGSSSTSKICVLAPSSRDDADVDFTFVQVGIRDGRLDLAGNCGNMSAIVGPVAWDWGFAKGQNFTDGQEEALIRIFNTNTSKIMHSRFRVHGTPPQYCSVGDYVMDGVPGTQSRITLSFVDPAGAKTGKALPTGNPVDVLKLPDGTSIRASLVDVSNPGVFVALEELLGTDHHIYSPAAIESNQQLKERLEIIRRAGAARMGLDPDVESVPKIVLVYPPENGTDLDLRCLAMSMGQAHKAAPLTLSLCLGAATSMDGTIPAQVCRQRKDSEATRRQNHSVVIGHPSGSVEIGATIEKGKIVSAELHRTARVMMKGEVYY

SEQ ID NO: 29465 - DNA, 1776 bp, Muscodor strobelii
  misc_feature: SGI cDNA ID NO. 570121
  misc_feature: Encodes the peptide sequence at SEQ ID NO 29466
atgttgcaatcgcgatggtggcttccgtcagtgctggctctttggaccatcactgtgcatgcgaagctgaactgtccactctacgggctgggatatcctaagccgagtaacttgttaagctcggaaggcatccaaaaagcaggcacgagtcttgattccgttttcgctcaatatatcgacaatgcaaacaacaccggctccgactacttctcctattccgttcaggtcttttctgctgctgagaaacagccgatatggtctcaccactggacagccaagaacttggcaactatgaataccactggcgtcaagaaggtcgatggcgacacagtgtatcgagtgggtagtttgacaaaggttctcagcatgctgacgttcctcgcggaggtaggcgacgcatcttggaatgagcctatcacgaaattcgttcctgagattgccgatatggttgccaatggatcggactactcgcattccttgactacacctgattggggatctattaccataggctcgttggcgagccagatttcagggctgatgagggattacgctctgctcggcgagctcacgattagcagtaacgtgagccaggcgacaaagattgggtttcctgcactggcagacattgatattccaccctgtggcgatgcgccggtttgcaacagagctcagttcttcgatgggttgaagaaactcccaccgtctttctcaccttttgtgacaccggcatattcggacattggttacactctcttagggtatgcactggagagcatgactgggaaatcctttcagcaatcgttcgaggacaaaattgtgaaacccctgaatctgaatcggacattttataccactcctaatgattctctgggcgtgataccaggtggtagatatctcacaacgtgggcttttgacatgggccatgaatcgcctaccggcaatgtttatgcatcgatctcggacttgtcaaccattggaagggccattctacagtctacactcctgccaccagccctgacacgacgttggctcaggcctgtcactttcagttcagatcctgcatcgtccgttggtagcccatggggcgtacggcgattgtctcttccaacgaattcatcgtatcaatttgcgaccacattcaacaagcttggaagcatgggaaagtacagcgccctgctagctgtcattcccgattttgatctagggttttctgttatgggtgcgggcgagcttcctgctgccctaatgctgaatatcgctgatactttatctaatacatacctgcctactgttcttgccgttgctcggtcacaggccttcgcgacgtacgcggggtcctaccagtatatcggtctcaacactactctcaattcttccatcactatctccgtagacgatgcgcatccaggcctcggagtcagctcgtggataagtaacggtactgatctaatgggtatctcggttgccttaggtcaaaatattacgcaagggtactggaaggacatccagcccagcatccgattgtaccctactggtctgtgggatgccacagcagacgggggcaagcgtgtaggattcaaagcggtctttgaagacttgagtgcaccgaatgcctcatatccgttcacgacagactgtacgacatgggttaatgttgcaggcgttgtgtacggatcgcaacctttggattcttttgtttttgactttgcagcaaatgggactgtagtggctatggaaaatgcagcacttcgcattcgactcgtgaagacatag

SEQ ID NO: 29466 - protein, 591 aa, Muscodor strobelii
  misc_feature: SGI Peptide ID NO. 570121
  misc_feature (51)..(427): Pfam Id: PF00144 Pfam Desc: Beta-lactamase
  misc_feature (104)..(427): Pfam Id: PF00144 Pfam Desc: Beta-lactamase
  misc_feature (21)..(590): NCBI GI: 164426216 Blast Desc: NCU01038 [Neurospora crassa OR74A] gi|16415969|emb|CAD01102.1| conserved [Neurospora crassa] gi|157071245|gb|EAA32414.2| [Neurospora crassa OR74A]
  misc_feature (8)..(590): NCBI GI: 116198601 Blast Desc: CHGG_07456 [Chaetomium globosum CBS 148.51] gi|88178735|gb|EAQ86203.1| CHGG_07456 [Chaetomium globosum CBS 148.51]
  misc_feature (21)..(588): NCBI GI: 145601307 Blast Desc: MGG_14134 [Magnaporthe grisea 70-15] gi|145009316|gb|EDJ94027.1| MGG_14134 [Magnaporthe grisea 70-15]
  misc_feature (1)..(590): NCBI GI: 169615793 Blast Desc: SNOG_11060 [Phaeosphaeria nodorum SN15] gi|160703048|gb|EAT81559.2| SNOG_11060 [Phaeosphaeria nodorum SN15]
  misc_feature (21)..(590): NCBI GI: 145604126 Blast Desc: MGG_10744 [Magnaporthe grisea 70-15] gi|145012195|gb|EDJ96851.1| MGG_10744 [Magnaporthe grisea 70-15]
  misc_feature (24)..(547): NCBI GI: 116182952 Blast Desc: CHGG_02104 [Chaetomium globosum CBS 148.51] gi|88186401|gb|EAQ93869.1| CHGG_02104 [Chaetomium globosum CBS 148.51]
  misc_feature (21)..(590): NCBI GI: 164428737 Blast Desc: NCU00993 [Neurospora crassa OR74A] gi|157072259|gb|EAA34667.2| [Neurospora crassa OR74A]
  misc_feature (25)..(590): NCBI GI: 169765968 Blast Desc: [Aspergillus oryzae RIB40] gi|83765310|dbj|BAE55453.1| protein product [Aspergillus oryzae]
  misc_feature (19)..(580): NCBI GI: 238492251 Blast Desc: beta-lactamase, [Aspergillus flavus NRRL3357] gi|220695856|gb|EED52198.1| beta-lactamase, [Aspergillus flavus NRRL3357]
  misc_feature (25)..(588): NCBI GI: 67904662 Blast Desc: AN9318.2 [Aspergillus nidulans FGSC A4] gi|40747229|gb|EAA66385.1| AN9318.2 [Aspergillus nidulans FGSC A4] gi|259488153|tpe|CBF87393.1| TPA: conserved [Aspergillus FGSC
MLQSRWWLPSVLALWTITVHAKLNCPLYGLGYPKPSNLLSSEGIQKAGTSLDSVFAQYIDNANNTGSDYFSYSVQVFSAAEKQPIWSHHWTAKNLATMNTTGVKKVDGDTVYRVGSLTKVLSMLTFLAEVGDASWNEPITKFVPEIADMVANGSDYSHSLTTPDWGSITIGSLASQISGLMRDYALLGELTISSNVSQATKIGFPALADIDIPPCGDAPVCNRAQFFDGLKKLPPSFSPFVTPAYSDIGYTLLGYALESMTGKSFQQSFEDKIVKPLNLNRTFYTTPNDSLGVIPGGRYLTTWAFDMGHESPTGNVYASISDLSTIGRAILQSTLLPPALTRRWLRPVTFSSDPASSVGSPWGVRRLSLPTNSSYQFATTFNKLGSMGKYSALLAVIPDFDLGFSVMGAGELPAALMLNIADTLSNTYLPTVLAVARSQAFATYAGSYQYIGLNTTLNSSITISVDDAHPGLGVSSWISNGTDLMGISVALGQNITQGYWKDIQPSIRLYPTGLWDATADGGKRVGFKAVFEDLSAPNASYPFTTDCTTWVNVAGVVYGSQPLDSFVFDFAANGTVVAMENAALRIRLVKT

SEQ ID NO: 29467 - DNA, 456 bp, Muscodor strobelii
  misc_feature: SGI EST ID NO. CUFF.69722.0
  misc_feature: Variant of the nucleotide sequence at SEQ ID NO 29465
gtgaaacccctgaatctgaatcggacattttataccactcctaatgattctctgggcgtgataccaggtggtagatatctcacaacgtgggcttttgacatgggccatgaatcgcctaccggcaatgtttatgcatcgatctcggacttgtcaaccattggaagggccattctacagtctacactcctgccaccagccctgacacgacgttggctcaggcctgtcactttcagttcagatcctgcatcgtccgttggtagcccatggggcgtacggcgattgtctcttccaacgaattcatcgtatcaatttgcgaccacattcaacaagcttggaagcatgggaaagtacagcgccctgctagctgtcattcccgattttgatctagggttttctgttatgggtgcgggcgagcttcctgctgccctaatgctgaatatcgctgatactttatct

SEQ ID NO: 29468 - DNA, 1020 bp, Muscodor strobelii
  misc_feature: SGI cDNA ID NO. 570122
  misc_feature: Encodes the peptide sequence at SEQ ID NO 29469
atgtctactaccgcaatccctctccggcaattgggaaagaatggtcccaaagtaccggctctaggccttggcatgatgggcatgtctatgctttatggctcagcgccaagtgacgaagagcgcttcgaggttctcgaccgtgctctcgcactaggtgctacacactgggacagttccgacatgtatggagatagtgaagaactcctaggcaagtggttcaagaggactggaaggcgcgatgacgtatttctctctaccaagttcggattcatgaagggttcattcaccgagatagatagctcagcagcacattgtagacatgcctgtgaggcaagtctcaaggcattaggcactgatcgtattgatctctactacatgcaccgtgccaatccgaatacgccaattgaagaaactgtacaggcgatgtctgagctcaaaagagatggaaagatacggtacatcggcctatccgaaattagttccaatacgctgcgccgcgcgtgcaaagtagcgcagatcgacgtcgttcagatcgaatattcagctttcactctcgatattgaagggcccaaaggcactggtcttctcaagacatgtcgagagcttggcgttgctattgttgcttattcgcctctcggacgcggcctcttaacaggtgccatcgcgtcggtatctgccattacaggtgaaggtgatctacgtagtatgttccccaggttcgaggctgataacctgaacgaaaatgtcagggtagtcaatcagctcaaggacgttgctcagaagaagggctgtacggtggctcaactggcgatcgcttggttactgaagcaaggtgaggatgtgattcccatccccggtacgaagaaaatcaagtatctcgacgagaactggggtgcgctgcaagtcaacttgaccgacgaggaagagaaggagattcggaagataattagcaaggtagtgggtgaacgaggtcctgccgttgccgacccgcaatcgttcgtagacacgcgagaaccatag

SEQ ID NO: 29469 - protein, 339 aa, Muscodor strobelii
  misc_feature: SGI Peptide ID NO. 570122
  misc_feature (12)..(317): Pfam Id: PF00248 Pfam Desc: Aldo/keto reductase family
  misc_feature (1)..(338): NCBI GI: 242812857 Blast Desc: aldo/keto reductase, [Talaromyces stipitatus ATCC 10500] gi|218714384|gb|EED13807.1| aldo/keto reductase, [Talaromyces stipitatus ATCC 10500]
  misc_feature (1)..(338): NCBI GI: 212544578 Blast Desc: aldo/keto reductase, [Penicillium marneffei ATCC 18224] gi|210065412|gb|EEA19506.1| aldo/keto reductase, [Penicillium marneffei ATCC 18224]
  misc_feature (1)..(338): NCBI GI: 119476590 Blast Desc: aldo/keto reductase [Neosartorya fischeri NRRL 181] gi|119407362|gb|EAW17311.1| aldo/keto reductase [Neosartorya fischeri NRRL 181]
  misc_feature (9)..(325): NCBI GI: 70996859 Blast Desc: aldo-keto reductase (AKR13) [Aspergillus fumigatus Af293] gi|66850820|gb|EAL91146.1| aldo-keto reductase (AKR13), [Aspergillus fumigatus Af293] gi|159127085|gb|EDP52201.1| A1163]
  misc_feature (8)..(338): NCBI GI: 212533389 Blast Desc: aldo-keto reductase (AKR13), [Penicillium marneffei ATCC 18224] gi|210072215|gb|EEA26304.1| aldo-keto reductase (AKR13), [Penicillium marneffei ATCC 18224]
  misc_feature (1)..(337): NCBI GI: 242821974 Blast Desc: aldo/keto reductase, [Talaromyces stipitatus ATCC 10500] gi|218712711|gb|EED12136.1| aldo/keto reductase, [Talaromyces stipitatus ATCC 10500]
  misc_feature (8)..(338): NCBI GI: 242798005 Blast Desc: aldo-keto reductase (AKR13), [Talaromyces stipitatus ATCC 10500] gi|218716424|gb|EED15845.1| aldo-keto reductase (AKR13), [Talaromyces stipitatus ATCC 10500]
  misc_feature (1)..(338): NCBI GI: 256728942 Blast Desc: NECHADRAFT_40120 [Nectria haematococca mpVI 77-13-4]
  misc_feature (6)..(338): NCBI GI: 156043793 Blast Desc: SS1G_10900 [Sclerotinia sclerotiorum 1980] gi|154695287|gb|EDN95025.1| SS1G_10900 [Sclerotinia sclerotiorum 1980]
  misc_feature (6)..(338): NCBI GI: 154317005 Blast Desc: BC1G_03920 [Botryotinia fuckeliana B05.10] gi|150845532|gb|EDN20725.1| BC1G_03920 [Botryotinia fuckeliana B05.10]
  misc_feature (38)..(305): SWISSPROT Homolog: EC 1.1.1.65 Pyridoxine 4-dehydrogenase
MSTTAIPLRQLGKNGPKVPALGLGMMGMSMLYGSAPSDEERFEVLDRALALGATHWDSSDMYGDSEELLGKWFKRTGRRDDVFLSTKFGFMKGSFTEIDSSAAHCRHACEASLKALGTDRIDLYYMHRANPNTPIEETVQAMSELKRDGKIRYIGLSEISSNTLRRACKVAQIDVVQIEYSAFTLDIEGPKGTGLLKTCRELGVAIVAYSPLGRGLLTGAIASVSAITGEGDLRSMFPRFEADNLNENVRVVNQLKDVAQKKGCTVAQLAIAWLLKQGEDVIPIPGTKKIKYLDENWGALQVNLTDEEEKEIRKIISKVVGERGPAVADPQSFVDTREP

SEQ ID NO: 29470 - DNA, 1041 bp, Muscodor strobelii
  misc_feature: SGI cDNA ID NO. 570123
  misc_feature: Elevated expression when VOC is produced
  misc_feature: Encodes the peptide sequence at SEQ ID NO 29471
atggccgcatcacagcacgcgcttacgcgacaatttggccgagatggacccaaaatccccgccatcggattgggactcatgggaataagtgttgcgtatggttctgctagctctgatgaagatcgattgaagctgctggatcgggcttgggagatcggctgcactaattgggatacagcagatgcatatggcgatagtgaagaggtgatcgggaagtggttcaagcttcacccagagcgtcgcgcggatattttcctagcaacaaagttcggtcttaagcccggcgattctcaagacggcactggctatgtggtcgactcttctcccgactactgccgtagaggcattgagagcagtctgaaacgtatcggggttgagcacattgatttatattacatgcatcgcgcaaatcctgacgtgcccatcgagaagacaatggaggctatgaaagagctagttcagctgggtaagatcaaatacattggcttgtcggaggtttcgtccactacactacgtcgagcatatgccattcacccagttcacgctgtgcaagtcgaatataatccgtggactcttgatattgaagagtcctcgggaacaaacctgttcgacacctgtaaagaactaggcgtgtcggtgtttgcctactcgccgctcggtcgaggactgatgactggtcgattccgatcagccgcagactttggcccaaatgatatacgaccctttcttccccgataccaaggagagaattttcagaaaaatctcaagctcgtagacgattttgccgagttggcacaacgcaaaggctgcaccagtagtcaattagtgctagaatggttgcttgctcaaggcgacaacgtctttgtcatacccggcaccaaaaatattcaatacttggaagacaatttcggtgctacacaagttggcatcactgaaaaagaagaacgggggttaagaaaattagtagcagcagctggcgtaagcggagaccgtggtggtatgttcacaacattcgctgataccgcgcctttacaaaagtaa

SEQ ID NO: 29471 - protein, 346 aa, Muscodor strobelii
  misc_feature: SGI Peptide ID NO. 570123
  misc_feature (13)..(323): Pfam Id: PF00248 Pfam Desc: Aldo/keto reductase family
  misc_feature (13)..(305): Pfam Id: PF00248 Pfam Desc: Aldo/keto reductase family
  misc_feature (1)..(345): NCBI GI: 256721961 Blast Desc: NECHADRAFT_42670 [Nectria haematococca mpVI 77-13-4]
  misc_feature (1)..(345): NCBI GI: 46111743 Blast Desc: FG02753.1 [Gibberella zeae PH-1]
  misc_feature (1)..(344): NCBI GI: 39963222 Blast Desc: MGG_09715 [Magnaporthe grisea 70-15] gi|145015504|gb|EDK00041.1| MGG_09715 [Magnaporthe grisea 70-15]
  misc_feature (9)..(331): NCBI GI: 171678211 Blast Desc: protein product [Podospora anserina] gi|170937175|emb|CAP61832.1| protein product [Podospora anserina]
  misc_feature (1)..(344): NCBI GI: 171681118 Blast Desc: protein product [Podospora anserina] gi|170940517|emb|CAP65745.1| protein product [Podospora anserina]
  misc_feature (9)..(345): NCBI GI: 189196364 Blast Desc: aldo/keto reductase [Pyrenophora tritici-repentis Pt-1C-BFP] gi|187980399|gb|EDU47025.1| aldo/keto reductase [Pyrenophora tritici-repentis Pt-1C-BFP]
  misc_feature (3)..(344): NCBI GI: 46118121 Blast Desc: FG04686.1 [Gibberella zeae PH-1]
  misc_feature (9)..(331): NCBI GI: 67522226 Blast Desc: AN1570.2 [Aspergillus nidulans FGSC A4] gi|40745121|gb|EAA64277.1| AN1570.2 [Aspergillus nidulans FGSC A4]
  misc_feature (10)..(341): NCBI GI: 242812857 Blast Desc: aldo/keto reductase, [Talaromyces stipitatus ATCC 10500] gi|218714384|gb|EED13807.1| aldo/keto reductase, [Talaromyces stipitatus ATCC 10500]
  misc_feature (9)..(344): NCBI GI: 156043793 Blast Desc: SS1G_10900 [Sclerotinia sclerotiorum 1980] gi|154695287|gb|EDN95025.1| SS1G_10900 [Sclerotinia sclerotiorum 1980]
  misc_feature (16)..(331): SWISSPROT Homolog: EC 1.1.1.65 Pyridoxine 4-dehydrogenase
  misc_feature: Useful for introducing or modulating the production of volatile compounds
MAASQHALTRQFGRDGPKIPAIGLGLMGISVAYGSASSDEDRLKLLDRAWEIGCTNWDTADAYGDSEEVIGKWFKLHPERRADIFLATKFGLKPGDSQDGTGYVVDSSPDYCRRGIESSLKRIGVEHIDLYYMHRANPDVPIEKTMEAMKELVQLGKIKYIGLSEVSSTTLRRAYAIHPVHAVQVEYNPWTLDIEESSGTNLFDTCKELGVSVFAYSPLGRGLMTGRFRSAADFGPNDIRPFLPRYQGENFQKNLKLVDDFAELAQRKGCTSSQLVLEWLLAQGDNVFVIPGTKNIQYLEDNFGATQVGITEKEERGLRKLVAAAGVSGDRGGMFTTFADTAPLQK

SEQ ID NO: 29472 - DNA, 1262 bp, Muscodor strobelii
  misc_feature: SGI EST ID NO. CUFF.69747.0
  misc_feature: Variant of the nucleotide sequence at SEQ ID NO 29470
ggcttgacgcacttcgaaaccatttccccttctgctctctacttataagttgcacgtcatatttttcatagtatcaaagaatccttgacccttcaccaagatggccgcatcacagcacgcgcttacgcgacaatttggccgagatggacccaaaatccccgccatcggattgggactcatgggaataagtgttgcgtatggttctgctagctctgatgaagatcgattgaagctgctggatcgggcttgggagatcggctgcactaattgggatacagcagatgcatatggcgatagtgaagaggtgatcgggaagtggttcaagcttcacccagagcgtcgcgcggatattttcctagcaacaaagttcggtcttaagcccggcgattctcaagacggcactggctatgtggtcgactcttctcccgactactgccgtagaggcattgagagcagtctgaaacgtatcggggttgagcacattgatttatattacatgcatcgcgcaaatcctgacgtgcccatcgagaagacaatggaggctatgaaagagctagttcagctgggtaagatcaaatacattggcttgtcggaggtttcgtccactacactacgtcgagcatatgccattcacccagttcacgctgtgcaagtcgaatataatccgtggactcttgatattgaagagtcctcgggaacaaacctgttcgacacctgtaaagaactaggcgtgtcggtgtttgcctactcgccgctcggtcgaggactgatgactggtcgattccgatcagccgcagactttggcccaaatgatatacgaccctttcttccccgataccaaggagagaattttcagaaaaatctcaagctcgtagacgattttgccgagttggcacaacgcaaaggctgcaccagtagtcaattagtgctagaatggttgcttgctcaaggcgacaacgtctttgtcatacccggcaccaaaaatattcaatacttggaagacaatttcggtgctacacaagttggcatcactgaaaaagaagaacgggggttaagaaaattagtagcagcagctggcgtaagcggagaccgtggtggtatgttcacaacattcgctgataccgcgcctttacaaaagtaaacagatcgggcacgaagcaatgaaatagagctggctgctgattagtctagaacatcgtttacctgactctctcctatttgcagcatccactatgattatctcaagagttaattaatgattg

SEQ ID NO: 29473 - DNA, 1122 bp, Muscodor strobelii
  misc_feature: SGI cDNA ID NO. 570124
  misc_feature: Reduced expression when VOC is produced
  misc_feature: Encodes the peptide sequence at SEQ ID NO 29474
atgtgtgaaggctgcaccaacaacgatctgaacgagctggagcatcagctcgactgttccctgccgcaggatgtccgcgactcgttgatgatccacgacggccaggaacgcggcggcttgcccactggtgttgtcttctcccacatgctgttggactgcgaggagattgtgcaggagtgggatcagtggcgtcgggtgaaccagcagtacctgctggagatgtcggtttcgaagcccgccgctccttccaaggccttcggcggcagcgacgaggcttcttcatcccgctccgtcccgggctcgcccaatggctctcagaagtcgacctggcggcaagacttgcagagccggcaagattccattcctgccggtgccgttcagcgagcatatgcacacccggcctggattccgctagtgcgagactggggtggcaacaacttggccgtcgatctggctccaggtccttccggcacttggggccaaattatcttgttcggccgagattatgacaccaagtatgtcgtcgctagatcgtggtccgccttcatcgccatcttggccgacgatctcggcagctccaagtggtacgtagatgaagaaaccaacgagctgaagttgcgcgagttcaagacgacccgtgtcgagccctcgtatttcgatattctccgctggcgcatggaccagaaacacggacgcacggccaaggccactgccaagcggaagtctggcatgccggctggtgctggttccccgggcggatctccctacgcgagccccgtagatgccaatggggatgctcgcggacgatcattgcagcgcctgaacagcccttcccctctggttagcccggctcggccaggctttggcaagcccagccccctggcgcgcgtggctgaggagtcggactttccgaagcccaagttggtgaccaacggcgtccagcccacaaaacttgtcgaggtggagactcccaaactgggcacaggtgccaagttgtccctccaggctgatgctgtgcccaatgttatagacaaggaagcgtcgccattaaagacagaggcaagcttaattaacgaacgcaccgaagacccagagggtggaatgaagacgatagagatttga

SEQ ID NO: 29474 - protein, 373 aa, Muscodor strobelii
  misc_feature: SGI Peptide ID NO. 570124
  misc_feature (4)..(185): Pfam Id: PF09346 Pfam Desc: SMI1 / KNR4 family
  misc_feature (1)..(373): NCBI GI: 256731028 Blast Desc: NECHADRAFT_49379 [Nectria haematococca mpVI 77-13-4]
  misc_feature (1)..(373): NCBI GI: 156048014 Blast Desc: SS1G_08738 [Sclerotinia sclerotiorum 1980] gi|154693135|gb|EDN92873.1| SS1G_08738 [Sclerotinia sclerotiorum 1980]
  misc_feature (1)..(373): NCBI GI: 154305940 Blast Desc: BC1G_08201 [Botryotinia fuckeliana B05.10] gi|150853086|gb|EDN28278.1| BC1G_08201 [Botryotinia fuckeliana B05.10]
  misc_feature (1)..(373): NCBI GI: 116198027 Blast Desc: CHGG_07169 [Chaetomium globosum CBS 148.51] gi|88178448|gb|EAQ85916.1| CHGG_07169 [Chaetomium globosum CBS 148.51]
  misc_feature (1)..(325): NCBI GI: 171693961 Blast Desc: protein product [Podospora anserina] gi|170946929|emb|CAP73733.1| protein product [Podospora anserina]
  misc_feature (1)..(339): NCBI GI: 39943918 Blast Desc: MGG_03970 [Magnaporthe grisea 70-15] gi|145014687|gb|EDJ99255.1| MGG_03970 [Magnaporthe grisea 70-15]
  misc_feature (1)..(372): NCBI GI: 729636 Blast Desc: GS1_NEUCR RecName: Full=Glucan synthesis regulatory protein gi|493030|gb|AAA50440.1| glucan synthase-1 [Neurospora crassa] gi|11595725|emb|CAC18203.1| 1, 3-beta-glucan synthase
  misc_feature (1)..(372): NCBI GI: 164426497 Blast Desc: NCU04189 [Neurospora crassa OR74A] gi|157071359|gb|EAA31913.2| NCU04189 [Neurospora crassa OR74A]
  misc_feature (1)..(370): NCBI GI: 240109273 Blast Desc: glucan synthesis regulatory protein, [Coccidioides posadasii C735 delta SOWgp]
  misc_feature (1)..(304): NCBI GI: 70998666 Blast Desc: 1,3-beta-glucan biosynthesis protein [Aspergillus fumigatus Af293] gi|66851691|gb|EAL92017.1| 1,3-beta-glucan biosynthesis protein, [Aspergillus fumigatus Af293] biosynthesis
  misc_feature: Useful for introducing or modulating the production of volatile compounds
MCEGCTNNDLNELEHQLDCSLPQDVRDSLMIHDGQERGGLPTGVVFSHMLLDCEEIVQEWDQWRRVNQQYLLEMSVSKPAAPSKAFGGSDEASSSRSVPGSPNGSQKSTWRQDLQSRQDSIPAGAVQRAYAHPAWIPLVRDWGGNNLAVDLAPGPSGTWGQIILFGRDYDTKYVVARSWSAFIAILADDLGSSKWYVDEETNELKLREFKTTRVEPSYFDILRWRMDQKHGRTAKATAKRKSGMPAGAGSPGGSPYASPVDANGDARGRSLQRLNSPSPLVSPARPGFGKPSPLARVAEESDFPKPKLVTNGVQPTKLVEVETPKLGTGAKLSLQADAVPNVIDKEASPLKTEASLINERTEDPEGGMKTIEI

SEQ ID NO: 29475 - DNA, 3131 bp, Muscodor strobelii
  misc_feature: SGI EST ID NO. CUFF.69988.1
  misc_feature: Variant of the nucleotide sequence at SEQ ID NO 29473
tgacaatgcaggctgaggtacctggtgactagccgtcgggaaacttgaattgaaggcgtttccaaggtcgatttcttgcctctttgcatcctgcagctcctcctgttcctcctcattctgcatgcagtcgacttcccgcagtgcccttccatccccctcgcatcacatctggatctctacgcctaatctcaacaccaagacagtctattcccgagcaccgtgtctggtctgcgcctccgtagcccagctcagtgtcctgcattcgctttttactccatagttgttgcagtgttttcccgtacctacgcgtgtctgtctccttgcttcatcctcgccgcgccccctgtggcgaccctcccaactggacgcagacaagctgcagacgacgacgaaccacttcggcccatccacccttccacccttctacccttcgcagcgcgactgccgaccaatgcatcctgccacgtccgagcaatgagccgacaaagacgctgatccgcaccggaagacacgaccgccgccccatcgctcccgcacttcctccacttgacacattgttgcgatccgccgtccaccgcggcccgcgccctcccagagtcattcgttactgtataccaactacgtatctatctatacgcatctctccacgcattcagcacgattccgcaccacgccagccgtggttttcagactgccagcatcacatagctcgcgagccccagtgtttgatcagctctcttactcaacaaaacacctagtcttttggagagcagtctagacatcatggctaacatcggatccgcttttcgctccttttggcacactatgaccagctacgaccgccattccaacttcgatgctccccaccgaaccggccgccacgtacctctcagccgccagagcaccctgacatcggtcgccaccgcttcggattcccgagccgacatcacatcccccttcagcgacgatctcggccgcttgcagacacagtccgagcacacggcatacatgggagccggcatgccctccgcctccccgctttcgcccggccacaatgctccctactcccccggcatgaggtcgctgagcgcacgccgccaagactcgagagacgatggcttcgagacggtgagcagccccggcgacatccctatgcagtccttcgccaacggcgctccgcccgccccgcccgttcaccattcatggaagcggatcgacaggtgggctgaggacaactatcccgagctcttcgaccagatgtgtgaaggctgcaccaacaacgatctgaacgagctggagcatcagctcgactgttccctgccgcaggatgtccgcgactcgttgatgatccacgacggccaggaacgcggcggcttgcccactggtgttgtcttctcccacatgctgttggactgcgaggagattgtgcaggagtgggatcagtggcgtcgggtgaaccagcagtacctgctggagatgtcggtttcgaagcccgccgctccttccaaggccttcggcggcagcgacgaggcttcttcatcccgctccgtcccgggctcgcccaatggctctcagaagtcgacctggcggcaagacttgcagagccggcaagattccattcctgccggtgccgttcagcgagcatatgcacacccggcctggattccgctagtgcgagactggggtggcaacaacttggccgtcgatctggctccaggtccttccggcacttggggccaaattatcttgttcggccgagattatgacaccaagtatgtcgtcgctagatcgtggtccgccttcatcgccatcttggccgacgatctcggcagctccaagtggtacgtagatgaagaaaccaacgagctgaagttgcgcgagttcaagacgacccgtgtcgagccctcgtatttcgatattctccgctggcgcatggaccagaaacacggacgcacggccaaggccactgccaagcggaagtctggcatgccggctggtgctggttccccgggcggatctccctacgcgagccccgtagatgccaatggggatgctcgcggacgatcattgcagcgcctgaacagcccttcccctctggttagcccggctcggccaggctttggcaagcccagccccctggcgcgcgtggctgaggagtcggactttccgaagcccaagttggtgaccaacggcgtccagcccacaaaacttgtcgaggtggagactcccaaactgggcacaggtgccaagttgtccctccaggctgatgctgtgcccaatgttatagacaaggaagcgtcgccattaaagacagaggcaagcttaattaacgaacgcaccgaagacccagagggtggaatgaagacgatagagatttgatgaactttgcacgatgacgcacgacaggccatgtgccgcgacgactacatagacaacaaacgggcggcgtttcgggtgtcagatttggtattattcgacgatcagcattttattttttatacctcacttggtggggaaatccatcgccttcgtctttgatggggaggccactcggggacctctcgctgatcctcttcgtggacagcccccaataattcatcgtttcccgatctaggtcgacttagacatggcattctcattctcttctgcattcaacaccgatacaggctgagcggccgaggctttctgctccaggccagagcttcgagcctcggtagatcattcatgtaacaatacatgtctgtttagttcgtcttccaggcggacggcagggacaggagaggtaattctgacgccagactgtggagttcaattctgggcatatggtggcctgcatagcaagaagatacgggcggcgcagtgtacaaaagaaggggatggcgttttcacctttgttctttgatgctagggagaaccgtaccggagttttgaccaagctccatggtcacttgactagtttccacacatgatggatgagaagacgtgacggaatgtcctatgaggacgagactagttaataaagataatgtggcaacatacagagtgtgaattctttcgcagtatgaggcgcgcaatgcaaaaacctagtagcacgattttagtcgtccaacgctcttgatatacgtcccttg

SEQ ID NO: 29476 - DNA, 1596 bp, Muscodor strobelii
  misc_feature: SGI cDNA ID NO. 570125
  misc_feature: Reduced expression when VOC is produced
  misc_feature: Encodes the peptide sequence at SEQ ID NO 29477
atggctaacatcggatccgcttttcgctccttttggcacactatgaccagctacgaccgccattccaacttcgatgctccccaccgaaccggccgccacgtacctctcagccgccagagcaccctgacatcggtcgccaccgcttcggattcccgagccgacatcacatcccccttcagcgacgatctcggccgcttgcagacacagtccgagcacacggcatacatgggagccggcatgccctccgcctccccgctttcgcccggccacaatgctccctactcccccggcatgaggtcgctgagcgcacgccgccaagactcgagagacgatggcttcgagacggtgagcagccccggcgacatccctatgcagtccttcgccaacggcgctccgcccgccccgcccgttcaccattcatggaagcggatcgacaggtgggctgaggacaactatcccgagctcttcgaccagatgtgtgaaggctgcaccaacaacgatctgaacgagctggagcatcagctcgactgttccctgccgcaggatgtccgcgactcgttgatgatccacgacggccaggaacgcggcggcttgcccactggtgttgtcttctcccacatgctgttggactgcgaggagattgtgcaggagtgggatcagtggcgtcgggtgaaccagcagtacctgctggagatgtcggtttcgaagcccgccgctccttccaaggccttcggcggcagcgacgaggcttcttcatcccgctccgtcccgggctcgcccaatggctctcagaagtcgacctggcggcaagacttgcagagccggcaagattccattcctgccggtgccgttcagcgagcatatgcacacccggcctggattccgctagtgcgagactggggtggcaacaacttggccgtcgatctggctccaggtccttccggcacttggggccaaattatcttgttcggccgagattatgacaccaagtatgtcgtcgctagatcgtggtccgccttcatcgccatcttggccgacgatctcggcagctccaagtggtacgtagatgaagaaaccaacgagctgaagttgcgcgagttcaagacgacccgtgtcgagccctcgtatttcgatattctccgctggcgcatggaccagaaacacggacgcacggccaaggccactgccaagcggaagtctggcatgccggctggtgctggttccccgggcggatctccctacgcgagccccgtagatgccaatggggatgctcgcggacgatcattgcagcgcctgaacagcccttcccctctggttagcccggctcggccaggctttggcaagcccagccccctggcgcgcgtggctgaggagtcggactttccgaagcccaagttggtgaccaacggcgtccagcccacaaaacttgtcgaggtggagactcccaaactgggcacaggtgccaagttgtccctccaggctgatgctgtgcccaatgttatagacaaggaagcgtcgccattaaagacagaggcaagcttaattaacgaacgcaccgaagacccagagggtggaatgaagacgatagagatttga

SEQ ID NO: 29477 - protein, 531 aa, Muscodor strobelii
  misc_feature: SGI Peptide ID NO. 570125
  misc_feature (162)..(343): Pfam Id: PF09346 Pfam Desc: SMI1 / KNR4 family
  misc_feature (15)..(531): NCBI GI: 256731028 Blast Desc: NECHADRAFT_49379 [Nectria haematococca mpVI 77-13-4]
  misc_feature (4)..(531): NCBI GI: 156048014 Blast Desc: SS1G_08738 [Sclerotinia sclerotiorum 1980] gi|154693135|gb|EDN92873.1| SS1G_08738 [Sclerotinia sclerotiorum 1980]
  misc_feature (1)..(483): NCBI GI: 39943918 Blast Desc: MGG_03970 [Magnaporthe grisea 70-15] gi|145014687|gb|EDJ99255.1| MGG_03970 [Magnaporthe grisea 70-15]
  misc_feature (1)..(483): NCBI GI: 171693961 Blast Desc: protein product [Podospora anserina] gi|170946929|emb|CAP73733.1| protein product [Podospora anserina]
  misc_feature (4)..(530): NCBI GI: 729636 Blast Desc: GS1_NEUCR RecName: Full=Glucan synthesis regulatory protein gi|493030|gb|AAA50440.1| glucan synthase-1 [Neurospora crassa] gi|11595725|emb|CAC18203.1| 1, 3-beta-glucan synthase
  misc_feature (4)..(531): NCBI GI: 154305940 Blast Desc: BC1G_08201 [Botryotinia fuckeliana B05.10] gi|150853086|gb|EDN28278.1| BC1G_08201 [Botryotinia fuckeliana B05.10]
  misc_feature (6)..(530): NCBI GI: 164426497 Blast Desc: NCU04189 [Neurospora crassa OR74A] gi|157071359|gb|EAA31913.2| NCU04189 [Neurospora crassa OR74A]
  misc_feature (42)..(531): NCBI GI: 116198027 Blast Desc: CHGG_07169 [Chaetomium globosum CBS 148.51] gi|88178448|gb|EAQ85916.1| CHGG_07169 [Chaetomium globosum CBS 148.51]
  misc_feature (1)..(485): NCBI GI: 145253857 Blast Desc: An17g02120 [Aspergillus niger] gi|134084017|emb|CAL00555.1| protein product [Aspergillus niger]
  misc_feature (1)..(484): NCBI GI: 255943751 Blast Desc: Pc20g00810 [Penicillium chrysogenum Wisconsin 54-1255] gi|211587378|emb|CAP85410.1| Pc20g00810 [Penicillium chrysogenum Wisconsin 54-1255]
  misc_feature: Useful for introducing or modulating the production of volatile compounds
MANIGSAFRSFWHTMTSYDRHSNFDAPHRTGRHVPLSRQSTLTSVATASDSRADITSPFSDDLGRLQTQSEHTAYMGAGMPSASPLSPGHNAPYSPGMRSLSARRQDSRDDGFETVSSPGDIPMQSFANGAPPAPPVHHSWKRIDRWAEDNYPELFDQMCEGCTNNDLNELEHQLDCSLPQDVRDSLMIHDGQERGGLPTGVVFSHMLLDCEEIVQEWDQWRRVNQQYLLEMSVSKPAAPSKAFGGSDEASSSRSVPGSPNGSQKSTWRQDLQSRQDSIPAGAVQRAYAHPAWIPLVRDWGGNNLAVDLAPGPSGTWGQIILFGRDYDTKYVVARSWSAFIAILADDLGSSKWYVDEETNELKLREFKTTRVEPSYFDILRWRMDQKHGRTAKATAKRKSGMPAGAGSPGGSPYASPVDANGDARGRSLQRLNSPSPLVSPARPGFGKPSPLARVAEESDFPKPKLVTNGVQPTKLVEVETPKLGTGAKLSLQADAVPNVIDKEASPLKTEASLINERTEDPEGGMKTIEI

SEQ ID NO: 29478 - DNA, 3131 bp, Muscodor strobelii; identical to SEQ ID NO: 29475
  misc_feature: SGI EST ID NO. CUFF.69988.1
  misc_feature: Variant of the nucleotide sequence at SEQ ID NO 29476

SEQ ID NO: 29479 - DNA, 516 bp, Muscodor strobelii
  misc_feature: SGI cDNA ID NO. 570126
  misc_feature: Encodes the peptide sequence at SEQ ID NO 29480
atggaagaagagcgcctttggaagttcagcaggcccgagtggctgaacagtgcatgggcgcgcaatgcgggcgtgtacagcgccggcgccctgttctccctcgccttctacgttctcatcgacgcggcgacctggtccaagtctgcgtacaacggctccgatgtgcacgtcacattcatcgactggctgcccttcatcttcagctccctcggcatgctcatcatcaactcggtcgagaagacgaggctctccgccgactcatttagttactcaggctccggcgttgcctggaaggcccgtgttgtgctgttcctcggtttcgctgccctggctggcggcatggccggcggcgtcgtcgtcttcgtgctcaagttcgccgtgcaagatgtcggttggcccatgctgggaatgggcgtcgagaacatcgtcgcgaacgcactggtcggcctcagcaccgttgtgctttggatcagccagaatatggaggatgaatacagttataacttgtctctgtga

SEQ ID NO: 29480 - protein, 171 aa, Muscodor strobelii
  misc_feature: SGI Peptide ID NO. 570126
  misc_feature (1)..(166): Pfam Id: PF05255 Pfam Desc: Uncharacterised protein family (UPF0220)
  misc_feature (21)..(166): Pfam Id: PF05255 Pfam Desc: Uncharacterised protein family (UPF0220)
  misc_feature (1)..(171): NCBI GI: 39943920 Blast Desc: conserved [Magnaporthe grisea 70-15] gi|145014688|gb|EDJ99256.1| conserved [Magnaporthe grisea 70-15]
  misc_feature (1)..(171): NCBI GI: 256731365 Blast Desc: [Nectria haematococca mpVI 77-13-4]
  misc_feature (1)..(171): NCBI GI: 154305944 Blast Desc: BC1G_08203 [Botryotinia fuckeliana B05.10] gi|150853088|gb|EDN28280.1| BC1G_08203 [Botryotinia fuckeliana B05.10]
  misc_feature (1)..(171): NCBI GI: 46125889 Blast Desc: FG07322.1 [Gibberella zeae PH-1]
  misc_feature (1)..(171): NCBI GI: 116198025 Blast Desc: CHGG_07168 [Chaetomium globosum CBS 148.51] gi|88178447|gb|EAQ85915.1| CHGG_07168 [Chaetomium globosum CBS 148.51]
  misc_feature (1)..(171): NCBI GI: 156048020 Blast Desc: conserved [Sclerotinia sclerotiorum 1980] gi|154693138|gb|EDN92876.1| conserved [Sclerotinia sclerotiorum 1980]
  misc_feature (1)..(171): NCBI GI: 85101432 Blast Desc: NCU04188 [Neurospora crassa OR74A] gi|16944686|emb|CAC18202.2| conserved [Neurospora crassa] gi|28922688|gb|EAA31912.1| [Neurospora crassa OR74A]
  misc_feature (1)..(171): NCBI GI: 261351606 Blast Desc: vacuolar protein sorting-associated protein [Verticillium albo-atrum VaMs.102]
  misc_feature (3)..(171): NCBI GI: 171693959 Blast Desc: protein product [Podospora anserina] gi|170946928|emb|CAP73732.1| protein product [Podospora anserina]
  misc_feature (1)..(171): NCBI GI: 169597817 Blast Desc: SNOG_01699 [Phaeosphaeria nodorum SN15] gi|160707595|gb|EAT91348.2| SNOG_01699 [Phaeosphaeria nodorum SN15]
MEEERLWKFSRPEWLNSAWARNAGVYSAGALFSLAFYVLIDAATWSKSAYNGSDVHVTFIDWLPFIFSSLGMLIINSVEKTRLSADSFSYSGSGVAWKARVVLFLGFAALAGGMAGGVVVFVLKFAVQDVGWPMLGMGVENIVANALVGLSTVVLWISQNMEDEYSYNLSL

SEQ ID NO: 29481 - DNA, 1712 bp, Muscodor strobelii
  misc_feature: SGI EST ID NO. CUFF.70075.1
  misc_feature: Variant of the nucleotide sequence at SEQ ID NO 29479
caaccgccaagctcggtgcttcagctcaggcacaggcttcgacaatacacgacccgactcaccgactccctcttcacgccgcctactgctcttcttcatcaacagagacagagacgggaacaggaacagaaacagaacatctcaaccgctgcatctccaagcaggcgcccagtccgtcactcggtcgccatggaagaagagcgcctttggaagttcagcaggcccgagtggctgaacagtgcatgggcgcgcaatgcgggcgtgtacagcgccggcgccctgttctccctcgccttctacgttctcatcgacgcggcgacctggtccaagtctgcgtacaacggctccgatgtgcacgtcacattcatcgactggctgcccttcatcttcagctccctcggcatgctcatcatcaactcggtcgagaagacgaggctctccgccgactcatttagttactcaggctccggcgttgcctggaaggcccgtgttgtgctgttcctcggtttcgctgccctggctggcggcatggccggcggcgtcgtcgtcttcgtgctcaagttcgccgtgcaagatgtcggttggcccatgctgggaatgggcgtcgagaacatcgtcgcgaacgcactggtcggcctcagcaccgttgtgctttggatcagccagaatatggaggatgaatacagttataacttgtctctgtgagaaacttaaaacatcgatgtttttgtcgcggtcatgccgggttgatggacagtacgggaagtttgtatttgtattgctaggaacgctacgggaagctgagacccgagtttgtaacttatactgacagcaacgggagaagagaatactaccgtcaaaattattactgatgcgctcaaccctaagatacgtgcttatgaattattctagagccgttcgatacgggcacatcagctacacttcaacaaactcaacgatgatcccgtcacatggcaccgatttcgacgtccataaagtcacgccgtcggatcaggatcctggaagtcgggtcgaaaataagatcaaaatccgagaccacttctttagaagtagtgccaggcgctagtttccactcatatttcatgaggatgtggcaaagcgcgatcttcacctcgttcgcagcgaagaagcgacctgggcacgcgtgtattccatagccaaacccgagatggtcggctcccaccgccgtaacaagcaaagcttgactcccgttatcaccgtcgcgcatacgaagaaatcgataggggtcccatgttaatggattctcatagacagtcgggtcccgcatccggttcgtgtcgacgactagtctatccccgcgcttgaggtcgagtccgttggagagcttcacgtcttcttggacgtagcggaacatggcagctgtggatctcattagagcaatccctctgattttatcgaccgcgaggagcttaccagtctgtacgggtttcaacctttgtgtctccttgagtgcactatcgagtagcttcaagccatggagcgatgccttctcccaaccactcgcaccaatgaccgtagcaatctcctcgcgtagcggcgcaaagtactctgggttttccccgagctgcaccatgaacttcgacagcagatccgtagtcgtgtggatggctacgaatgacattccgagttggaagaacgcaggttcgtatgcctgccctgccgcctcgtcc

SEQ ID NO: 29482 - DNA, 1377 bp, Muscodor strobelii
  misc_feature: SGI cDNA ID NO. 570127
  misc_feature: Encodes the peptide sequence at SEQ ID NO 29483
atgaatcctcgcccgcggtttccgtggaatatcctcaagtcccaaccccatcaaccattcgagaccgagaaactcctagcaaaagcgaagaccctatatcccggcagaccatttcgcatatgcaccgcagatggcgagagtattcaccttcccgctgaattcgcagaagagctgcgcaacgatggccgtttcagctttggtgaagtcgtcagaagggtcagtttccatatccaatctgttctctccgcagtcacgaagcggcggttgactaaatctctagcgaggataacccaacctatatcggaagaaacacaattcgccctgcccatagagttcggcaactcaacggagtggcaaacaatgcaagtcagcacaccggtcttaaaccttgtgaccagattatccgccagagtattcgtcggtcccgatttatgtaggaatgacgattggcttcgactcaaccacgagtacactctcaccttgatcatggctgcagctagaatgcgggcttatccccacttcgtcaggcctcttgtccactggtttctccctgaatgcaaggctcttcgagcgcagaaccaagaggcgcagcgagtcatcaggtcggtactgcaagacagacgggcgacgaaaaccaaggctggaaaatcgattccgaacttcgatgacgccttacaatgggcagaggacgaggcggcagggcaggcatacgaacctgcgttcttccaactcggaatgtcattcgtagccatccacacgactacggatctgctgtcgaagttcatggtgcagctcggggaaaacccagagtactttgcgccgctacgcgaggagattgctacggtcattggtgcgagtggttgggagaaggcatcgctccatggcttgaagctactcgatagtgcactcaaggagacacaaaggttgaaacccgtacagactgctgccatgttccgctacgtccaagaagacgtgaagctctccaacggactcgacctcaagcgcggggatagactagtcgtcgacacgaaccggatgcgggacccgactgtctatgagaatccattaacatgggacccctatcgatttcttcgtatgcgcgacggtgataacgggagtcaagctttgcttgttacggcggtgggagccgaccatctcgggtttggctatggaatacacgcgtgcccaggtcgcttcttcgctgcgaacgaggtgaagatcgcgctttgccacatcctcatgaaatatgagtggaaactagcgcctggcactacttctaaagaagtggtctcggattttgatcttattttcgacccgacttccaggatcctgatccgacggcgtgactttatggacgtcgaaatcggtgccatgtga

SEQ ID NO: 29483 - protein, 458 aa, Muscodor strobelii
  misc_feature: SGI Peptide ID NO. 570127
  misc_feature (5)..(446): Pfam Id: PF00067 Pfam Desc: Cytochrome P450
  misc_feature (265)..(446): Pfam Id: PF00067 Pfam Desc: Cytochrome P450
  misc_feature (22)..(458): NCBI GI: 3549891 Blast Desc: cytochrome P450 monooxygenase [Gibberella fujikuroi] gi|122894064|gb|ABC46411.2| GA20 oxidase [Fusarium proliferatum]
  misc_feature (25)..(449): NCBI GI: 261352868 Blast Desc: ent-kaurene oxidase [Verticillium albo-atrum VaMs.102]
  misc_feature (21)..(453): NCBI GI: 197724593 Blast Desc: P450 monooxygenase [Sphaceloma manihoticola]
  misc_feature (2)..(450): NCBI GI: 242815592 Blast Desc: cytochrome P450, [Talaromyces stipitatus ATCC 10500] gi|218714938|gb|EED14361.1| cytochrome P450, [Talaromyces stipitatus ATCC 10500]
  misc_feature (34)..(449): NCBI GI: 256726660 Blast Desc: NECHADRAFT_32184 [Nectria haematococca mpVI 77-13-4]
  misc_feature (33)..(449): NCBI GI: 169783174 Blast Desc: [Aspergillus oryzae RIB40] gi|83774793|dbj|BAE64916.1| protein product [Aspergillus oryzae]
  misc_feature (5)..(448): NCBI GI: 85110002 Blast Desc: NCU05376 [Neurospora crassa OR74A] gi|16416002|emb|CAB91316.2| cytochrome P450 monooxygenase (lovA) [Neurospora crassa] gi|28924857|gb|EAA33953.1| NCU05376 crassa
  misc_feature (38)..(448): NCBI GI: 169786189 Blast Desc: [Aspergillus oryzae RIB40] gi|83776303|dbj|BAE66422.1| protein product [Aspergillus oryzae]
  misc_feature (5)..(448): NCBI GI: 46111581 Blast Desc: FG02672.1 [Gibberella zeae PH-1]
  misc_feature (38)..(448): NCBI GI: 238507153 Blast Desc: cytochrome P450 monooxygenase, [Aspergillus flavus NRRL3357] gi|220689491|gb|EED45842.1| cytochrome P450 monooxygenase, [Aspergillus flavus NRRL3357]
  misc_feature (67)..(452): SWISSPROT Homolog: EC 1.14.13.78 Ent-kaurene oxidase
MNPRPRFPWNILKSQPHQPFETEKLLAKAKTLYPGRPFRICTADGESIHLPAEFAEELRNDGRFSFGEVVRRVSFHIQSVLSAVTKRRLTKSLARITQPISEETQFALPIEFGNSTEWQTMQVSTPVLNLVTRLSARVFVGPDLCRNDDWLRLNHEYTLTLIMAAARMRAYPHFVRPLVHWFLPECKALRAQNQEAQRVIRSVLQDRRATKTKAGKSIPNFDDALQWAEDEAAGQAYEPAFFQLGMSFVAIHTTTDLLSKFMVQLGENPEYFAPLREEIATVIGASGWEKASLHGLKLLDSALKETQRLKPVQTAAMFRYVQEDVKLSNGLDLKRGDRLVVDTNRMRDPTVYENPLTWDPYRFLRMRDGDNGSQALLVTAVGADHLGFGYGIHACPGRFFAANEVKIALCHILMKYEWKLAPGTTSKEVVSDFDLIFDPTSRILIRRRDFMDVEIGAM

SEQ ID NO: 29484 - DNA, 756 bp, Muscodor strobelii
  misc_feature: SGI cDNA ID NO. 570128
  misc_feature: Encodes the peptide sequence at SEQ ID NO 29485
atgctcttcaataagctaacagctgtgcaaacgccgacgattctattggtcccttatgatttctatcatgtggagagatatcatgagtggatgcaggatgcagagctgcgcgaggcgacgggttctgatctcctaagcccagaagaagagattgagaaccagcaaagttggcagaacgcacatgacaaattaaccttcatcgtttgcacatcaaatgctacaagcgatgagcctgatgttgtcaaggcagggaccacggacaccagagactctatgatcggtgacgtaaatctgtttcttgctgtcgaggacgaggacgaggacagtgacggggatcatgtcaacaatgacaatcacattcgttgcaaaggcgagttaagcatcatggtcgcggagaaacgtaacagaaagcaaggctatgggtcatatgccctagacgcattcttacagtatctcgggcggaatctgaatagtattctggaggagtacttcgagagtcttcgcccttcaaacctacaagccacggatgcaaaactggaatatctcttcgtcaaaatgcacaatgaaaacaagagcagcattgcattattcgaaaaggcagggtttatgcatgagggaagtgtggattattttggtgaactgacgatggtccaccgaacattctcactgcaaaacgaagatgtaaaagatgttgagggatatagagagattccttacgatagatctggcgtggcgcatctagagcgaactacataa

SEQ ID NO: 29485 - protein, 251 aa, Muscodor strobelii
  misc_feature: SGI Peptide ID NO. 570128
  misc_feature (1)..(241): NCBI GI: 85101212 Blast Desc: NCU03760 [Neurospora crassa OR74A] gi|16944627|emb|CAC28664.2| conserved [Neurospora crassa] gi|28922646|gb|EAA31871.1| conserved [Neurospora crassa OR74A]
  misc_feature (6)..(242): NCBI GI: 145605679 Blast Desc: MGG_06949 [Magnaporthe grisea 70-15] gi|145013476|gb|EDJ98117.1| MGG_06949 [Magnaporthe grisea 70-15]
  misc_feature (9)..(239): NCBI GI: 154321155 Blast Desc: BC1G_01452 [Botryotinia fuckeliana B05.10] gi|150851990|gb|EDN27182.1| BC1G_01452 [Botryotinia fuckeliana B05.10]
  misc_feature (1)..(241): NCBI GI: 238491654 Blast Desc: AFLA_111950 [Aspergillus flavus NRRL3357] gi|220697477|gb|EED53818.1| AFLA_111950 [Aspergillus flavus NRRL3357]
  misc_feature (1)..(245): NCBI GI: 145257040 Blast Desc: An04g02270 [Aspergillus niger] gi|134058505|emb|CAL00714.1| protein product [Aspergillus niger]
  misc_feature (7)..(217): NCBI GI: 261354828 Blast Desc: N-acetyltransferase [Verticillium albo-atrum VaMs.102]
  misc_feature (7)..(241): NCBI GI: 67526799 Blast Desc: AN3857.2 [Aspergillus nidulans FGSC A4] gi|40739932|gb|EAA59122.1| AN3857.2 [Aspergillus nidulans FGSC A4]
  misc_feature (8)..(242): NCBI GI: 169773643 Blast Desc: [Aspergillus oryzae RIB40] gi|83769151|dbj|BAE59288.1| protein product [Aspergillus oryzae]
  misc_feature (4)..(216): NCBI GI: 256731546 Blast Desc: NECHADRAFT_96414 [Nectria haematococca mpVI 77-13-4]
  misc_feature (1)..(240): NCBI GI: 242808495 Blast Desc: conserved [Talaromyces stipitatus ATCC 10500] gi|218715801|gb|EED15223.1| conserved [Talaromyces stipitatus ATCC 10500]
MLFNKLTAVQTPTILLVPYDFYHVERYHEWMQDAELREATGSDLLSPEEEIENQQSWQNAHDKLTFIVCTSNATSDEPDVVKAGTTDTRDSMIGDVNLFLAVEDEDEDSDGDHVNNDNHIRCKGELSIMVAEKRNRKQGYGSYALDAFLQYLGRNLNSILEEYFESLRPSNLQATDAKLEYLFVKMHNENKSSIALFEKAGFMHEGSVDYFGELTMVHRTFSLQNEDVKDVEGYREIPYDRSGVAHLERTT

SEQ ID NO: 29486 - DNA, 1134 bp, Muscodor strobelii
  misc_feature: SGI EST ID NO. CUFF.69768.0
  misc_feature: Variant of the nucleotide sequence at SEQ ID NO 29484
cagcaaaattggtagtgtaattgggctaattagaagacggttcatgatttgatgcccaaagggactatcaagttacataccacgcttctacgccatcttgctagacctgtgtatagagaattgcgatccaggtcaaaatagttgagtttaaatttacctcagcaagtctagccccgcctagccattttctacgacacaataatcaacttttgtagaccacccaaacatgcctcggatattgtctcagccgtaatcaatctcacaatatgctcttcaataagctaacagctgtgcaaacgccgacgattctattggtcccttatgatttctatcatgtggagagatatcatgagtggatgcaggatgcagagctgcgcgaggcgacgggttctgatctcctaagcccagaagaagagattgagaaccagcaaagttggcagaacgcacatgacaaattaaccttcatcgtttgcacatcaaatgctacaagcgatgagcctgatgttgtcaaggcagggaccacggacaccagagactctatgatcggtgacgtaaatctgtttcttgctgtcgaggacgaggacgaggacagtgacggggatcatgtcaacaatgacaatcacattcgttgcaaaggcgagttaagcatcatggtcgcggagaaacgtaacagaaagcaaggctatgggtcatatgccctagacgcattcttacagtatctcgggcggaatctgaatagtattctggaggagtacttcgagagtcttcgcccttcaaacctacaagccacggatgcaaaactggaatatctcttcgtcaaaatgcacaatgaaaacaagagcagcattgcattattcgaaaaggcagggtttatgcatgagggaagtgtggattattttggtgaactgacgatggtccaccgaacattctcactgcaaaacgaagatgtaaaagatgttgagggatatagagagattccttacgatagatctggcgtggcgcatctagagcgaactacataagctcgagaggcattttgatacccgctttgtccagtactgaagcttctcatggaaatctcggtatgaatctgtctgcaatgttacacttcattgcagtgccttcatcgcagcg

SEQ ID NO: 29487 - DNA, 606 bp, Muscodor strobelii
  misc_feature: SGI cDNA ID NO. 570129
  misc_feature: Reduced expression when VOC is produced
  misc_feature: Encodes the peptide sequence at SEQ ID NO 29488
atggcgaacctcccaagtcctatgacccagtctcaggtcgtgagcgatgcagcatcgagcttcgtggacgcctactatgaggcgctcaacaagaagcactccctcgctcagttctatgctagcatatccaacaccctgacatctgccactgtaaagcctgatatcagcatcaacgggcaagtagtcgagtccgtggccgccctggagtcgctggttaattcccaaggctctcacgtccactatgaggtgacgagctttgatgcgcaccctatcaatccgaactatgttattggatgcccgacaacgttggatggcagtacgggaacagctaccaccaagggcaagatcgcgaagtcaattgaaagcggcgagcgcttgagtttttctatccacgtcggcggatctgtcaagtacggcaaagtcggggctaacaacacggctgccacacctgcttctgctgcgtttggcaacgcttcggagggtcccatagagaaggcatttaatgaagcctggcttttagtaccgcattgggaatcgcatagtccgagggcgcctcgcggattgcgaaaatgggtggtggtcagccagaattacagatctctctga

SEQ ID NO: 29488 - protein, 201 aa, Muscodor strobelii
  misc_feature: SGI Peptide ID NO. 570129
  misc_feature (4)..(201): NCBI GI: 46123065 Blast Desc: FG05910.1 [Gibberella zeae PH-1]
  misc_feature (4)..(201): NCBI GI: 256731142 Blast Desc: NECHADRAFT_101726 [Nectria haematococca mpVI 77-13-4]
  misc_feature (15)..(201): NCBI GI: 39978127 Blast Desc: MGG_06948 [Magnaporthe grisea 70-15] gi|145013477|gb|EDJ98118.1| MGG_06948 [Magnaporthe grisea 70-15]
  misc_feature (1)..(199): NCBI GI: 154320608 Blast Desc: BC1G_01776 [Botryotinia fuckeliana B05.10] gi|150853465|gb|EDN28657.1| BC1G_01776 [Botryotinia fuckeliana B05.10]
  misc_feature (5)..(199): NCBI GI: 156040339 Blast Desc: SS1G_12186 [Sclerotinia sclerotiorum 1980] gi|154696242|gb|EDN95980.1| SS1G_12186 [Sclerotinia sclerotiorum 1980]
  misc_feature (11)..(199): NCBI GI: 238843668 Blast Desc: nuclear transport factor 2 domain-containing protein [Microsporum canis CBS 113480]
  misc_feature (16)..(200): NCBI GI: 85102570 Blast Desc: NCU03631 [Neurospora crassa OR74A] gi|12718386|emb|CAC28694.1| [Neurospora crassa] gi|28922902|gb|EAA32122.1| [Neurospora crassa OR74A]
  misc_feature (11)..(199): NCBI GI: 146323741 Blast Desc: nuclear transport factor 2 domain protein [Aspergillus fumigatus Af293] gi|129557559|gb|EBA27392.1| nuclear transport factor 2 domain protein, [Aspergillus fumigatus Af293]
  misc_feature (11)..(199): NCBI GI: 159125044 Blast Desc: conserved [Aspergillus fumigatus A1163]
  misc_feature (18)..(200): NCBI GI: 171693657 Blast Desc: protein product [Podospora anserina] gi|170946777|emb|CAP73581.1| protein product [Podospora anserina]
  misc_feature: Useful for introducing or modulating the production of volatile compounds
MANLPSPMTQSQVVSDAASSFVDAYYEALNKKHSLAQFYASISNTLTSATVKPDISINGQVVESVAALESLVNSQGSHVHYEVTSFDAHPINPNYVIGCPTTLDGSTGTATTKGKIAKSIESGERLSFSIHVGGSVKYGKVGANNTAATPASAAFGNASEGPIEKAFNEAWLLVPHWESHSPRAPRGLRKWVVVSQNYRSL

SEQ ID NO: 29489 - DNA, 1396 bp, Muscodor strobelii
  misc_feature: SGI EST ID NO. CUFF.69772.0
  misc_feature: Variant of the nucleotide sequence at SEQ ID NO 29487
accgtaggctcgcgcacatatttaaatgatgcatcgcttgtaggctactggagctatcgctttctatctaaacctgagagcacccaagcgttgtgtctcggtaatttcaatcaaaccagacgttcgatcaccttcgaggccgccatggtatttttgtatattgtatcacgaatctagcgaaatatccacctacatagacaggatcaaaccaccttgatctgagacgccgttgcaacgcacgcatagagcaaagaagatcaacctcgatcgctgatctgagtacccagaatagcgggcagacatggcgaacctcccaagtcctatgacccagtctcaggtcgtgagcgatgcagcatcgagcttcgtggacgcctactatgaggcgctcaacaagaagcactccctcgctcagttctatgctagcatatccaacaccctgacatctgccactgtaaagcctgatatcagcatcaacgggcaagtagtcgagtccgtggccgccctggagtcgctggttaattcccaaggctctcacgtccactatgaggtgacgagctttgatgcgcaccctatcaatccgaactatgttattggatgcccgacaacgttggatggcagtacgggaacagctaccaccaagggcaagatcgcgaagtcaattgaaagcggcgagcgcttgagtttttctatccacgtcggcggatctgtcaagtacggcaaagtcggggctaacaacacggctgccacacctgcttctgctgcgtttggcaacgcttcggagggtcccatagagaaggcatttaatgaagcctggcttttagtaccgcattgggaatcgcatagtccgagggcgcctcgcggattgcgaaaatgggtggtggtcagccagaattacagatctctctgagacgtcaacttcacagaggtctacgacaaacgcatgtcgaaagatattcaaccaatgaatgtccacgtccaatcctgtggtgtgagtagacatgtagcgcatgtatgcagcctcaatctctttcttatattgagggtgagctggtatgtgtgaactttccaccgttcaggggggataaggggacgggacagacgaaaaatagtgtatgcagcacgaaaaatatcttcctccgtaatttgagcagagacatgtttatgcttgccagacagcgagttgctggatatacgagaagcaaagcctgcccataaagggggggaatcaattactaggatcatctctctaaggtgctttttaagtcctatgcgcgtgcgtggctctgactagttcgattatgttgttagtctatttgggtggacgtcctccagctgacgacttgtagagatttgactgaatgctcgctgctcccttcaaaagtgcatgtagtcgcac

SEQ ID NO: 29490 - DNA, 1113 bp, Muscodor strobelii
  misc_feature: SGI cDNA ID NO. 570130
  misc_feature: Reduced expression when VOC is produced
  misc_feature: Encodes the peptide sequence at SEQ ID NO 29491
atggatccaaaggcagcaggtctatatatcgagacaccatgtatatcatcgccagaattatcacgcaaggcaggatgcaacatatttcttaaactcgagaacctccagccaggaggctctttcaaatcgcgcggaataggaacaatgatggcacgcgccgtctcatcctcgtccacaggcaaagcacggttctactgtagtagtggcggcaacgccggattagcctgcgcaactgctgctcgttctcttggcctgccatgcgatgtcttcctcccctccatcagcccagaactcgttgttcagaaacttcagagccgcggagccgccactcatcgcgcaggggatttatttccccaggctgatgccgcgtgtcggaagcaagccgctctcgacccggacgggctgtatgtccatccatttgacaatgcggatctgtgggatggacacgcaacactagtcgatgaactcgttgcacaggaagcacaaggcttctttggagaaggtcggagcataaatgctatcgtatgcaacgttggtggcggcgggttactaaacggcgtaatggaaggcatagagcgaaactacggcacgaagccaaacggcaccaccaatgggcatgtctccaagcctagacctagagtcctcgccatcgaaacagaaggcgccgactctcttgctgccagtatccgtgccggagaacatgttacgcttccagccatgactagtgcggcaacgagcctaggcgcaccacgagtctcggccaagacattcgattgggctcagaagtacaacgcaaccgttgtatccccttgttcttcatccgcatcagaatctacggggctccaaccccagctcgttagcgcagttgtatctgatgcgtcagccgtgtcggctgttgtagagtttctagacgatgcgagactgctcatcgaattgtcctgcggcgcgacgttagcaagtgcatatgatggcggagagctacttcgatccgctctaggagacggcatggatgatgaaagctggtctcagatgaatgttgtgttagtcgtatgcggtggttcactcatctcttccgacttgttggccgcgtatagaaacaagttcggagtgtag

SEQ ID NO: 29491 - protein, 370 aa, Muscodor strobelii
  misc_feature: SGI Peptide ID NO. 570130
  misc_feature (5)..(334): Pfam Id: PF00291 Pfam Desc: Pyridoxal-phosphate dependent enzyme
  misc_feature (5)..(269): Pfam Id: PF00291 Pfam Desc: Pyridoxal-phosphate dependent enzyme
  misc_feature (9)..(370): NCBI GI: 39978131 Blast Desc: MGG_06950 [Magnaporthe grisea 70-15] gi|145013475|gb|EDJ98116.1| MGG_06950 [Magnaporthe grisea 70-15]
  misc_feature (1)..(368): NCBI GI: 46125569 Blast Desc: FG07162.1 [Gibberella zeae PH-1]
  misc_feature (1)..(368): NCBI GI: 256731330 Blast Desc: NECHADRAFT_84700 [Nectria haematococca mpVI 77-13-4]
  misc_feature (9)..(369): NCBI GI: 261354020 Blast Desc: L-serine dehydratase [Verticillium albo-atrum VaMs.102]
  misc_feature (9)..(369): NCBI GI: 85101216 Blast Desc: NCU03761 [Neurospora crassa OR74A] gi|12718312|emb|CAC28663.1| related to L-serine dehydratase [Neurospora crassa] gi|28922647|gb|EAA31872.1| [Neurospora crassa
  misc_feature (9)..(368): NCBI GI: 134111979 Blast Desc: CNBE2390 [Cryptococcus neoformans var. neoformans B-3501A] gi|50258184|gb|EAL20878.1| CNBE2390 [Cryptococcus neoformans var. neoformans B-3501A]
  misc_feature (9)..(368): NCBI GI: 58268128 Blast Desc: serine family amino acid catabolism-related protein [Cryptococcus neoformans var. neoformans JEC21] gi|57227454|gb|AAW43913.1| serine family amino acid protein, var.
  misc_feature (9)..(370): NCBI GI: 156054462 Blast Desc: SS1G_06079 [Sclerotinia sclerotiorum 1980] gi|154703859|gb|EDO03598.1| SS1G_06079 [Sclerotinia sclerotiorum 1980]
  misc_feature (9)..(370): NCBI GI: 154321113 Blast Desc: BC1G_01431 [Botryotinia fuckeliana B05.10] gi|150851969|gb|EDN27161.1| BC1G_01431 [Botryotinia fuckeliana B05.10]
  misc_feature (8)..(369): NCBI GI: 145602791 Blast Desc: MGG_14171 [Magnaporthe grisea 70-15] gi|145011183|gb|EDJ95839.1| MGG_14171 [Magnaporthe grisea 70-15]
  misc_feature (9)..(363): SWISSPROT Homolog: EC 4.3.1.17 L-serine ammonia-lyase
  misc_feature: Useful for introducing or modulating the production of volatile compounds
MDPKAAGLYIETPCISSPELSRKAGCNIFLKLENLQPGGSFKSRGIGTMMARAVSSSSTGKARFYCSSGGNAGLACATAARSLGLPCDVFLPSISPELVVQKLQSRGAATHRAGDLFPQADAACRKQAALDPDGLYVHPFDNADLWDGHATLVDELVAQEAQGFFGEGRSINAIVCNVGGGGLLNGVMEGIERNYGTKPNGTTNGHVSKPRPRVLAIETEGADSLAASIRAGEHVTLPAMTSAATSLGAPRVSAKTFDWAQKYNATVVSPCSSSASESTGLQPQLVSAVVSDASAVSAVVEFLDDARLLIELSCGATLASAYDGGELLRSALGDGMDDESWSQMNVVLVVCGGSLISSDLLAAYRNKFGV

SEQ ID NO: 29492 - DNA, 4720 bp, Muscodor strobelii
  misc_feature: SGI EST ID NO. CUFF.70015.1
  misc_feature: Variant of the nucleotide sequence at SEQ ID NO 29490
acctaaacgagattttttatgcgccctacgcgcaatcgctggcatctttgtcggaaaatttccgtcggagcatattctcctcgaagacttgatatcaaatatttctgggatcaacgcgacagcccatcttgactgcactatctcagactaaagctgagactcccgtcggggcgcagtcactcaagcttcgcactgctcggctttccaccgtttcccgtctccatttcctgattggatccttggctagatattactaccccttcctgcactatcacgaatcagctgccatcttcggatcctagtctggtgatatacctcaacaaatactcgcgaaagtatctatttacaacaacgatacgggagccatctcatatcggccccggccccgcgacgacaaggtcgggggaacgagcgcggcaagcatcgggtgggatgtcatctgctggctaactcggtccggttttagcattggccgaaactggacatttcattaccctataacttaccctacaattaccctataatctgttggaaagtcgaagtatgtctctttttgctttctctctgttgtcacgaggtatgcaagacttcatttttgttgagattaatgttaccgatcgaggatggcagtgttgaacacgccctatcttgatcagatttgtgggaacgtgataggcgccgatgccgttcgaaaaattatccttggaaactacgagaacgcagtcacgaactaatacttaagtcatttatggtatatataaaggacaaccaatacgattggctttcctatcgacttttgaatacgatggcttaagacttgtagttattatagaaaacctagtcatcctacactctctcgtttcaccaaaccctagtcgacgcaaattgtgcttccagtagaatgctgtccatgcaagaaatactttaaaccccgatctagcacaattttccaaatctcagaccaacatggatccaaaggcagcaggtctatatatcgagacaccatgtatatcatcgccagaattatcacgcaaggcaggatgcaacatatttcttaaactcgagaacctccagccaggaggctctttcaaatcgcgcggaataggaacaatgatggcacgcgccgtctcatcctcgtccacaggcaaagcacggttctactgtagtagtggcggcaacgccggattagcctgcgcaactgctgctcgttctcttggcctgccatgcgatgtcttcctcccctccatcagcccagaactcgttgttcagaaacttcagagccgcggagccgccactcatcgcgcaggggatttatttccccaggctgatgccgcgtgtcggaagcaagccgctctcgacccggacgggctgtatgtccatccatttgacaatgcggatctgtgggatggacacgcaacactagtcgatgaactcgttgcacaggaagcacaaggcttctttggagaaggtcggagcataaatgctatcgtatgcaacgttggtggcggcgggttactaaacggcgtaatggaaggcatagagcgaaactacggcacgaagccaaacggcaccaccaatgggcatgtctccaagcctagacctagagtcctcgccatcgaaacagaaggcgccgactctcttgctgccagtatccgtgccggagaacatgttacgcttccagccatgactagtgcggcaacgagcctaggcgcaccacgagtctcggccaagacattcgattgggctcagaagtacaacgcaaccgttgtatccccttgttcttcatccgcatcagaatctacggggctccaaccccagctcgttagcgcagttgtatctgatgcgtcagccgtgtcggctgttgtagagtttctagacgatgcgagactgctcatcgaattgtcctgcggcgcgacgttagcaagtgcatatgatggcggagagctacttcgatccgctctaggagacggcatggatgatgaaagctggtctcagatgaatgttgtgttagtcgtatgcggtggttcactcatctcttccgacttgttggccgcgtatagaaacaagttcggagtgtagagagcgaaattgcgagaagagaaagaaatataatatttgtagtcgggagctgatgaataagatactcgcatcatttgatagagtggcacggctgttccgagcttcacgttactggattgtgggccgtcacacgagggtctgggtagagaataaacattcgaccacgacggtccaagcatctggcggttgacaaatatcgaagtaccatcaccggtgaaaacttcttttaattgctatctgtgctcgtagcagcactgtttgctaattctctagtccaagtgcatacagtccatgacacagatgatttcgaagcaaaacgataaaggctgcttttcccgtaaactacatcaagccaatgtatataatgctccggaattcgccttacggcctgttgaaaccatgtagggtctgagtgttgtccattgcactcagacatgtgaccttcgagagtctatgactttgactcatccagtagtctcttcctgtattcccagtaccccttgcggataggatcccacttctgcgccagtcggttcaaagccaacgtggcaccttccttatcgcctgaccctgcacagatttcggctagacaatccacagcgtgcgagcttctcacctcctcgttgtcctcgccgagttgcgaaaaaaaggttctaacaaaatcgaccaccgactccagaggcctgcctcctttggccaacacgccacgaaggtagttccaagggctctggttctgaggggcaagttgtatcataaactgagcatagtcgacttctcgatcgatgatgtcttggggcaccttggggtcgtgctccgtggcgtgagagtcggatgtgctcgttttcggattgctgaataccaagaagaaacgatgcgaccaagccgaattgttgcgtacatcctgctcgatcatatattccacactagtcatctcctcctcgagatcccataattccaacttggacacaaaaaattgccggtagctccacacgtgataattcttggtgtctctttccaagatgcgcgtgaggaaacttcgctcggatgcgacaagctcggagcggccagcctcatcggacttaatcttggggtagtattcctcgatcaaaagctggcggtggtgccagatctgatagttcttcaggtgctccagggatactctattcagccactccaactcgtctttgatggacatagcgcatgccttgatgatatcgaaccggtacagccacacagtgtagtgggccgggttgagctctatgatgtcttcggtcaggcccaggcagcgctttgatttctccttgttggccatgacggcgcggaggtaggccatggctgtgtgaaacattagacgttagcgacgagggcgagcgtgcgtgagcccggggaggcaatgggacgctaccttctgcgtaatcatcggggtaggcaatggcggccaaggcgccttcgggctcctcctgggggatggggacgacatcgtcccattccgggtcattcgcgtagctgaaggtgcgttcgccggtgagcttctgccggatggacgccatctcttggcgccgcgtcttctcggcctcgatgtcctgcggagtgatggtgtagcgcttgccggtctcggggttcgtccgcttggcgcgcgcggagtgacggcgtctcctgaaggcgtcgctctcgatgcgcaggagcctcagcctcgtcttgtcgtggctgtactgtgcgaagtcttggggcgtgtagttgccgatgtccctgccgtgggcgtcgaggccccagggcttgtcggccgggggcggcacgcgcaggagggtgacgttggcgtcgttgagctgcttccacacctcgcgctgggacttcttggagagccggtcgaggaagccgggcgtgcgtgccgactggagcgcgtggtacgtcttcctgtcgttggggctcagcgcatcgatgccctgttcgtggacaatcttgccgatcgggtccgcctcggcccagcgctggtagtgcacctcgcggatggtttgaggctgcttgggagtttcctttgctgctgtctgtggtttggctatgcgcatgtcagagcatcagcctctgtctcacacaaaatggtggagagtgcatgaggggactatagctagagcgccatgtgagggcgagaaagaagagtcgaggttcgcagtgtacaatacttacaatcagcctccttcgccttgctgctcccgcctttgtttttggcaggcatgaccgcaagctctggtgagccgtggagaaggtcgggaggagtgcggctaggtacatgtacttaaaggatcagggaggctgtcgccgatcgactggtgggatgatgctacggcatgaggaatcgacggcagcgacatggtggggttgcttcccccaaacatcctgcccaaaaggccccgcgcgttcagtcaccctccctaccttgcctgccagcttgcgataccattgacgcacatgagcaccggcgcaaacatactacagagctagtactggtgtaatagctattgggtcaagtctatagagagcgaaataaaagaaaaggagccaatcagatagcgaaaaaagcgtgggtatttgaacttcacgtctgtgttcactcaaggaggcagatagatctttgacaggctca

SEQ ID NO: 29493 - DNA, 1584 bp, Muscodor strobelii
  misc_feature: SGI cDNA ID NO. 570131
  misc_feature: Encodes the peptide sequence at SEQ ID NO 29494
atgcctgccaaaaacaaaggcgggagcagcaaggcgaaggaggctgattccaaaccacagacagcagcaaaggaaactcccaagcagcctcaaaccatccgcgaggtgcactaccagcgctgggccgaggcggacccgatcggcaagattgtccacgaacagggcatcgatgcgctgagccccaacgacaggaagacgtaccacgcgctccagtcggcacgcacgcccggcttcctcgaccggctctccaagaagtcccagcgcgaggtgtggaagcagctcaacgacgccaacgtcaccctcctgcgcgtgccgcccccggccgacaagccctggggcctcgacgcccacggcagggacatcggcaactacacgccccaagacttcgcacagtacagccacgacaagacgaggctgaggctcctgcgcatcgagagcgacgccttcaggagacgccgtcactccgcgcgcgccaagcggacgaaccccgagaccggcaagcgctacaccatcactccgcaggacatcgaggccgagaagacgcggcgccaagagatggcgtccatccggcagaagctcaccggcgaacgcaccttcagctacgcgaatgacccggaatgggacgatgtcgtccccatcccccaggaggagcccgaaggcgccttggccgccattgcctaccccgatgattacgcagaagccatggcctacctccgcgccgtcatggccaacaaggagaaatcaaagcgctgcctgggcctgaccgaagacatcatagagctcaacccggcccactacactgtgtggctgtaccggttcgatatcatcaaggcatgcgctatgtccatcaaagacgagttggagtggctgaatagagtatccctggagcacctgaagaactatcagatctggcaccaccgccagcttttgatcgaggaatactaccccaagattaagtccgatgaggctggccgctccgagcttgtcgcatccgagcgaagtttcctcacgcgcatcttggaaagagacaccaagaattatcacgtgtggagctaccggcaattttttgtgtccaagttggaattatgggatctcgaggaggagatgactagtgtggaatatatgatcgagcaggatgtacgcaacaattcggcttggtcgcatcgtttcttcttggtattcagcaatccgaaaacgagcacatccgactctcacgccacggagcacgaccccaaggtgccccaagacatcatcgatcgagaagtcgactatgctcagtttatgatacaacttgcccctcagaaccagagcccttggaactaccttcgtggcgtgttggccaaaggaggcaggcctctggagtcggtggtcgattttgttagaacctttttttcgcaactcggcgaggacaacgaggaggtgagaagctcgcacgctgtggattgtctagccgaaatctgtgcagggtcaggcgataaggaaggtgccacgttggctttgaaccgactggcgcagaagtgggatcctatccgcaaggggtactgggaatacaggaagagactactggatgagtcaaagtcatag

SEQ ID NO: 29494 - protein, 527 aa, Muscodor strobelii
  misc_feature: SGI Peptide ID NO. 570131
  misc_feature (331)..(361): Pfam Id: PF01239 Pfam Desc: Protein prenyltransferase alpha subunit repeat
  misc_feature (367)..(397): Pfam Id: PF01239 Pfam Desc: Protein prenyltransferase alpha subunit repeat
  misc_feature (250)..(280): Pfam Id: PF01239 Pfam Desc: Protein prenyltransferase alpha subunit repeat
  misc_feature (420)..(450): Pfam Id: PF01239 Pfam Desc: Protein prenyltransferase alpha subunit repeat
  misc_feature (285)..(315): Pfam Id: PF01239 Pfam Desc: Protein prenyltransferase alpha subunit repeat
  misc_feature (12)..(522): NCBI GI: 46123067 Blast Desc: FG05911.1 [Gibberella zeae PH-1]
  misc_feature (1)..(522): NCBI GI: 256731143 Blast Desc: NECHADRAFT_49141 [Nectria haematococca mpVI 77-13-4]
  misc_feature (1)..(527): NCBI GI: 16944635 Blast Desc: related to geranylgeranyltransferase type I alpha subunit (RAM2) [Neurospora crassa]
  misc_feature (31)..(522): NCBI GI: 39978125 Blast Desc: MGG_06947 [Magnaporthe grisea 70-15] gi|145013478|gb|EDJ98119.1| MGG_06947 [Magnaporthe grisea 70-15]
  misc_feature (82)..(527): NCBI GI: 164426773 Blast Desc: NCU03632 [Neurospora crassa OR74A] gi|157071472|gb|EAA32123.2| conserved [Neurospora crassa OR74A]
  misc_feature (85)..(523): NCBI GI: 116206426 Blast Desc: CHGG_02506 [Chaetomium globosum CBS 148.51] gi|88183103|gb|EAQ90571.1| CHGG_02506 [Chaetomium globosum CBS 148.51]
  misc_feature (85)..(523): NCBI GI: 171693617 Blast Desc: protein product [Podospora anserina] gi|170946757|emb|CAP73561.1| protein product [Podospora anserina]
  misc_feature (201)..(527): NCBI GI: 156054464 Blast Desc: protein farnesyltransferase/geranylgeranyltransferase type I alpha subunit [Sclerotinia sclerotiorum 1980] gi|154703860|gb|EDO03599.1| protein type I alpha subunit 1980]
  misc_feature (242)..(522): NCBI GI: 261354831 Blast Desc: CaaX farnesyltransferase alpha subunit Ram2 [Verticillium albo-atrum VaMs.102]
  misc_feature (200)..(523): NCBI GI: 115398015 Blast Desc: ATEG_05421 [Aspergillus terreus NIH2624] gi|114192790|gb|EAU34490.1| ATEG_05421 [Aspergillus terreus NIH2624]
  misc_feature (206)..(518): SWISSPROT Homolog: EC 2.5.1.59 Protein geranylgeranyltransferase type I
  misc_feature (206)..(518): SWISSPROT Homolog: EC 2.5.1.58 Protein farnesyltransferase
MPAKNKGGSSKAKEADSKPQTAAKETPKQPQTIREVHYQRWAEADPIGKIVHEQGIDALSPNDRKTYHALQSARTPGFLDRLSKKSQREVWKQLNDANVTLLRVPPPADKPWGLDAHGRDIGNYTPQDFAQYSHDKTRLRLLRIESDAFRRRRHSARAKRTNPETGKRYTITPQDIEAEKTRRQEMASIRQKLTGERTFSYANDPEWDDVVPIPQEEPEGALAAIAYPDDYAEAMAYLRAVMANKEKSKRCLGLTEDIIELNPAHYTVWLYRFDIIKACAMSIKDELEWLNRVSLEHLKNYQIWHHRQLLIEEYYPKIKSDEAGRSELVASERSFLTRILERDTKNYHVWSYRQFFVSKLELWDLEEEMTSVEYMIEQDVRNNSAWSHRFFLVFSNPKTSTSDSHATEHDPKVPQDIIDREVDYAQFMIQLAPQNQSPWNYLRGVLAKGGRPLESVVDFVRTFFSQLGEDNEEVRSSHAVDCLAEICAGSGDKEGATLALNRLAQKWDPIRKGYWEYRKRLLDESKS

SEQ ID NO: 29495 - DNA, 5263 bp, Muscodor strobelii
  misc_feature: SGI EST ID NO. CUFF.70016.0
  misc_feature: Variant of the nucleotide sequence at SEQ ID NO 29493
ccttgagtgaacacagacgtgaagttcaaatacccacgcttttttcgctatctgattggctccttttcttttatttcgctctctatagacttgacccaatagctattacaccagtactagctctgtagtatgtttgcgccggtgctcatgtgcgtcaatggtatcgcaagctggcaggcaaggtagggagggtgactgaacgcgcggggccttttgggcaggatgtttgggggaagcaaccccaccatgtcgctgccgtcgattcctcatgccgtagcatcatcccaccagtcgatcggcgacagcctccctgatcctttaagtacatgtacctagccgcactcctcccgaccttctccacggctcaccagagcttgcggtcatgcctgccaaaaacaaaggcgggagcagcaaggcgaaggaggctgattccaaaccacagacagcagcaaaggaaactcccaagcagcctcaaaccatccgcgaggtgcactaccagcgctgggccgaggcggacccgatcggcaagattgtccacgaacagggcatcgatgcgctgagccccaacgacaggaagacgtaccacgcgctccagtcggcacgcacgcccggcttcctcgaccggctctccaagaagtcccagcgcgaggtgtggaagcagctcaacgacgccaacgtcaccctcctgcgcgtgccgcccccggccgacaagccctggggcctcgacgcccacggcagggacatcggcaactacacgccccaagacttcgcacagtacagccacgacaagacgaggctgaggctcctgcgcatcgagagcgacgccttcaggagacgccgtcactccgcgcgcgccaagcggacgaaccccgagaccggcaagcgctacaccatcactccgcaggacatcgaggccgagaagacgcggcgccaagagatggcgtccatccggcagaagctcaccggcgaacgcaccttcagctacgcgaatgacccggaatgggacgatgtcgtccccatcccccaggaggagcccgaaggcgccttggccgccattgcctaccccgatgattacgcagaagccatggcctacctccgcgccgtcatggccaacaaggagaaatcaaagcgctgcctgggcctgaccgaagacatcatagagctcaacccggcccactacactgtgtggctgtaccggttcgatatcatcaaggcatgcgctatgtccatcaaagacgagttggagtggctgaatagagtatccctggagcacctgaagaactatcagatctggcaccaccgccagcttttgatcgaggaatactaccccaagattaagtccgatgaggctggccgctccgagcttgtcgcatccgagcgaagtttcctcacgcgcatcttggaaagagacaccaagaattatcacgtgtggagctaccggcaattttttgtgtccaagttggaattatgggatctcgaggaggagatgactagtgtggaatatatgatcgagcaggatgtacgcaacaattcggcttggtcgcatcgtttcttcttggtattcagcaatccgaaaacgagcacatccgactctcacgccacggagcacgaccccaaggtgccccaagacatcatcgatcgagaagtcgactatgctcagtttatgatacaacttgcccctcagaaccagagcccttggaactaccttcgtggcgtgttggccaaaggaggcaggcctctggagtcggtggtcgattttgttagaacctttttttcgcaactcggcgaggacaacgaggaggtgagaagctcgcacgctgtggattgtctagccgaaatctgtgcagggtcaggcgataaggaaggtgccacgttggctttgaaccgactggcgcagaagtgggatcctatccgcaaggggtactgggaatacaggaagagactactggatgagtcaaagtcatagactctcgaaggtcacatgtctgagtgcaatggacaacactcagaccctacatggtttcaacaggccgtaaggcgaattccggagcattatatacattggcttgatgtagtttacgggaaaagcagcctttatcgttttgcttcgaaatcatctgtgtcatggactgtatgcacttggactagagaattagcaaacagtgctgctacgagcacagatagcaattaaaagaagttttcaccggtgatggtacttcgatatttgtcaaccgccagatgcttggaccgtcgtggtcgaatgtttattctctacccagaccctcgtgtgacggcccacaatccagtaacgtgaagctcggaacagccgtgccactctatcaaatgatgcgagtatcttattcatcagctcccgactacaaatattatatttctttctcttctcgcaatttcgctctctacactccgaacttgtttctatacgcggccaacaagtcggaagagatgagtgaaccaccgcatacgactaacacaacattcatctgagaccagctttcatcatccatgccgtctcctagagcggatcgaagtagctctccgccatcatatgcacttgctaacgtcgcgccgcaggacaattcgatgagcagtctcgcatcgtctagaaactctacaacagccgacacggctgacgcatcagatacaactgcgctaacgagctggggttggagccccgtagattctgatgcggatgaagaacaaggggatacaacggttgcgttgtacttctgagcccaatcgaatgtcttggccgagactcgtggtgcgcctaggctcgttgccgcactagtcatggctggaagcgtaacatgttctccggcacggatactggcagcaagagagtcggcgccttctgtttcgatggcgaggactctaggtctaggcttggagacatgcccattggtggtgccgtttggcttcgtgccgtagtttcgctctatgccttccattacgccgtttagtaacccgccgccaccaacgttgcatacgatagcatttatgctccgaccttctccaaagaagccttgtgcttcctgtgcaacgagttcatcgactagtgttgcgtgtccatcccactgcaacgcttgaagtcaatgattactctttattgtgtgtttgcgcgtgtctcgatggtcttgaatcatatttatagagcacttgctcccgaaaacgtccaggataggtagtgaaagacttcaggattactcaccagatccgcattgtcaaatggatggacatacagcccgtccgggtcgagagcggcttgcttccgacacgcggcatcagcctggggaaataaatcccctgcgcgatgagtggcggctccgcggctctgaagtttctgaacaacgagttctgggctgatggaggggaggaagacatcgcatggcaggccaagagaacgagcagcagttgcgcaggctaatccggcgttgccgccactactacagtagaaccgtgctttgcctgtggacgaggatgagacggcgcgtgccatcattgttcctattccgcgcgatttgaaagagcctcctggctggaggttctcgagtttaagaaatatgttgctttgggttggtcagtggaaagtcgataagacgccattgattgcgacgtctgaaaagaaattacttgccatcctgccttgcgtgataattctggcgatgatatacatggtgtctcgatatatagacctgctgcctttggatccatgttggtctgagatttggaaaattgtgctagatcggggtttaaagtatttcttgcatggacagcattctactggaagcacaatttgcgtcgactagggtttggtgaaacgagagagtgtaggatgactaggttttctataataactacaagtcttaagccatcgtattcaaaagtcgataggaaagccaatcgtattggttgtcctttatatataccataaatgacttaagtattagttcgtgactgcgttctcgtagtttccaaggataatttttcgaacggcatcggcgcctatcacgttcccacaaatctgatcaagatagggcgtgttcaacactgccatcctcgatcggtaacattaatctcaacaaaaatgaagtcttgcatacctcgtgacaacagagagaaagcaaaaagagacatacttcgactttccaacagattatagggtaattgtagggtaagttatagggtaatgaaatgtccagtttcggccaatgctaaaaccggaccgagttagccagcagatgacatcccacccgatgcttgccgcgctcgttcccccgaccttgtcgtcgcggggccggggccgatatgagatggctcccgtatcgttgttgtaaatagatactttcgcgagtatttgttgaggtatatcaccagactaggatccgaagatggcagctgattcgtgatagtgcaggaaggggtagtaatatctagccaaggatccaatcaggaaatggagacgggaaacggtggaaagccgagcagtgcgaagcttgagtgactgcgccccgacgggagtctcagctttagtctgagatagtgcagtcaagatgggctgtcgcgttgatcccagaaatatttgatatcaagtcttcgaggagaatatgctccgacggaaattttccgacaaagatgccagcgattgcgcgtagggcgcataaaaaatctcgtttaggctgcagccggtgcaagtcaaggaagatcaagtgcaatgaggagcacccttgctcatattgtgtcaaaaagggttatcaatgcagtctggtagatgactcaagcacacccggaccatcagaattcaagtatcaagtaaaccaagaatttagtgtgacagatttcgctctatttcgacatttcattaagaaagtcgcagtcgaccacgccgacgatataccctcagaagtagtttgggcagagcacgtctcgagtctcgccacacagcatgactatcttctacaccagatcctcgctctctcagcactccacatgagaatatcgtttcccgagcagtctggagagctcgagcaaattgccctttcacaccaagcaaggagtttaccgcttttcagagatgcgttgtcgacagacctagagagagattccctcccattatttgtctgcgctgtgctgatcataccacatcacttcgcgctaacgaatgatccgatgcttatgattcttaacgaaaagacacagagtcctccggaatggctcttgatgctcgacggcgctacacgtatcg

SEQ ID NO: 29496 - DNA, 1542 bp, Muscodor strobelii
  misc_feature: SGI cDNA ID NO. 570132
  misc_feature: Reduced expression when VOC is produced
  misc_feature: Encodes the peptide sequence at SEQ ID NO 29497
atgacacgcgtgccctccacccccgaaagctcgtcttcggagatgtccagccttctcaatggcttccacaacggctccgagctgaacggagacagcagggggacctcggtctccagcaggacctccagcgatagcgagacgcagcgcgaacgcggcaggctgacccggaggaagtccagtcccatgatgcccccgttcatggtctctgcgccgggcaaggtcattgtgttcggcgaacatgccgtcgtccacggcaaggctgccatcgctgcctcaatttcactccgctcctatctccacgtcacgaccctctccaaatcgcgacgcacattcaccatccgcttcccagacatcgacatgatccactcgtggaatatcgacgatctgccctgggatctgttctcccacccttccaaaaagaagtactactacgacctggtcacgagcatcgaccccgagctcatggaggccatccagccgcatctagtcgatgtgtcggtccacaaatcgcctgccgagcgcaagatccaccagaactcggctgcatgcttcctttacctcttcctttctctgggctcgcagaagttcccgggctgcgtgtacacactacggtctaccatacctatcggggctggcttgggaagcagcgcatccatcgccgtctgcttagcggcagctttgctattgcagatccgtacgttgtccgggccgcacccggatcaaccgccggaggaggctcgcctacagattgagagaataaaccgctgggctttcgtcgccgagatggccatccacggaaatccgtccggcgtcgacaacacggtctccacgcaaggcaaagccgtcgttttccaacgaacagactacgagaagccccccgtcgttacaccgctctgggacttccccgagctgccactgctcctgctcgacacgcgcacgccaaagtcgacactgcacgaggtggccaaagtggccaagctgaagaacacccatcctaaactggtgggcagcatcttggatgcggtggacaaggtgacgcggacggcagagagcctgatcgacgaggaggatttcgacagcgaagaagacgagagcctccggcgcatgggagagctgatctcgatcaaccacggcctgctcgcatcgctaggggtttcacacccccggctagagcggattcgcgagttgatcgacttccagggactgggctggagtaaattgacgggtgccggcggcggtggctgctcgatcacactgctgaagcccagcgtgcccaaggacaagctgcaggccttggaggaccagctggactcggagggctatgcacagttcaagacgacgctcggtggagatggcgtcggggttctttggccggcggtgctgaagaacggcttggacgatgacgaagatggtggcatggagatcgatttggattcgttcctcaaggcatcgggcacggagggagtggagaagttggtgggcgtgcacggaggcacgggcgaaagggaaggttggaagttctggagggtggaaagccgatag

SEQ ID NO: 29497 - protein, 513 aa, Muscodor strobelii
  misc_feature: SGI Peptide ID NO. 570132
  misc_feature (348)..(438): Pfam Id: PF08544 Pfam Desc: GHMP kinases C terminal
  misc_feature (200)..(280): Pfam Id: PF00288 Pfam Desc: GHMP kinases N terminal domain
  misc_feature (20)..(512): NCBI GI: 171693619 Blast Desc: protein product [Podospora anserina] gi|170946758|emb|CAP73562.1| protein product [Podospora anserina]
  misc_feature (19)..(513): NCBI GI: 85102580 Blast Desc: NCU03633 [Neurospora crassa OR74A] gi|12718384|emb|CAC28692.1| related to MEVALONATE KINASE [Neurospora crassa] gi|28922904|gb|EAA32124.1| NCU03633 crassa
  misc_feature (18)..(513): NCBI GI: 256731547 Blast Desc: [Nectria haematococca mpVI 77-13-4]
  misc_feature (20)..(512): NCBI GI: 116206428 Blast Desc: CHGG_02507 [Chaetomium globosum CBS 148.51] gi|88183104|gb|EAQ90572.1| CHGG_02507 [Chaetomium globosum CBS 148.51]
  misc_feature (17)..(513): NCBI GI: 46123069 Blast Desc: FG05912.1 [Gibberella zeae PH-1]
  misc_feature (20)..(510): NCBI GI: 39978123 Blast Desc: MGG_06946 [Magnaporthe grisea 70-15] gi|145013479|gb|EDJ98120.1| MGG_06946 [Magnaporthe grisea 70-15]
  misc_feature (45)..(511): NCBI GI: 156054466 Blast Desc: SS1G_06081 [Sclerotinia sclerotiorum 1980] gi|154703861|gb|EDO03600.1| SS1G_06081 [Sclerotinia sclerotiorum 1980]
  misc_feature (28)..(511): NCBI GI: 154321109 Blast Desc: BC1G_01429 [Botryotinia fuckeliana B05.10] gi|150851967|gb|EDN27159.1| BC1G_01429 [Botryotinia fuckeliana B05.10]
  misc_feature (45)..(513): NCBI GI: 119500972 Blast Desc: mevalonate kinase [Neosartorya fischeri NRRL 181] gi|119415408|gb|EAW25346.1| mevalonate kinase [Neosartorya fischeri NRRL 181]
  misc_feature (35)..(509): NCBI GI: 115398019 Blast Desc: conserved [Aspergillus terreus NIH2624] gi|114192792|gb|EAU34492.1| conserved [Aspergillus terreus NIH2624]
  misc_feature (62)..(456): SWISSPROT Homolog: EC 2.7.1.36 Mevalonate kinase
  misc_feature: Useful for fungicidal and/or biocontrol applications
  misc_feature: Useful for introducing or modulating the production of volatile compounds
MTRVPSTPESSSSEMSSLLNGFHNGSELNGDSRGTSVSSRTSSDSETQRERGRLTRRKSSPMMPPFMVSAPGKVIVFGEHAVVHGKAAIAASISLRSYLHVTTLSKSRRTFTIRFPDIDMIHSWNIDDLPWDLFSHPSKKKYYYDLVTSIDPELMEAIQPHLVDVSVHKSPAERKIHQNSAACFLYLFLSLGSQKFPGCVYTLRSTIPIGAGLGSSASIAVCLAAALLLQIRTLSGPHPDQPPEEARLQIERINRWAFVAEMAIHGNPSGVDNTVSTQGKAVVFQRTDYEKPPVVTPLWDFPELPLLLLDTRTPKSTLHEVAKVAKLKNTHPKLVGSILDAVDKVTRTAESLIDEEDFDSEEDESLRRMGELISINHGLLASLGVSHPRLERIRELIDFQGLGWSKLTGAGGGGCSITLLKPSVPKDKLQALEDQLDSEGYAQFKTTLGGDGVGVLWPAVLKNGLDDDEDGGMEIDLDSFLKASGTEGVEKLVGVHGGTGEREGWKFWRVESR

SEQ ID NO: 29498 - DNA, 2635 bp, Muscodor strobelii
  misc_feature: SGI EST ID NO. CUFF.70231.1
  misc_feature: Variant of the nucleotide sequence at SEQ ID NO 29496
cggtgcgggctgcccagatccttcgaaattaatgaccactaagccaggtactttaataatgctacgtacaaatggaggtagctttcgtgactaccacgatccgtcggtcgatgcaggccaatgaggccatacaagctgccgtccaagtacattatccatctgtgtccaccgacggcgccactccttgctactcctgctcttcttcttccctctcccctttcccgaagcccgtgtcccgtcctcaaaccttctctcactgccagctatcgatttcacacctcaccagcatccaacccacctcctctcctgtctgcctttgtacatacctacagacaacaacaccgccgtcccagcataagcaacttctgtcagcgcagccgtgtgtctttgtgtgctgattctaccactgcgtccggcattttccattttccccagtgtctctgcagcctcgctcgctgtcgtcattgcagaacccgccagtgcttctgagacaaggcaccgccagccggctcctggcgcccccagcttgactgctcgactcctgtgcggaggctcttggatcgccaacatcgagacgacggggcttgcgcttccctgatcgctcacccacagcggccactcccccccagcggtgctaatgacacgcgtgccctccacccccgaaagctcgtcttcggagatgtccagccttctcaatggcttccacaacggctccgagctgaacggagacagcagggggacctcggtctccagcaggacctccagcgatagcgagacgcagcgcgaacgcggcaggctgacccggaggaagtccagtcccatgatgcccccgttcatggtctctgcgccgggcaaggtcattgtgttcggcgaacatgccgtcgtccacggcaaggctgccatcgctgcctcaatttcactccgctcctatctccacgtcacgaccctctccaaatcgcgacgcacattcaccatccgcttcccagacatcgacatgatccactcgtggaatatcgacgatctgccctgggatctgttctcccacccttccaaaaagaagtactactacgacctggtcacgagcatcgaccccgagctcatggaggccatccagccgcatctagtcgatgtgtcggtccacaaatcgcctgccgagcgcaagatccaccagaactcggctgcatgcttcctttacctcttcctttctctgggctcgcagaagttcccgggctgcgtgtacacactacggtctaccatacctatcggggctggcttgggaagcagcgcatccatcgccgtctgcttagcggcagctttgctattgcagatccgtacgttgtccgggccgcacccggatcaaccgccggaggaggctcgcctacagattgagagaataaaccgctgggctttcgtcgccgagatggccatccacggaaatccgtccggcgtcgacaacacggtctccacgcaaggcaaagccgtcgttttccaacgaacagactacgagaagccccccgtcgttacaccgctctgggacttccccgagctgccactgctcctgctcgacacgcgcacgccaaagtcgacactgcacgaggtggccaaagtggccaagctgaagaacacccatcctaaactggtgggcagcatcttggatgcggtggacaaggtgacgcggacggcagagagcctgatcgacgaggaggatttcgacagcgaagaagacgagagcctccggcgcatgggagagctgatctcgatcaaccacggcctgctcgcatcgctaggggtttcacacccccggctagagcggattcgcgagttgatcgacttccagggactgggctggagtaaattgacgggtgccggcggcggtggctgctcgatcacactgctgaagcccagcgtgcccaaggacaagctgcaggccttggaggaccagctggactcggagggctatgcacagttcaagacgacgctcggtggagatggcgtcggggttctttggccggcggtgctgaagaacggcttggacgatgacgaagatggtggcatggagatcgatttggattcgttcctcaaggcatcgggcacggagggagtggagaagttggtgggcgtgcacggaggcacgggcgaaagggaaggttggaagttctggagggtggaaagccgatagtccgcagcccgcagtgttctgcaaggtcggcggcctgcccgaaatggcaacgggccatgtcctccaacagcccatccccccaacactctatcaggaccgggtggcgttattgcgttattgcagttttcggtgtgcccgcgcagcgaggctcgtcggtggtatttattgtattatagattgacatggggctataatacaggatctacggattaggcattgcatatatgttttatggagtagagttagattcattggccttgcggtccgcagcacagcaccagggtagatgcattcttgatactgacattcgatctatcatgactatttcaaataccaattatctgtgaaccggaagctcgatagtcagctgcatctcactggcttttcatatctacaatgcactcaagacagcagtcaggcagtggcatcattacaaagtttgtgaacagagtagag

SEQ ID NO: 29499 - DNA, 759 bp, Muscodor strobelii
  misc_feature: SGI cDNA ID NO. 570133
  misc_feature: Reduced expression when VOC is produced
  misc_feature: Encodes the peptide sequence at SEQ ID NO 29500
atggccatccacggaaatccgtccggcgtcgacaacacggtctccacgcaaggcaaagccgtcgttttccaacgaacagactacgagaagccccccgtcgttacaccgctctgggacttccccgagctgccactgctcctgctcgacacgcgcacgccaaagtcgacactgcacgaggtggccaaagtggccaagctgaagaacacccatcctaaactggtgggcagcatcttggatgcggtggacaaggtgacgcggacggcagagagcctgatcgacgaggaggatttcgacagcgaagaagacgagagcctccggcgcatgggagagctgatctcgatcaaccacggcctgctcgcatcgctaggggtttcacacccccggctagagcggattcgcgagttgatcgacttccagggactgggctggagtaaattgacgggtgccggcggcggtggctgctcgatcacactgctgaagcccagcgtgcccaaggacaagctgcaggccttggaggaccagctggactcggagggctatgcacagttcaagacgacgctcggtggagatggcgtcggggttctttggccggcggtgctgaagaacggcttggacgatgacgaagatggtggcatggagatcgatttggattcgttcctcaaggcatcgggcacggagggagtggagaagttggtgggcgtgcacggaggcacgggcgaaagggaaggttggaagttctggagggtggaaagccgatag

SEQ ID NO: 29500 - protein, 252 aa, Muscodor strobelii
  misc_feature: SGI Peptide ID NO. 570133
  misc_feature (87)..(177): Pfam Id: PF08544 Pfam Desc: GHMP kinases C terminal
  misc_feature (1)..(251): NCBI GI: 171693619 Blast Desc: protein product [Podospora anserina] gi|170946758|emb|CAP73562.1| protein product [Podospora anserina]
  misc_feature (1)..(252): NCBI GI: 46123069 Blast Desc: FG05912.1 [Gibberella zeae PH-1]
  misc_feature (1)..(252): NCBI GI: 256731547 Blast Desc: [Nectria haematococca mpVI 77-13-4]
  misc_feature (1)..(251): NCBI GI: 116206428 Blast Desc: CHGG_02507 [Chaetomium globosum CBS 148.51] gi|88183104|gb|EAQ90572.1| CHGG_02507 [Chaetomium globosum CBS 148.51]
  misc_feature (1)..(252): NCBI GI: 85102580 Blast Desc: NCU03633 [Neurospora crassa OR74A] gi|12718384|emb|CAC28692.1| related to MEVALONATE KINASE [Neurospora crassa] gi|28922904|gb|EAA32124.1| NCU03633 crassa
  misc_feature (1)..(251): NCBI GI: 261354833 Blast Desc: mevalonate kinase [Verticillium albo-atrum VaMs.102]
  misc_feature (1)..(249): NCBI GI: 39978123 Blast Desc: MGG_06946 [Magnaporthe grisea 70-15] gi|145013479|gb|EDJ98120.1| MGG_06946 [Magnaporthe grisea 70-15]
  misc_feature (1)..(250): NCBI GI: 156054466 Blast Desc: SS1G_06081 [Sclerotinia sclerotiorum 1980] gi|154703861|gb|EDO03600.1| SS1G_06081 [Sclerotinia sclerotiorum 1980]
  misc_feature (1)..(250): NCBI GI: 154321109 Blast Desc: BC1G_01429 [Botryotinia fuckeliana B05.10] gi|150851967|gb|EDN27159.1| BC1G_01429 [Botryotinia fuckeliana B05.10]
  misc_feature (1)..(252): NCBI GI: 115398019 Blast Desc: conserved [Aspergillus terreus NIH2624] gi|114192792|gb|EAU34492.1| conserved [Aspergillus terreus NIH2624]
  misc_feature (2)..(195): SWISSPROT Homolog: EC 2.7.1.36 Mevalonate kinase
  misc_feature: Useful for fungicidal and/or biocontrol applications
  misc_feature: Useful for introducing or modulating the production of volatile compounds
MAIHGNPSGVDNTVSTQGKAVVFQRTDYEKPPVVTPLWDFPELPLLLLDTRTPKSTLHEVAKVAKLKNTHPKLVGSILDAVDKVTRTAESLIDEEDFDSEEDESLRRMGELISINHGLLASLGVSHPRLERIRELIDFQGLGWSKLTGAGGGGCSITLLKPSVPKDKLQALEDQLDSEGYAQFKTTLGGDGVGVLWPAVLKNGLDDDEDGGMEIDLDSFLKASGTEGVEKLVGVHGGTGEREGWKFWRVESR

SEQ ID NO: 29501 - DNA, 2635 bp, Muscodor strobelii; identical to SEQ ID NO: 29498
  misc_feature: SGI EST ID NO. CUFF.70231.1
  misc_feature: Variant of the nucleotide sequence at SEQ ID NO 29499

SEQ ID NO: 29502 - DNA, 672 bp, Muscodor strobelii
  misc_feature: SGI cDNA ID NO. 570134
  misc_feature: Elevated expression when VOC is produced
  misc_feature: Encodes the peptide sequence at SEQ ID NO 29503
atggccgtcacaaaccttgtctggctcaccagttcctcggacactttcacggccgataacaaagccgcaatggagggcgcctttgacgcgcaggcagactgggtagtgcgaaacgtgccctctgcaccaaaggatagagaggcacgcggcgtagcgctgtggcagcaacttgaggacccgcgtgtagtcatggagagcgcgcactggtcgtcaacggaagaacacatgcaatggctagcgagcaccgaataccagaatagctccgcgccacttgcgggacattttgatttctcgaaattggagtattttcacctggatacagatgtgttccggcctgtggacgaggctgctggcgaagtctcactattgaagaacgctgtcatcagtgttgctaggattcagggcccatctaacaagaaggacgagctgttgaaagtatgggatgagtcgaaagccatccttgaaagttttgcaaagccgagcgtgctgaggagcggattcagggtgcagaaggttgatcctgagaccgaggaatttctcttcttcatagggtggcccgatgctgccactcatggcgaatttgcgaaacagccggatttccagaaatttgccgggcccctaggtagcttcgcaaagtctcacgatgtcaaacattacaagaggattatataa

SEQ ID NO: 29503 - protein, 223 aa, Muscodor strobelii
  misc_feature: SGI Peptide ID NO. 570134
  misc_feature (1)..(223): NCBI GI: 85102584 Blast Desc: NCU03634 [Neurospora crassa OR74A] gi|12718383|emb|CAC28691.1| [Neurospora crassa] gi|28922905|gb|EAA32125.1| NCU03634 [Neurospora crassa OR74A]
  misc_feature (53)..(204): NCBI GI: 169786267 Blast Desc: [Aspergillus oryzae RIB40] gi|238507245|ref|XP_002384824.1| conserved [Aspergillus flavus NRRL3357] gi|83776342|dbj|BAE66461.1| protein product oryzae]
  misc_feature (3)..(221): NCBI GI: 70991897 Blast Desc: conserved [Aspergillus fumigatus Af293] gi|66848430|gb|EAL88759.1| conserved [Aspergillus fumigatus Af293]
  misc_feature (3)..(221): NCBI GI: 159124359 Blast Desc: conserved [Aspergillus fumigatus A1163]
  misc_feature (1)..(96): NCBI GI: 261354835 Blast Desc: conserved [Verticillium albo-atrum VaMs.102]
  misc_feature (3)..(221): NCBI GI: 119470351 Blast Desc: NFIA_054750 [Neosartorya fischeri NRRL 181] gi|119406178|gb|EAW16129.1| conserved [Neosartorya fischeri NRRL 181]
  misc_feature (35)..(221): NCBI GI: 121699570 Blast Desc: conserved [Aspergillus clavatus NRRL 1] gi|119396204|gb|EAW06636.1| conserved [Aspergillus clavatus NRRL 1]
  misc_feature (53)..(203): NCBI GI: 258570111 Blast Desc: [Uncinocarpus reesii 1704] gi|237904129|gb|EEP78530.1| [Uncinocarpus reesii 1704]
  misc_feature (1)..(221): NCBI GI: 240106666 Blast Desc: CPC735_014490 [Coccidioides posadasii C735 delta SOWgp]
  misc_feature (1)..(221): NCBI GI: 119174026 Blast Desc: CIMG_08995 [Coccidioides immitis RS]
  misc_feature: Useful for introducing or modulating the production of volatile compounds
MAVTNLVWLTSSSDTFTADNKAAMEGAFDAQADWVVRNVPSAPKDREARGVALWQQLEDPRVVMESAHWSSTEEHMQWLASTEYQNSSAPLAGHFDFSKLEYFHLDTDVFRPVDEAAGEVSLLKNAVISVARIQGPSNKKDELLKVWDESKAILESFAKPSVLRSGFRVQKVDPETEEFLFFIGWPDAATHGEFAKQPDFQKFAGPLGSFAKSHDVKHYKRII

SEQ ID NO: 29504 - DNA, 249 bp, Muscodor strobelii
  misc_feature: SGI cDNA ID NO. 570135
  misc_feature: Reduced expression when VOC is produced
  misc_feature: Encodes the peptide sequence at SEQ ID NO 29505
atgccgcaggaaatcgccgacatcaagagattcatcgagatctgccgtcgcgatgacgccaagtccgctcggatcaagaagaacaagaagtcctcccagaccaagttcaaggtccgctgctccaagcacctttacactctggtcctgaaggactccgacaaggccgagaagctcaagcagagcctgcctcccaacttgtcgatcaaggatgtccccaagaagaacaagaagggcaagcacactgcctag

SEQ ID NO: 29505 - protein, 82 aa, Muscodor strobelii
  misc_feature: SGI Peptide ID NO. 570135
  misc_feature (2)..(71): Pfam Id: PF01781 Pfam Desc: Ribosomal L38e protein family
  misc_feature (1)..(77): NCBI GI: 116206432 Blast Desc: CHGG_02509 [Chaetomium globosum CBS 148.51] gi|88183106|gb|EAQ90574.1| CHGG_02509 [Chaetomium globosum CBS 148.51]
  misc_feature (1)..(77): NCBI GI: 171693621 Blast Desc: protein product [Podospora anserina] gi|170946759|emb|CAP73563.1| protein product [Podospora anserina]
  misc_feature (1)..(78): NCBI GI: 256731548 Blast Desc: [Nectria haematococca mpVI 77-13-4]
  misc_feature (1)..(77): NCBI GI: 85102588 Blast Desc: 60S ribosomal protein L38 [Neurospora crassa OR74A] gi|30316287|sp|Q9C2B9.1|RL38_NEUCR RecName: Full=60S ribosomal protein L38 gi|12718382|emb|CAC28690.1| ribosomal protein L38 60S
  misc_feature (1)..(82): NCBI GI: 156040333 Blast Desc: SS1G_12183 [Sclerotinia sclerotiorum 1980] gi|154696239|gb|EDN95977.1| SS1G_12183 [Sclerotinia sclerotiorum 1980]
  misc_feature (1)..(78): NCBI GI: 154279186 Blast Desc: [Ajellomyces capsulatus NAm1] gi|150412349|gb|EDN07736.1| [Ajellomyces capsulatus NAm1] gi|240281241|gb|EER44744.1| 60S ribosomal protein L38 capsulatus
  misc_feature (1)..(82): NCBI GI: 154320602 Blast Desc: 60S ribosomal protein L38 [Botryotinia fuckeliana B05.10] gi|150853462|gb|EDN28654.1| 60S ribosomal protein L38 [Botryotinia fuckeliana B05.10]
  misc_feature (1)..(77): NCBI GI: 242808499 Blast Desc: 60S ribosomal protein L38, [Talaromyces stipitatus ATCC 10500] gi|218715802|gb|EED15224.1| 60S ribosomal protein L38, [Talaromyces stipitatus ATCC 10500]
  misc_feature (1)..(78): NCBI GI: 225562393 Blast Desc: 60S ribosomal protein L38 [Ajellomyces capsulatus G186AR]
  misc_feature (1)..(78): NCBI GI: 261204910 Blast Desc: 60S ribosomal protein L38 [Ajellomyces dermatitidis SLH14081] gi|239592251|gb|EEQ74832.1| 60S ribosomal protein L38 [Ajellomyces dermatitidis SLH14081] gi|239611592|gb|EEQ88579.1|
  misc_feature: Useful for introducing or modulating the production of volatile compounds
MPQEIADIKRFIEICRRDDAKSARIKKNKKSSQTKFKVRCSKHLYTLVLKDSDKAEKLKQSLPPNLSIKDVPKKNKKGKHTA

SEQ ID NO: 29506 - DNA, 1866 bp, Muscodor strobelii
  misc_feature: SGI EST ID NO. CUFF.69859.0
  misc_feature: Variant of the nucleotide sequence at SEQ ID NO 29504
aacgaaccctgccatccacacaattttgcggcgtcccaccaatatttgtcccagagccgccaacatttcgcaccacctcaatcccacatcttcacgcaagccaaccgccaagatgccgcaggaaatcgccgacatcaagagattcatcgagatctgccgtcgcgatgacgccaagtccgctcggatcaagaagaacaagaagtcctcccagaccaagttcaaggtccgctgctccaagcacctttacactctggtcctgaaggactccgacaaggccgagaagctcaagcagagcctgcctcccaacttgtcgatcaaggatgtccccaagaagaacaagaagggcaagcacactgcctagaagccagagaaagcctagttctggattcgggactgagaaggattcggagtgggagagctatcacgacggaacgggatgagctccaaggatcgggcgatagctacacgaccaaggtctcacgtgaacgacaaaatgacaacggaccacggaaaaacgacggcgtgtacggaaatcaatcatgtgcatatgggttggggcacacgagctggccaggctcgttaccggcgtctttacggatagcatggaattgaggtctctgtgaaataagataatcgcagcaagatgtctatggcaataaagtagccaaatggcaaacccattgtgccttgcgctttacgtttgggactgcaaggactgcaagacaacaccacgaggagtaaaaagaactgagtgctatgtttccactccgtgggtctatcacctttcgccaatatggaataaaacatcatgtttcatgtggacctctttcccaggaatatttacatccagtaagagcctcttagtcatcagaagtcgcagtttgatgcaaacagatttgaagccctcgagtccttcttacttgttaacttatataatcctcttgtaatgtttgacatcgtgagactttgcgaagctacctaggggcccggcaaatttctggaaatccggctgtttcgcaaattcgccatgagtggcagcatcgggccaccctatgaagaagagaaattcctcggtctcaggatcaaccttctgcaccctgaatccgctcctcagcacgctcggctttgcaaaactttcaaggatggctttcgactcatcccatactttcaacagctcgtccttcttgttagatgggccctgaatcctagcaacactgatgacagcgttcttcaatagtgagacttcgccagcagcctcgtccacaggccggaacacatctgtatccaggtgaaaatactccaatttcgagaaatcaaaatgtcccgcaagtggcgcggagctattctggtattcggtgctcgctagccattgcatgtgttcttccgttgacgaccagtgcgcgctctccatgactacacgcgggtcctcaagttgctgccacagcgctacgccgcgtgcctctctatcctttggtgcagagggcacgtttcgcactacccagtctgcctgcgcgtcaaaggcgccctccattgcggctttgttatcggccgtgaaagtgtccgaggaactggtgagccagacaaggtttgtgacggccattttgacatgtgcttgttacaagttttgaaggtgacgttaaatttagatggacatgtaagtagtctcactgcttcaaccaaaggctccgaagggaaagtggttaaattttgaagctggctttgctctgaggatgttgatttcttacaattcctgatggattgatgttggatcagtagacatatcaccacttgcagtgcagagcctcccaattccatcccactactgtaccccgcagaccaccaaggtctcaaagaatcacgatgggg

SEQ ID NO: 29507 - DNA, 222 bp, Muscodor strobelii
  misc_feature: SGI cDNA ID NO. 570136
  misc_feature: Reduced expression when VOC is produced
  misc_feature: Encodes the peptide sequence at SEQ ID NO 29508
atggaactctacgtcaaagccttctccgggcttgtcacagcggccgtggtgtggtcattctggggcggagatatctttccgaccgcagatgatcccaaaggtgatcccgaatcgtggacgagagaggaattgagacgatggctagcagctcgcaaccttcatcctggcgcgaatgatacgaaagaccagctcttagagagagtcaaagcaaatatgagatga

SEQ ID NO: 29508 - protein, 73 aa, Muscodor strobelii
  misc_feature: SGI Peptide ID NO. 570136
  misc_feature (5)..(73): NCBI GI: 156040335 Blast Desc: SS1G_12184 [Sclerotinia sclerotiorum 1980] gi|154696240|gb|EDN95978.1| SS1G_12184 [Sclerotinia sclerotiorum 1980]
  misc_feature (2)..(73): NCBI GI: 261354822 Blast Desc: conserved [Verticillium albo-atrum VaMs.102]
  misc_feature (7)..(73): NCBI GI: 171693623 Blast Desc: protein product [Podospora anserina] gi|170946760|emb|CAP73564.1| protein product [Podospora anserina]
  misc_feature (7)..(73): NCBI GI: 85102592 Blast Desc: NCU03636 [Neurospora crassa OR74A] gi|28922907|gb|EAA32127.1| [Neurospora crassa OR74A]
  misc_feature (7)..(73): NCBI GI: 225680907 Blast Desc: [Paracoccidioides brasiliensis Pb03]
  misc_feature (7)..(73): NCBI GI: 239611593 Blast Desc: BDCG_03700 [Ajellomyces dermatitidis ER-3]
  misc_feature (8)..(73): NCBI GI: 145257031 Blast Desc: An04g02250 [Aspergillus niger] gi|134058503|emb|CAL00712.1| protein product [Aspergillus niger]
  misc_feature (8)..(73): NCBI GI: 212537691 Blast Desc: conserved [Penicillium marneffei ATCC 18224] gi|210068743|gb|EEA22834.1| conserved [Penicillium marneffei ATCC 18224]
  misc_feature (7)..(73): NCBI GI: 238843670 Blast Desc: conserved [Microsporum canis CBS 113480]
  misc_feature (8)..(73): NCBI GI: 242808504 Blast Desc: conserved [Talaromyces stipitatus ATCC 10500] gi|218715803|gb|EED15225.1| conserved [Talaromyces stipitatus ATCC 10500]
  misc_feature: Useful for introducing or modulating the production of volatile compounds
MELYVKAFSGLVTAAVVWSFWGGDIFPTADDPKGDPESWTREELRRWLAARNLHPGANDTKDQLLERVKANMR

SEQ ID NO: 29509 - DNA, 1092 bp, Muscodor strobelii
  misc_feature: SGI EST ID NO. CUFF.69957.0
  misc_feature: Variant of the nucleotide sequence at SEQ ID NO 29507
cttgcccaccctacttcgatacctagcaacctccctgtatgacctacaagacagccaactttgtgatgccagatactctctaattaaacggttgcctgaagtcgtcaagacaagttgtcataatgaaagattgatatctgtgactaatcgcaacactcgttcacgcaaggacctagtataattgtcacccatcaatcctacacttattttcgctatcaaaacacacacgatgcctactcccattgataatgctatgaggtccaaggtattgcctgcaaagtagtcccgtaaactcatacggccatattctaatttgatcccagaatgctgtgctaggtacttcgaagacatacttcacaatatcaccattttcaaaccgtactaatggaactctacgtcaaagccttctccgggcttgtcacagcggccgtggtgtggtcattctggggcggagatatctttccgaccgcagatgatcccaaaggtgatcccgaatcgtggacgagagaggaattgagacgatggctagcagctcgcaaccttcatcctggcgcgaatgatacgaaagaccagctcttagagagagtcaaagcaaatatgagatgatagatggatagacgaccgtcagggatggagagggtgacttatcgaagaccgagaattatggatatggattgagcagaggataatgcaatcaggtagttgatgtattcccgcctctcgtagcgcactgggggtatggactcatggagatggaggcacgcgttctcgtccgaagtagcacggtcttgagaaactatatcatatcggcagcaaagattcttgaacaagtggttccagtctctaattggcttgaaattaggtcctgtgtaatagcagtgcgaaaagtgcggtattgcttggcgttgtgatatagaagaactagctcataagcagaagaattatctaaacgaggtgcaaacgtgatctattctatcttctgcctctatgctacctctcttcctcatatacataagggctctttcttctatctaccaggcaaccatgcgcctggaatatgcgcctggaatctgccagaataaccaagtgata

SEQ ID NO: 29510 - DNA, 1536 bp, Muscodor strobelii
  misc_feature: SGI cDNA ID NO. 570137
  misc_feature: Reduced expression when VOC is produced
  misc_feature: Encodes the peptide sequence at SEQ ID NO 29511
atgacatggtcgcgccacgactatcccgtacctgacacggtttcgtgttggagcttggccccgtcttccactcccgtcatactactttcctccgtcgaagctacctgcttagcttcgattccggtcttcactccttcatcaataattcattttgcacttgtcaagatggatttcctacagcgcttggcgcgcgccctcgaccgcccgctcttcccgtggaagaagctgattctcggcttctccatcggacagtactgtttcgaggaattcctctcctggcgccagtaccgtgtgctcaagaacaccaagcccccaaaggttctccaacaggaagtctctcaggaagtctacgataagagtcaggaatacggtcgcgcaaaagcaaagtttgggtttattcgaggtctatggggtcagatccagaatatcgcttttatacagttcgatgtcttgcctaaactctggtcatggtctggtgacttgctgcttcgctttgcgcccgagcgcttcaccggcgagatttcccaatccatcgtcttcgtcctctcgtttatcctgatccagcaactcctgtctctgcccaccagtgtctatcacactttcgtcctggaggagaagttcggatttaacaagcaaacgcccagactgttcattaccgacatgatcaagtcagacctcctcgccttcgtctttgcccctcccatcctggctggcttcctgagcatcgtcaagaagacaggcaaccagttcgtgacatggctatggctcttcactgcggctcttcaaatgtttatgattactgtctaccctatctttattctacccctgttcaacaaactatctcccctgcaagaaggcaagctcaagacggaaaccgagggcttggctaagaaattgaagttccccctgcacgagctcttcgtcatcgatggtagcaagcgcagcgcacatagcaacgcctatttcttcggtctgccttggaagaagcatatcgtcatctacgacaccctcatcgagaagagcaaggaagaggaggttgttgcagttctagcacacgagctcggtcattggaaactgggccacacaaccagtctgttcggcatctctcaggttcacgtcttttacatcttcacactcttttcggtcttcatcaacaaccgctcgctgtacgcagattttggattcctgcaggagcacccgattatcattggcttcatcctattctcagatgccttggcgcccatggacaccatcatcaagcttttgatgaacatcatgagccggcggtttgagttccaggctgacgagtttgctcgtaacctgggatacaaaaaggagcttgcggcttcgctgatcaagctccagatccagaacttgagcacgatggatgcggactggatgtatgctagctaccacttctcgcaccccatcctttcggaaagactcaaggccttggagtggaccgcaagtgagaaggtaacagaggacaagacggagcctcaggaagctgacaaggcaagtggtcgtgagctgtga

SEQ ID NO: 29511 - protein, 511 aa, Muscodor strobelii
  misc_feature: SGI Peptide ID NO. 570137
  misc_feature (295)..(495): Pfam Id: PF01435 Pfam Desc: Peptidase family M48
  misc_feature (56)..(510): NCBI GI: 46123047 Blast Desc: FG05901.1 [Gibberella zeae PH-1]
  misc_feature (56)..(510): NCBI GI: 171693625 Blast Desc: protein product [Podospora anserina] gi|170946761|emb|CAP73565.1| protein product [Podospora anserina]
  misc_feature (56)..(511): NCBI GI: 154321087 Blast Desc: BC1G_01418 [Botryotinia fuckeliana B05.10] gi|150851956|gb|EDN27148.1| BC1G_01418 [Botryotinia fuckeliana B05.10]
  misc_feature (61)..(510): NCBI GI: 39978133 Blast Desc: MGG_06951 [Magnaporthe grisea 70-15] gi|145013474|gb|EDJ98115.1| MGG_06951 [Magnaporthe grisea 70-15]
  misc_feature (56)..(511): NCBI GI: 156054492 Blast Desc: SS1G_06094 [Sclerotinia sclerotiorum 1980] gi|154703874|gb|EDO03613.1| SS1G_06094 [Sclerotinia sclerotiorum 1980]
  misc_feature (56)..(510): NCBI GI: 12718381 Blast Desc: zinc metallo-protease [Neurospora crassa]
  misc_feature (60)..(510): NCBI GI: 164426777 Blast Desc: NCU03637 [Neurospora crassa OR74A] gi|157071473|gb|EAA32128.2| NCU03637 [Neurospora crassa OR74A]
  misc_feature (60)..(511): NCBI GI: 159125019 Blast Desc: CaaX prenyl protease Ste24 [Aspergillus fumigatus A1163]
  misc_feature (60)..(511): NCBI GI: 146323731 Blast Desc: CaaX prenyl protease Ste24 [Aspergillus fumigatus Af293] gi|129557564|gb|EAL90028.2| CaaX prenyl protease Ste24 [Aspergillus fumigatus Af293]
  misc_feature (60)..(511): NCBI GI: 119501016 Blast Desc: CaaX prenyl protease Ste24 [Neosartorya fischeri NRRL 181] gi|119415430|gb|EAW25368.1| CaaX prenyl protease Ste24 [Neosartorya fischeri NRRL 181]
  misc_feature (62)..(492): SWISSPROT Homolog: EC 3.4.24.84 Ste24 endopeptidase
  misc_feature: Useful for introducing or modulating the production of volatile compounds
MTWSRHDYPVPDTVSCWSLAPSSTPVILLSSVEATCLASIPVFTPSSIIHFALVKMDFLQRLARALDRPLFPWKKLILGFSIGQYCFEEFLSWRQYRVLKNTKPPKVLQQEVSQEVYDKSQEYGRAKAKFGFIRGLWGQIQNIAFIQFDVLPKLWSWSGDLLLRFAPERFTGEISQSIVFVLSFILIQQLLSLPTSVYHTFVLEEKFGFNKQTPRLFITDMIKSDLLAFVFAPPILAGFLSIVKKTGNQFVTWLWLFTAALQMFMITVYPIFILPLFNKLSPLQEGKLKTETEGLAKKLKFPLHELFVIDGSKRSAHSNAYFFGLPWKKHIVIYDTLIEKSKEEEVVAVLAHELGHWKLGHTTSLFGISQVHVFYIFTLFSVFINNRSLYADFGFLQEHPIIIGFILFSDALAPMDTIIKLLMNIMSRRFEFQADEFARNLGYKKELAASLIKLQIQNLSTMDADWMYASYHFSHPILSERLKALEWTASEKVTEDKTEPQEADKASGREL

SEQ ID NO: 29512 - DNA, 5903 bp, Muscodor strobelii
  misc_feature: SGI EST ID NO. CUFF.70019.1
  misc_feature: Variant of the nucleotide sequence at SEQ ID NO 29510
gtgttggagcttggccccgtcttccactcccgtcatactactttcctccgtcgaagctacctgcttagcttcgattccggtcttcactccttcatcaataattcattttgcacttgtcaagatggatttcctacagcgcttggcgcgcgccctcgaccgcccgctcttcccgtggaagaagctgattctcggcttctccatcggacagtactgtttcgaggaattcctctcctggcgccagtaccgtgtgctcaagaacaccaagcccccaaaggttctccaacaggaagtctctcaggaagtctacgataagagtcaggaatacggtcgcgcaaaagcaaagtttgggtttattcgaggtctatggggtcagatccagaatatcgcttttatacagttcgatgtcttgcctaaactctggtcatggtctggtgacttgctgcttcgctttgcgcccgagcgcttcaccggcgagatttcccaatccatcgtcttcgtcctctcgtttatcctgatccagcaactcctgtctctgcccaccagtgtctatcacactttcgtcctggaggagaagttcggatttaacaagcaaacgcccagactgttcattaccgacatgatcaagtcagacctcctcgccttcgtctttgcccctcccatcctggctggcttcctgagcatcgtcaagaagacaggcaaccagttcgtgacatggctatggctcttcactgcggctcttcaaatgtttatgattactgtctaccctatctttattctacccctgttcaacaaactatctcccctgcaagaaggcaagctcaagacggaaaccgagggcttggctaagaaattgaagttccccctgcacgagctcttcgtcatcgatggtagcaagcgcagcgcacatagcaacgcctatttcttcggtctgccttggaagaagcatatcgtcatctacgacaccctcatcgagaagagcaaggaagaggaggttgttgcagttctagcacacgagctcggtcattggaaactgggccacacaaccagtctgttcggcatctctcaggttcacgtcttttacatcttcacactcttttcggtcttcatcaacaaccgctcgctgtacgcagattttggattcctgcaggagcacccgattatcattggcttcatcctattctcagatgccttggcgcccatggacaccatcatcaagcttttgatgaacatcatgagccggcggtttgagttccaggctgacgagtttgctcgtaacctgggatacaaaaaggagcttgcggcttcgctgatcaagctccagatccagaacttgagcacgatggatgcggactggatgtatgctagctaccacttctcgcaccccatcctttcggaaagactcaaggccttggagtggaccgcaagtgagaaggtaacagaggacaagacggagcctcaggaagctgacaaggcaagtggtcgtgagctgtgagctcgatcgacaatgcatcaggcgtgtacctatccacgaccgttgcagccaagtagatgcctcaagattcgaccgaagtctacaggtaggtattctattaggtcgttgtatttataagttaaaaaagattatacttggcttggttagattagagcaatgagccatcatattgctacttgttcccaacgtgatcaagtgttgctagctagcaggacttgtataaaaggtaaatcgtaacacagacgacggacaacatggaagcgccgcgttagaaagactggctaagatgtggagagtgacattgcctatcctaacttttgctgcaactacctatatagccgatgctctattagacagctggagcctgtatatactcctcgaataaatataagcagcctgtacacgtcgttgcaagtttggggccaggcagttttcgcataatgcgtacacggtggttgtgcaggggggagagagacgggttggattaatgggtgacgtctgacgcgactaggtacatgtctagccccaccgagaacgtgaaccccggccactttcacagcaacacagcgcgtgtgaacgcgactctttgagaaagcactttaactctagattgcctccattgatacctaccgtacataggtactcgatctcacactcccggagcccaacccgtaaactccaacaacttttcccatgacactcccactcgcacgtctcaacaaaacatagctcaaaggccggttgactgtgaaggacagtcacaatggcgacggccatattgccacagaagcgtgcgctgggcgatgcatccaaccgccgcaacatcccctccacgcccgcctccaccaagcgcagacggctggagccgctgacctcgtcgccggcatcgcgcctcaacagctcgcagaacgggcctggcctgcggctcgggtccagccagcccaagagcgcgttcgagtccgaggtgctggagaagctgagccaggacatctcggagctcaagcagtccaacgccgagaaggaccaggcctgggagcggccgcccgtcgtcgacttcgacccccgccgcgacagcttgaccttccagcagatcgaggccgaggagggcttcctcaacggcggccggcccaccgtcaagctgttcggcgtcaccgagaacggccactccgtcatgctgcacgtcaccgacttcaagcactacctctacgtcgccgcccccgtctccttcacccccaaggactgcgagcccttcaaggcctacctcgagacccagctggcccagcaccagcccgccatctactcctgccacctcgtcctgcgcgagaacatctacggcttccagggaaacacccagagcccctacatcaaggtcaccgtcaccgaccccaagttcatcggccgagtccgcaccctcatcgagacgggcaaggccaactggaagggcctgtggaagggcgccgagggcggtatcatgaccttcgacaacctccaatacgtcctcagattcatggtagactgcaagattccgggcatgtcatgggtccaagcccctcccgacaaatactcgctcctctccgaggcccatcgacaatccaactgtcagatcgaagcagagatcagctatgttgacctcgtctctcatgagcccaagggcgagtggtccaagatggcaccgctgagagtgctgtcgttcgacatcgagtgcgcaggacgaaagggtatctttcccgaagcgaaccaggaccccgtcatccagatcgccaacgtggtcacgcgatacggagagagcaagccgttcatccgcaatgtcttctgtctcgataacacaagtcccattgttgccacccagattctgtctttcgacgacgagagggacatgctcatgagctggaaacagttcctcgacaaagttgaccccgacttgatcactggctacaacatctccaactttgatttcccatacctactcgaccgcgcaaagcatctcaaagtgaatgggttcgaatactggacgcggctacctggcgtcaagtcggctcataaggaaacaaacttctcaagtaaacaaatgggcaatcgagatacaaaggcaacaaataccaacggccgattgcaattggatttgttacagctcatccaacgggatcatcaccttcgaagctacacgctcaactcagtgtgtgcccactttctcggggaacaaaaggaggatgtgcaccacaccatgatcaccgagctcttcaacggaacgccggaatcaaggcgtcgtctcgcgttgtactgtctcaaggatgcctatctaccacagcgtcttatggacaaactctcttgtctagccaactatacagaaatggcgagagtcacaggagttcccttcaatttcttgctctcacgtggacaacaagtcaaattcatgagtcaattgtttcgtaaggctttggaacaaaagcttgtcatcccaaatatgaggtcagaaggctcagatgatcagtacgagggtgccaccgtcatcgaaccgactcgcggttattacgatgtgcccattgccaccctggattttgcgtcgctgtaccccagtatcatgcaggcccacaatttatgttatacaactcttatcaagaaggcagccatcgagaagttcaatctggttaaggatgaagactatgttgtcacgccgaacggcgatatgttcgtaactatcaagcaacgcaaaggtctgctggcgcagatcttggaagaactgttgcttgccagaaaacaagccaaaagagagctcgccgtggaaacggatcccttcaaaaaggctgtgctcaatggtcgacaactggctttgaagatcagcgccaacagtgtctacggtttgaccggtgccacaaccggaaagcttccttgtctcgagatcgccaggagtacgacgagctacggtcggcaaatgattgagaagacgaaagaggaagttgaaaaacattacaatcctggaaatggctttaaacacaaggctcaagtcatctacggtgacacagactccgtcatggtcaaatttggaaccaatgatttagcggaagccatgaagctgggagaggaggcagctaatctcgtctccgaaaagtttcccaagccgatcaagctcgagtttgagaaggtatatttcccctatctacttatcaacaaaaaacgttacgcaggtcttttctggacgagacctgaaaagttcgacaaaatggacaccaaaggtattgagacggttcgaagagacaattgcacattagtgcagacagtcatcgagaaagtgcttcgaatgatcttgattgatcgggatgtccaaggcgcacaggattacgtcaaaaatatgatctcagatttgctgcagaataagatcgacatgtctaaactggttatcacgaaagccctaaccaaagagagctacgatgccaagcaagcacatgttgagcttgctgcgcgcatgaagaagcgcgacgcaggatccgcacctggattgggcgatcgagtggcctatgtcatggtgaaaggcgctacaggttccaagaactttgaaaactcggaggatccaatctacgtgctcgaaaacaatgtgcctatcgacacaaagtactacctagacaatcaactggccaaacctctgggtcgtatatttgaacccattctcggagaaacaaaggccaaatcgctgcttgcgggtgcccacactcgttccatctctgtggctgcacccactattggcgggctcatgaaattcgcaaaaaagaccatgacgtgcatgggttgcaagaagcccctagtcggcaaagaggagagcgcgggcgcagtatgctcgaattgcgcgcctcgtgtcggcgaattgtacaagaaaacattggacaaggtttcagatctcgaggtgcggtttgggcgcctatggacgcagtgtcagcggtgtcagggcagcatgcactgtgaggtgatttgcagctccaaagactgtcccattttctacatgcgcatgaaagccaagaaggacgtcgaggatgcgggtaaggagcttaaacggttcgatttcgaccaggctgctttatggtaggggcgggaaaaaagattatcacaatgcatcacggcgaggcgtaaacggcgtcttgggttgtatattttaatgctggatggatggccccggtctatggactattttaggtggtaacatgagatacaaaggactcgatgagctttgagacgtagcataataatcgaccgatcaaatatgttcaatgattcgatgcaaatacgaagataggagactctacgttttgacacggtcatcatgctagcatgaacagtgtaagttatctcggctctggattcacccgtgttcaagtggtctatatacgtccattggtctccaaggcgtagagtagttgga

SEQ ID NO: 29513 - DNA, 3315 bp, Muscodor strobelii
  misc_feature: SGI cDNA ID NO. 570138
  misc_feature: Encodes the peptide sequence at SEQ ID NO 29514
atggcgacggccatattgccacagaagcgtgcgctgggcgatgcatccaaccgccgcaacatcccctccacgcccgcctccaccaagcgcagacggctggagccgctgacctcgtcgccggcatcgcgcctcaacagctcgcagaacgggcctggcctgcggctcgggtccagccagcccaagagcgcgttcgagtccgaggtgctggagaagctgagccaggacatctcggagctcaagcagtccaacgccgagaaggaccaggcctgggagcggccgcccgtcgtcgacttcgacccccgccgcgacagcttgaccttccagcagatcgaggccgaggagggcttcctcaacggcggccggcccaccgtcaagctgttcggcgtcaccgagaacggccactccgtcatgctgcacgtcaccgacttcaagcactacctctacgtcgccgcccccgtctccttcacccccaaggactgcgagcccttcaaggcctacctcgagacccagctggcccagcaccagcccgccatctactcctgccacctcgtcctgcgcgagaacatctacggcttccagggaaacacccagagcccctacatcaaggtcaccgtcaccgaccccaagttcatcggccgagtccgcaccctcatcgagacgggcaaggccaactggaagggcctgtggaagggcgccgagggcggtatcatgaccttcgacaacctccaatacgtcctcagattcatggtagactgcaagattccgggcatgtcatgggtccaagcccctcccgacaaatactcgctcctctccgaggcccatcgacaatccaactgtcagatcgaagcagagatcagctatgttgacctcgtctctcatgagcccaagggcgagtggtccaagatggcaccgctgagagtgctgtcgttcgacatcgagtgcgcaggacgaaagggtatctttcccgaagcgaaccaggaccccgtcatccagatcgccaacgtggtcacgcgatacggagagagcaagccgttcatccgcaatgtcttctgtctcgataacacaagtcccattgttgccacccagattctgtctttcgacgacgagagggacatgctcatgagctggaaacagttcctcgacaaagttgaccccgacttgatcactggctacaacatctccaactttgatttcccatacctactcgaccgcgcaaagcatctcaaagtgaatgggttcgaatactggacgcggctacctggcgtcaagtcggctcataaggaaacaaacttctcaagtaaacaaatgggcaatcgagatacaaaggcaacaaataccaacggccgattgcaattggatttgttacagctcatccaacgggatcatcaccttcgaagctacacgctcaactcagtgtgtgcccactttctcggggaacaaaaggaggatgtgcaccacaccatgatcaccgagctcttcaacggaacgccggaatcaaggcgtcgtctcgcgttgtactgtctcaaggatgcctatctaccacagcgtcttatggacaaactctcttgtctagccaactatacagaaatggcgagagtcacaggagttcccttcaatttcttgctctcacgtggacaacaagtcaaattcatgagtcaattgtttcgtaaggctttggaacaaaagcttgtcatcccaaatatgaggtcagaaggctcagatgatcagtacgagggtgccaccgtcatcgaaccgactcgcggttattacgatgtgcccattgccaccctggattttgcgtcgctgtaccccagtatcatgcaggcccacaatttatgttatacaactcttatcaagaaggcagccatcgagaagttcaatctggttaaggatgaagactatgttgtcacgccgaacggcgatatgttcgtaactatcaagcaacgcaaaggtctgctggcgcagatcttggaagaactgttgcttgccagaaaacaagccaaaagagagctcgccgtggaaacggatcccttcaaaaaggctgtgctcaatggtcgacaactggctttgaagatcagcgccaacagtgtctacggtttgaccggtgccacaaccggaaagcttccttgtctcgagatcgccaggagtacgacgagctacggtcggcaaatgattgagaagacgaaagaggaagttgaaaaacattacaatcctggaaatggctttaaacacaaggctcaagtcatctacggtgacacagactccgtcatggtcaaatttggaaccaatgatttagcggaagccatgaagctgggagaggaggcagctaatctcgtctccgaaaagtttcccaagccgatcaagctcgagtttgagaaggtatatttcccctatctacttatcaacaaaaaacgttacgcaggtcttttctggacgagacctgaaaagttcgacaaaatggacaccaaaggtattgagacggttcgaagagacaattgcacattagtgcagacagtcatcgagaaagtgcttcgaatgatcttgattgatcgggatgtccaaggcgcacaggattacgtcaaaaatatgatctcagatttgctgcagaataagatcgacatgtctaaactggttatcacgaaagccctaaccaaagagagctacgatgccaagcaagcacatgttgagcttgctgcgcgcatgaagaagcgcgacgcaggatccgcacctggattgggcgatcgagtggcctatgtcatggtgaaaggcgctacaggttccaagaactttgaaaactcggaggatccaatctacgtgctcgaaaacaatgtgcctatcgacacaaagtactacctagacaatcaactggccaaacctctgggtcgtatatttgaacccattctcggagaaacaaaggccaaatcgctgcttgcgggtgcccacactcgttccatctctgtggctgcacccactattggcgggctcatgaaattcgcaaaaaagaccatgacgtgcatgggttgcaagaagcccctagtcggcaaagaggagagcgcgggcgcagtatgctcgaattgcgcgcctcgtgtcggcgaattgtacaagaaaacattggacaaggtttcagatctcgaggtgcggtttgggcgcctatggacgcagtgtcagcggtgtcagggcagcatgcactgtgaggtgatttgcagctccaaagactgtcccattttctacatgcgcatgaaagccaagaaggacgtcgaggatgcgggtaaggagcttaaacggttcgatttcgaccaggctgctttatggtag

SEQ ID NO: 29514 - protein, 1104 aa, Muscodor strobelii
  misc_feature: SGI Peptide ID NO. 570138
  misc_feature (545)..(1002): Pfam Id: PF00136 Pfam Desc: DNA polymerase family B
  misc_feature (129)..(472): Pfam Id: PF03104 Pfam Desc: DNA polymerase family B, exonuclease domain
  misc_feature (1)..(1104): NCBI GI: 46125595 Blast Desc: FG07175.1 [Gibberella zeae PH-1]
  misc_feature (1)..(1104): NCBI GI: 39945902 Blast Desc: conserved [Magnaporthe grisea 70-15] gi|145019309|gb|EDK03537.1| conserved [Magnaporthe grisea 70-15]
  misc_feature (1)..(1104): NCBI GI: 85103616 Blast Desc: DNA polymerase delta catalytic subunit [Neurospora crassa OR74A] gi|18376276|emb|CAD21389.1| DNA-directed DNA polymerase III [Neurospora crassa] gi|28923105|gb|EAA32322.1| DNA
  misc_feature (1)..(1104): NCBI GI: 171693865 Blast Desc: protein product [Podospora anserina] gi|170946881|emb|CAP73685.1| protein product [Podospora anserina]
  misc_feature (1)..(1104): NCBI GI: 261351517 Blast Desc: DNA polymerase delta catalytic subunit [Verticillium albo-atrum VaMs.102]
  misc_feature (1)..(1104): NCBI GI: 116199119 Blast Desc: conserved [Chaetomium globosum CBS 148.51] gi|88178994|gb|EAQ86462.1| conserved [Chaetomium globosum CBS 148.51]
  misc_feature (1)..(1104): NCBI GI: 156041052 Blast Desc: SS1G_11504 [Sclerotinia sclerotiorum 1980] gi|154695888|gb|EDN95626.1| SS1G_11504 [Sclerotinia sclerotiorum 1980]
  misc_feature (6)..(1104): NCBI GI: 71002632 Blast Desc: DNA polymerase delta catalytic subunit Cdc2 [Aspergillus fumigatus Af293] gi|66853635|gb|EAL93959.1| DNA polymerase delta catalytic subunit Cdc2, [Aspergillus fumigatus
  misc_feature (6)..(1104): NCBI GI: 119482197 Blast Desc: DNA polymerase delta large chain [Neosartorya fischeri NRRL 181] gi|119409281|gb|EAW19230.1| DNA polymerase delta large chain [Neosartorya fischeri NRRL 181]
  misc_feature (6)..(1104): NCBI GI: 145251457 Blast Desc: An15g07150 [Aspergillus niger] gi|134082776|emb|CAK48550.1| protein product [Aspergillus niger]
  misc_feature (18)..(1097): SWISSPROT Homolog: EC 2.7.7.7 DNA-directed DNA polymerase
MATAILPQKRALGDASNRRNIPSTPASTKRRRLEPLTSSPASRLNSSQNGPGLRLGSSQPKSAFESEVLEKLSQDISELKQSNAEKDQAWERPPVVDFDPRRDSLTFQQIEAEEGFLNGGRPTVKLFGVTENGHSVMLHVTDFKHYLYVAAPVSFTPKDCEPFKAYLETQLAQHQPAIYSCHLVLRENIYGFQGNTQSPYIKVTVTDPKFIGRVRTLIETGKANWKGLWKGAEGGIMTFDNLQYVLRFMVDCKIPGMSWVQAPPDKYSLLSEAHRQSNCQIEAEISYVDLVSHEPKGEWSKMAPLRVLSFDIECAGRKGIFPEANQDPVIQIANVVTRYGESKPFIRNVFCLDNTSPIVATQILSFDDERDMLMSWKQFLDKVDPDLITGYNISNFDFPYLLDRAKHLKVNGFEYWTRLPGVKSAHKETNFSSKQMGNRDTKATNTNGRLQLDLLQLIQRDHHLRSYTLNSVCAHFLGEQKEDVHHTMITELFNGTPESRRRLALYCLKDAYLPQRLMDKLSCLANYTEMARVTGVPFNFLLSRGQQVKFMSQLFRKALEQKLVIPNMRSEGSDDQYEGATVIEPTRGYYDVPIATLDFASLYPSIMQAHNLCYTTLIKKAAIEKFNLVKDEDYVVTPNGDMFVTIKQRKGLLAQILEELLLARKQAKRELAVETDPFKKAVLNGRQLALKISANSVYGLTGATTGKLPCLEIARSTTSYGRQMIEKTKEEVEKHYNPGNGFKHKAQVIYGDTDSVMVKFGTNDLAEAMKLGEEAANLVSEKFPKPIKLEFEKVYFPYLLINKKRYAGLFWTRPEKFDKMDTKGIETVRRDNCTLVQTVIEKVLRMILIDRDVQGAQDYVKNMISDLLQNKIDMSKLVITKALTKESYDAKQAHVELAARMKKRDAGSAPGLGDRVAYVMVKGATGSKNFENSEDPIYVLENNVPIDTKYYLDNQLAKPLGRIFEPILGETKAKSLLAGAHTRSISVAAPTIGGLMKFAKKTMTCMGCKKPLVGKEESAGAVCSNCAPRVGELYKKTLDKVSDLEVRFGRLWTQCQRCQGSMHCEVICSSKDCPIFYMRMKAKKDVEDAGKELKRFDFDQAALW

SEQ ID NO: 29515 - DNA, 5903 bp, Muscodor strobelii; identical to SEQ ID NO: 29512
  misc_feature: SGI EST ID NO. CUFF.70019.1
  misc_feature: Variant of the nucleotide sequence at SEQ ID NO 29513

SEQ ID NO: 29516 - DNA, 615 bp, Muscodor strobelii
  misc_feature: SGI cDNA ID NO. 570139
  misc_feature: Encodes the peptide sequence at SEQ ID NO 29517
atgaagaagcgcgacgcaggatccgcacctggattgggcgatcgagtggcctatgtcatggtgaaaggcgctacaggttccaagaactttgaaaactcggaggatccaatctacgtgctcgaaaacaatgtgcctatcgacacaaagtactacctagacaatcaactggccaaacctctgggtcgtatatttgaacccattctcggagaaacaaaggccaaatcgctgcttgcgggtgcccacactcgttccatctctgtggctgcacccactattggcgggctcatgaaattcgcaaaaaagaccatgacgtgcatgggttgcaagaagcccctagtcggcaaagaggagagcgcgggcgcagtatgctcgaattgcgcgcctcgtgtcggcgaattgtacaagaaaacattggacaaggtttcagatctcgaggtgcggtttgggcgcctatggacgcagtgtcagcggtgtcagggcagcatgcactgtgaggtgatttgcagctccaaagactgtcccattttctacatgcgcatgaaagccaagaaggacgtcgaggatgcgggtaaggagcttaaacggttcgatttcgaccaggctgctttatggtag

SEQ ID NO: 29517 - protein, 204 aa, Muscodor strobelii
  misc_feature: SGI Peptide ID NO. 570139
  misc_feature (1)..(102): Pfam Id: PF00136 Pfam Desc: DNA polymerase family B
  misc_feature (1)..(204): NCBI GI: 46125595 Blast Desc: FG07175.1 [Gibberella zeae PH-1]
  misc_feature (1)..(204): NCBI GI: 85103616 Blast Desc: DNA polymerase delta catalytic subunit [Neurospora crassa OR74A] gi|18376276|emb|CAD21389.1| DNA-directed DNA polymerase III [Neurospora crassa] gi|28923105|gb|EAA32322.1| DNA
  misc_feature (1)..(204): NCBI GI: 261351517 Blast Desc: DNA polymerase delta catalytic subunit [Verticillium albo-atrum VaMs.102]
  misc_feature (1)..(204): NCBI GI: 171693865 Blast Desc: protein product [Podospora anserina] gi|170946881|emb|CAP73685.1| protein product [Podospora anserina]
  misc_feature (1)..(204): NCBI GI: 39945902 Blast Desc: conserved [Magnaporthe grisea 70-15] gi|145019309|gb|EDK03537.1| conserved [Magnaporthe grisea 70-15]
  misc_feature (1)..(204): NCBI GI: 116199119 Blast Desc: conserved [Chaetomium globosum CBS 148.51] gi|88178994|gb|EAQ86462.1| conserved [Chaetomium globosum CBS 148.51]
  misc_feature (1)..(202): NCBI GI: 156041052 Blast Desc: SS1G_11504 [Sclerotinia sclerotiorum 1980] gi|154695888|gb|EDN95626.1| SS1G_11504 [Sclerotinia sclerotiorum 1980]
  misc_feature (1)..(202): NCBI GI: 154305267 Blast Desc: BC1G_08928 [Botryotinia fuckeliana B05.10] gi|150853670|gb|EDN28862.1| BC1G_08928 [Botryotinia fuckeliana B05.10]
  misc_feature (1)..(204): NCBI GI: 71002632 Blast Desc: DNA polymerase delta catalytic subunit Cdc2 [Aspergillus fumigatus Af293] gi|66853635|gb|EAL93959.1| DNA polymerase delta catalytic subunit Cdc2, [Aspergillus fumigatus
  misc_feature (1)..(204): NCBI GI: 121716875 Blast Desc: DNA polymerase delta large chain [Aspergillus clavatus NRRL 1] gi|119404095|gb|EAW14512.1| DNA polymerase delta large chain [Aspergillus clavatus NRRL 1]
  misc_feature (1)..(197): SWISSPROT Homolog: EC 2.7.7.7 DNA-directed DNA polymerase
MKKRDAGSAPGLGDRVAYVMVKGATGSKNFENSEDPIYVLENNVPIDTKYYLDNQLAKPLGRIFEPILGETKAKSLLAGAHTRSISVAAPTIGGLMKFAKKTMTCMGCKKPLVGKEESAGAVCSNCAPRVGELYKKTLDKVSDLEVRFGRLWTQCQRCQGSMHCEVICSSKDCPIFYMRMKAKKDVEDAGKELKRFDFDQAALW

SEQ ID NO: 29518 - DNA, 5903 bp, Muscodor strobelii; identical to SEQ ID NO: 29512
  misc_feature: SGI EST ID NO. CUFF.70019.1
  misc_feature: Variant of the nucleotide sequence at SEQ ID NO 29516

SEQ ID NO: 29519 - DNA, 1368 bp, Muscodor strobelii
  misc_feature: SGI cDNA ID NO. 570140
  misc_feature: Reduced expression when VOC is produced
  misc_feature: Encodes the peptide sequence at SEQ ID NO 29520
atgtccaacgtcgcccccgagcccgagtttgagcaggcgcataaagagcttgtaagcaccctcgaggacagcacattgttcgagaagaaccccgagtttcggacggccttgaaagtcgtttcgatcccagagcgaatcatccagtttcgagtcgtctgggaagatgactcaggcaatctccaagtcaatcgcgggtaccgcgttcagttcaactcgtccctgggcccctataagggcggtctccgattccaccctaccgtcaacctatctatcctcaagttcctcggtttcgagcagaccttcaagaacgctctcactggattgaatatcggcggtggcaaaggtggagcagacttcgaccccaagggcaagagtgacaatgaaatccgaaagttctgcactgcattcatgtcaagactgtgccaacatatcggcgctgacactgacgttcctgccggtgatatcggcgtcggtggacgggaaattggtttcatgttcggcgagtaccgtcgggcaaggaacagatgggaaggcatccttactggcaaggggctgacttggggtggtagcttgattcgacctgaggccactggctacggtctcgtctattacgtcgaagagatgttaaaatatgctagcaagggcactttttctggaaagcgtgtcgctatttcaggctctggtaatgttgctcaatatgccgccttaaagtgtatcgaactcggtgccactgttgtgtccttatccgactcccagggttgcttgattgccgagggtgatgcacatttcacccctgagcacatcaacgaaattgccgaggtaaagctcgcccgcaagtcccttactacattctctggtaagtcggcattcaagtacattgaaggcgcccgcccatggattcatgtcggcaaagtcgacgttgcccttccttgcgctacgcagaatgaagtcagcaaggaggaggctcaggctctggtcgacaaaggcgcgctgttcatcgctgagggatccaacatgggttgtacacaagaggctattgatgtctttgagggagtccgcaaggctaagggctctgcggctgtctggtacgcacccggcaaggcatctaattgcggcggtgttgccgtctctggccttgaaatggcgcagaacagccagcgtctctcgtggacgacagaggaggttgatgctaagctcaaggatattatgcgcaacgcctttgacaacggtctgaacaccgcgaaggagtatgttcagacagctgagggtgaactacctagccttgtggccggtagcaatattgcagggtttgtgaaggttgccagagccatggctgaccaaggtgattggtggtcaccaaagttataa

SEQ ID NO: 29520 - protein, 455 aa, Muscodor strobelii
  misc_feature: SGI Peptide ID NO. 570140
  misc_feature (188)..(448): Pfam Id: PF00208 Pfam Desc: Glutamate/Leucine/Phenylalanine/Valine dehydrogenase
  misc_feature (43)..(173): Pfam Id: PF02812 Pfam Desc: Glu/Leu/Phe/Val dehydrogenase, dimerisation domain
  misc_feature (1)..(451): NCBI GI: 154294727 Blast Desc: NADP-specific glutamate dehydrogenase [Botryotinia fuckeliana B05.10] gi|150844625|gb|EDN19818.1| NADP-specific glutamate dehydrogenase [Botryotinia fuckeliana B05.10]
  misc_feature (1)..(451): NCBI GI: 156048776 Blast Desc: NADP-specific glutamate dehydrogenase [Sclerotinia sclerotiorum 1980] gi|154693516|gb|EDN93254.1| NADP-specific glutamate dehydrogenase [Sclerotinia sclerotiorum 1980]
  misc_feature (1)..(451): NCBI GI: 41016968 Blast Desc: DHE4_BOTFU RecName: Full=NADP-specific glutamate dehydrogenase; Short=NADP-GDH; AltName: Full=NADP-dependent glutamate dehydrogenase gi|4008140|gb|AAC95390.1| NADP-dependent
  misc_feature (1)..(452): NCBI GI: 85103627 Blast Desc: NADP-specific glutamate dehydrogenase [Neurospora crassa OR74A] gi|118550|sp|P00369.3|DHE4_NEUCR RecName: Full=NADP-specific glutamate dehydrogenase; Short=NADP-GDH;
  misc_feature (1)..(452): NCBI GI: 41017057 Blast Desc: DHE4_NEUIN RecName: Full=NADP-specific glutamate dehydrogenase; Short=NADP-GDH; AltName: Full=NADP-dependent glutamate dehydrogenase gi|9858833|gb|AAG01158.1| NADP-specific
  misc_feature (1)..(452): NCBI GI: 223877 Blast Desc: DHE4_NEUIN RecName: Full=NADP-specific glutamate dehydrogenase; Short=NADP-GDH; AltName: Full=NADP-dependent glutamate dehydrogenase gi|9858833|gb|AAG01158.1| NADP-specific
  misc_feature (1)..(452): NCBI GI: 41017056 Blast Desc: DHE4_NEUSI RecName: Full=NADP-specific glutamate dehydrogenase; Short=NADP-GDH; AltName: Full=NADP-dependent glutamate dehydrogenase gi|9858835|gb|AAG01159.1| NADP-specific
  misc_feature (1)..(451): NCBI GI: 116199115 Blast Desc: NADP-specific glutamate dehydrogenase [Chaetomium globosum CBS 148.51] gi|88178992|gb|EAQ86460.1| NADP-specific glutamate dehydrogenase [Chaetomium globosum CBS 148.51]
  misc_feature (1)..(451): NCBI GI: 209972742 Blast Desc: NADP-glutamate dehydrogenase [Aspergillus niger]
  misc_feature (1)..(451): NCBI GI: 145256621 Blast Desc: NADP-glutamate dehydrogenase [Aspergillus niger]
  misc_feature (1)..(451): SWISSPROT Homolog: EC 1.4.1.4 Glutamate dehydrogenase (NADP(+))
  misc_feature: Useful for introducing or modulating the production of volatile compounds
MSNVAPEPEFEQAHKELVSTLEDSTLFEKNPEFRTALKVVSIPERIIQFRVVWEDDSGNLQVNRGYRVQFNSSLGPYKGGLRFHPTVNLSILKFLGFEQTFKNALTGLNIGGGKGGADFDPKGKSDNEIRKFCTAFMSRLCQHIGADTDVPAGDIGVGGREIGFMFGEYRRARNRWEGILTGKGLTWGGSLIRPEATGYGLVYYVEEMLKYASKGTFSGKRVAISGSGNVAQYAALKCIELGATVVSLSDSQGCLIAEGDAHFTPEHINEIAEVKLARKSLTTFSGKSAFKYIEGARPWIHVGKVDVALPCATQNEVSKEEAQALVDKGALFIAEGSNMGCTQEAIDVFEGVRKAKGSAAVWYAPGKASNCGGVAVSGLEMAQNSQRLSWTTEEVDAKLKDIMRNAFDNGLNTAKEYVQTAEGELPSLVAGSNIAGFVKVARAMADQGDWWSPKL

SEQ ID NO: 29521 - DNA, 2170 bp, Muscodor strobelii
  misc_feature: SGI EST ID NO. CUFF.69831.1
  misc_feature: Variant of the nucleotide sequence at SEQ ID NO 29519
caagcaggcaatgtgctttcatgccggccaaagcgacgtcaatgatccactatcttggttgtggcatggcatgggaattttcttttcctcccgcctatgatcaaaggtaggctgaaagattcgattccagtcacattatgttgaacgccgaagacggtcatccacccatcgagaccaaattgaacgataaccacgtcgtagcagagatgtataaatgtatgtatataatgccagcttgacacgcagcttcttcgcggttttttcttatcatatgtgacatcacttctacccggtgctctttctatttatcaaggatcttggaactcagattgcctaaagtatccagccagagataagcttgacctcgcacttcgtcctctctgctatccgtcaatcgacagatatctgtgtggccttcacattccccagacataaacagcctagacgtagagatgtccaacgtcgcccccgagcccgagtttgagcaggcgcataaagagcttgtaagcaccctcgaggacagcacattgttcgagaagaaccccgagtttcggacggccttgaaagtcgtttcgatcccagagcgaatcatccagtttcgagtcgtctgggaagatgactcaggcaatctccaagtcaatcgcgggtaccgcgttcagttcaactcgtccctgggcccctataagggcggtctccgattccaccctaccgtcaacctatctatcctcaagttcctcggtttcgagcagaccttcaagaacgctctcactggattgaatatcggcggtggcaaaggtggagcagacttcgaccccaagggcaagagtgacaatgaaatccgaaagttctgcactgcattcatgtcaagactgtgccaacatatcggcgctgacactgacgttcctgccggtgatatcggcgtcggtggacgggaaattggtttcatgttcggcgagtaccgtcgggcaaggaacagatgggaaggcatccttactggcaaggggctgacttggggtggtagcttgattcgacctggtgagtaattgtcgtatccccaggttacagtgcctaatatgacagtgactacatgagctaatacgagtgatacagaggccactggctacggtctcgtctattacgtcgaagagatgttaaaatatgctagcaagggcactttttctggaaagcgtgtcgctatttcaggctctggtaatgttgctcaatatgccgccttaaagtgtatcgaactcggtgccactgttgtgtccttatccgactcccagggttgcttgattgccgagggtgatgcacatttcacccctgagcacatcaacgaaattgccgaggtaaagctcgcccgcaagtcccttactacattctctggtaagtcggcattcaagtacattgaaggcgcccgcccatggattcatgtcggcaaagtcgacgttgcccttccttgcgctacgcagaatgaagtcagcaaggaggaggctcaggctctggtcgacaaaggcgcgctgttcatcgctgagggatccaacatgggttgtacacaagaggctattgatgtctttgagggagtccgcaaggctaagggctctgcggctgtctggtacgcacccggcaaggcatctaattgcggcggtgttgccgtctctggccttgaaatggcgcagaacagccagcgtctctcgtggacgacagaggaggttgatgctaagctcaaggatattatgcgcaacgcctttgacaacggtctgaacaccgcgaaggagtatgttcagacagctgagggtgaactacctagccttgtggccggtagcaatattgcagggtttgtgaaggttgccagagccatggctgaccaaggtgattggtggtcaccaaagttataacgagctattatgactcaacttttagtggagttatggcgacgggtcatgtattatatacaatgatgatgagctcagacgaaaaggttggcggcgtttaggtttatgatgcccgattcaaaataccatttcatgcgttgttgtcttacaggtagcatcatgttcttctcttgacaatgtaactttcgcaaaatcagtgtcgttggagtttgatccaatatttcgatcatatcaagcaactaacgatatctgagctgttgcttacctcatagctgagc

SEQ ID NO: 29522 - DNA, 4188 bp, Muscodor strobelii
  misc_feature: SGI cDNA ID NO. 570141
  misc_feature: Encodes the peptide sequence at SEQ ID NO 29523
atgcccgcaacggtcccaacaaacatggagacctccaacggggtcgacacagatgccgagactggacaaacaactggagtggactttgctaccaacggcgtgaacggcacaaccagagctaatggcgtagaaaagagattaaaaggacgatcgggcacatggcctgcgaacaaacatgtgcgcacggagagtcagagttcttcctgtggctcaaccgatgtcgaccaaagcccaggtttgcccgctaatggtgttggaaacggtttccaggagaacacggatcatagccgtgccccgggtcacgacaacgatgttggcgggccacgatctcgagcctatgctcatatacgaacttgggctgacgatccgaaggacccgcagtttcctagaatatccaagcccatggaattgatgcgacacgagtacgactgtgtcgttattggatccggatatggtggaggagtcgcagcgtctcgaatggcgcgcacaggcgactcggtctgtcttctagagcgtggtaaagagcgctggccgggagaatatcctagcaccactcgcgacgctctcgagcagatgcactgctcgggcgaacttgcgccaccctggctacccaaaaaagttgtgcagacgggtgatcctactggcatgtatcatataatcttcgggaacggccaaaatgctatagttggaaatggtctgggtggaacgagcttaatcaatgccaatgttttcatggaggcagacgaagatgctcttcagctggaacagtggccagaagaaatcagagcaaataagggctgccttacgccatactacgaaaaggctgcggaagtcctggagcccaaggagtatcctgatgattggccccagctgcccaagcttgagcttctcaagaagcaagcggaatatcttaatctgccggaaaaattccaccgagtgaagcagacaacacgatttcaaaatgggcccaatagttgtggtgttgaaatgtctgcgtctgcttccactggtcaagacgctactggcatcaatgacggctcgaaaaacaccaccctggtcacgtacttggctgatgcgtggaattggggcgctgaaatgttctgtgaatcggaagtacgatacatcactgaagctccagatgggaagggatacattgtctactttgcgtggcacggtcggaaccgcgggcacttcaaggcgaacttgcatggcgacctcatgtgggttcgggcaaagaaggctgtcttctttggggctggtgctatcggtaccactgagatcctccttcgaagcaagcaaatggggctcaagatgagtgaaaaagtcggacttaatatgagtggaaatggcgatatctttggttttggatacaacacggaccatgaagtcaatgcaatggggaaacccttcccatcaccatatcaccccatcggaccgtgtataacgggtgttattgataacagaaccggccatgataatcctctggatggctatgttatcgaggaaggggctattccaggagcacttgtcccctttatgcagatgcttttgacattcttacctggtaacgttgggccaactgatcaatcgttagtcgataaggtcaagtccaatctagctcgcgcaggaagcacgctgctaggaccatactaccgaaaaggtgctcttgagaggacacaggtctacctgatcatgtcccacgacagcaaccaagcttacttgactttgaaagaagacaggccggtgttggagttcataggtgttggccgaagtgaccatgtcaggtatctgaacaatgtcctgaagaaagctaccagagctgtgggtggcactttcgttcagaacccattcgctacgcttttgggcgaccaagttacagtacaccccattggtggtgcctgcatggccgactctgcatattccggcgtgacgaaccacgctggacagatcttcaccggcgatgacaccaaaacatataacggcctcatcgtaacagatgccgcagtcattccttgtgctctcggagccaatccttttgcgaccatcacagccttggcagaacgctcgttggacctgtatatccagaggaggcaattgacgagcagtatggaacccaacggtctgcttgagctatttggatctcctaaataccccaatccccgtcgaaagggcaagtggttggagaaactagaagaaaaagaggaagatgaaacgatataccacacgcacaaatctataacgagtgcccgtcgactcaaggatggtggattcggcttcaccgaggttatgtctggatacgttcatcgccacaatggcgaaggctattcaagggacaatcccgatatatacgaactcgcagctcggacagcgcagtctatgtgcgagaaagcgcggtttttcctcagcgtccaagcctttaacactagatctatcgtacatgaccctcttcacacagcgacgttgacggggacctttgtgtgcccgacactcgaaggctcaccattcatggtccagcgcggaaggttcaacttgttcttagttgactgcaaagcaccaggaactcggaatctcacctatgatttcgatatgcgtggtatcaatagccgaaaactccacttccacggatacaaagtcgtcgactcttcggttgctctatcgccgatgcatttctggagatctactagcacactctacgtcaccatcactgagtgcgtctccacggaggaaagggagcagctgaacgcagaagaggacggactggcaggcggtaaaatcgtcgccaagggaattatgcggatcaagccgcaagacttcgtctctgagatcatgactcttacgccgactggcagcaacatctttcgcaagataaagagtgccgcaaacttcatgacctttttcacgcgaaagtcgatctctctgctccttgcaccgctcacgccgctgcaatatcccagtcagaactattcaggttttgataataatacgccaccgactaaatcctttaaggtaacagctcgcgatggagttatcaccagtctccattactgggaacctctcgttgtcactcccgaatgcgaagtgaagaatctgttcatggttccaggtgcttctgtcgaccaccagatctttgcacttcccacgatcaagttgaacgctgtcaattacttcacacgcgctggctatcgtgttttcatcacagtgcatcgcatcggcgctcttatggtcgcacaaaacaactggacaacgttcgacgcgcgtttcgatatcgaggcatgtttgaaatttatacgcgaaaaatttcccacttatgatgactcaccaatcagcgagggtgatgacaaacatatcaagcgtgagcctgaggctatatacacaatcgcacattgtatgggcagcgtggctttctcgaccggtctgcttgacggcacgatccctggaaagtgggtcaagggcgtgacgtgtagtcaggttttcatgaatccaatttggaacgccatgaacatgataaaaattttggcgcttcccatacctgctgataaactctaccgcttcttcgtgggctcatggtttagctgtagcacagggaagaacgatagcttccttcagagaggcttgaacgagttgctgcggttcatgcctgatgagcgcaaggagatatgtaacaatgccagctgccaccgcatctcgcttgtgtttgcgcgctgctggaaccaccgcaatctcaatgaggctacgcatcgccagatcgacagattcttcggcggcgtgaatatgacccttctgcacctgctcatgaagcagggcttcgatggacatgtcatgtcaaacgggcccttattcgaacgtcttgacacgccagagaatatccgaaggcttcgcggcatcccattcttactctttgttggccgtgacaatgccgtgctcagccccgagagcacagaaaggacttacgaagtcctgaccgatacttttggtactcgcgctgacgatggcatccagtaccgccgtcgtgtcgtgccgaattatgggcatctagactgctggatgggccgtaacgcttggaaggatgtctatcccttcgttagggaagaagtcgatcgcgtcgtccgtggccctaagtatcatttccaagagcccaatgacagattccaacatatgattgcttctggcgagcttctggcgaggtag

SEQ ID NO: 29523 - protein, 1395 aa, Muscodor strobelii
  misc_feature: SGI Peptide ID NO. 570141
  misc_feature (143)..(179): Pfam Id: PF07992 Pfam Desc: Pyridine nucleotide-disulphide oxidoreductase
  misc_feature (101)..(1393): NCBI GI: 164426128 Blast Desc: NCU01193 [Neurospora crassa OR74A] gi|157071209|gb|EAA32323.2| conserved [Neurospora crassa OR74A]
  misc_feature (101)..(1393): NCBI GI: 18376275 Blast Desc: related to cholesterol oxidase precursor [Neurospora crassa]
  misc_feature (101)..(1393): NCBI GI: 145612063 Blast Desc: MGG_08072 [Magnaporthe grisea 70-15] gi|145019310|gb|EDK03538.1| MGG_08072 [Magnaporthe grisea 70-15]
  misc_feature (5)..(1377): NCBI GI: 154300851 Blast Desc: BC1G_10725 [Botryotinia fuckeliana B05.10] gi|150856473|gb|EDN31665.1| BC1G_10725 [Botryotinia fuckeliana B05.10]
  misc_feature (100)..(1392): NCBI GI: 171692889 Blast Desc: protein product [Podospora anserina] gi|170946393|emb|CAP73194.1| protein product [Podospora anserina]
  misc_feature (31)..(1363): NCBI GI: 156048596 Blast Desc: SS1G_09029 [Sclerotinia sclerotiorum 1980] gi|154693426|gb|EDN93164.1| SS1G_09029 [Sclerotinia sclerotiorum 1980]
  misc_feature (207)..(1393): NCBI GI: 261351515 Blast Desc: glucose-methanol-choline oxidoreductase [Verticillium albo-atrum VaMs.102]
  misc_feature (457)..(1393): NCBI GI: 116199117 Blast Desc: CHGG_07714 [Chaetomium globosum CBS 148.51] gi|88178993|gb|EAQ86461.1| CHGG_07714 [Chaetomium globosum CBS 148.51]
  misc_feature (124)..(1358): NCBI GI: 255947376 Blast Desc: Pc22g04160 [Penicillium chrysogenum Wisconsin 54-1255] gi|211591472|emb|CAP97704.1| Pc22g04160 [Penicillium chrysogenum Wisconsin 54-1255]
  misc_feature (63)..(700): NCBI GI: 145230976 Blast Desc: An01g13510 [Aspergillus niger] gi|134055877|emb|CAK44138.1| protein product [Aspergillus niger]
MPATVPTNMETSNGVDTDAETGQTTGVDFATNGVNGTTRANGVEKRLKGRSGTWPANKHVRTESQSSSCGSTDVDQSPGLPANGVGNGFQENTDHSRAPGHDNDVGGPRSRAYAHIRTWADDPKDPQFPRISKPMELMRHEYDCVVIGSGYGGGVAASRMARTGDSVCLLERGKERWPGEYPSTTRDALEQMHCSGELAPPWLPKKVVQTGDPTGMYHIIFGNGQNAIVGNGLGGTSLINANVFMEADEDALQLEQWPEEIRANKGCLTPYYEKAAEVLEPKEYPDDWPQLPKLELLKKQAEYLNLPEKFHRVKQTTRFQNGPNSCGVEMSASASTGQDATGINDGSKNTTLVTYLADAWNWGAEMFCESEVRYITEAPDGKGYIVYFAWHGRNRGHFKANLHGDLMWVRAKKAVFFGAGAIGTTEILLRSKQMGLKMSEKVGLNMSGNGDIFGFGYNTDHEVNAMGKPFPSPYHPIGPCITGVIDNRTGHDNPLDGYVIEEGAIPGALVPFMQMLLTFLPGNVGPTDQSLVDKVKSNLARAGSTLLGPYYRKGALERTQVYLIMSHDSNQAYLTLKEDRPVLEFIGVGRSDHVRYLNNVLKKATRAVGGTFVQNPFATLLGDQVTVHPIGGACMADSAYSGVTNHAGQIFTGDDTKTYNGLIVTDAAVIPCALGANPFATITALAERSLDLYIQRRQLTSSMEPNGLLELFGSPKYPNPRRKGKWLEKLEEKEEDETIYHTHKSITSARRLKDGGFGFTEVMSGYVHRHNGEGYSRDNPDIYELAARTAQSMCEKARFFLSVQAFNTRSIVHDPLHTATLTGTFVCPTLEGSPFMVQRGRFNLFLVDCKAPGTRNLTYDFDMRGINSRKLHFHGYKVVDSSVALSPMHFWRSTSTLYVTITECVSTEEREQLNAEEDGLAGGKIVAKGIMRIKPQDFVSEIMTLTPTGSNIFRKIKSAANFMTFFTRKSISLLLAPLTPLQYPSQNYSGFDNNTPPTKSFKVTARDGVITSLHYWEPLVVTPECEVKNLFMVPGASVDHQIFALPTIKLNAVNYFTRAGYRVFITVHRIGALMVAQNNWTTFDARFDIEACLKFIREKFPTYDDSPISEGDDKHIKREPEAIYTIAHCMGSVAFSTGLLDGTIPGKWVKGVTCSQVFMNPIWNAMNMIKILALPIPADKLYRFFVGSWFSCSTGKNDSFLQRGLNELLRFMPDERKEICNNASCHRISLVFARCWNHRNLNEATHRQIDRFFGGVNMTLLHLLMKQGFDGHVMSNGPLFERLDTPENIRRLRGIPFLLFVGRDNAVLSPESTERTYEVLTDTFGTRADDGIQYRRRVVPNYGHLDCWMGRNAWKDVYPFVREEVDRVVRGPKYHFQEPNDRFQHMIASGELLAR

SEQ ID NO: 29524 - DNA, 7129 bp, Muscodor strobelii
  misc_feature: SGI EST ID NO. CUFF.69822.0
  misc_feature: Variant of the nucleotide sequence at SEQ ID NO 29522
gcgatcgatgggtatgggatgatcggaaagctggtcgactgggcaggttgtgccgtccctgcagccgttaggaacgcacaattctgctatgatttgctctcatgcgaactggtcggccagcaagcccgcctccgtgccaatgatagctgttgacgtaggactcacatgcattgctccatacaattgagaatatctggtgcccgaaaaagaatatcgcatcgtgccatgcaccgctgaacggtcaaatcacttagcaggccaatggaaatccgtgtccagggggctcttctcagcctagcccccagcagcgccaccacgcctcagagctagttctgcagagacaggcattccttctagcctccaatctcttccggtcactggagaaccgacgggtcaaggattgagaggggcggaatggttgtagggctactgcagtactcaggtttctggttcgcggtcaatggtattcaccatcatctcgtcagccgattctcccttctctcggagatgtcctgtctgctgatcgacgttggggtttgcaaatggtgcccctggccataaggcagactagtcgaaggattgagtatcttttcggttgatatatatgaagctgcaatcctgacgaccgagacgttggcaacccccagacaaaataataccccaggcctttatcccttgctatcttcttctccagctatcagagctcccttgctttcgtcttgggtattgtgactaggattggattatatatacattgttgtctcgtgtgatcgctgcagaatcccgagtgcttggttttggatcatccaacgcggcccaagccgaggccatgcccgcaacggtcccaacaaacatggagacctccaacggggtcgacacagatgccgagactggacaaacaactggagtggactttgctaccaacggcgtgaacggcacaaccagagctaatggcgtagaaaagagattaaaaggacgatcgggcacatggcctgcgaacaaacatgtgcgcacggagagtcagagttcttcctgtggctcaaccgatgtcgaccaaagcccaggtttgcccgctaatggtgttggaaacggtttccaggagaacacggatcatagccgtgccccgggtcacgacaacgatgttggcgggccacgatctcgagcctatgctcatatacgaacttgggctgacgatccgaaggacccgcagtttcctagaatatccaagcccatggaattgatgcgacacgagtacgactgtgtcgttattggatccggatatggtggaggagtcgcagcgtctcgaatggcgcgcacaggcgactcggtctgtcttctagagcgtggtaaagagcgctggccgggagaatatcctagcaccactcgcgacgctctcgagcagatgcactgctcgggcgaacttgcgccaccctggctacccaaaaaagttgtgcagacgggtgatcctactggcatgtatcatataatcttcgggaacggccaaaatgctatagttggaaatggtctgggtggaacgagcttaatcaatgccaatgttttcatggaggcagacgaagatgctcttcagctggaacagtggccagaagaaatcagagcaaataagggctgccttacgccatactacgaaaaggctgcggaagtcctggagcccaaggagtatcctgatgattggccccagctgcccaagcttgagcttctcaagaagcaagcggaatatcttaatctgccggaaaaattccaccgagtgaagcagacaacacgatttcaaaatgggcccaatagttgtggtgttgaaatgtctgcgtctgcttccactggtcaagacgctactggcatcaatgacggctcgaaaaacaccaccctggtcacgtacttggctgatgcgtggaattggggcgctgaaatgttctgtgaatcggaagtacgatacatcactgaagctccagatgggaagggatacattgtctactttgcgtggcacggtcggaaccgcgggcacttcaaggcgaacttgcatggcgacctcatgtgggttcgggcaaagaaggctgtcttctttggggctggtgctatcggtaccactgagatcctccttcgaagcaagcaaatggggctcaagatgagtgaaaaagtcggacttaatatgagtggaaatggcgatatctttggttttggatacaacacggaccatgaagtcaatgcaatggggaaacccttcccatcaccatatcaccccatcggaccgtgtataacgggtgttattgataacagaaccggccatgataatcctctggatggctatgttatcgaggaaggggctattccaggagcacttgtcccctttatgcagatgcttttgacattcttacctggtaacgttgggccaactgatcaatcgttagtcgataaggtcaagtccaatctagctcgcgcaggaagcacgctgctaggaccatactaccgaaaaggtgctcttgagaggacacaggtctacctgatcatgtcccacgacagcaaccaagcttacttgactttgaaagaagacaggccggtgttggagttcataggtgttggccgaagtgaccatgtcaggtatctgaacaatgtcctgaagaaagctaccagagctgtgggtggcactttcgttcagaacccattcgctacgcttttgggcgaccaagttacagtacaccccattggtggtgcctgcatggccgactctgcatattccggcgtgacgaaccacgctggacagatcttcaccggcgatgacaccaaaacatataacggcctcatcgtaacagatgccgcagtcattccttgtgctctcggagccaatccttttgcgaccatcacagccttggcagaacgctcgttggacctgtatatccagaggaggcaattgacgagcagtatggaacccaacggtctgcttgagctatttggatctcctaaataccccaatccccgtcgaaagggcaagtggttggagaaactagaagaaaaagaggaagatgaaacgatataccacacgcacaaatctataacgagtgcccgtcgactcaaggatggtggattcggcttcaccgaggttatgtctggatacgttcatcgccacaatggcgaaggctattcaagggacaatcccgatatatacgaactcgcagctcggacagcgcagtctatgtgcgagaaagcgcggtttttcctcagcgtccaagcctttaacactagatctatcgtacatgaccctcttcacacagcgacgttgacggggacctttgtgtgcccgacactcgaaggctcaccattcatggtccagcgcggaaggttcaacttgttcttagttgactgcaaagcaccaggaactcggaatctcacctatgatttcgatatgcgtggtatcaatagccgaaaactccacttccacggatacaaagtcgtcgactcttcggttgctctatcgccgatgcatttctggagatctactagcacactctacgtcaccatcactgagtgcgtctccacggaggaaagggagcagctgaacgcagaagaggacggactggcaggcggtaaaatcgtcgccaagggaattatgcggatcaagccgcaagacttcgtctctgagatcatgactcttacgccgactggcagcaacatctttcgcaagataaagagtgccgcaaacttcatgacctttttcacgcgaaagtcgatctctctgctccttgcaccgctcacgccgctgcaatatcccagtcagaactattcaggttttgataataatacgccaccgactaaatcctttaaggtaacagctcgcgatggagttatcaccagtctccattactgggaacctctcgttgtcactcccgaatgcgaagtgaagaatctgttcatggttccaggtgcttctgtcgaccaccagatctttgcacttcccacgatcaagttgaacgctgtcaattacttcacacgcgctggctatcgtgttttcatcacagtgcatcgcatcggcgctcttatggtcgcacaaaacaactggacaacgttcgacgcgcgtttcgatatcgaggcatgtttgaaatttatacgcgaaaaatttcccacttatgatgactcaccaatcagcgagggtgatgacaaacatatcaagcgtgagcctgaggctatatacacaatcgcacattgtatgggcagcgtggctttctcgaccggtctgcttgacggcacgatccctggaaagtgggtcaagggcgtgacgtgtagtcaggttttcatgaatccaatttggaacgccatgaacatgataaaaattttggcgcttcccatacctgctgataaactctaccgcttcttcgtgggctcatggtttagctgtagcacagggaagaacgatagcttccttcagagaggcttgaacgagttgctgcggttcatgcctgatgagcgcaaggagatatgtaacaatgccagctgccaccgcatctcgcttgtgtttgcgcgctgctggaaccaccgcaatctcaatgaggctacgcatcgccagatcgacagattcttcggcggcgtgaatatgacccttctgcacctgctcatgaagcagggcttcgatggacatgtcatgtcaaacgggcccttattcgaacgtcttgacacgccagagaatatccgaaggcttcgcggcatcccattcttactctttgttggccgtgacaatgccgtgctcagccccgagagcacagaaaggacttacgaagtcctgaccgatacttttggtactcgcgctgacgatggcatccagtaccgccgtcgtgtcgtgccgaattatgggcatctagactgctggatgggccgtaacgcttggaaggatgtctatcccttcgttagggaagaagtcgatcgcgtcgtccgtggccctaagtatcatttccaagagcccaatgacagattccaacatatgattgcttctggcgagcttctggcgaggtagagatcccacgaagctcgcaacagattcacagttggagctgtaaggagacgatagatgtgcgatactgtgcggaaaaaaaattccggtcggaagcagctctcatgactggatcatggaaacatgttgttgcttctgagagataaaggatatttaaagaaaaggcgttaaggtggatacccctgacgctctcatcagagtttcgcagtttcgcagtttcgcacattcggagtcactctatctcgatggctcactgtatagacatttatataattttctatttctctatttgattattgactgtttctttttattgggttactggtggcatgttgagtttgacgtctcatttaggaatcatagcaataatctgtacagtctaagtctgagatgatgctcactcccagttcaaagatcgaatacgggttgcatagcatagaagtgtatacatttgtagcatggacccgtggctgacaacccactctgcggtatatgtttgcgtgtatcttgctcaggatataaattctacaacatttagtagtcatcctacatctagcctatgctgaggcgctcgtcatagttgtatgtatatgattgaagggcagatatcatgcggtcaaagtgttcattgcctgtcattctggccttatcagctctacaccatcatgaacctcactgtcgccattgatggttcccttccttcttgtgaataagacagtaattggactacttcttcatcctagaaccttccctcttcctcatgagattgggcatgaaaacaaagacagtgccctgcgcagcgaacacgattgaaacgctgagtgattccagcgacacctttggctcaatcggtgcatggtgtcgaatctctcggctcactcctctagctcgccctgttccttgattcgatctgcccttgtcactactcaagctttctttgctgtcagaaattgccggtaacgcatcttgccttggtaacaaacttggaagcttttcctggccattactctcgcttcaccttcaaagccttccatatccattgccattgtctctcgcgctcttgtgaagctgccagcagctctgtgcctcgctctatttgacttcatttgactcgagggagcaggcaggggatttctttggtcgacgagatcgtggacactaagagggaatcaggcgtatcgctcagtcgcttccctaacatcacttccttccttcttttcactatctgcattgcaccgccttggtcctcatttcacgagacaactctccaagtagaagtcctcttcgtcctgccacgaccagacatcatcacctctcctcctcaacttctgataccacttctgctttcccggttctagcatctggctttagctaagtctccctccgttgctctagcatcatcattcccttctcgtattcgcggctcttctgcaaggtaacagtacttggagagttagagcagggcgttgtagaattgctcaacgagctccctggcaccatcgcagtgcttgcactctttcatttcgttggcggttcgtagcctccgtccctccattctttgagcttcgctgcggaacctctcatctgcgtcaccaccctaccaccaccacgaattctggttgtcgaggcatcatctggtgaaaagcgttgcctggccggcaaggcggcagggaaacagacacattttgcccggtagtagattttcgagccgacactaggtgagcatttgttactatctacttggcctataattctctagcgaagtagcgcccactcgctgccacgcacccaagagaagagggaacagggggtgattgctcaaacagtcgttgatcccgtttccgccgtccgtcttacgtgctgataagatataggatatagagacagcaacgaggttggcgtcttcactttaggattgacgcctttcgttagcctcctctttcagcgcctttgagatcgaggtctcgcaatctgaacgagaacgtcgcgggattccttacgctatctacgaagtaaccccgatcgttagcatctaccatctaccatctaacatataccaagcgatagtatatacctgctcacgtatctagatatatctgttcccagtggttgggc

SEQ ID NO: 29525 - DNA, 472 bp, Muscodor strobelii
  misc_feature: SGI cDNA ID NO. 570142
  misc_feature: Reduced expression when VOC is produced
  misc_feature: Encodes the peptide sequence at SEQ ID NO 29526
atgagccgggccgcatcccgcacgccccattcccacacacgacgacccaaacgcggcaccaggtccaggaggcgcacttcgaggccggacgaggcgtggttcacagtgcgcgacatcatcggcgagaaggagcaggacggcgccatctactacaggatcgactgggacggcaccgataagcacggccaccctttcgagccgtcttgggaaccggccgccaacgtcaacaagaaggctgtcgacgcctggagggacagcaagagcgcgggtcctgccaacaccgtgcatgcgaccagccaggagactgcgcagtcttctccagctgcagcgggcgagtcgacacaggagaccgatcccgtgcggccccccaactggagacgacgccggggagagcgccaggagacggacatcgaggctgctgcgccaccaggctcaggtcgaggagctccgatagtagtggagttgccgcata

SEQ ID NO: 29526 - protein, 157 aa, Muscodor strobelii
  misc_feature: SGI Peptide ID NO. 570142
  misc_feature (14)..(129): NCBI GI: 116199207 Blast Desc: CHGG_07759 [Chaetomium globosum CBS 148.51] gi|88179038|gb|EAQ86506.1| CHGG_07759 [Chaetomium globosum CBS 148.51]
  misc_feature (31)..(91): NCBI GI: 85100685 Blast Desc: NCU06696 [Neurospora crassa OR74A] gi|28922547|gb|EAA31775.1| [Neurospora crassa OR74A] gi|28949934|emb|CAD70920.1| conserved [Neurospora crassa]
  misc_feature (33)..(137): NCBI GI: 156062554 Blast Desc: SS1G_01393 [Sclerotinia sclerotiorum 1980] gi|154696729|gb|EDN96467.1| SS1G_01393 [Sclerotinia sclerotiorum 1980]
  misc_feature: Useful for introducing or modulating the production of volatile compounds
MSRAASRTPHSHTRRPKRGTRSRRRTSRPDEAWFTVRDIIGEKEQDGAIYYRIDWDGTDKHGHPFEPSWEPAANVNKKAVDAWRDSKSAGPANTVHATSQETAQSSPAAAGESTQETDPVRPPNWRRRRGERQETDIEAAAPPGSGRGAPIVVELPH

SEQ ID NO: 29527 - DNA, 745 bp, Muscodor strobelii
  misc_feature: SGI EST ID NO. CUFF.69825.0
  misc_feature: Variant of the nucleotide sequence at SEQ ID NO 29525
gtcggcccagcgggcccccctgtcgcggttcagccgcgacgcaaggctagcagcagtatgacaactccctgcaccctatctcgcccccgtttgctggcgtccaccaggtatgccgcatgacttacaccgaatctagtgccatccgcgacgccacagcacgagcttccgcctcgtcgcgacaccgctgccgacgctgacgacgacgacgttgatgcaatcactaagcatgggcccggtgccgtggagagaccccgtcgccgacagccagagtcaatgagccgggccgcatcccgcacgccccattcccacacacgacgacccaaacgcggcaccaggtccaggaggcgcacttcgaggccggacgaggcgtggttcacagtgcgcgacatcatcggcgagaaggagcaggacggcgccatctactacaggatcgactgggacggcaccgataagcacggccaccctttcgagccgtcttgggaaccggccgccaacgtcaacaagaaggctgtcgacgcctggagggacagcaagagcgcgggtcctgccaacaccgtgcatgcgaccagccaggagactgcgcagtcttctccagctgcagcgggcgagtcgacacaggagaccgatcccgtgcggccccccaactggagacgacgccggggagagcgccaggagacggacatcgaggctgctgcgccaccaggctcaggtcgaggagctccgatagtagtggagttgccgcata

SEQ ID NO: 29528 - DNA, 687 bp, Muscodor strobelii
  misc_feature: SGI cDNA ID NO. 570143
  misc_feature: Reduced expression when VOC is produced
  misc_feature: Encodes the peptide sequence at SEQ ID NO 29529
atgggatcaacgccgccgaaacgctgggctgctctcgctcgtgacacaaacgagaccaagatccagctggctctgaatttggatgggggcgaattcccgccagaaacggatgagcgcttgactgccgctttaaaggagggtcacgccagccagtccagcaagtcacagactatcagcctcaacactggcattggcttcctcgaccacatgctccatgccttagcaaagcatgctggctggagtctggtccttgcttgcaagggcgatttacatatcgatgaccatcacacggcggaagacgtgtgtctagcactgggctacgcctttgcacaagcgttgggctcagcgtcaggcctcgcgcgcttcggatatgcctacgcgcctctagatgaggctctctcacgagctgtggttgatctatcgaaccggcccttctgcgtgacagatctcggtcttaagcgtgagaaaatcggtgatctaagctgcgagatgatacctcactgcatgcagagttttgcgcaagccgctcggatcacgctccacgtcgactgtcttcgcggcgaaaatgaccaccaccgcgctgaaagcgctttcaaggctctggcagttgctactaaggctgccactgcgaggatacctggcaaagagggcgaggtgcccagtacgaagggaacattgagtgtctag

SEQ ID NO: 29529 - protein, 228 aa, Muscodor strobelii
  misc_feature: SGI Peptide ID NO. 570143
  misc_feature (62)..(206): Pfam Id: PF00475 Pfam Desc: Imidazoleglycerol-phosphate dehydratase
  misc_feature (8)..(227): NCBI GI: 261351665 Blast Desc: imidazoleglycerol-phosphate dehydratase [Verticillium albo-atrum VaMs.102]
  misc_feature (5)..(228): NCBI GI: 85102774 Blast Desc: imidazoleglycerol-phosphate dehydratase [Neurospora crassa OR74A] gi|51701615|sp|Q9HEG3.1|HIS7_NEUCR RecName: Full=Imidazoleglycerol-phosphate dehydratase; Short=IGPD crassa]
  misc_feature (3)..(220): NCBI GI: 116206662 Blast Desc: imidazoleglycerol-phosphate dehydratase [Chaetomium globosum CBS 148.51] gi|88183221|gb|EAQ90689.1| imidazoleglycerol-phosphate dehydratase [Chaetomium globosum CBS
  misc_feature (1)..(227): NCBI GI: 151935419 Blast Desc: [Oryza sativa Japonica Group]
  misc_feature (1)..(227): NCBI GI: 46123431 Blast Desc: FG06093.1 [Gibberella zeae PH-1]
  misc_feature (6)..(227): NCBI GI: 154322653 Blast Desc: imidazoleglycerol-phosphate dehydratase [Botryotinia fuckeliana B05.10] gi|150848003|gb|EDN23196.1| imidazoleglycerol-phosphate dehydratase [Botryotinia fuckeliana
  misc_feature (1)..(227): NCBI GI: 256731032 Blast Desc: [Nectria haematococca mpVI 77-13-4]
  misc_feature (6)..(227): NCBI GI: 156064855 Blast Desc: imidazoleglycerol-phosphate dehydratase [Sclerotinia sclerotiorum 1980] gi|154691297|gb|EDN91035.1| imidazoleglycerol-phosphate dehydratase [Sclerotinia sclerotiorum
  misc_feature (8)..(228): NCBI GI: 39972453 Blast Desc: imidazoleglycerol-phosphate dehydratase [Magnaporthe grisea 70-15] gi|148887380|sp|O42621.2|HIS7_MAGGR RecName: Full=Imidazoleglycerol-phosphate dehydratase; Short=IGPD grisea
  misc_feature (1)..(206): NCBI GI: 462274 Blast Desc: HIS7_TRIHA RecName: Full=Imidazoleglycerol-phosphate dehydratase; Short=IGPD gi|5177|emb|CAA77617.1| imidazoleglycerolphosphate [Hypocrea lixii]
  misc_feature (5)..(228): SWISSPROT Homolog: EC 4.2.1.19 Imidazoleglycerol-phosphate dehydratase
  misc_feature: Useful for introducing or modulating the production of volatile compounds
MGSTPPKRWAALARDTNETKIQLALNLDGGEFPPETDERLTAALKEGHASQSSKSQTISLNTGIGFLDHMLHALAKHAGWSLVLACKGDLHIDDHHTAEDVCLALGYAFAQALGSASGLARFGYAYAPLDEALSRAVVDLSNRPFCVTDLGLKREKIGDLSCEMIPHCMQSFAQAARITLHVDCLRGENDHHRAESAFKALAVATKAATARIPGKEGEVPSTKGTLSV

SEQ ID NO: 29530 - DNA, 1166 bp, Muscodor strobelii
  misc_feature: SGI EST ID NO. CUFF.69829.0
  misc_feature: Variant of the nucleotide sequence at SEQ ID NO 29528
caaaagtgagtatcgaaacatcacaccgattcactgcccactcacacatcgtttcttatttcgttatagatctcatccataatctgtttttttcttgtgcgctttcagatctatcatatcgtttataccaagatatagaccataacagaatgggatcaacgccgccgaaacgctgggctgctctcgctcgtgacacaaacgagaccaagatccagctggctctgaatttggatgggggcgaattcccgccagaaacggatgagcgcttgactgccgctttaaaggagggtcacgccagccagtccagcaagtcacagactatcagcctcaacactggcattggcttcctcgaccacatgctccatgccttagcaaagcatgctggctggagtctggtccttgcttgcaagggcgatttacatatcgatgaccatcacacggcggaagacgtgtgtctagcactgggctacgcctttgcacaagcgttgggctcagcgtcaggcctcgcgcgcttcggatatgcctacgcgcctctagatgaggctctctcacgagctgtggttgatctatcgaaccggcccttctgcgtgacagatctcggtcttaagcgtgagaaaatcggtgatctaagctgcgagatgatacctcactgcatgcagagttttgcgcaagccgctcggatcacgctccacgtcgactgtcttcgcggcgaaaatgaccaccaccgcgctgaaagcgctttcaaggctctggcagttgctactaaggctgccactgcgaggatacctggcaaagagggcgaggtgcccagtacgaagggaacattgagtgtctagaggaatacagaaaaacttagagatgggaaaaggtgtgggatgtaagtcggggaaagcacggcgtatagtcaagcggcgcttgccaaatttgacttcaagattcaaacccatttgcatacgtccatgtgtgttatgatcttggtgtggaggtaggttgcatgaataatatgataccattgagatcatagattaataattgtgaagggttacagaagatggtttattggaaattgaatgtcaacggggcaattgtgacagcagcttcataggattgaattggatactgactgccaacacaaatggccaactggcctagtggtctgagttgcc

SEQ ID NO: 29531 - DNA, 597 bp, Muscodor strobelii
  misc_feature: SGI cDNA ID NO. 570144
  misc_feature: Reduced expression when VOC is produced
  misc_feature: Encodes the peptide sequence at SEQ ID NO 29532
atgggtgtccaaagaacgagaacgatcaaaaacaagcacgccgccaacaagtctggcatcagcggcagcaagtcctccaagtctagctcttcagatggcgtatccaagtccagatcgaagaagcctacgggcgcacctatctcgaagcagatgaagggcaagaccatggccgatgtactaaaaaagaagaaaaagaaggtctatacagaaaaggaacttggcattccccagctcaacatggtcacaccaatcggcgttacgaaaccgaagggcaagaagaagggaaaggtctttgcggatgatagggaaagcatgagcacaatcctcgccatcgtccaagcagacaagaaaggcgagatcgagtctaagatgatcaaggcacgggagatggaggagatccgcgaggcacgccgcgcagagactgaaaaaaaggaagcagagaagaaagctaagctggacgaaacgaaagaatcgcttcgaaagaagagaaaacgcaacaaggctgctgccgacgaggacgacaccgagaccatctccgctgctgtgtctgctggtacgaatacaaagactaagaagaaaagagtttctttcgcatga

SEQ ID NO: 29532 - protein, 198 aa, Muscodor strobelii
  misc_feature: SGI Peptide ID NO. 570144
  misc_feature (1)..(198): NCBI GI: 256731394 Blast Desc: NECHADRAFT_73868 [Nectria haematococca mpVI 77-13-4] gi|256734284|gb|EEU47631.1| NECHADRAFT_59514 [Nectria haematococca mpVI 77-13-4]
  misc_feature (6)..(167): NCBI GI: 85102779 Blast Desc: NCU01301 [Neurospora crassa OR74A] gi|74624543|sp|Q9HEG2.1|LOC1_NEUCR RecName: Full=60S ribosomal subunit assembly/export protein loc-1 gi|11595667|emb|CAC18288.1|
  misc_feature (1)..(198): NCBI GI: 156064857 Blast Desc: SS1G_00436 [Sclerotinia sclerotiorum 1980] gi|160012134|sp|A7E564.1|LOC1_SCLS1 RecName: Full=60S ribosomal subunit assembly/export protein loc1 gi|154691298|gb|EDN91036.1|
  misc_feature (1)..(162): NCBI GI: 154322651 Blast Desc: BC1G_00668 [Botryotinia fuckeliana B05.10] gi|160012229|sp|A6RJP7.1|LOC1_BOTFB RecName: Full=60S ribosomal subunit assembly/export protein LOC1 gi|150848002|gb|EDN23195.1|
  misc_feature (1)..(198): NCBI GI: 46124827 Blast Desc: FG06791.1 [Gibberella zeae PH-1]
  misc_feature (34)..(197): NCBI GI: 160013752 Blast Desc: FG06791.1 [Gibberella zeae PH-1]
  misc_feature (29)..(198): NCBI GI: 258569477 Blast Desc: conserved [Uncinocarpus reesii 1704] gi|237903812|gb|EEP78213.1| conserved [Uncinocarpus reesii 1704]
  misc_feature (9)..(198): NCBI GI: 261351641 Blast Desc: 60S ribosomal subunit assembly/export protein LOC1 [Verticillium albo-atrum VaMs.102]
  misc_feature (46)..(198): NCBI GI: 261191003 Blast Desc: 60S ribosomal subunit assembly/export protein LOC1 [Ajellomyces dermatitidis SLH14081] gi|239590954|gb|EEQ73535.1| 60S ribosomal subunit assembly/export protein LOC1 [Ajellomyces
  misc_feature (34)..(198): NCBI GI: 119196671 Blast Desc: CIMG_02710 [Coccidioides immitis RS] gi|121769092|sp|Q1E403.1|LOC1_COCIM RecName: Full=60S ribosomal subunit assembly/export protein LOC1 gi|240110798|gb|EER28954.1|
  misc_feature: Useful for introducing or modulating the production of volatile compounds
MGVQRTRTIKNKHAANKSGISGSKSSKSSSSDGVSKSRSKKPTGAPISKQMKGKTMADVLKKKKKKVYTEKELGIPQLNMVTPIGVTKPKGKKKGKVFADDRESMSTILAIVQADKKGEIESKMIKAREMEEIREARRAETEKKEAEKKAKLDETKESLRKKRKRNKAAADEDDTETISAAVSAGTNTKTKKKRVSFA

SEQ ID NO: 29533 - DNA, 1102 bp, Muscodor strobelii
  misc_feature: SGI EST ID NO. CUFF.69837.1
  misc_feature: Variant of the nucleotide sequence at SEQ ID NO 29531
attttcccagcagccaatccagcagccaattgaccaacatcaccaaagtcgcagcttgcgcttcaacaaccacacacctgcccaagatgggtgtccaaagaacgagaacgatcaaaaacaagcacgccgccaacaagtctggcatcagcggcagcaagtcctccaagtctagctcttcagatggcgtatccaagtccagatcgaagaagcctacgggcgcacctatctcgaagcagatgaagggcaagaccatggccgatgtactaaaaaagaagaaaaagaaggtctatacagaaaaggaacttggcattccccagctcaacatggtcacaccaatcggcgttacgaaaccgaagggcaagaagaagggaaaggtctttgcggatgatagggaaagcatgagcacaatcctcgccatcgtccaagcagacaagaaaggcgagatcgagtctaagatgatcaaggcacgggagatggaggagatccgcgaggcacgccgcgcagagactgaaaaaaaggaagcagagaagaaagctaagctggacgaaacgaaagaatcgcttcgaaagaagagaaaacgcaacaaggctgctgccgacgaggacgacaccgagaccatctccgctgctgtgtctgctggtacgaatacaaagactaagaagaaaagagtttctttcgcatgagcaaacaaaatcggcattggatggagttatggggcgtttcctccggagttggtcctttaccactcgttcttaggttttctgcttctagagatgctgcgcacgataattatgataccccaacagagatcatttcaaaatctgccgtcttttctaaacatctaaattgccatgtagctaacaatattgatggaatggtgaagatcggataggcgaaagcatcatgtttattgtttcaccgtgtcataggaggtcggttcactatggtatcatcctacagtcactgaaagaccgcttgtgcacctgaagacacgcagcgtgtgctcgtactctacttgtaatatgtggcgagctggacaaaaacttccgggaggagtttcaacatcgacgccatacgattcccgactaaacaagttaggaag

SEQ ID NO: 29534 - DNA, 1536 bp, Muscodor strobelii
  misc_feature: SGI cDNA ID NO. 570145
  misc_feature: Reduced expression when VOC is produced
  misc_feature: Encodes the peptide sequence at SEQ ID NO 29535
atggccgaccaggcgtccgggtcttcactccctcagatccagcgccgcggtcgccagcaatcccacgttcattaccacaaccacaacaaccacagccatcacgctcgttcacaccaccaccacagcgacgcaaagctcccgcacgccgagcgcgaccaagccgccgagagcaccgtcgtcatcgtccagaccatctccgtctaccagatcaccgacgccagcggcgccaccatcatccagaccatcccgactgccgacacaacctcgtccgctgcactgatacagaccaccgatatcgtccccgctgcaaccaccaccgcatccagcgctagtctccccgacgactcgacgacctctgcgaccagcagcgacgatgatgttgacaccttgtcggcagcctcttatccgaccgctgtagatccgaccgtaacaccgtcaggatcttccatgcctacttcgtttccaaccttatcttatgctactttcacgtccgctccttcaactcccacgcctgtctttccttcaataaccggcgcttcaaattctacgggctctgtgtccggccctggcttctctaattctaccgcatctctacactcattcactgctccaagcgaaaccgaaagcggcttctccatttttggcagcgctggttctacttcaacaaggataccatcctcctcttcgacgaccattacagactcacacgtcggcacaggcacttcgacgacaatacattcatctacgcccacccttttcactacttcttcttacgaccctgatgtcacacccctcacagcaggtggcgatggtttgactactaccgcgagtacccctactgcaagcattgctgtcgacgactcaaatggctcggatactactgtctccaaagcgacgattgccggaagtgtagtgggagctatcagtggctttgtcttccttttgctcctggccacggcttttctcagatggaagaaacgccaccccggtatcaaactcttggggaatgaaagaggtccccaaggcatgctcaccggagctccgagcggccctgcaggtggcggtgacgcgagcggcggtgatatggcgcaacgacgacgctctgtaccatttgctatcccagctgcactggccaatcttgccgggaacagtcgcttctccagaagtaccgtttcgtccgatggaggtgagagaggctttgctaagatctcgggtcggaaactccctccagtcatacaatttggtggcgacgggtacacggatccacgtgctactatgatgagcgaccaatccgtcgactatcggaactcacaacacttctttggggatgcgacgccctcccgcttggctgtcggttctcccatgctacaagagaccagttcgcccattttccatgccagcccggcccggactgcagtaagggaagagggtccgttcagtaatccattctcagatgacaacgccataagcaacgatccaccacgttcgagtgatcgaagtgcatttggtcgccacagattcaccgaggatctgtga

SEQ ID NO: 29535 - protein, 511 aa, Muscodor strobelii
  misc_feature: SGI Peptide ID NO. 570145
  misc_feature (299)..(510): NCBI GI: 39972291 Blast Desc: MGG_07447 [Magnaporthe grisea 70-15] gi|145016633|gb|EDK01063.1| MGG_07447 [Magnaporthe grisea 70-15]
  misc_feature (375)..(511): NCBI GI: 261351701 Blast Desc: conserved [Verticillium albo-atrum VaMs.102]
  misc_feature (311)..(482): NCBI GI: 46124863 Blast Desc: FG06809.1 [Gibberella zeae PH-1]
  misc_feature (313)..(480): NCBI GI: 256731386 Blast Desc: [Nectria haematococca mpVI 77-13-4]
  misc_feature (313)..(481): NCBI GI: 156065081 Blast Desc: SS1G_00551 [Sclerotinia sclerotiorum 1980] gi|154691410|gb|EDN91148.1| SS1G_00551 [Sclerotinia sclerotiorum 1980]
  misc_feature (369)..(486): NCBI GI: 38566843 Blast Desc: [Neurospora crassa]
  misc_feature (369)..(486): NCBI GI: 85081610 Blast Desc: NCU01477 [Neurospora crassa OR74A] gi|28917830|gb|EAA27518.1| [Neurospora crassa OR74A]
  misc_feature (316)..(479): NCBI GI: 171692689 Blast Desc: protein product [Podospora anserina] gi|170946293|emb|CAP73094.1| protein product [Podospora anserina]
  misc_feature (267)..(511): NCBI GI: 154319907 Blast Desc: BC1G_01934 [Botryotinia fuckeliana B05.10] gi|150854673|gb|EDN29865.1| BC1G_01934 [Botryotinia fuckeliana B05.10]
  misc_feature (315)..(419): NCBI GI: 115396540 Blast Desc: [Aspergillus terreus NIH2624] gi|114193478|gb|EAU35178.1| [Aspergillus terreus NIH2624]
  misc_feature: Useful for introducing or modulating the production of volatile compounds
MADQASGSSLPQIQRRGRQQSHVHYHNHNNHSHHARSHHHHSDAKLPHAERDQAAESTVVIVQTISVYQITDASGATIIQTIPTADTTSSAALIQTTDIVPAATTTASSASLPDDSTTSATSSDDDVDTLSAASYPTAVDPTVTPSGSSMPTSFPTLSYATFTSAPSTPTPVFPSITGASNSTGSVSGPGFSNSTASLHSFTAPSETESGFSIFGSAGSTSTRIPSSSSTTITDSHVGTGTSTTIHSSTPTLFTTSSYDPDVTPLTAGGDGLTTTASTPTASIAVDDSNGSDTTVSKATIAGSVVGAISGFVFLLLLATAFLRWKKRHPGIKLLGNERGPQGMLTGAPSGPAGGGDASGGDMAQRRRSVPFAIPAALANLAGNSRFSRSTVSSDGGERGFAKISGRKLPPVIQFGGDGYTDPRATMMSDQSVDYRNSQHFFGDATPSRLAVGSPMLQETSSPIFHASPARTAVREEGPFSNPFSDDNAISNDPPRSSDRSAFGRHRFTEDL

SEQ ID NO: 29536 - DNA, 4295 bp, Muscodor strobelii
  misc_feature: SGI EST ID NO. CUFF.70518.1
  misc_feature: Variant of the nucleotide sequence at SEQ ID NO 29534
atagtattggcgagcaggaagacgagagagtggaatgctgtacagtgctactagcactcagcttacacgtgcaagtcgaggcacattccgagcgttgggtggactgatggccacgatgttggcccttgcaggcgggaaagcacgctcgttcgtctgtttctctcattttaaaattgggcgggccgtctggtcgtgttttttgggggtctgcaaacagagcgtacgtctgccatacgtgtacccagacgacccgggcccatgtttaggcgtgctactaggccgtgcgcatgtacagtacgatatagtccctagctcatctcatctaacgctggccctgttgcgtcgcaaaggcttggcccccgtcggtcgctgttggcctgcggtgctattacgaaacccaattcccttttcatttcaacctcgctcctccctctccagcccatcgccgtccgacttcaccatcccctccggctgccagacgtccggtgccagactcgcgccgacgacgatgaggacgcggtagagcaggagaacaggagaaccgcagcagcacgccggacaatacgaggtcgtccgagaatggaagtctccgcacgatcggcaacctagcgcactcgtttgacacccgcctggccgcgcagcagcgagtcagagcgacaaagctcctccagcacctcgtatccagcatacaccgccacgcacgacacgccgtgcagtgtgcgcaatggccgaccaggcgtccgggtcttcactccctcagatccagcgccgcggtcgccagcaatcccacgttcattaccacaaccacaacaaccacagccatcacgctcgttcacaccaccaccacagcgacgcaaagctcccgcacgccgagcgcgaccaagccgccgagagcaccgtcgtcatcgtccagaccatctccgtctaccagatcaccgacgccagcggcgccaccatcatccagaccatcccgactgccgacacaacctcgtccgctgcactgatacagaccaccgatatcgtccccgctgcaaccaccaccgcatccagcgctagtctccccgacgactcgacgacctctgcgaccagcagcgacgatgatgttgacaccttgtcggcagcctcttatccgaccgctgtagatccgaccgtaacaccgtcaggatcttccatgcctacttcgtttccaaccttatcttatgctactttcacgtccgctccttcaactcccacgcctgtctttccttcaataaccggcgcttcaaattctacgggctctgtgtccggccctggcttctctaattctaccgcatctctacactcattcactgctccaagcgaaaccgaaagcggcttctccatttttggcagcgctggttctacttcaacaaggataccatcctcctcttcgacgaccattacagactcacacgtcggcacaggcacttcgacgacaatacattcatctacgcccacccttttcactacttcttcttacgaccctgatgtcacacccctcacagcaggtggcgatggtttgactactaccgcgagtacccctactgcaagcattgctgtcgacgactcaaatggctcggatactactgtctccaaagcgacgattgccggaagtgtagtgggagctatcagtggctttgtcttccttttgctcctggccacggcttttctcagatggaagaaacgccaccccggtatcaaactcttggggaatgaaagaggtccccaaggcatgctcaccggagctccgagcggccctgcaggtggcggtgacgcgagcggcggtgatatggcgcaacgacgacgctctgtaccatttgctatcccagctgcactggccaatcttgccgggaacagtcgcttctccagaagtaccgtttcgtccgatggaggtgagagaggctttgctaagatctcgggtcggaaactccctccagtcatacaatttggtggcgacgggtacacggatccacgtgctactatgatgagcgaccaatccgtcgactatcggaactcacaacacttctttggggatgcgacgccctcccgcttggctgtcggttctcccatgctacaagagaccagttcgcccattttccatgccagcccggcccggactgcagtaagggaagagggtccgttcagtaatccattctcagatgacaacgccataagcaacgatccaccacgttcgagtgatcgaagtgcatttggtcgccacagattcaccgaggatctgtgaacctgtcatagccacacttgtggcttttttgtgcgctcatgtttctgacttcatctaatgatatcactcataatcgcatagacctcgatgtcatgtgatcatggtactttgtgtggcgttttttgctggataaaattttcgtcgggcatgagcagccacgatgagagatttcgaagggatcgatacttgtatataatgcagcctgccctcgtggccaagacatcaggctgaacacctagatagcagcctacgagaattgctcacaatctatggaaataatatctgaccaaccgaaaggatctgagtgaagggcccttgcattatgactttatcttattgacgatgagaactaattgggtaatgataatatcgtgggagtatgcgcacagctagtcctatgccactacatgtgacgattggcattgcttggtggcagtagatgacacaagggccacgcgggatgccacttagatattgcctaatcgtttgggtttagaaacaggagggggatgttgtcaagatagccagaaagactttgagacgaaggtgaaacctgggtggatggcgatcactcacctcgctttgaccatccccaaatcatctcatgcccgatagctctggattttttgcacaattagtaattacttagaattcgtcgcaagttgtaaagttgtctgatcgaactacaggaaacccttttcgatccaaagtgccacgctctcaggtatgacgaccccttcgctggggtcctgggacctgaaacgcaaagttgagaatgggttcagcccgcggagtttggatttggaatgcagtggaatgtcaagtggaaaatgcgcgcatctatttttttcgttttcgcattccagtgcgcatggtattgcctgcgcataccttaacgttcaagtctcctattggacctaatgacgcagccgagaatggtgtcacatcattttgctattcaaagtatctggcccatagccgcgatatgagaccgactttctataatgcacatgaatgctgtgatcttttctgatcatatgccaacttcagacctacagggaacacgggtgtagcatcttaaagaccgctatgccgacctactaatttagcagctctattggtaatggaaggtagccaaacctcaatctgatttgccaatacgtcaacatactcaacgagcaagagcaggctggtgtatatcctgacaaatacttcaacgccccaactccggtctgcccaatgctcgcagccacatggccgtctccttgcatcgcgggctaattcttatgaccgcaacccgcaagatctcatcactctgatgcacgtaattacaaaaatgatagatctgagatgcacccttgccaagagaatggccacacctaacccaagcaaacagactagagtgtcgagagtgttatcattatgcttcaaggagttgcgataccaccgaagctggggccagagtccctggatatactcgtgacctaatggggggccctggtacatcgggcggcagcttcaaaaactgctgataatgatagcgtggtgtctgactcgactgagaaacaacatgagtgacaatgattcgatgatttcttggatgccaccgtgccatggtttgagccaggagtcagtgaagtcacttttgggtcttgatggatttaagcagcatgtcgtagattaattaccaatgagaggcttcggtgtggttggataagacgggatgttaggggggtgttctaggatgagatatgggaccctggaatgattgccctgtccaccgaacggaccttcggatgctcgtaagacttcaaggagctgcgccaggtatcgtaggaagatcctgaagacaaagaatgctcaaagcagaaaatgatgatggcgtggcgtgcttggagttgcattttacttacaggtgcaattgaggcaaccaaccgtgccgtcttgttgcggcgactgattatagatgcaacaacaggccggagatgggatcatgtaagttattgatgttgatcaagagatatacatagccaca

SEQ ID NO: 29537 - DNA, 2784 bp, Muscodor strobelii
  misc_feature: SGI cDNA ID NO. 570146
  misc_feature: Reduced expression when VOC is produced
  misc_feature: Encodes the peptide sequence at SEQ ID NO 29538
atggagcaccttcgagtcgatcctggcacgttccagttcactggcatacagcagccgccgatgatgaacccaccaccgccgatatttgcgaattacgcccacgatggcatgcccgtactcccgccggatctcgcggcccacatggggttcgatgcgtctctgttagatgatgccaatgaagcgaagaggcggaggatcgcacgggcgtgcgacatgtgccgcaaaaagaagatcaagtgcgatgggaaaatgcccgcttgcactcattgcatcaattataagacagaatgcgtcttcacgcaggtcgagaagaagcgaagtcctcccaaaggcgcgaaatacatagaaggtcttgagaatcgacttggtcgcatggagagtttacttagactgtccggtcttcttggagaagacgatgaggcaaccgacttggctactctcgagaaacgtctcgctgagaaacaccaacagaacagacatgcatcccacgtctcgcaggcgtcgcattccaacccgacctcgccatcactcacaacatctggtccagacgcatgtgactcgacaccccagagcgccttgacgtcgccggaaccaacaagagagcgcgagttcaagagggattcttctccgccattagatgggaaatcggaagaggaagtggctgccctgtcggagatgatgtgctctctcgtcacaaatcaacagggcgagacgagatatatcggttcctcttcggggttctcaatattttcaccaaagggcattcaatgggtaaacgaaaggacgggagatacatcgtttcagcggatgatatcagaagtgtcgctcgatgaccataagtggaaccaatggaagcccgagatcttttcagatctcttccatcgcccggtatttcgaccgttgccgcccaagtcagaagcattgtctctgttgaaggactatttcgagaatttcaactgcattcttccgctcttccaccagccgacgttcatgcatcttgtggagaaacagtactcctctgatccgtatgatggctccggctggtgggcttctctgaactgcgtcctggccattgcgcatcgtcttcgtgtcatgagcaatctcgtaccggcagaagaggatgagaaggcttgggcctacctgaagaatgcgatgggcgtctttaccgagttgatcatgcgtaacacagatcttctaagtgtacaggccttgttgggaatggctttgttcatgcaaggaacaccgaatcctcaaccatcgtttcaattggtggctgctgccatcagattatctcatagtattggtctacataagcgcggtacaggattcaacctaaatcccgtcgagatcgagcaaagaaagcgtgtcttttggattgcgtacatgctggaaaaggatttgtgtcttcggtcaggtcgaccaccagcgcaggatgatgacgacatgaatgttgagcttcccgatgccgatccagcagaccacatcggcaacattcccctagctaacggcaagggaaagatgaatctcttccgcgtcatgtgcgaactatcagtcatcgaaagcaagatctacaaaagcctttactcgacgaaagccacaaagttgtcggatggcgagctattgcagactattggggagcttgataaagagctcgaagtatggaaagacaacatcgatatcgactaccgccccgaacacgaaatcaaagcatcacacactcccttaatattgcatatcgtcatgttgcacttcacttattacaacgctctcaccaccatccaccgcatgtccgtacatcacggctattggacaagtcgcctagcgaattatgccatccagggtctcaatgctagaccgttgaatcctagagttttctcatccgctgcgctctgcgcatctgccgcgagagccaccatctccttgctgaagtatatcccacaaggtgacttttcgtgcgtctggatggcattatacttcccagtttctgcactggtcacattatttggaaatattctacaaaatccaaatgatcctcgggcacgatccgacacgcggctcatgaatctggtggtgaccttcttatccacgttaggtcaggaagcagagacgggcggtgtgtaccgcatgctaggcgtgtgttcggagttcgagcggattgccaaggctgtgattgataaagcagaaaaagaagcatcatcaagaagaaagagaaaaccaactgaactgactaagccggacaaccaccatggcccaccaaccgggctgtcctcgacgacaccgaggccctcgacctctggtgcaacaccgacgccaaacgctgcgaggttaaacgagaacggtacttcggatgtggctcagctctcgcccaagttcaacggagaacagaatcggcagaacaacgcagcaaatgcagcaacaccaaactcacaaatcagcggaaacggcagcacaaatggctacagccccatggaaacaacgcaagcggcaaacggcaccatgcctcagccttctagcgggtggccatctgaatcgttcgatccgactgatatggggttcgcagagctcaccggatttggacaagcggttacgtcgccctctgctatgttgaacatgatgggcatgggtggcgctgcgccggcgaaccgagggcctggagcgggcatgggatttaatccgtcgttaccgcaggacttgtggcagttgccgatgacgcttgattgggactgggctgagtttaccggtggaccgtatcctgggtttgagaacgggagtacgacgcagtga

SEQ ID NO: 29538 - protein, 927 aa, Muscodor strobelii
  misc_feature: SGI Peptide ID NO. 570146
  misc_feature (68)..(107): Pfam Id: PF00172 Pfam Desc: Fungal Zn(2)-Cys(6) binuclear cluster domain
  misc_feature (397)..(491): Pfam Id: PF04082 Pfam Desc: Fungal specific transcription factor domain
  misc_feature (28)..(925): NCBI GI: 261351700 Blast Desc: fungal specific transcription factor domain-containing protein [Verticillium albo-atrum VaMs.102]
  misc_feature (11)..(924): NCBI GI: 256731385 Blast Desc: [Nectria haematococca mpVI 77-13-4]
  misc_feature (28)..(924): NCBI GI: 38566844 Blast Desc: related to transcriptional activator Mut3p [Neurospora crassa]
  misc_feature (28)..(924): NCBI GI: 85081614 Blast Desc: NCU01478 [Neurospora crassa OR74A] gi|28917831|gb|EAA27519.1| NCU01478 [Neurospora crassa OR74A]
  misc_feature (1)..(923): NCBI GI: 154319903 Blast Desc: BC1G_01932 [Botryotinia fuckeliana B05.10] gi|150854671|gb|EDN29863.1| BC1G_01932 [Botryotinia fuckeliana B05.10]
  misc_feature (6)..(924): NCBI GI: 46124865 Blast Desc: FG06810.1 [Gibberella zeae PH-1]
  misc_feature (22)..(924): NCBI GI: 171692679 Blast Desc: protein product [Podospora anserina] gi|170946288|emb|CAP73089.1| protein product [Podospora anserina]
  misc_feature (28)..(745): NCBI GI: 116206248 Blast Desc: CHGG_02417 [Chaetomium globosum CBS 148.51] gi|88183014|gb|EAQ90482.1| CHGG_02417 [Chaetomium globosum CBS 148.51]
  misc_feature (19)..(921): NCBI GI: 255943195 Blast Desc: Pc18g05390 [Penicillium chrysogenum Wisconsin 54-1255] gi|211587099|emb|CAP94763.1| Pc18g05390 [Penicillium chrysogenum Wisconsin 54-1255]
  misc_feature (15)..(926): NCBI GI: 169775145 Blast Desc: [Aspergillus oryzae RIB40] gi|83769903|dbj|BAE60038.1| protein product [Aspergillus oryzae]
  misc_feature: Useful for introducing or modulating the production of volatile compounds
MEHLRVDPGTFQFTGIQQPPMMNPPPPIFANYAHDGMPVLPPDLAAHMGFDASLLDDANEAKRRRIARACDMCRKKKIKCDGKMPACTHCINYKTECVFTQVEKKRSPPKGAKYIEGLENRLGRMESLLRLSGLLGEDDEATDLATLEKRLAEKHQQNRHASHVSQASHSNPTSPSLTTSGPDACDSTPQSALTSPEPTREREFKRDSSPPLDGKSEEEVAALSEMMCSLVTNQQGETRYIGSSSGFSIFSPKGIQWVNERTGDTSFQRMISEVSLDDHKWNQWKPEIFSDLFHRPVFRPLPPKSEALSLLKDYFENFNCILPLFHQPTFMHLVEKQYSSDPYDGSGWWASLNCVLAIAHRLRVMSNLVPAEEDEKAWAYLKNAMGVFTELIMRNTDLLSVQALLGMALFMQGTPNPQPSFQLVAAAIRLSHSIGLHKRGTGFNLNPVEIEQRKRVFWIAYMLEKDLCLRSGRPPAQDDDDMNVELPDADPADHIGNIPLANGKGKMNLFRVMCELSVIESKIYKSLYSTKATKLSDGELLQTIGELDKELEVWKDNIDIDYRPEHEIKASHTPLILHIVMLHFTYYNALTTIHRMSVHHGYWTSRLANYAIQGLNARPLNPRVFSSAALCASAARATISLLKYIPQGDFSCVWMALYFPVSALVTLFGNILQNPNDPRARSDTRLMNLVVTFLSTLGQEAETGGVYRMLGVCSEFERIAKAVIDKAEKEASSRRKRKPTELTKPDNHHGPPTGLSSTTPRPSTSGATPTPNAARLNENGTSDVAQLSPKFNGEQNRQNNAANAATPNSQISGNGSTNGYSPMETTQAANGTMPQPSSGWPSESFDPTDMGFAELTGFGQAVTSPSAMLNMMGMGGAAPANRGPGAGMGFNPSLPQDLWQLPMTLDWDWAEFTGGPYPGFENGSTTQ

SEQ ID NO: 29539 - DNA, 4026 bp, Muscodor strobelii
  misc_feature: SGI EST ID NO. CUFF.70969.0
  misc_feature: Variant of the nucleotide sequence at SEQ ID NO 29537
ttttaatagtttcgagatgccgtcgagcctccaatcgcatggccaggtgcgacgaggttgcaggcgagaatagcgatatcagtgagtgtgtgacatggcagcctgcagactgccgccaactgcttcggcgtttaaccaccagcacagcccagcttggaacatggaacgaatggacgttgtgcttcgcgttacagcaacccacgactgatgatttctaatgcgcttctacatgcacggtagccatgtaccgttcctcacacaaaatctagatatagtagagtgtttagaaaagtcgcacgcatgaacggcggttgtgcgaatccatacttagcagaccacggcagggcaccgacatacatccatccatccatgacatgaatgatgctgtaatgggtgtgtaagagttgcgcgactcggcacatcagacaaagtcgctgctgcatgtcaattccagacgaaaatattagatcgcatgtcaatccgaccggaattttattacgggtgcatcgtctggatctctttggttctccatctcatcgttcagtctgtctcctacctaacccgcgttgactgcgtttaatctattccgattcattgcaagttagacctgacgaggcctaggaatacctctcttacctcatatcccatgtccccttagctcatcagtcccttgtccatcgctgtgccgcatggtttgaacgaccccctcgcatccgtatccgtgctctgggttccgggtccttgtttgctttactgctcccttccccacgactcttatccccgtcatcctgcccgtcgagccattgaaagcaaccaccgactctttttgaagtcgaccatcgcatccaccacgacatcccatcccccgccacgccaccgacgatacctacctcgccgacgcgggtgtacagtgcaccatggagcaccttcgagtcgatcctggcacgttccagttcactggcatacagcagccgccgatgatgaacccaccaccgccgatatttgcgaattacgcccacgatggcatgcccgtactcccgccggatctcgcggcccacatggggttcgatgcgtctctgttagatgatgccaatgaagcgaagaggcggaggatcgcacgggtgagcagccgcgggacttctcttctgcgcgctatcaggccgcaactaatcgctgtgatgcgtgacaggcgtgcgacatgtgccgcaaaaagaagatcaagtgcgatgggaaaatgcccgcttgcactcattgcatcaattataagacagaatgcgtcttcacgcaggtcgagaagaagcgaagtcctcccaaaggcgcgaaatacatagaaggtcttgagaatcgacttggtcgcatggagagtttacttagactgtccggtcttcttggagaagacgatgaggcaaccgacttggctactctcgagaaacgtctcgctgagaaacaccaacagaacagacatgcatcccacgtctcgcaggcgtcgcattccaacccgacctcgccatcactcacaacatctggtccagacgcatgtgactcgacaccccagagcgccttgacgtcgccggaaccaacaagagagcgcgagttcaagagggattcttctccgccattagatgggaaatcggaagaggaagtggctgccctgtcggagatgatgtgctctctcgtcacaaatcaacagggcgagacgagatatatcggttcctcttcggggttctcaatattttcaccaaagggcattcaatgggtaaacgaaaggacgggagatacatcgtttcagcggatgatatcagaagtgtcgctcgatgaccataagtggaaccaatggaagcccgagatcttttcagatctcttccatcgcccggtatttcgaccgttgccgcccaagtcagaagcattgtctctgttgaaggactatttcgagaatttcaactgcattcttccgctcttccaccagccgacgttcatgcatcttgtggagaaacagtactcctctgatccgtatgatggctccggctggtgggcttctctgaactgcgtcctggccattgcgcatcgtcttcgtgtcatgagcaatctcgtaccggcagaagaggatgagaaggcttgggcctacctgaagaatgcgatgggcgtctttaccgagttgatcatgcgtaacacagatcttctaagtgtacaggccttgttgggaatggctttgttcatgcaaggaacaccgaatcctcaaccatcgtttcaattggtggctgctgccatcagattatctcatagtattggtctacataagcgcggtacaggattcaacctaaatcccgtcgagatcgagcaaagaaagcgtgtcttttggattgcgtacatgctggaaaaggatttgtgtcttcggtcaggtcgaccaccagcgcaggatgatgacgacatgaatgttgagcttcccgatgccgatccagcagaccacatcggcaacattcccctagctaacggcaagggaaagatgaatctcttccgcgtcatgtgcgaactatcagtcatcgaaagcaagatctacaaaagcctttactcgacgaaagccacaaagttgtcggatggcgagctattgcagactattggggagcttgataaagagctcgaagtatggaaagacaacatcgatatcgactaccgccccgaacacgaaatcaaagcatcacacactcccttaatattgcatatcgtcatgttgcacttcacttattacaacgctctcaccaccatccaccgcatgtccgtacatcacggctattggacaagtcgcctagcgaattatgccatccagggtctcaatgctagaccgttgaatcctagagttttctcatccgctgcgctctgcgcatctgccgcgagagccaccatctccttgctgaagtatatcccacaaggtgacttttcgtgcgtctggatggcattatacttcccagtttctgcactggtcacattatttggaaatattctacaaaatccaaatgatcctcgggcacgatccgacacgcggctcatgaatctggtggtgaccttcttatccacgttaggtcaggaagcagagacgggcggtgtgtaccgcatgctaggcgtgtgttcggagttcgagcggattgccaaggctgtgattgataaagcagaaaaagaagcatcatcaagaagaaagagaaaaccaactgaactgactaagccggacaaccaccatggcccaccaaccgggctgtcctcgacgacaccgaggccctcgacctctggtgcaacaccgacgccaaacgctgcgaggttaaacgagaacggtacttcggatgtggctcagctctcgcccaagttcaacggagaacagaatcggcagaacaacgcagcaaatgcagcaacaccaaactcacaaatcagcggaaacggcagcacaaatggctacagccccatggaaacaacgcaagcggcaaacggcaccatgcctcagccttctagcgggtggccatctgaatcgttcgatccgactgatatggggttcgcagagctcaccggatttggacaagcggttacgtcgccctctgctatgttgaacatgatgggcatgggtggcgctgcgccggcgaaccgagggcctggagcgggcatgggatttaatccgtcgttaccgcaggacttgtggcagttgccgatgacgcttgattgggactgggctgagtttaccggtggaccgtatcctgggtttgagaacgggagtacgacgcagtgaacgcggttggagagactgggatgaagggcgacgctgtggaagtggtgatttatacgatatgagttcgttgatgataatgagataacgggccgggggaagatgcaatctgtgtatatgttatgattggtgattgggctctggattggagttggtttgatgatatacatattgttttttagcggtttttattctgagattggagcttttattgagttaaaatcttacgtatattgaaacccattacattagatacagag

SEQ ID NO: 29540 - DNA, 2823 bp, Muscodor strobelii
  misc_feature: SGI cDNA ID NO. 570147
  misc_feature: Reduced expression when VOC is produced
  misc_feature: Encodes the peptide sequence at SEQ ID NO 29541
atgtccaccatactgcgccggtcggctggcctcacgagggctgccacgcgctccctcgatgcctcgacccgaatcgccctccgatcgcagcgcatcctacgcaccacagccgccaccgcgccatggacgatgcagcctgcgcgatgctactccgctagcaagaaatcggacaacgaccccgagaagcccaagtccaccccctcagatcccgagatgaagagctcacactcccctggtcccacagaaggcgaagcaccagcctcgaacccctccgacagaactgaacagttaccattgccggatggctgggtgcgcatcgatgccaagcaggttgccgcaatggaagagctgctgcaagtcggttctggcccattggggaagctcctgggtgccggtacaaaacatacctctgcccaggtaatcgaaaccctccaacgagtcggagctcctgagaagctggctcagttcctgacggcccgtgtaaaggcgtatggcgacgaggcacacgacatgagcttcaagtccctatggcaagagatacctaaattaggggagatcgtgccggccctcaaccagcttatcgacaaggcccaagatctcgagagcgcgggcgaactccgctcaagtccgaatcctagatcgccttctcagagttacaagaatgcttcctccagaaagaagtccagaaatgagagccagaccaatgagaacaagaagggcgaagaagccgccgacggcgagcagagccccaagctcggcgacaagggcttccggtccaacccgcagccagacccgaacaacaacggaaatggaggaggagacaccggcaacaacttctggggctccatcgtcgtcagtatggtcatctactgggcatggtcctccatgttccccagcgagacaggccgagagatcacgtggcaggaactcaggaagaacttcctcgacaaaggtcttgtcgagaagatggtcgtctccggccacaccgtctacgtcgagctcaacaaggacgccgtccagtctatctatcccgattcagctgccacgcggcccggcttccggtaccacttcaatattgcctcggtcgatgcctttgagaaacgactagacgatgctcagcaagaactcggaatccccagtaccgatagaattcccgtgagttattctggcgagagcaatggtatgaacctgctcttagcctttggtcctaccctcatgattgtcggtctgctctactatgctagtcgccgtggcccaggaggaggtggtggcggtgccggtggaatcttcggcttcagtaagagcaaggccaagcgtttcagtcaagagacggccgtcaaggtcaagttctccgatgtcgccggtatggacgaggcgaagcaggagatcatggagttcgtcagcttcctacagaagccagacaagttccaaaggctgggcgccaagatcccccgtggtgccattctcgctgggccccctggtaccggtaagacgctgcttgccaaagccacagctggcgaatccggcgtgcctttcttcagcgtcagcggttccgaattcgtagagatgttcgtcggtgtgggtgcttccagagtacgcgacttgtttgccactgcccgtaaaaatgctccctgtattatcttcatcgatgagatcgacgccattggtagatcacgttctgaaggtcaacgatttggcggcaatgatgaacgagaagctactttgaaccagattctcactgagatggatggtttcaatacgacagagcagattgtggttcttgctggtactaaccgagcagatattcttgacaaggctttgatgcgacctggacgatttgatcgacacatcaatattgatgctccgaccatggaaggccgcaaagacattttcaaggtttacctcaagaagatcgtcacgagtgaggatatggagtatctaagtggccgacttgcatcgttgacgccgggcttcgctggcgctgatatcgccaactgcgtgaacgaagccgctctcatcgctgcgagaaccaatgctcccactgtgatacttaagcacttcgagcaagccattgaacgtgtcattggcggccttgagcggaaatcactggtgctcaacccagtcgagaagaagactgttgcctaccacgaggccggccacgctatctgcggctggttcttccggtatgccgatcctttactgaaagtatccatcattcctcgtggcaagggtctcggctacgcacagtacctacctggcgatgcctacctcatgagctaccatcaactcatggaccgaatggccatgaccctcggtggtcgcatatcagaagaactccatttctccaccgtgaccacgggcgctagcgacgatttctccaaagtcacggccatggccacgcgcatggtcacgcaatggggcatgtccgacaaagtcgggcctctgcacttccagaacgacgagggccggattcagaagccgttctctgagacgacggggcagatgatcgatgaagaggtcaaacgcattgtggatgaggcctataagcagtgcaaggatctactggtggagaagaagaaggaagtcggcatcattgccgaggaactccttacgaaggaggtcctggttagggatgacatgattcgtctcctgggacctagacccttcgatgatagacaggagtttaccaagtactttggtggcgagcagccgaaacctactgatcctactgagcccccgacgagcccgagtttagatgatacgcctgagccgccgcctgcggctccggctgcttttgagaaattggatggaaatgagaggtga

SEQ ID NO: 29541 - protein, 940 aa, Muscodor strobelii
  misc_feature: SGI Peptide ID NO. 570147
  misc_feature (486)..(676): Pfam Id: PF00004 Pfam Desc: ATPase family associated with various cellular activities (AAA)
  misc_feature (303)..(460): Pfam Id: PF06480 Pfam Desc: FtsH Extracellular
  misc_feature (683)..(883): Pfam Id: PF01434 Pfam Desc: Peptidase family M41
  misc_feature (201)..(917): NCBI GI: 146413306 Blast Desc: PGUG_05644 [Pichia guilliermondii ATCC 6260]
  misc_feature (233)..(905): NCBI GI: 254567361 Blast Desc: Mitochondrial respiratory chain complexes assembly protein RCA1 [Pichia pastoris GS115] gi|238030587|emb|CAY68511.1| Mitochondrial respiratory chain complexes assembly protein RCA1
  misc_feature (302)..(904): NCBI GI: 260943786 Blast Desc: CLUG_03432 [Clavispora lusitaniae ATCC 42720] gi|238849840|gb|EEQ39304.1| CLUG_03432 [Clavispora lusitaniae ATCC 42720]
  misc_feature (276)..(899): NCBI GI: 71004758 Blast Desc: UM00898.1 [Ustilago maydis 521] gi|46096849|gb|EAK82082.1| UM00898.1 [Ustilago maydis 521]
  misc_feature (300)..(900): NCBI GI: 256273497 Blast Desc: Yta12p [Saccharomyces cerevisiae JAY291]
  misc_feature (300)..(900): NCBI GI: 259148663 Blast Desc: Yta12p [Saccharomyces cerevisiae EC1118]
  misc_feature (300)..(900): NCBI GI: 508233 Blast Desc: Rca1p [Saccharomyces cerevisiae]
  misc_feature (300)..(900): NCBI GI: 190408318 Blast Desc: SCRG_01979 [Saccharomyces cerevisiae RM11-1a]
  misc_feature (300)..(900): NCBI GI: 151946245 Blast Desc: ATPase [Saccharomyces cerevisiae YJM789]
  misc_feature (1)..(934): NCBI GI: 85081618 Blast Desc: NCU01479 [Neurospora crassa OR74A] gi|28917832|gb|EAA27520.1| NCU01479 [Neurospora crassa OR74A] gi|38566845|emb|CAE76151.1| matrix AAA protease MAP-1 [Neurospora
  misc_feature: Useful for introducing or modulating the production of volatile compounds
MSTILRRSAGLTRAATRSLDASTRIALRSQRILRTTAATAPWTMQPARCYSASKKSDNDPEKPKSTPSDPEMKSSHSPGPTEGEAPASNPSDRTEQLPLPDGWVRIDAKQVAAMEELLQVGSGPLGKLLGAGTKHTSAQVIETLQRVGAPEKLAQFLTARVKAYGDEAHDMSFKSLWQEIPKLGEIVPALNQLIDKAQDLESAGELRSSPNPRSPSQSYKNASSRKKSRNESQTNENKKGEEAADGEQSPKLGDKGFRSNPQPDPNNNGNGGGDTGNNFWGSIVVSMVIYWAWSSMFPSETGREITWQELRKNFLDKGLVEKMVVSGHTVYVELNKDAVQSIYPDSAATRPGFRYHFNIASVDAFEKRLDDAQQELGIPSTDRIPVSYSGESNGMNLLLAFGPTLMIVGLLYYASRRGPGGGGGGAGGIFGFSKSKAKRFSQETAVKVKFSDVAGMDEAKQEIMEFVSFLQKPDKFQRLGAKIPRGAILAGPPGTGKTLLAKATAGESGVPFFSVSGSEFVEMFVGVGASRVRDLFATARKNAPCIIFIDEIDAIGRSRSEGQRFGGNDEREATLNQILTEMDGFNTTEQIVVLAGTNRADILDKALMRPGRFDRHINIDAPTMEGRKDIFKVYLKKIVTSEDMEYLSGRLASLTPGFAGADIANCVNEAALIAARTNAPTVILKHFEQAIERVIGGLERKSLVLNPVEKKTVAYHEAGHAICGWFFRYADPLLKVSIIPRGKGLGYAQYLPGDAYLMSYHQLMDRMAMTLGGRISEELHFSTVTTGASDDFSKVTAMATRMVTQWGMSDKVGPLHFQNDEGRIQKPFSETTGQMIDEEVKRIVDEAYKQCKDLLVEKKKEVGIIAEELLTKEVLVRDDMIRLLGPRPFDDRQEFTKYFGGEQPKPTDPTEPPTSPSLDDTPEPPPAAPAAFEKLDGNER

SEQ ID NO: 29542 - DNA, 3555 bp, Muscodor strobelii
  misc_feature: SGI EST ID NO. CUFF.69924.0
  misc_feature: Variant of the nucleotide sequence at SEQ ID NO 29540
cataatcactcgttgccttgcagctgtgcggctaaccgcttcaggactagagcattggttgaagctttctcataatcaccacctttttccaacctcgccgagcggcgaagagcagcagtagtagcagtcattcatatccacaggggcaattcattccctccggccccttccacgacaccaacaccgccccacagcctgcccgacggtcgtgagagagctacgggagctgtttctgctttcatcacgccaattaccctcgccgacccggccgttggtcgactcatcacagccctcgccggccctccgaagctacctcgcataccgctgtcttttctcatcttcgccgcctcccaacaactccgcccgctcctcttcggtctggtcggtgcgaccacccatcgcccaccatgtccaccatactgcgccggtcggctggcctcacgagggctgccacgcgctccctcgatgcctcgacccgaatcgccctccgatcgcagcgcatcctacgcaccacagccgccaccgcgccatggacgatgcagcctgcgcgatgctactccgctagcaagaaatcggacaacgaccccgagaagcccaagtccaccccctcagatcccgagatgaagagctcacactcccctggtcccacagaaggcgaagcaccagcctcgaacccctccgacagaactgaacagttaccattgccggatggctgggtgcgcatcgatgccaagcaggttgccgcaatggaagagctgctgcaagtcggttctggcccattggggaagctcctgggtgccggtacaaaacatacctctgcccaggtaatcgaaaccctccaacgagtcggagctcctgagaagctggctcagttcctgacggcccgtgtaaaggcgtatggcgacgaggcacacgacatgagcttcaagtccctatggcaagagatacctaaattaggggagatcgtgccggccctcaaccagcttatcgacaaggcccaagatctcgagagcgcgggcgaactccgctcaagtccgaatcctagatcgccttctcagagttacaagaatgcttcctccagaaagaagtccagaaatgagagccagaccaatgagaacaagaagggcgaagaagccgccgacggcgagcagagccccaagctcggcgacaagggcttccggtccaacccgcagccagacccgaacaacaacggaaatggaggaggagacaccggcaacaacttctggggctccatcgtcgtcagtatggtcatctactgggcatggtcctccatgttccccagcgagacaggccgagagatcacgtggcaggaactcaggaagaacttcctcgacaaaggtcttgtcgagaagatggtcgtctccggccacaccgtctacgtcgagctcaacaaggacgccgtccagtctatctatcccgattcagctgccacgcggcccggcttccggtaccacttcaatattgcctcggtcgatgcctttgagaaacgactagacgatgctcagcaagaactcggaatccccagtaccgatagaattcccgtgagttattctggcgagagcaatggtatgaacctgctcttagcctttggtcctaccctcatgattgtcggtctgctctactatgctagtcgccgtggcccaggaggaggtggtggcggtgccggtggaatcttcggcttcagtaagagcaaggccaagcgtttcagtcaagagacggccgtcaaggtcaagttctccgatgtcgccggtatggacgaggcgaagcaggagatcatggagttcgtcagcttcctacagaagccagacaagttccaaaggctgggcgccaagatcccccgtggtgccattctcgctgggccccctggtaccggtaagacgctgcttgccaaagccacagctggcgaatccggcgtgcctttcttcagcgtcagcggttccgaattcgtagagatgttcgtcggtgtgggtgcttccagagtacgcgacttgtttgccactgcccgtaaaaatgctccctgtattatcttcatcgatgagatcgacgccattggtagatcacgttctgaaggtcaacgatttggcggcaatgatgaacgagaagctactttgaaccagattctcactgagatggatggtttcaatacgacagagcagattgtggttcttgctggtactaaccgagcagatattcttgacaaggctttgatgcgacctggacgatttgatcgacacatcaatattgatgctccgaccatggaaggccgcaaagacattttcaaggtttacctcaagaagatcgtcacgagtgaggatatggagtatctaagtggccgacttgcatcgttgacgccgggcttcgctggcgctgatatcgccaactgcgtgaacgaagccgctctcatcgctgcgagaaccaatgctcccactgtgatacttaagcacttcgagcaagccattgaacgtgtcattggcggccttgagcggaaatcactggtgctcaacccagtcgagaagaagactgttgcctaccacgaggccggccacgctatctgcggctggttcttccggtatgccgatcctttactgaaagtatccatcattcctcgtggcaagggtctcggctacgcacagtacctacctggcgatgcctacctcatgagctaccatcaactcatggaccgaatggccatgaccctcggtggtcgcatatcagaagaactccatttctccaccgtgaccacgggcgctagcgacgatttctccaaagtcacggccatggccacgcgcatggtcacgcaatggggcatgtccgacaaagtcgggcctctgcacttccagaacgacgagggccggattcagaagccgttctctgagacgacggggcagatgatcgatgaagaggtcaaacgcattgtggatgaggcctataagcagtgcaaggatctactggtggagaagaagaaggaagtcggcatcattgccgaggaactccttacgaaggaggtcctggttagggatgacatgattcgtctcctgggacctagacccttcgatgatagacaggagtttaccaagtactttggtggcgagcagccgaaacctactgatcctactgagcccccgacgagcccgagtttagatgatacgcctgagccgccgcctgcggctccggctgcttttgagaaattggatggaaatgagaggtgataccatgtacgtgtaaaataggggaaggtggagaagttgaaacttgtcctgttgtattctgtatatagggaagaaagaaagaaagaggaaaggttttgcggcgtatcatgctacaggttggacaggtcctggcgctattgttccgctgatatatctgtatctgtatccatattcgcaccttagatggcgcgaaagctctgctctatattcgaagaaagaatggaggaaaggaggaactccccacccttgtatacttatcctatgtcatattacactacgacaaatcataaaataaatataaatgtgaagatatgacattaaggag

SEQ ID NO: 29543 - DNA, 1803 bp, Muscodor strobelii
  misc_feature: SGI cDNA ID NO. 570148
  misc_feature: Encodes the peptide sequence at SEQ ID NO 29544
atgacggcgacaaaccccggcaccggaggcggcatcggtgcgacagatcaccacagcacacgttcgaaaattacaaaacgttccgccccgaaatggtggaagatccatcttttccggggtattatcaatgatatacgccgtcgcgcgccgtattattggagcgatttggcagatgcttgggattatagagttgtgcctgctaccatttatatgtatttcgctaatatcctgcctgctctggcttttagcttggatatgtttaccaagacggacatgcattatggggtcaatgaagtacttttggcgtctgtcctcggtgctgttgtgtttgctgttgcggcttgtcagccgcttgttattgtgggagtcactgggcctatcactgtgttcgattacacggtatacgatatcatctcgccgtcgggtacaaactacctatcattcatgtgctggattggtttatggtccgttgtactacactggattctggccataaccaactcctgcaactggctgaaatacgtgacgcggtttccgtgtgatatcttcggcttctatgtggctttcatctacctccagaaggggatacaagtcctcgagcgtttcggcaacggcccgtcattctatctatcgctatctgttgcattgctcgtcttcgccattgcgtacatctgtggagagctcggcaatgcatcagctctgttccgtcaccccgtacgtgtgttcttgaaggattatggaacgccacttacagtcattttctttaccgggtttgtacaccttgggcgtatgaaatctatcgagttggataaattgccgacaagtaggccattttcccccacggctgataggccttggcttgtcgatcccggagatataagtgtcggtgaggtctttgtcgcgttgccgttcgcaattttgttgaccgtgttgttttggtttgatcataatgtatcatcacttatcgcccaaggaacagagtttccacttcgaaaaccagcaggctttcactgggatctcttcctccttggccttaccacaggcgtagcaggcattctaggcctaccattccccaacggtctgattccacaagcccctttccacacggaatctctctgcgtgacaaaggtagagatagacgaagacaagaaaaatcagcaacaagagcaccattacacatataaacgtacccacgtagtcgaacaacgcttctcaaatcttgcacaaggtctgcttaccctcggaacggcaacaggaccgctcctcatcgtcctgcatctcattccccaggcagtacttgcgggattgttcttcatcatgggttaccaagcactggaagcaaacggtataacggcgaaaatcttattccttctccgagacaggaatctgacggccgcaaatcaccctctgaatcaaatcgagaggcggtgggtactctggctgtttgtggggatcgagttattcggattcggcgcaacgtttgccatcacgcagactattgctgcggtaggtttcccgattattattcttgctcttatccctgttagagcgttggtcttgccctatgttttcacggccaaggaattaggtatcttggatgcacctacagcgagtccgtatatcatggagggtattggaggtagttacggtggcgttgaggaagacgaggaaccggagagtacgagtagtggtgtgttggctggtgatgagtcgcttgttgaagaagggagacgggggctgggtgagaagaatgagggactacagaggagaaatcaggggaacagagatggtgaagaagtatag

SEQ ID NO: 29544 - protein, 600 aa, Muscodor strobelii
  misc_feature: SGI Peptide ID NO. 570148
  misc_feature (36)..(485): Pfam Id: PF00955 Pfam Desc: HCO3- transporter family
  misc_feature (37)..(178): Pfam Id: PF00955 Pfam Desc: HCO3- transporter family
  misc_feature (278)..(356): Pfam Id: PF00955 Pfam Desc: HCO3- transporter family
  misc_feature (18)..(596): NCBI GI: 46124875 Blast Desc: FG06815.1 [Gibberella zeae PH-1]
  misc_feature (15)..(560): NCBI GI: 169597583 Blast Desc: SNOG_01578 [Phaeosphaeria nodorum SN15] gi|160707552|gb|EAT91227.2| SNOG_01578 [Phaeosphaeria nodorum SN15]
  misc_feature (10)..(560): NCBI GI: 242784453 Blast Desc: anion exchange family protein [Talaromyces stipitatus ATCC 10500] gi|218720537|gb|EED19956.1| anion exchange family protein [Talaromyces stipitatus ATCC 10500]
  misc_feature (13)..(545): NCBI GI: 164429355 Blast Desc: NCU01480 [Neurospora crassa OR74A] gi|157073448|gb|EAA27521.2| NCU01480 [Neurospora crassa OR74A]
  misc_feature (13)..(545): NCBI GI: 38566846 Blast Desc: related to chloride-bicarbonate anion exchanger AE2 [Neurospora crassa]
  misc_feature (31)..(595): NCBI GI: 145232842 Blast Desc: An02g06580 [Aspergillus niger] gi|134056714|emb|CAL00656.1| protein product [Aspergillus niger]
  misc_feature (10)..(565): NCBI GI: 119491753 Blast Desc: anion exchange family protein [Neosartorya fischeri NRRL 181] gi|119411531|gb|EAW21474.1| anion exchange family protein [Neosartorya fischeri NRRL 181]
  misc_feature (10)..(576): NCBI GI: 70999628 Blast Desc: anion exchange family protein [Aspergillus fumigatus Af293] gi|66852168|gb|EAL92493.1| anion exchange family protein [Aspergillus fumigatus Af293] gi|159127544|gb|EDP52659.1| anion
  misc_feature (14)..(596): NCBI GI: 67537468 Blast Desc: AN4904.2 [Aspergillus nidulans FGSC A4] gi|40741792|gb|EAA60982.1| AN4904.2 [Aspergillus nidulans FGSC A4] gi|259482229|tpe|CBF76511.1| TPA: anion transporter nidulans
  misc_feature (10)..(594): NCBI GI: 119187443 Blast Desc: CIMG_03769 [Coccidioides immitis RS]
MTATNPGTGGGIGATDHHSTRSKITKRSAPKWWKIHLFRGIINDIRRRAPYYWSDLADAWDYRVVPATIYMYFANILPALAFSLDMFTKTDMHYGVNEVLLASVLGAVVFAVAACQPLVIVGVTGPITVFDYTVYDIISPSGTNYLSFMCWIGLWSVVLHWILAITNSCNWLKYVTRFPCDIFGFYVAFIYLQKGIQVLERFGNGPSFYLSLSVALLVFAIAYICGELGNASALFRHPVRVFLKDYGTPLTVIFFTGFVHLGRMKSIELDKLPTSRPFSPTADRPWLVDPGDISVGEVFVALPFAILLTVLFWFDHNVSSLIAQGTEFPLRKPAGFHWDLFLLGLTTGVAGILGLPFPNGLIPQAPFHTESLCVTKVEIDEDKKNQQQEHHYTYKRTHVVEQRFSNLAQGLLTLGTATGPLLIVLHLIPQAVLAGLFFIMGYQALEANGITAKILFLLRDRNLTAANHPLNQIERRWVLWLFVGIELFGFGATFAITQTIAAVGFPIIILALIPVRALVLPYVFTAKELGILDAPTASPYIMEGIGGSYGGVEEDEEPESTSSGVLAGDESLVEEGRRGLGEKNEGLQRRNQGNRDGEEV

SEQ ID NO: 29545 - DNA, 2177 bp, Muscodor strobelii
  misc_feature: SGI EST ID NO. CUFF.69864.0
  misc_feature: Variant of the nucleotide sequence at SEQ ID NO 29543
aaaagacggccgtatccatttcgttgatgcagcagccttgtcgagtcattttgacttatcaagccttttcgacttcgcgtcacaacctcgccctaggcgaagcctcgtgatgcgacgagactttaaatatcttccattttcgtaactcatcctatacagctatttctctgctatattgactcagcatttcatatattcgttatgaaatattgatatcgtcgttgtgattggtctaagaatcgctttgactgctccctcgtcgttatacaacatgacggcgacaaaccccggcaccggaggcggcatcggtgcgacagatcaccacagcacacgttcgaaaattacaaaacgttccgccccgaaatggtggaagatccatcttttccggggtattatcaatgatatacgccgtcgcgcgccgtattattggagcgatttggcagatgcttgggattatagagttgtgcctgctaccatttatatgtatttcgctaatatcctgcctgctctggcttttagcttggatatgtttaccaagacggacatgcattatggggtcaatgaagtacttttggcgtctgtcctcggtgctgttgtgtttgctgttgcggcttgtcagccgcttgttattgtgggagtcactgggcctatcactgtgttcgattacacggtatacgatatcatctcgccgtcgggtacaaactacctatcattcatgtgctggattggtttatggtccgttgtactacactggattctggccataaccaactcctgcaactggctgaaatacgtgacgcggtttccgtgtgatatcttcggcttctatgtggctttcatctacctccagaaggggatacaagtcctcgagcgtttcggcaacggcccgtcattctatctatcgctatctgttgcattgctcgtcttcgccattgcgtacatctgtggagagctcggcaatgcatcagctctgttccgtcaccccgtacgtgtgttcttgaaggattatggaacgccacttacagtcattttctttaccgggtttgtacaccttgggcgtatgaaatctatcgagttggataaattgccgacaagtaggccattttcccccacggctgataggccttggcttgtcgatcccggagatataagtgtcggtgaggtctttgtcgcgttgccgttcgcaattttgttgaccgtgttgttttggtttgatcataatgtatcatcacttatcgcccaaggaacagagtttccacttcgaaaaccagcaggctttcactgggatctcttcctccttggccttaccacaggcgtagcaggcattctaggcctaccattccccaacggtctgattccacaagcccctttccacacggaatctctctgcgtgacaaaggtagagatagacgaagacaagaaaaatcagcaacaagagcaccattacacatataaacgtacccacgtagtcgaacaacgcttctcaaatcttgcacaaggtctgcttaccctcggaacggcaacaggaccgctcctcatcgtcctgcatctcattccccaggcagtacttgcgggattgttcttcatcatgggttaccaagcactggaagcaaacggtataacggcgaaaatcttattccttctccgagacaggaatctgacggccgcaaatcaccctctgaatcaaatcgagaggcggtgggtactctggctgtttgtggggatcgagttattcggattcggcgcaacgtttgccatcacgcagactattgctgcggtaggtttcccgattattattcttgctcttatccctgttagagcgttggtcttgccctatgttttcacggccaaggaattaggtatcttggatgcacctacagcgagtccgtatatcatggagggtattggaggtagttacggtggcgttgaggaagacgaggaaccggagagtacgagtagtggtgtgttggctggtgatgagtcgcttgttgaagaagggagacgggggctgggtgagaagaatgagggactacagaggagaaatcaggggaacagagatggtgaagaagtatagagttcctcgagacaccgatatagtagaacaagatggtctctagtgtgtaatgcacaggacagtaatatcatagatgaattgccaattgaggcatagcacagcg

SEQ ID NO: 29546 - DNA, 2139 bp, Muscodor strobelii
  misc_feature: SGI cDNA ID NO. 570149
  misc_feature: Encodes the peptide sequence at SEQ ID NO 29547
atgctcgttactaggcacttcgacacggatcaaagccactggtcgagcaagtttgaggctgctttccacaagtcaaataactcacgcatgtccagctacgacagtccgctgtctacgcagcccgactggcaagggaactattcgtttatacctcccggggagagcagcatattcggatcctcgtttgagcaagtgtcgaccactggcaatgaaaatgacactgtttctcaaccacgttcatcaagcacgcataatagtaattccgaaagtcagcagactggcgctggcgatctgaactcgccgctgggtcgcagacacgccttggaccctctgggactacgccaatcaaaagcggaatccgaagctcggcgaccatcagacgtatccgagcccaactatacgatcaaatcagagattgaacatgaagagcctttaagctctccggtgcccgtgacggcaacgattgaaccaccttcctctggcggtgcggcacaatccgagccaagtcagattgttggccttggtattgagggcactggagatgccacgcttaccaaggatgaagaagatgaggaggtagtagaagatgaagatatgctagagggtgatggagacgttgaaggagaaggggaagatgaagcctcagcccaaccccagacagccgccgagcgcactgcagcgcgaagaaaaatgaaacgcttcaggcttacacaccagcaaacgcgatttctcatgagtgaatttgctaaacagccgcatccggatgcagcccatcgagaaagattgtcgcgcgaaataccaggcttaagcccgaggcaagtccaagtgtggttccagaacaggagagccaaaatcaagcgaatgacagctgacgatcgagatcgaatgataaaaatgcgtgctgtgcccgatgatttcgataatgtgcaagcattgcattcgccttacggagcggtgcatgcactgggcacacctgtcaaccccccatcagagtttgggtcttcttcctacacagatcatatcatgagaccgctactggtagacacaatgagacgggataatgatgatcatatatctcccacaggtctgagtccggcatttggcaacattggattttcccactcggggacaatgagcagctcagacatactttctcccctttcacctacatcaaccgaccgaggcttctactctagccacttgacgagtccactagccggctcaacacgaacttcgaatccctttgcaagacagaacagcctcgatgcaggattgcaactccattcccaatctcgacagagtatccgaccacttcagcccctctccctccgtgagacaatgtcaaggtcaagatccgataacttgcagtcaccgcttcgatcgagtatgtcatggaagggtgactctattgattactcgacatattcgggcggcagcggcagccctggtgctagcagacatacctcggtctaccaaccagaacacctcggcggtagctctgcgagcacattgggctatgattcgggtacattctcaggcacaggactgcaatcctcctcaaccaatatcaattattcaagcttacagcaaccatcgcagagccggtctcgcttgcgagcggcttctgcaacattgccgctgggtcttgacttgagacatcagtatcggtctgtgtctacgggacatggccttcagcctcctagccattcctctactactagagctggaagtattgcatcttatggcacatcgtctggttactccgctagctttccctccgcacctcttacggcgcctatcgatttttcgctcccaagaacaccaggaatcagaaacaccgttcatgattattctataccacaaatgagtgctcccattgcacccccacatgactttacgcaggctctgcatggaaacattggcacatcgacaactcgaacgccgataagggagacttttggcggtggaccactaaacatcagtcagaatcaaggatcgaatgacaaaaacgatgactttacacaagatgggcttaatggatcgagcgtaagcttgaaacgaaaacgcagctccttcagtctttctagttctcatgtatctggcccgcagagttcgcagccgtatggatacacgagttag

SEQ ID NO: 29547 - protein, 712 aa, Muscodor strobelii
  misc_feature: SGI Peptide ID NO. 570149
  misc_feature (232)..(287): Pfam Id: PF00046 Pfam Desc: Homeobox domain
  misc_feature (1)..(712): NCBI GI: 171692673 Blast Desc: protein product [Podospora anserina] gi|170946285|emb|CAP73086.1| protein product [Podospora anserina]
  misc_feature (1)..(690): NCBI GI: 39972271 Blast Desc: MGG_07437 [Magnaporthe grisea 70-15] gi|145016623|gb|EDK01053.1| MGG_07437 [Magnaporthe grisea 70-15]
  misc_feature (214)..(651): NCBI GI: 156065317 Blast Desc: SS1G_00669 [Sclerotinia sclerotiorum 1980] gi|154691528|gb|EDN91266.1| SS1G_00669 [Sclerotinia sclerotiorum 1980]
  misc_feature (203)..(689): NCBI GI: 85091178 Blast Desc: NCU09556 [Neurospora crassa OR74A] gi|28920159|gb|EAA29539.1| conserved [Neurospora crassa OR74A] gi|38566847|emb|CAE76153.1| [Neurospora crassa]
  misc_feature (1)..(407): NCBI GI: 116206258 Blast Desc: CHGG_02422 [Chaetomium globosum CBS 148.51] gi|88183019|gb|EAQ90487.1| CHGG_02422 [Chaetomium globosum CBS 148.51]
  misc_feature (30)..(494): NCBI GI: 154311247 Blast Desc: BC1G_06476 [Botryotinia fuckeliana B05.10] gi|150850873|gb|EDN26066.1| BC1G_06476 [Botryotinia fuckeliana B05.10]
  misc_feature (208)..(514): NCBI GI: 256730998 Blast Desc: NECHADRAFT_49051 [Nectria haematococca mpVI 77-13-4]
  misc_feature (219)..(506): NCBI GI: 46124869 Blast Desc: FG06812.1 [Gibberella zeae PH-1]
  misc_feature (279)..(690): NCBI GI: 261351695 Blast Desc: conserved [Verticillium albo-atrum VaMs.102]
  misc_feature (218)..(415): NCBI GI: 189205044 Blast Desc: conserved [Pyrenophora tritici-repentis Pt-1C-BFP] gi|187985956|gb|EDU51444.1| conserved [Pyrenophora tritici-repentis Pt-1C-BFP]
MLVTRHFDTDQSHWSSKFEAAFHKSNNSRMSSYDSPLSTQPDWQGNYSFIPPGESSIFGSSFEQVSTTGNENDTVSQPRSSSTHNSNSESQQTGAGDLNSPLGRRHALDPLGLRQSKAESEARRPSDVSEPNYTIKSEIEHEEPLSSPVPVTATIEPPSSGGAAQSEPSQIVGLGIEGTGDATLTKDEEDEEVVEDEDMLEGDGDVEGEGEDEASAQPQTAAERTAARRKMKRFRLTHQQTRFLMSEFAKQPHPDAAHRERLSREIPGLSPRQVQVWFQNRRAKIKRMTADDRDRMIKMRAVPDDFDNVQALHSPYGAVHALGTPVNPPSEFGSSSYTDHIMRPLLVDTMRRDNDDHISPTGLSPAFGNIGFSHSGTMSSSDILSPLSPTSTDRGFYSSHLTSPLAGSTRTSNPFARQNSLDAGLQLHSQSRQSIRPLQPLSLRETMSRSRSDNLQSPLRSSMSWKGDSIDYSTYSGGSGSPGASRHTSVYQPEHLGGSSASTLGYDSGTFSGTGLQSSSTNINYSSLQQPSQSRSRLRAASATLPLGLDLRHQYRSVSTGHGLQPPSHSSTTRAGSIASYGTSSGYSASFPSAPLTAPIDFSLPRTPGIRNTVHDYSIPQMSAPIAPPHDFTQALHGNIGTSTTRTPIRETFGGGPLNISQNQGSNDKNDDFTQDGLNGSSVSLKRKRSSFSLSSSHVSGPQSSQPYGYTS

SEQ ID NO: 29548 - DNA, 2539 bp, Muscodor strobelii
  misc_feature: SGI EST ID NO. CUFF.69886.0
  misc_feature: Variant of the nucleotide sequence at SEQ ID NO 29546
gagcaagtttgaggctgctttccacaagtcaaataactcacgcatgtccagctacgacagtccgctgtctacgcagcccgactggcaagggaactattcgtttatacctcccggggagagcagcatattcggatcctcgtttgagcaagtgtcgaccactggcaatgaaaatgacactgtttctcaaccacgttcatcaagcacgcataatagtaattccgaaagtcagcagactggcgctggcgatctgaactcgccgctgggtcgcagacacgccttggaccctctgggactacgccaatcaaaagcggaatccgaagctcggcgaccatcagacgtatccgagcccaactatacgatcaaatcagagattgaacatgaagagcctttaagctctccggtgcccgtgacggcaacgattgaaccaccttcctctggcggtgcggcacaatccgagccaagtcagattgttggccttggtattgagggcactggagatgccacgcttaccaaggatgaagaagatgaggaggtagtagaagatgaagatatgctagagggtgatggagacgttgaaggagaaggggaagatgaagcctcagcccaaccccagacagccgccgagcgcactgcagcgcgaagaaaaatgaaacgcttcaggcttacacaccagcaaacgcgatttctcatgagtgaatttgctaaacagccgcatccggatgcagcccatcgagaaagattgtcgcgcgaaataccaggcttaagcccgaggcaagtccaagtgtggttccagaacaggagagccaaaatcaagcgaatgacagctgacgatcgagatcgaatgataaaaatgcgtgctgtgcccgatgatttcgataatgtgcaagcattgcattcgccttacggagcggtgcatgcactgggcacacctgtcaaccccccatcagagtttgggtcttcttcctacacagatcatatcatgagaccgctactggtagacacaatgagacgggataatgatgatcatatatctcccacaggtctgagtccggcatttggcaacattggattttcccactcggggacaatgagcagctcagacatactttctcccctttcacctacatcaaccgaccgaggcttctactctagccacttgacgagtccactagccggctcaacacgaacttcgaatccctttgcaagacagaacagcctcgatgcaggattgcaactccattcccaatctcgacagagtatccgaccacttcagcccctctccctccgtgagacaatgtcaaggtcaagatccgataacttgcagtcaccgcttcgatcgagtatgtcatggaagggtgactctattgattactcgacatattcgggcggcagcggcagccctggtgctagcagacatacctcggtctaccaaccagaacacctcggcggtagctctgcgagcacattgggctatgattcgggtacattctcaggcacaggactgcaatcctcctcaaccaatatcaattattcaagcttacagcaaccatcgcagagccggtctcgcttgcgagcggcttctgcaacattgccgctgggtcttgacttgagacatcagtatcggtctgtgtctacgggacatggccttcagcctcctagccattcctctactactagagctggaagtattgcatcttatggcacatcgtctggttactccgctagctttccctccgcacctcttacggcgcctatcgatttttcgctcccaagaacaccaggaatcagaaacaccgttcatgattattctataccacaaatgagtgctcccattgcacccccacatgactttacgcaggctctgcatggaaacattggcacatcgacaactcgaacgccgataagggagacttttggcggtggaccactaaacatcagtcagaatcaaggatcgaatgacaaaaacgatgactttacacaagatgggcttaatggatcgagcgtaagcttgaaacgaaaacgcagctccttcagtctttctagttctcatgtatctggcccgcagagttcgcagccgtatggatacacgagttaggcgatatggtactaggtgaacgagtacaaccattttgggtcgaccagacatgccctttcaacctaggcagtgccgaggctaattgcagctggggtatcttttatttctttccaggatatcactttttcaaacataatacccattttgcgacgagactattatttcacaaacctgtgttactataactttacgaaatttacgctttatgatggtgttggtataaccggcaggctgtaaggatgggcctttggtaaaaacaaagctcttacggatgggaatatcggctttcgcaatttctaccaaaagacgataaaaataattatcgacacatgttggcgagaccctgctgagcaaataatgcttgatacgggacatggaatgacaacacgactaagaaataccaggaccgatgtctttgacttatttcgcaaaaatcaaatcacc

SEQ ID NO: 29549 - DNA, 3783 bp, Muscodor strobelii
  misc_feature: SGI cDNA ID NO. 570150
  misc_feature: Encodes the peptide sequence at SEQ ID NO 29550
atggctccggcaccggcagctttgccacagaagtttccttgctggtgtagagctgtctattcatggggaggagagtcaacgcgggatctcggatttatcgaaggagacttgatcgaagcccttaatgcgggagacgggtcgtggtggacggggaggctgcgccgtaacaaaactgttggctctttcccgtccaacttcgtcgaggtgctgccagatagctttcgcccggtcagccgatcaataagccccttgacctcgagcaacacaccgagtccgacgagcagcttgcagaagacgaagaccaaggcctttcgcaagcccttcgaggcgtatgcaaaagcaccgcactacactacggccaagcagccagagatcatacgcaatgatgccaggaccacctccaacacaccgccaagacagggctcaggcagctctttccgacatggtgtgcgtcgtgacaacaccagtcgacatgccgctacacctcccgacgcccgagggtatgatgcacgagctccctctccagcgcctccgaccagagaccactaccaccaacgcgccccgtcgcctgctcctccacagcataccaataactatcatcatccacgagctctatctccggcgcctcctcctcctccaagcagccacacaaatccctatggaccacccgcgagccttgtcgcccggtcctccgtcaatgcagtaccattcccgtgccccttctcctgctccatcccatcgtcgccttactatggtcaccgtgctccgtcgcctgcgccgccgccagtgcatcattatggatcgcgaagcccatcacctgcgcctctccagtctcagatgtacgaggcaagagctccttcgccggcaccctcgttcagtttcaagccctatcggcctggagcagagcgtgactcgcctcctccaccagctccacctccgcaccgcaaccttctcaatcggggtaactcgaatgcctcatatgatgagagatctcaacagccgtaccatactccgcacacacccagggcgcctactccgagagctccgtcaccggctggcgctggcttcacaccgtcacctcttcgtgaggccatggacggcgtcatcgagcaactagatgcattaggcatgccccgagagggcggatcttcaggtccaggcttcgatccatggtcccctgagtcttttgatctcgtccatcaccgatcaagaaagaaggaacggcagaggccgatgacatcgatgggacttgcgcaccaggattccggttatgaatcgtacgggggatcttcgcaagaaaacacgacgaacggcagttacggagatgaaccacatctaccacaactaagtgattatgtcgagagaatggagactcgactacgacagatgcaccagcacagcgcaagtgtaggtgcccttcatcaggatgaagattcgatgccaccgcctacgcccctcaagggcctccagtcgagccgtccaaaatcgtcaatgggcgatgagtcccgctcaaggcgcttccttcggaaacaaaagtcctcctacgacgtcagtcagctcgatagaacagcaactacgaagacgaactcgacaaactcatcgtctggcaatcgtagcacggcgaccaattctaccaaccgaagcctgatgagtggaatatctgcaggtggaattagcgcaactagtgccggcagtcttgctaggaaaaatgaccgcgcgcgtagtgctatgggtttccgtgacggtgaggaggattgggatggcaatcgcccgacaacgcccttttctggtgtatcttatcaccccagtcattccacatcagcaatgagaccacagtcacaaatggggctcgcggaacaaggaattgcggcggttggtggtctagtatcacccggcggcgtcaaaccaaagaagtcaaatttcatcaagagaatcctggaagcaaccaaaactggagttgcgaccggtcgcagtagtatagcgactagtcctgcagcttttcaatccctggctgcgacacgaagctcgcaaaatctgacagccatcgcaggcgggcctagcgtgaccaacctcggacgagatgctgctcgggatatgggattgagcagtggtgtggattgggttcaggttcgacgagacgtgaatagatccaacactttgagcagaaacgaatgcaacgagagacgagaccggtgccaaatgatggattatcccgccatcgatcctgttgatgagctttacgaatcagtccaaggagacgagggtgcagatgggtatccagttcgggagcccgtcaactatcagactctcaaccttagccaagtagacaagaactcacgattcgtaaacaatctaccccagatgacgaccgcaatcaccctggcaacgacttacgtctgccgaccatatagaagcgatgttcaacgtcttcgagccatatttgtctgggttgctgaacaaattcattgggaggaagacttcgaaggagaagtagatacccgtcgcgtcatctcgtcgaaacgaggatgcgcagaggaatacgctgtcttggtcaatgagatgtgcgctgccattggaatacactctgagattgtccgaggctacctcaagacgccaggtgaagtcccagaggcaaacatcatgccacggccaaatcactggtggaatgccgtcatcatcgacaacgagtggcgcatgatggattgttgtctcgcgagcccctctaacccacgccgtggtctatactctaatgtcggaagtgggaccgctgacttcttttggttccttactcagcctacagagctatgctggacgcacattcctgaacatcattcccaacaacatatatgtcctccagcagctcatgaaaccttgctcaacttacctggtgcttgtccaccattcttcaagaacagtctcgccatggtcgactacaacacatcacttactcggatcgaggatcttgagatggtacacgtcaaatttaacgtacccgaggacgtggaaatagctgccgaagtcgaagtccgagcctatacacgggactccgatgatgatttcttcgaaagcggggacacggtcaaaaagcgtgcattagcccaagcagagtggtttaatggagtcaagcggtacacagtcaaagcccttctccccggcgacgaaggaacaggaattctaaaggtctacgccgggaagcgcggtctcatgcacagcatcaaagatattcctcatcccatggcatttgccattccaattatccatacgggtgagaacccgccgtatgaattcgtcacgaggcatcctacaccgcatgcgcaacgccatgatatctatgtggtgcagccgcaatgccaacgcttggcacttaataataccttcgtttttgctattcggcaacacccttcgagtacggggaatgcaccgagtagtaatccgggcgggacgagtccggtgccgtttgcgagaccgacgagcgcgatgagtatgactagtagcgctgctgcgtcggcgccgagctcagcgacggggagtattgccggaaagaagccggcgaagttggctatccagacaccgggtgggaagatcttgagattgatgaggaaggaggagaggagagggattagtgttggggggaggaatgctggcgcgaatgatgaggttagtgatggaggcacgtgggagacgattatcaagtgctccgaagaaggagtatggaggggcttggtactggcggatcgtacggccagatggtgtgttttcgctgagtgggtttgcatgaagtaa

SEQ ID NO: 29550 - protein, 1260 aa, Muscodor strobelii
  misc_feature: SGI Peptide ID NO. 570150
  misc_feature (14)..(70): Pfam Id: PF00018 Pfam Desc: SH3 domain
  misc_feature (15)..(70): Pfam Id: PF07653 Pfam Desc: Variant SH3 domain
  misc_feature (1)..(1258): NCBI GI: 145607085 Blast Desc: MGG_12117 [Magnaporthe grisea 70-15] gi|145014683|gb|EDJ99251.1| MGG_12117 [Magnaporthe grisea 70-15]
  misc_feature (1)..(1237): NCBI GI: 46125931 Blast Desc: FG07343.1 [Gibberella zeae PH-1]
  misc_feature (1)..(1258): NCBI GI: 116198035 Blast Desc: CHGG_07173 [Chaetomium globosum CBS 148.51] gi|88178452|gb|EAQ85920.1| CHGG_07173 [Chaetomium globosum CBS 148.51]
  misc_feature (11)..(1235): NCBI GI: 256731378 Blast Desc: NECHADRAFT_105311 [Nectria haematococca mpVI 77-13-4]
  misc_feature (25)..(1258): NCBI GI: 85099857 Blast Desc: NCU04095 [Neurospora crassa OR74A] gi|28922386|gb|EAA31621.1| [Neurospora crassa OR74A]
  misc_feature (25)..(1258): NCBI GI: 28950370 Blast Desc: related to SH3-domain protein Cyk3 [Neurospora crassa]
  misc_feature (129)..(1258): NCBI GI: 171693947 Blast Desc: protein product [Podospora anserina] gi|170946922|emb|CAP73726.1| protein product [Podospora anserina]
  misc_feature (1)..(1259): NCBI GI: 261351615 Blast Desc: cytokinesis protein Cyk3 [Verticillium albo-atrum VaMs.102]
  misc_feature (1)..(1259): NCBI GI: 154319091 Blast Desc: BC1G_02497 [Botryotinia fuckeliana B05.10] gi|150856928|gb|EDN32120.1| BC1G_02497 [Botryotinia fuckeliana B05.10]
  misc_feature (1)..(1259): NCBI GI: 240277640 Blast Desc: SH3 domain-containing protein [Ajellomyces capsulatus H143]
MAPAPAALPQKFPCWCRAVYSWGGESTRDLGFIEGDLIEALNAGDGSWWTGRLRRNKTVGSFPSNFVEVLPDSFRPVSRSISPLTSSNTPSPTSSLQKTKTKAFRKPFEAYAKAPHYTTAKQPEIIRNDARTTSNTPPRQGSGSSFRHGVRRDNTSRHAATPPDARGYDARAPSPAPPTRDHYHQRAPSPAPPQHTNNYHHPRALSPAPPPPPSSHTNPYGPPASLVARSSVNAVPFPCPFSCSIPSSPYYGHRAPSPAPPPVHHYGSRSPSPAPLQSQMYEARAPSPAPSFSFKPYRPGAERDSPPPPAPPPHRNLLNRGNSNASYDERSQQPYHTPHTPRAPTPRAPSPAGAGFTPSPLREAMDGVIEQLDALGMPREGGSSGPGFDPWSPESFDLVHHRSRKKERQRPMTSMGLAHQDSGYESYGGSSQENTTNGSYGDEPHLPQLSDYVERMETRLRQMHQHSASVGALHQDEDSMPPPTPLKGLQSSRPKSSMGDESRSRRFLRKQKSSYDVSQLDRTATTKTNSTNSSSGNRSTATNSTNRSLMSGISAGGISATSAGSLARKNDRARSAMGFRDGEEDWDGNRPTTPFSGVSYHPSHSTSAMRPQSQMGLAEQGIAAVGGLVSPGGVKPKKSNFIKRILEATKTGVATGRSSIATSPAAFQSLAATRSSQNLTAIAGGPSVTNLGRDAARDMGLSSGVDWVQVRRDVNRSNTLSRNECNERRDRCQMMDYPAIDPVDELYESVQGDEGADGYPVREPVNYQTLNLSQVDKNSRFVNNLPQMTTAITLATTYVCRPYRSDVQRLRAIFVWVAEQIHWEEDFEGEVDTRRVISSKRGCAEEYAVLVNEMCAAIGIHSEIVRGYLKTPGEVPEANIMPRPNHWWNAVIIDNEWRMMDCCLASPSNPRRGLYSNVGSGTADFFWFLTQPTELCWTHIPEHHSQQHICPPAAHETLLNLPGACPPFFKNSLAMVDYNTSLTRIEDLEMVHVKFNVPEDVEIAAEVEVRAYTRDSDDDFFESGDTVKKRALAQAEWFNGVKRYTVKALLPGDEGTGILKVYAGKRGLMHSIKDIPHPMAFAIPIIHTGENPPYEFVTRHPTPHAQRHDIYVVQPQCQRLALNNTFVFAIRQHPSSTGNAPSSNPGGTSPVPFARPTSAMSMTSSAAASAPSSATGSIAGKKPAKLAIQTPGGKILRLMRKEERRGISVGGRNAGANDEVSDGGTWETIIKCSEEGVWRGLVLADRTARWCVFAEWVCMK

SEQ ID NO: 29551 - DNA, 1902 bp, Muscodor strobelii
  misc_feature: SGI cDNA ID NO. 570151
  misc_feature: Encodes the peptide sequence at SEQ ID NO 29552
atgtcagaccatggggcgagcgcggatcccgccgccaggtacacggtgcttgaagaactaggccgcggtagtttcggggtcgtttacaaagccatcgacagggagaccggcggaactgtcgctatcaagcatgtcgacctagaagcgagctcggacgatatcgacgatatacaacttgagatttcacttctcagcacgtgttcatcgctgtatgttacacagtattatactagctttgtcaaggggactaagctgtggatcgtcatggagtacctcggaggcggatcgtgtcacgatctgctaatgccagaccccggacgattcactgaagcccagatcgctatcatctgtcgtgagcttctgcatgggctcgtatacctccacgctggaggcaagatccatcgtgatattaaagccgccaatgtgctggtatccgacgatggcaaagtcaagctggccgatttcggagtggctgcccagctcaccacccacactaaccgccacacctttgttgggacaccattttggatgtccccggaagttatcagggctgagaatggccagaatggctaccataacaaggcagacatttggtctcttggcattaccgtgatagagatggcactaggcgagcctccacatgcgcaaaaagcgccctacagagcgctttttgaaattgagagttcaccatcgccaaggctggagggtcctttctctaaggaaatgaaggacttcgtcagccagtgcgtgatgaaagacccgaatcagagaccatcggctaagaccctgctctctcaccgcttcgtgcgctcggcgggtaaagtggaattgttgctagagcttattaacaggaagcgctactgggatgcgactaagacccgcaaacgccaccggccatattatcaggaaacactgaaggacttgtcgccaaaagacgaacaggatgaatgggtctttgatactgtaaagtcagttgccccgaaggaggagatggcaaggtccaggaagccttcgtccatcttgtctaccgaggacgcattccagcgcatggatatcaaggatgcgcctctccagctatctcctcaagcaccggcaaccgtacgacgcacaatgcgtagaccgctgtcgatcgcatccacccgcggccctgccttacgacgccctcttcagccagacctatcattcggtaatagcggatcatctcaacggctgttcaagagagtcccttcagatgggtccaactctggccgagtctcaccaagcccattcgacgagaacccagacgatgataaacaacctaaggctgccagtaccaacagcaaggaagctcgccttggtcgacgtatgtatacaaaagctcttgaacctacgttgtcggagctgcatgcccagacatccagccaggccaagagagaagccttggcaaagttgtctgatgcttttgccgcgctggatagtgttgatcccgaaggggcttaccatctgctccgcaatcttaatgctacgatagcagaagacaccaagctctctggcgcctttctcagtggcgcatcctcgactaagggcccaatcgtgtcggatactccacaaggcacggtcatcattaagagtgctgcatcagccaatccacacttgagtcccacgaagcttgttctggcggacaacaatccgcatctgaagagtcatagacgccgtcaaagtgcgttgtgcactcctactggcagcccccagaaggcttcccgtcaagagcgggacgttgaaggcggcgcagagaagtcggcaatccaggcgagatatccgggtcagatggtgcagcccggtatggagcattgtcagaagatatctgaccagctctacagtcgctggattgacggcttgcgcgtccgttggcctggtaaataa

SEQ ID NO: 29552 - protein, 633 aa, Muscodor strobelii
  misc_feature: SGI Peptide ID NO. 570151
  misc_feature (14)..(269): Pfam Id: PF00069 Pfam Desc: Protein kinase domain
  misc_feature (14)..(269): Pfam Id: PF07714 Pfam Desc: Protein tyrosine kinase
  misc_feature (1)..(632): NCBI GI: 46125933 Blast Desc: FG07344.1 [Gibberella zeae PH-1]
  misc_feature (1)..(632): NCBI GI: 256730987 Blast Desc: [Nectria haematococca mpVI 77-13-4]
  misc_feature (1)..(632): NCBI GI: 171693945 Blast Desc: protein product [Podospora anserina] gi|170946921|emb|CAP73725.1| protein product [Podospora anserina]
  misc_feature (1)..(630): NCBI GI: 116198033 Blast Desc: CHGG_07172 [Chaetomium globosum CBS 148.51] gi|88178451|gb|EAQ85919.1| CHGG_07172 [Chaetomium globosum CBS 148.51]
  misc_feature (1)..(577): NCBI GI: 85099861 Blast Desc: NCU04096 [Neurospora crassa OR74A] gi|28922387|gb|EAA31622.1| NCU04096 [Neurospora crassa OR74A] gi|28950369|emb|CAD71024.1| related to Ste20-like kinase Don3
  misc_feature (1)..(631): NCBI GI: 156062300 Blast Desc: SS1G_01266 [Sclerotinia sclerotiorum 1980] gi|154696602|gb|EDN96340.1| SS1G_01266 [Sclerotinia sclerotiorum 1980]
  misc_feature (13)..(631): NCBI GI: 154319089 Blast Desc: BC1G_02496 [Botryotinia fuckeliana B05.10] gi|150856927|gb|EDN32119.1| BC1G_02496 [Botryotinia fuckeliana B05.10]
  misc_feature (11)..(558): NCBI GI: 145607087 Blast Desc: MGG_12118 [Magnaporthe grisea 70-15] gi|145014684|gb|EDJ99252.1| MGG_12118 [Magnaporthe grisea 70-15]
  misc_feature (8)..(632): NCBI GI: 119499105 Blast Desc: Mst3-like protein kinase, [Neosartorya fischeri NRRL 181] gi|119414474|gb|EAW24413.1| Mst3-like protein kinase, [Neosartorya fischeri NRRL 181]
  misc_feature (5)..(632): NCBI GI: 242791628 Blast Desc: Mst3-like protein kinase, [Talaromyces stipitatus ATCC 10500] gi|218718384|gb|EED17804.1| Mst3-like protein kinase, [Talaromyces stipitatus ATCC 10500]
  misc_feature (8)..(340): SWISSPROT Homolog: EC 2.7.11.1 Non-specific serine/threonine protein kinase
MSDHGASADPAARYTVLEELGRGSFGVVYKAIDRETGGTVAIKHVDLEASSDDIDDIQLEISLLSTCSSLYVTQYYTSFVKGTKLWIVMEYLGGGSCHDLLMPDPGRFTEAQIAIICRELLHGLVYLHAGGKIHRDIKAANVLVSDDGKVKLADFGVAAQLTTHTNRHTFVGTPFWMSPEVIRAENGQNGYHNKADIWSLGITVIEMALGEPPHAQKAPYRALFEIESSPSPRLEGPFSKEMKDFVSQCVMKDPNQRPSAKTLLSHRFVRSAGKVELLLELINRKRYWDATKTRKRHRPYYQETLKDLSPKDEQDEWVFDTVKSVAPKEEMARSRKPSSILSTEDAFQRMDIKDAPLQLSPQAPATVRRTMRRPLSIASTRGPALRRPLQPDLSFGNSGSSQRLFKRVPSDGSNSGRVSPSPFDENPDDDKQPKAASTNSKEARLGRRMYTKALEPTLSELHAQTSSQAKREALAKLSDAFAALDSVDPEGAYHLLRNLNATIAEDTKLSGAFLSGASSTKGPIVSDTPQGTVIIKSAASANPHLSPTKLVLADNNPHLKSHRRRQSALCTPTGSPQKASRQERDVEGGAEKSAIQARYPGQMVQPGMEHCQKISDQLYSRWIDGLRVRWPGK

SEQ ID NO: 29553 - DNA, 2058 bp, Muscodor strobelii
  misc_feature: SGI EST ID NO. CUFF.69945.0
  misc_feature: Variant of the nucleotide sequence at SEQ ID NO 29551
caagcatgtcgacctagaagcgagctcggacgatatcgacgatatacaacttgagatttcacttctcagcacgtgttcatcgctctaatgccagaccccggacgattcactgaagcccagatcgctatcatctgtcgtgagcttctgcatgggctcgtatacctccacgctggaggcaagatccatcgtgatattaaagccgccaatgtgctggtatccgacgatggcaaagtcaagctggccgatttcggagtggctgcccagctcaccacccacactaaccgccacacctttgttgggacaccattttggatgtccccggaagttatcagggctgagaatggccagaatggctaccataacaaggcagacatttggtctcttggcattaccgtgatagagatggcactaggcgagcctccacatgcgcaaaaagcgccctacagagcgctttttgaaattgagagttcaccatcgccaaggctggagggtcctttctctaaggaaatgaaggacttcgtcagccagtgcgtgatgaaagacccgaatcagagaccatcggctaagaccctgctctctcaccgcttcgtgcgctcggcgggtaaagtggaattgttgctagagcttattaacaggaagcgctactgggatgcgactaagacccgcaaacgccaccggccatattatcaggaaacactgaaggacttgtcgccaaaagacgaacaggatgaatgggtctttgatactgtaaagtcagttgccccgaaggaggagatggcaaggtccaggaagccttcgtccatcttgtctaccgaggacgcattccagcgcatggatatcaaggatgcgcctctccagctatctcctcaagcaccggcaaccgtacgacgcacaatgcgtagaccgctgtcgatcgcatccacccgcggccctgccttacgacgccctcttcagccagacctatcattcggtaatagcggatcatctcaacggctgttcaagagagtcccttcagatgggtccaactctggccgagtctcaccaagcccattcgacgagaacccagacgatgataaacaacctaaggctgccagtaccaacagcaaggaagctcgccttggtcgacgtatgtatacaaaagctcttgaacctacgttgtcggagctgcatgcccagacatccagccaggccaagagagaagccttggcaaagttgtctgatgcttttgccgcgctggatagtgttgatcccgaaggggcttaccatctgctccgcaatcttaatgctacgatagcagaagacaccaagctctctggcgcctttctcagtggcgcatcctcgactaagggcccaatcgtgtcggatactccacaaggcacggtcatcattaagagtgctgcatcagccaatccacacttgagtcccacgaagcttgttctggcggacaacaatccgcatctgaagagtcatagacgccgtcaaagtgcgttgtgcactcctactggcagcccccagaaggcttcccgtcaagagcgggacgttgaaggcggcgcagagaagtcggcaatccaggcgagatatccgggtcagatggtgcagcccggtatggagcattgtcagaagatatctgaccagctctacagtcgctggattgacggcttgcgcgtccgttggcctggtaaataagccaccctcctgctttccccccatctccttggatatgcaaatcgcatatcgctacttaatgaatgtttggtatatgggttgcatactcacacaaaaagttgcccatgttgttggaatatgatgtttggctagtgtttgacgtataagagtggaagtctgtgaacatggttggcgttttacggttgcataggaatgcattgcgtggcggtggcgtcttttgcctttgattgttttattgtaggagtagtcgagatagatgcgaaccaaaagctgtagtaatgagatgatatggtttactgaaaatattatatagtagccggtgacttaagtgacgccataaagcgtgacaggctggtgagagttgaactgcaa

SEQ ID NO: 29554 - DNA, 1425 bp, Muscodor strobelii
  misc_feature: SGI cDNA ID NO. 570152
  misc_feature: Encodes the peptide sequence at SEQ ID NO 29555
atggcagacacgtccgaatctgagccaagctctggtggcagtagccaaaaggcgccacttcctacgtggatcgagccagagccatttgatattgagtctattccagaattgggcgataaagttcgctacaaacctctggattatggactcatgcgagccgcagcaatggaacctgaggggtcagaaaagcggcgctgtcgagatgcagagattatcaaacgtgccaagtatcttacttggaatgacacagtgatcagaggtttgaattatgcacgagctgatttcgttaactaccaaaacctcgtcaaagaagttgagttctgctcaggcaatatattccgagaagccccagactggagtcggaacgtttactacagacgtaatgaatttaaggttcgaaaagaaaactatgcaccaaatcctcttttagagcgcctaccagaaaaatggttggcgaagacattccgccttgaaagtggtcagccaaatcctgaggactctgtcatggagctctctcagtgggacgcgccacacgtcaacgcagggcatttgaacccaatctgggagtcatggattaagactgagtgggaaacgacgcacaaggcaagggcccagatggtaatccgatgcattaaaaacatcaaaaacccacagaaaatcaagaaatttatgtgcatcggactaggcagacttgcgacgcacaatttggtcctcgacagaaccaccaacaaagtgaagcacgacgaaaatggcggaattattcctatgtccccctttaacatcgcgcagcacgtgatcgcggtcaagatggtagagcaacttgaagaaataacaggaaataagattgaactctacggtgctgaccccatgtacgatatctaccatgaggagttcctcaagactaagggcttcacgaagttctttgatacatcttacgacgcacaagaacattggccacacatcgacgacgaaactttcgtcttcagtagcaaccccggattcagtcctgttaagttattggtcctggaatattgtcgaccagcagccatgattatgattaagccgttaagtggggagaacaacaaagactatccagctggcccaaccgagaaagacgacaagggtcttcctctgtacccacatgatgcccagtggatagaggtccgaagagacccgagctcgtacccgggctcgttcgagaagatagcaattccttattctcgggagggccgagaggtcgctagagcaatgtgtgattatgttgaggaaaaggagcttaaaatagaggagcctaacctgtggtggtctcataatgagggtatgttcaacatgtacgtccggaaggatttgacagttgaggcgagtatcgacaaaaatggcagcgacaaagatggcagcgagaaacagagcacccacacgaagtaa

SEQ ID NO: 29555 - protein, 474 aa, Muscodor strobelii
  misc_feature: SGI Peptide ID NO. 570152
  misc_feature (211)..(351): NCBI GI: 238506369 Blast Desc: conserved [Aspergillus flavus NRRL3357] gi|220689099|gb|EED45450.1| conserved [Aspergillus flavus NRRL3357]
  misc_feature (211)..(351): NCBI GI: 169785375 Blast Desc: [Aspergillus oryzae RIB40] gi|83775896|dbj|BAE66015.1| protein product [Aspergillus oryzae]
MADTSESEPSSGGSSQKAPLPTWIEPEPFDIESIPELGDKVRYKPLDYGLMRAAAMEPEGSEKRRCRDAEIIKRAKYLTWNDTVIRGLNYARADFVNYQNLVKEVEFCSGNIFREAPDWSRNVYYRRNEFKVRKENYAPNPLLERLPEKWLAKTFRLESGQPNPEDSVMELSQWDAPHVNAGHLNPIWESWIKTEWETTHKARAQMVIRCIKNIKNPQKIKKFMCIGLGRLATHNLVLDRTTNKVKHDENGGIIPMSPFNIAQHVIAVKMVEQLEEITGNKIELYGADPMYDIYHEEFLKTKGFTKFFDTSYDAQEHWPHIDDETFVFSSNPGFSPVKLLVLEYCRPAAMIMIKPLSGENNKDYPAGPTEKDDKGLPLYPHDAQWIEVRRDPSSYPGSFEKIAIPYSREGREVARAMCDYVEEKELKIEEPNLWWSHNEGMFNMYVRKDLTVEASIDKNGSDKDGSEKQSTHTK

SEQ ID NO: 29556 - DNA, 2235 bp, Muscodor strobelii
  misc_feature: SGI cDNA ID NO. 570153
  misc_feature: Reduced expression when VOC is produced
  misc_feature: Encodes the peptide sequence at SEQ ID NO 29557
atggcctctatgcggctgtccgccattgccgcggcccttgtgctccagttggtatcggcgagtcttatcccaagggtaacaacgagtcttgcctctatcgcgccgccaggaagcaacacgtccacgctgcccggctcatgggcttattatggatgctacactgaaggcagcaatggcgcccgagcattgatgaaacagcaaccggacagcagcaatctcacgatcgagtcttgcgtcgacacttgtattgccgccggttacagcgtggcggggatggaatatgcagtccagtgtttttgtgacaacttcttgcgcaacggcgccaatttgacgagcgagacggattgtaatatgccttgcccgggcgatgcttcggaagactgcggtgctggtaatcgactctctatttactctaatgactcgatcgtcgtttttcaacctccttcccccttgaccgataaccttcccggatcttgggagtatgtcgggtgtgttattgactccatcgacgcccgcgttctgccttatatgagcatagacgagcagaatgccactatcgaggcctgtatcgccgggtgcagtcagtttggctataacgccggtggtgttgagtatggttaccaatgcttttgtggcgatcagacggccatcaccaaggcgccagaggccgactgcaacgtggcctgcccaggcgacgctcaccatctctgcggcggcgggaataggataagctactacgaatggacaggcacaccccttacatcatggtcctacgcgcaaggcaacgcagcggggagctacgactttctcatgtctgccccccttttaccactcattagcgtagttgggataaataacaaggttgtcctcgtcgagaagcacggcacgcaggtctacgataacagcagcggctcgttcgagttcgatccgtccctcgccccccagtacggtacggcgttccgcgagctcttgctcaagacggacgttttttgctctgcgtccctggtcttacctgataaggcgggacgccagatcaacgtcggcgggtggtcggttgattctttgtacggtgtacgactcttcacgccagaaatgggtttaggagtcaatggtacaaataactgggaggagaacgttgagacgctgtccctcctcgacgcccgttggtatccgactgccatgacattgagcaacgggtctattctcgtaataggtggcgagaacggttccgacgggcccatggtaccgacctgcgagattctgccgcgccctgcgggcgtcacgaactcgacttatctcgactacctgcagaatgtcgaaaagataaactcgtaccccttcatcgccgtcttgccgtcaggcgacctgttcttcgcacaatacaacgaggcccgggtgatatcacagaccagcttcgagacgattcggatgctccctcagatgccaggagccgtaaacaacccggaatcgggacgcaactaccctcttcagggcactatgactctgctgccgcagtatgccccctataccgatccgcttaccgtacttatctgtggtggaacgaccgatggcgcaaatttcgctcttgacaactgcatctccacccagcctgaagtcactgatgctgaatgggttgttgagagaatgccctcgactcgagtcatgccaaacatggtcactttacctgatgggcgctcattgattctgaacggtgccgtcaatggccgcgccgggttcggcctcgcgcacaacgggaacaggggcgctgtgctctacgatccgagcaagcgtgtcggctcccgcatgacgcagctcgccaacacgactatatcgcgcttgtatcactccgaggcggtgctcatgcccgacggccgtgttctcgtgtcaggctctgaccctcaggaccaaatcaaccccggaggagtaccgactcgagtacttctcgccagactacgtgctctcggtcaaatcaaaatctcactcatcgcggctttcgggtcgacccatgggaacagcatgggccagcgtactcttttccccgagtttagttgttccggtggcgcctgcaccgttacggcgccccctaactcgcggatcagcccaccggcttggtaccagatgtttgtcttgaatggccctacgcccagccattcggtctgggttcgtattggtggtgatccggctgccattggtaactggcctaatttgcctgggtttactcaccctggcgtctaa

SEQ ID NO: 29557 - protein, 744 aa, Muscodor strobelii
  misc_feature: SGI Peptide ID NO. 570153
  misc_feature (625)..(723): Pfam Id: PF09118 Pfam Desc: Domain of function (DUF1929)
  misc_feature (49)..(130): Pfam Id: PF01822 Pfam Desc: WSC domain
  misc_feature (161)..(239): Pfam Id: PF01822 Pfam Desc: WSC domain
  misc_feature (657)..(723): Pfam Id: PF09118 Pfam Desc: Domain of function (DUF1929)
  misc_feature (25)..(744): NCBI GI: 156055692 Blast Desc: SS1G_05198 [Sclerotinia sclerotiorum 1980] gi|154702982|gb|EDO02721.1| SS1G_05198 [Sclerotinia sclerotiorum 1980]
  misc_feature (40)..(743): NCBI GI: 89113931 Blast Desc: copper radical oxidase [Phanerochaete chrysosporium]
  misc_feature (21)..(744): NCBI GI: 189196512 Blast Desc: copper radical oxidase [Pyrenophora tritici-repentis Pt-1C-BFP] gi|187980473|gb|EDU47099.1| copper radical oxidase [Pyrenophora tritici-repentis Pt-1C-BFP]
  misc_feature (41)..(744): NCBI GI: 89113933 Blast Desc: copper radical oxidase [Phanerochaete chrysosporium]
  misc_feature (43)..(744): NCBI GI: 169863293 Blast Desc: CC1G_04712 [Coprinopsis cinerea okayama7#130] gi|116500561|gb|EAU83456.1| CC1G_04712 [Coprinopsis cinerea okayama7#130]
  misc_feature (43)..(744): NCBI GI: 170104262 Blast Desc: [Laccaria bicolor S238N-H82] gi|164641798|gb|EDR06057.1| [Laccaria bicolor S238N-H82]
  misc_feature (44)..(744): NCBI GI: 261355977 Blast Desc: WSC domain-containing protein [Verticillium albo-atrum VaMs.102]
  misc_feature (31)..(743): NCBI GI: 89113929 Blast Desc: copper radical oxidase [Phanerochaete chrysosporium]
  misc_feature (32)..(744): NCBI GI: 39952025 Blast Desc: MGG_01655 [Magnaporthe grisea 70-15] gi|145020503|gb|EDK04632.1| MGG_01655 [Magnaporthe grisea 70-15]
  misc_feature (19)..(744): NCBI GI: 38567019 Blast Desc: related to glyoxal oxidase precursor [Neurospora crassa]
  misc_feature: Useful for introducing or modulating the production of volatile compounds
MASMRLSAIAAALVLQLVSASLIPRVTTSLASIAPPGSNTSTLPGSWAYYGCYTEGSNGARALMKQQPDSSNLTIESCVDTCIAAGYSVAGMEYAVQCFCDNFLRNGANLTSETDCNMPCPGDASEDCGAGNRLSIYSNDSIVVFQPPSPLTDNLPGSWEYVGCVIDSIDARVLPYMSIDEQNATIEACIAGCSQFGYNAGGVEYGYQCFCGDQTAITKAPEADCNVACPGDAHHLCGGGNRISYYEWTGTPLTSWSYAQGNAAGSYDFLMSAPLLPLISVVGINNKVVLVEKHGTQVYDNSSGSFEFDPSLAPQYGTAFRELLLKTDVFCSASLVLPDKAGRQINVGGWSVDSLYGVRLFTPEMGLGVNGTNNWEENVETLSLLDARWYPTAMTLSNGSILVIGGENGSDGPMVPTCEILPRPAGVTNSTYLDYLQNVEKINSYPFIAVLPSGDLFFAQYNEARVISQTSFETIRMLPQMPGAVNNPESGRNYPLQGTMTLLPQYAPYTDPLTVLICGGTTDGANFALDNCISTQPEVTDAEWVVERMPSTRVMPNMVTLPDGRSLILNGAVNGRAGFGLAHNGNRGAVLYDPSKRVGSRMTQLANTTISRLYHSEAVLMPDGRVLVSGSDPQDQINPGGVPTRVLLARLRALGQIKISLIAAFGSTHGNSMGQRTLFPEFSCSGGACTVTAPPNSRISPPAWYQMFVLNGPTPSHSVWVRIGGDPAAIGNWPNLPGFTHPGV

SEQ ID NO: 29558 - DNA, 3233 bp, Muscodor strobelii
  misc_feature: SGI EST ID NO. CUFF.70112.1
  misc_feature: Variant of the nucleotide sequence at SEQ ID NO 29556
cttgggtccttggtgttgttgggctcgggtattaagatcgataatgagatatataataccccctcgagatccgctgtgatcgaccagtttcatgtcggtcatcacactcgttttttggtcattttttggccagtagtaccctgtcgtcatggcctctatgcggctgtccgccattgccgcggcccttgtgctccagttggtatcggcgagtcttatcccaagggtaacaacgagtcttgcctctatcgcgccgccaggaagcaacacgtccacgctgcccggctcatgggcttattatggatgctacactgaaggcagcaatggcgcccgagcattgatgaaacagcaaccggacagcagcaatctcacgatcgagtcttgcgtcgacacttgtattgccgccggttacagcgtggcggggatggaatatgcagtccagtgtttttgtgacaacttcttgcgcaacggcgccaatttgacgagcgagacggattgtaatatgccttgcccgggcgatgcttcggaagactgcggtgctggtaatcgactctctatttactctaatgactcgatcgtcgtttttcaacctccttcccccttgaccgataaccttcccggatcttgggagtatgtcgggtgtgttattgactccatcgacgcccgcgttctgccttatatgagcatagacgagcagaatgccactatcgaggcctgtatcgccgggtgcagtcagtttggctataacgccggtggtgttgagtatggttaccaatgcttttgtggcgatcagacggccatcaccaaggcgccagaggccgactgcaacgtggcctgcccaggcgacgctcaccatctctgcggcggcgggaataggataagctactacgaatggacaggcacaccccttacatcatggtcctacgcgcaaggcaacgcagcggggagctacgactttctcatgtctgccccccttttaccactcattagcgtagttgggataaataacaaggttgtcctcgtcgagaagcacggcacgcaggtctacgataacagcagcggctcgttcgagttcgatccgtccctcgccccccagtacggtacggcgttccgcgagctcttgctcaagacggacgttttttgctctgcgtccctggtcttacctgataaggcgggacgccagatcaacgtcggcgggtggtcggttgattctttgtacggtgtacgactcttcacgccagaaatgggtttaggagtcaatggtacaaataactgggaggagaacgttgagacgctgtccctcctcgacgcccgttggtatccgactgccatgacattgagcaacgggtctattctcgtaataggtggcgagaacggttccgacgggcccatggtaccgacctgcgagattctgccgcgccctgcgggcgtcacgaactcgacttatctcgactacctgcagaatgtcgaaaagataaactcgtaccccttcatcgccgtcttgccgtcaggcgacctgttcttcgcacaatacaacgaggcccgggtgatatcacagaccagcttcgagacgattcggatgctccctcagatgccaggagccgtaaacaacccggaatcgggacgcaactaccctcttcagggcactatgactctgctgccgcagtatgccccctataccgatccgcttaccgtacttatctgtggtggaacgaccgatggcgcaaatttcgctcttgacaactgcatctccacccagcctgaagtcactgatgctgaatgggttgttgagagaatgccctcgactcgagtcatgccaaacatggtcactttacctgatgggcgctcattgattctgaacggtgccgtcaatggccgcgccgggttcggcctcgcgcacaacgggaacaggggcgctgtgctctacgatccgagcaagcgtgtcggctcccgcatgacgcagctcgccaacacgactatatcgcgcttgtatcactccgaggcggtgctcatgcccgacggccgtgttctcgtgtcaggctctgaccctcaggaccaaatcaaccccggaggagtaccgactcgagtacttctcgccagactacgtgctctcgggtgctgcgcgtcctacgttcacgattgagaacactgattgggcgtacggtgagaccgtgccattcacgatcacatccgctgttgtttctagtcaaatcaaaatctcactcatcgcggctttcgggtcgacccatgggaacagcatgggccagcgtactcttttccccgagtttagttgttccggtggcgcctgcaccgttacggcgccccctaactcgcggatcagcccaccggcttggtaccagatgtttgtcttgaatggccctacgcccagccattcggtctgggttcgtattggtggtgatccggctgccattggtaactggcctaatttgcctgggtttactcaccctggcgtctaatttaaacggtctagctggatgaaggattacgtgttcgtcaagactttctgccaagaatatcgaaaaacgcttttctgagcaactctcttgtcgaatcccatgtgatcaatttgccaacatgtattgtccgtattcatgcgtcatttgattgaggatggatgttctctttctaagcttagagatgcaaaggctgatctaagccgcctggcaccgtcggtctggctcggcatctgtggtgaaatcgaccgggcccttgaaagaacttggtcgtatccgggccgagatcatttttgaagagccgcctgaagtcgatcgacccccaaagtttcctagaatcgctgataggatatgtcgtaacctttgatgaggggcccgtcatccaaaagttcgtcacgttaccccatagaaacgcgaaaggcgtcagagcggacagcgacagcgtctcatgcatcctgacctgcttcttttgtcaatgacatccaggaaatgcccgatgatattcccaattgagcagatgagaatgagcgcgagagtcttctgcgtaattcggcctcttagccatcgtcattgacatgtgccaagccatcaggtatgaggtttgcaactaattgcaagagcgagtttcacgaaaccgcatcacatatcctcgcttctaagtgccttgcagtattctacaattactattaatcattactatatactctatacatttaatatgtgacaagcctttataagattatatgcaaaagaattccgtgg

SEQ ID NO: 29559 - DNA, 2103 bp, Muscodor strobelii
  misc_feature: SGI cDNA ID NO. 570154
  misc_feature: Reduced expression when VOC is produced
  misc_feature: Encodes the peptide sequence at SEQ ID NO 29560
atgtcaaagaaatccacggccgtcaaggaggcggtcaaggagtccctcttgggctccgaagagcctgtcaacttgtctgttggcagcaaggcaatcttcttcaacaacgcaaagaaggacaaggactcaggtgaccatgttttgggccgagaggagttcatcgaagccattgcgccctcagatgaagactattccaagatccatcgcgaacagtaccagatcctcttcaatgtcgccgaccgtgctcagcatggccagatcacctaccaggactgggctgctttcataaaccttcttaacaaagcagatgctgaatacgagattgcattccgccttttcgatgtcgatagaacgggcaccgttaagtatgaggacttcagacgtctctacgagctgaacaagggcgagggtgccatcccatttgactgggactctgaatgggccaagctctacattggtgacaagaccaaacgccacaatcttacataccccgagttctcccagatgttgcgtggtcttcagggtgagcgtattcgtcaagctttccagcgcttcgacaagaacaaagatggctacattgagcccgagcagtttgcccagatcatcctcgagtcggccaagcacaagctgtccgaccaccttctcgagaacctcacttccctctgcaatatctcgaccggcagcaagatctcatacgccaacgttcgagccttccagaatatgatcaaggagatggatctggtcgagctcatcattcgtaaggctatcagccgcagcacggacggacgcatcacacgcaccgagttcctcaacgaagctgccaagattactcgattttccttcttcaccccgatggaggccgacatcctgttccacttcgctagtctggacgagccatccggacgacttggtcttcaggactttgcgaaggtcttggaccctcaatggaccaaccgtggcgtctccgacgactctgtagctgcagcccagaaagccaagtcgactacccagaccgctcttctcaaggttgccgagtcagcctacggctttgttctcggtagtttggctggtgcttttggtgcattcatggtttatcctatagatctcgtcaaaacccgcatgcagaaccagcgcggtgccgaccccggacagcaactgtacaagaactcaattgactgctttagaaaagtcgtagccaatgagggtttccgtggtctgtactcgggcgtgctgcctcagctggttggcgttgcaccagagaaggctatcaagcttacggtaaacgatcttgtccgtggtgtcttcacagataagaagactggacaaattggtcttccatacgagattctcgccggtggcagtgccggtgcctgtcaagtcgtctttaccaacccacttgagattgtcaagattcgacttcaagtccagggagaggtcgtgaaggcaagtgaaggtgctgctcagaagcggtccgccatgtggattgttaagaacttgggcctggcgggcctctataagggcgcgtctgcctgtcttctccgagatgttccattctctatgatctacttcccgacctacagtcacttgaagaaggatttgttcggtgaatcacccaccaagaagctaggtgttctgcagcttcttactgctggtgccatcgctggtatgcctgcggcctatcttacgaccccctgtgatgttatcaagacccgtctacaagttgaagctcgtaagggagacactcagtacactggtctgcgtcacgccgccaagactatattgaaagaggaaggcttcaaagctttctttaagggcggtccggctcgtattttccgctcgtctcctcaattcggtttcactctggccgcatacgaagtcctgcagagtgtcttccctttccccggcaagtcgaagcaggagcaggtccacactggtgttgctgaggttgtccacaccatgagagagaaggacattgcatcgcctcacgcccgcagccgtaacgccctgaagatcattctcgacatcgatgagaacttcggccgtttccaaaacggtgatgataagtcgtggaaagcccttccacgacttatgggaggaaaataa

SEQ ID NO: 29560 - protein, 700 aa, Muscodor strobelii
  misc_feature: SGI Peptide ID NO. 570154
  misc_feature (177)..(205): Pfam Id: PF00036 Pfam Desc: EF hand
  misc_feature (345)..(439): Pfam Id: PF00153 Pfam Desc: Mitochondrial carrier protein
  misc_feature (543)..(635): Pfam Id: PF00153 Pfam Desc: Mitochondrial carrier protein
  misc_feature (444)..(537): Pfam Id: PF00153 Pfam Desc: Mitochondrial carrier protein
  misc_feature (105)..(133): Pfam Id: PF00036 Pfam Desc: EF hand
  misc_feature (4)..(697): NCBI GI: 171692297 Blast Desc: protein product [Podospora anserina] gi|170946097|emb|CAP72898.1| protein product [Podospora anserina]
  misc_feature (1)..(700): NCBI GI: 116206762 Blast Desc: conserved [Chaetomium globosum CBS 148.51] gi|88183271|gb|EAQ90739.1| conserved [Chaetomium globosum CBS 148.51]
  misc_feature (5)..(697): NCBI GI: 85103807 Blast Desc: NCU01241 [Neurospora crassa OR74A] gi|12718261|emb|CAC28650.1| mitochondrial carrier protein ARALAR1 [Neurospora crassa] gi|28923154|gb|EAA32371.1| NCU01241 crassa
  misc_feature (4)..(697): NCBI GI: 261351500 Blast Desc: calcium-binding mitochondrial carrier protein Aralar1 [Verticillium albo-atrum VaMs.102]
  misc_feature (9)..(699): NCBI GI: 156041190 Blast Desc: SS1G_11574 [Sclerotinia sclerotiorum 1980] gi|154695957|gb|EDN95695.1| SS1G_11574 [Sclerotinia sclerotiorum 1980]
  misc_feature (6)..(699): NCBI GI: 154299528 Blast Desc: BC1G_11026 [Botryotinia fuckeliana B05.10] gi|150857368|gb|EDN32560.1| BC1G_11026 [Botryotinia fuckeliana B05.10]
  misc_feature (4)..(700): NCBI GI: 145612339 Blast Desc: MGG_07066 [Magnaporthe grisea 70-15] gi|145019526|gb|EDK03754.1| MGG_07066 [Magnaporthe grisea 70-15]
  misc_feature (1)..(699): NCBI GI: 46125507 Blast Desc: FG07131.1 [Gibberella zeae PH-1]
  misc_feature (1)..(699): NCBI GI: 256731315 Blast Desc: [Nectria haematococca mpVI 77-13-4]
  misc_feature (8)..(694): NCBI GI: 119189315 Blast Desc: CIMG_04705 [Coccidioides immitis RS] gi|240111282|gb|EER29435.1| Mitochondrial carrier family protein [Coccidioides posadasii C735 delta SOWgp]
  misc_feature: Useful for introducing or modulating the production of volatile compounds
MSKKSTAVKEAVKESLLGSEEPVNLSVGSKAIFFNNAKKDKDSGDHVLGREEFIEAIAPSDEDYSKIHREQYQILFNVADRAQHGQITYQDWAAFINLLNKADAEYEIAFRLFDVDRTGTVKYEDFRRLYELNKGEGAIPFDWDSEWAKLYIGDKTKRHNLTYPEFSQMLRGLQGERIRQAFQRFDKNKDGYIEPEQFAQIILESAKHKLSDHLLENLTSLCNISTGSKISYANVRAFQNMIKEMDLVELIIRKAISRSTDGRITRTEFLNEAAKITRFSFFTPMEADILFHFASLDEPSGRLGLQDFAKVLDPQWTNRGVSDDSVAAAQKAKSTTQTALLKVAESAYGFVLGSLAGAFGAFMVYPIDLVKTRMQNQRGADPGQQLYKNSIDCFRKVVANEGFRGLYSGVLPQLVGVAPEKAIKLTVNDLVRGVFTDKKTGQIGLPYEILAGGSAGACQVVFTNPLEIVKIRLQVQGEVVKASEGAAQKRSAMWIVKNLGLAGLYKGASACLLRDVPFSMIYFPTYSHLKKDLFGESPTKKLGVLQLLTAGAIAGMPAAYLTTPCDVIKTRLQVEARKGDTQYTGLRHAAKTILKEEGFKAFFKGGPARIFRSSPQFGFTLAAYEVLQSVFPFPGKSKQEQVHTGVAEVVHTMREKDIASPHARSRNALKIILDIDENFGRFQNGDDKSWKALPRLMGGK

SEQ ID NO: 29561 - DNA, 4185 bp, Muscodor strobelii
  misc_feature: SGI EST ID NO. CUFF.69973.1
  misc_feature: Variant of the nucleotide sequence at SEQ ID NO 29559
ccgtattaaaaagcggctctcattatgtttatctcaactacatcccttgcatgctggcctctgttgaacatacatccaacagcgcaacgcatatgctgtatcttctgttgtcacacatttgtgtctccaacaacaaccatgatcaaaactgccgagggcagccgggcccactacagcgagacaaacccgggttcggcaatacttggagaggcttttatagccaaagagttgtgtttccccaagttttctctcgtaacaactctcctctcttcaatctcaagttagagtgtgaactagtctaacaaaattcagagccacaaaatcgctgtcacaccactgaattccacacaaaggagccttgtccaaatttccagagcataaccatcggtgtatcatgatattgtctgacaaattgaggtcagcaatgacactccaggtggatctgataacagaacacatcatgctttgtgctatctgtgacgaagacagacttgtttagggcgcgctctgccaaagagtcttcatctcggatgtctttctgcgatcgatcaggcgagacacccttcatgatgagacaacccagatggctcgacaagtctacttcacatacttggtagttagcaatattccaggatttcggatcaaaggatacgtactggttctaggttcaagctgttcaagatgatcgccaggaacaccaacgctgatagcgcggggcttcccgcttccattcagcttctagcgggattccacttccggctctccagcaaatttggcctgggcatgggggcgtgccccatctcgtggtctccaaagccccgaataggcatggcgcaacggacggagggacgctaggagaaatcacgcccccacgaggactctaaactccgccatcttcggcaagttcggatagaccgttatcgatcagatatgcaacaagacggtcttgcccagctccctggcgccccttctcatcgggaatatgcttatcctggcggtcaggcgccccaatcagcgccgataggaagacaaggatgggtgccgtgcagatgcaatcgcgacctgcagttggtggttcagctcgatgaggcaactttcagctcaccgcccagcgctgagagcacagctagacccctacctcacacctggtcttctgcaggcttcgtcttgcgcagattggctggtgtggtaagaaagtttttgaggtcttactcgtcctctagcgtctcccttttatcgcggacaacatcgtcttttgcctcaagcatctgcacatctcccctctattatctgcgctgtggccagtatatcatactgccgcgtctttcacttcgtctgcctttagttgcctttctgcattctgcagtcccgtatcggggctctattcccgaacgcctccgagttgttgagcccgtgcagcacccactcctttagtcggagctccacaggatcctctcacattgtgggcgcttgagcattcgcattctctcattgcattcactacatacgcaagagggcatttccatcctttcgcccgttgatcccagtcaacagtcaccatcacgctaggagcttgattccctttggagcagcctctcttgtgtgttgtgtcgaatttcagccgccccttccgtaccctctgaccctgatcctcgcgtcgtaccttcacttgatttcgtcgcgagcttagacagcctgtcctcctagacccaattgcgtcgtcgtcatgtcaaagaaatccacggccgtcaaggaggcggtcaaggagtccctcttgggctccgaagagcctgtcaacttgtctgttggcagcaaggcaatcttcttcaacaacgcaaagaaggacaaggactcaggtgaccatgttttgggccgagaggagttcatcgaagccattgcgccctcagatgaagactattccaagatccatcgcgaacagtaccagatcctcttcaatgtcgccgaccgtgctcagcatggccagatcacctaccaggactgggctgctttcataaaccttcttaacaaagcagatgctgaatacgagattgcattccgccttttcgatgtcgatagaacgggcaccgttaagtatgaggacttcagacgtctctacgagctgaacaagggcgagggtgccatcccatttgactgggactctgaatgggccaagctctacattggtgacaagaccaaacgccacaatcttacataccccgagttctcccagatgttgcgtggtcttcagggtgagcgtattcgtcaagctttccagcgcttcgacaagaacaaagatggctacattgagcccgagcagtttgcccagatcatcctcgagtcggccaagcacaagctgtccgaccaccttctcgagaacctcacttccctctgcaatatctcgaccggcagcaagatctcatacgccaacgttcgagccttccagaatatgatcaaggagatggatctggtcgagctcatcattcgtaaggctatcagccgcagcacggacggacgcatcacacgcaccgagttcctcaacgaagctgccaagattactcgattttccttcttcaccccgatggaggccgacatcctgttccacttcgctagtctggacgagccatccggacgacttggtcttcaggactttgcgaaggtcttggaccctcaatggaccaaccgtggcgtctccgacgactctgtagctgcagcccagaaagccaagtcgactacccagaccgctcttctcaaggttgccgagtcagcctacggctttgttctcggtagtttggctggtgcttttggtgcattcatggtttatcctatagatctcgtcaaaacccgcatgcagaaccagcgcggtgccgaccccggacagcaactgtacaagaactcaattgactgctttagaaaagtcgtagccaatgagggtttccgtggtctgtactcgggcgtgctgcctcagctggttggcgttgcaccagagaaggctatcaagcttacggtaaacgatcttgtccgtggtgtcttcacagataagaagactggacaaattggtcttccatacgagattctcgccggtggcagtgccggtgcctgtcaagtcgtctttaccaacccacttgagattgtcaagattcgacttcaagtccagggagaggtcgtgaaggcaagtgaaggtgctgctcagaagcggtccgccatgtggattgttaagaacttgggcctggcgggcctctataagggcgcgtctgcctgtcttctccgagatgttccattctctatgatctacttcccgacctacagtcacttgaagaaggatttgttcggtgaatcacccaccaagaagctaggtgttctgcagcttcttactgctggtgccatcgctggtatgcctgcggcctatcttacgaccccctgtgatgttatcaagacccgtctacaagttgaagctcgtaagggagacactcagtacactggtctgcgtcacgccgccaagactatattgaaagaggaaggcttcaaagctttctttaagggcggtccggctcgtattttccgctcgtctcctcaattcggtttcactctggccgcatacgaagtcctgcagagtgtcttccctttccccggcaagtcgaagcaggagcaggtccacactggtgttgctgaggttgtccacaccatgagagagaaggacattgcatcgcctcacgcccgcagccgtaacgccctgaagatcattctcgacatcgatgagaacttcggccgtttccaaaacggtgatgataagtcgtggaaagcccttccacgacttatgggaggaaaataatggaattaacttgctttgaacgaatttcctctgtcttacattatagagacatctagaggtaaacccttgcatgtggccggcgtttaagatttggcaaggaaaaagagccttgtatttgcttctaccttttttgctttttttgttgtacactaggtgacgttcttgtcacattcagaaggaggattcttgccatacacagagagacttcttgccagattcaaggggttctagtcatacccaagaggattcttgctatactcgagaggattatcgccatactcagtaggatcgagtagtaacagcaggatcaagtggatacgataacatcaggaataggatgttctacaatgagtttc

SEQ ID NO: 29562 - DNA, 2130 bp, Muscodor strobelii
  misc_feature: SGI cDNA ID NO. 570155
  misc_feature: Encodes the peptide sequence at SEQ ID NO 29563
atggccactaccaataacaacaacaccaacgagcaacacctcactgcccgaaccctccatcaacgccacaagtccacaggaaacctcaacatggtggcctctgctgctgctggcaatatgaatgtggctgccaagcgtactgcgttcggagatcgcaaccgaatccctcctctggatctgagagacatcgagaagaatggcgagcctggcgtcaagtacacccacaggcgtgtcgccggtgtaatagtctctaccagccaagagaaccagcctctcgtcaaccagaaggacgctgtgaagaaagcacttcttcagcccgcccagcgcctttctcggccagacccttccctcgccaaatttcgacctcatctgacaaatcgagctagtgtgtcgacattcagaccctacgttgaccacaaagtggaaagcgagccttccatcgatcagctccctcaacctggtcacactggaaagggtgcagctgctgtcactggctataatgcgccagtcaaacggaaagaggtgaccatcaaccagcgccttccgcctccgcgtgttcctgagcattatcccaccatcgaggagtcacaggcacgtcctaccagcagtggtagtggcaacgtagttcagtactacgccgagaaggagcaagtggtagtagatgttgcggatccacgcatcttgcagccggagcggcagcactcttcgcttcaagagacttcatcaacttactactcggcccgcgaccaggcttctcgcccaacgtcttcttcctcggtcctcatccaccccatcatcgtgcctgtgaatgaggaaccgtcacataactctcttggcgcggaggacgaagcctcttacgtagatgctgttgagactcaatcatcccgtcacagcgtctacccaccacccggctcgtttgcatcagagaacgcctccaagcctttcatccagagcgctgttgctactaccaagcacgaagtccagttcgctgactcgcacgatacgcacgctttccagatatcggactacgaagaggaggattactacgaggatccaggctacactaccgctcattcgaaccgatctaggggcgataacacgacaacgggcatcactacagtgatgttgcctccgaagctcaccaagcgaggcgtgtctgagcttgacgcagccaagcaatttgtcgccagtagacgtactcccgacgagatcgaggaggacaaatgggatgtcagcatggtggccgaatacggagatgagatcttcgagtacatgagagagatggagatgacccttctacccaatccccattacatggacatccagaccgagatccagtggtcaatgcgatctgttttgatggactgggtcattcaggttcacacacgcttcggactcctacccgagactctcttcctggccgtcaactacattgaccgttttctcacatacaaggttgtttcgctcggcaagctacagcttgtcggcgccacggcaatcttcatcgctgccaagtatgaggagatcaactgtccctccgtccaggagatcgtctatatggtagacggcggctacactatcgaagagatcctgaaggcggagcgctttatgctgagcatgctcgatttcgagcttggctggcccggacctatgagtttcctgcgccgcatcagcaaggcggatgattatgacctggagactcgcaccctcgcaaagtacttccttgagatcgtaatcatggatgagcgatttgtggccagtccgccgagctatattgctgccggcgcacactgtctctcgcgtctcatgctccgcaagggtgactggacccctagccatgtccactactccggctatacctatacgcagctgaagcctctggtgtctactgttttggactgctgccatcacgctcggaatcaccactgcgccgtttatgagaagtactcggacaaacgctaccgacgtgcttcgacttatgttgaggaagagatcaggaaaggcttttctctgccctatcaacagcgcatctcgatgccactttcggttgacttctatcacgatgaagccactcgagtctcctacaccgacagtcaggcgctgaaaatgcccattccaatccagggttaa

SEQ ID NO: 29563 - protein, 709 aa, Muscodor strobelii
  misc_feature: SGI Peptide ID NO. 570155
  misc_feature (548)..(667): Pfam Id: PF02984 Pfam Desc: Cyclin, C-terminal domain
  misc_feature (420)..(546): Pfam Id: PF00134 Pfam Desc: Cyclin, N-terminal domain
  misc_feature (18)..(684): NCBI GI: 154299530 Blast Desc: BC1G_11027 [Botryotinia fuckeliana B05.10] gi|150857369|gb|EDN32561.1| BC1G_11027 [Botryotinia fuckeliana B05.10]
  misc_feature (353)..(672): NCBI GI: 71002538 Blast Desc: G2/mitotic-specific cyclin (Clb3) [Aspergillus fumigatus Af293] gi|66853588|gb|EAL93912.1| G2/mitotic-specific cyclin (Clb3), [Aspergillus fumigatus Af293] G2/mitotic-specific
  misc_feature (353)..(676): NCBI GI: 119482101 Blast Desc: G2/mitotic-specific cyclin, [Neosartorya fischeri NRRL 181] gi|119409233|gb|EAW19182.1| G2/mitotic-specific cyclin, [Neosartorya fischeri NRRL 181]
  misc_feature (353)..(679): NCBI GI: 121716748 Blast Desc: G2/mitotic-specific cyclin, [Aspergillus clavatus NRRL 1] gi|119404056|gb|EAW14473.1| G2/mitotic-specific cyclin, [Aspergillus clavatus NRRL 1]
  misc_feature (349)..(684): NCBI GI: 156041186 Blast Desc: SS1G_11572 [Sclerotinia sclerotiorum 1980] gi|154695955|gb|EDN95693.1| SS1G_11572 [Sclerotinia sclerotiorum 1980]
  misc_feature (6)..(678): NCBI GI: 189207833 Blast Desc: G2/mitotic-specific cyclin 3 [Pyrenophora tritici-repentis Pt-1C-BFP] gi|187976343|gb|EDU42969.1| G2/mitotic-specific cyclin 3 [Pyrenophora tritici-repentis
  misc_feature (353)..(678): NCBI GI: 145251329 Blast Desc: An15g06500 [Aspergillus niger] gi|134082710|emb|CAK42602.1| protein product [Aspergillus niger]
  misc_feature (349)..(695): NCBI GI: 261351510 Blast Desc: G2/mitotic-specific cyclin cdc13 [Verticillium albo-atrum VaMs.102]
  misc_feature (354)..(687): NCBI GI: 169762682 Blast Desc: [Aspergillus oryzae RIB40] gi|83770269|dbj|BAE60402.1| protein product [Aspergillus oryzae]
  misc_feature (354)..(687): NCBI GI: 238488495 Blast Desc: G2/mitotic-specific cyclin (Clb3), [Aspergillus flavus NRRL3357] gi|220697873|gb|EED54213.1| G2/mitotic-specific cyclin (Clb3), [Aspergillus flavus NRRL3357]
MATTNNNNTNEQHLTARTLHQRHKSTGNLNMVASAAAGNMNVAAKRTAFGDRNRIPPLDLRDIEKNGEPGVKYTHRRVAGVIVSTSQENQPLVNQKDAVKKALLQPAQRLSRPDPSLAKFRPHLTNRASVSTFRPYVDHKVESEPSIDQLPQPGHTGKGAAAVTGYNAPVKRKEVTINQRLPPPRVPEHYPTIEESQARPTSSGSGNVVQYYAEKEQVVVDVADPRILQPERQHSSLQETSSTYYSARDQASRPTSSSSVLIHPIIVPVNEEPSHNSLGAEDEASYVDAVETQSSRHSVYPPPGSFASENASKPFIQSAVATTKHEVQFADSHDTHAFQISDYEEEDYYEDPGYTTAHSNRSRGDNTTTGITTVMLPPKLTKRGVSELDAAKQFVASRRTPDEIEEDKWDVSMVAEYGDEIFEYMREMEMTLLPNPHYMDIQTEIQWSMRSVLMDWVIQVHTRFGLLPETLFLAVNYIDRFLTYKVVSLGKLQLVGATAIFIAAKYEEINCPSVQEIVYMVDGGYTIEEILKAERFMLSMLDFELGWPGPMSFLRRISKADDYDLETRTLAKYFLEIVIMDERFVASPPSYIAAGAHCLSRLMLRKGDWTPSHVHYSGYTYTQLKPLVSTVLDCCHHARNHHCAVYEKYSDKRYRRASTYVEEEIRKGFSLPYQQRISMPLSVDFYHDEATRVSYTDSQALKMPIPIQG

SEQ ID NO: 29564 - DNA, 3464 bp, Muscodor strobelii
  misc_feature: SGI EST ID NO. CUFF.69992.1
  misc_feature: Variant of the nucleotide sequence at SEQ ID NO 29562
ctcaaaacaaggccagggaccctcaactcccttcactggatctgtgtatgatatctggtatgcggccagttgtttattgtacttgttcttcacaacgtcagcacatcataaacctctccctcttgtctttgcagcttctggttctcaacaccagacactctctcctctccacatccgttccagctgttttgctgccatcgtcactcagcagtcgtgcagtagcatcatcgcgctacctggtagttgttgcttgtcggccgcattgcacaacatcaggcaaatttgttcagttccgtcaatgaatctttagacgcgcctctgcaccctcggtgcggtacatcaccatcaacagcctctacctcataacctagaactacgggtctttgctcgaggcttggcgcgccgtcgcgtcgcctctgggatccagcaacacctccctgatctgcctcgtacaacagcacaacccggggcatcgggcgccatctgggaaacatggatgccagaccttttcgagctggccgaaatatgcccaacatggccactaccaataacaacaacaccaacgagcaacacctcactgcccgaaccctccatcaacgccacaagtccacaggaaacctcaacatggtggcctctgctgctgctggcaatatgaatgtggctgccaagcgtactgcgttcggagatcgcaaccgaatccctcctctggatctgagagacatcgagaagaatggcgagcctggcgtcaagtacacccacaggcgtgtcgccggtgtaatagtctctaccagccaagagaaccagcctctcgtcaaccagaaggacgctgtgaagaaagcacttcttcagcccgcccagcgcctttctcggccagacccttccctcgccaaatttcgacctcatctgacaaatcgagctagtgtgtcgacattcagaccctacgttgaccacaaagtggaaagcgagccttccatcgatcagctccctcaacctggtcacactggaaagggtgcagctgctgtcactggctataatgcgccagtcaaacggaaagaggtgaccatcaaccagcgccttccgcctccgcgtgttcctgagcattatcccaccatcgaggagtcacaggcacgtcctaccagcagtggtagtggcaacgtagttcagtactacgccgagaaggagcaagtggtagtagatgttgcggatccacgcatcttgcagccggagcggcagcactcttcgcttcaagagacttcatcaacttactactcggcccgcgaccaggcttctcgcccaacgtcttcttcctcggtcctcatccaccccatcatcgtgcctgtgaatgaggaaccgtcacataactctcttggcgcggaggacgaagcctcttacgtagatgctgttgagactcaatcatcccgtcacagcgtctacccaccacccggctcgtttgcatcagagaacgcctccaagcctttcatccagagcgctgttgctactaccaagcacgaagtccagttcgctgactcgcacgatacgcacgctttccagatatcggactacgaagaggaggattactacgaggatccaggctacactaccgctcattcgaaccgatctaggggcgataacacgacaacgggcatcactacagtgatgttgcctccgaagctcaccaagcgaggcgtgtctgagcttgacgcagccaagcaatttgtcgccagtagacgtactcccgacgagatcgaggaggacaaatgggatgtcagcatggtggccgaatacggagatgagatcttcgagtacatgagagagatggagatgacccttctacccaatccccattacatggacatccagaccgagatccagtggtcaatgcgatctgttttgatggactgggtcattcaggttcacacacgcttcggactcctacccgagactctcttcctggccgtcaactacattgaccgttttctcacatacaaggttgtttcgctcggcaagctacagcttgtcggcgccacggcaatcttcatcgctgccaagtatgaggagatcaactgtccctccgtccaggagatcgtctatatggtagacggcggctacactatcgaagagatcctgaaggcggagcgctttatgctgagcatgctcgatttcgagcttggctggcccggacctatgagtttcctgcgccgcatcagcaaggcggatgattatgacctggagactcgcaccctcgcaaagtacttccttgagatcgtaatcatggatgagcgatttgtggccagtccgccgagctatattgctgccggcgcacactgtctctcgcgtctcatgctccgcaagggtgactggacccctagccatgtccactactccggctatacctatacgcagctgaagcctctggtgtctactgttttggactgctgccatcacgctcggaatcaccactgcgccgtttatgagaagtactcggacaaacgctaccgacgtgcttcgacttatgttgaggaagagatcaggaaaggcttttctctgccctatcaacagcgcatctcgatgccactttcggttgacttctatcacgatgaagccactcgagtctcctacaccgacagtcaggcgctgaaaatgcccattccaatccagggttaagggcgtcaatccctttccggagcagcagtcgacttcacctcgacccttctaatatcatcatccgcactggccaggatcggaactcacctggccatacgattgtgccacactttcagcactatggtgttcttgtaatgctttgcacgtggcatccagcagtagcagacctatcgctaggcatttccactggctctcactcaatccgacttcgataccccaaccctaatatcctaattcggcacacatacatcaccacttcacgacgcataacgacgatcatgagttcacgatccttcgatttctacttcacttgcattgtctttaccttctcagaggttgagcacttgattcccctggcggcgttcagagattccagacggtatagaggctgcagactcgcgtgactagagggaggcaaagacctcatcaggttcaggcgttcggtttgagcacggaaagtacgagatgtagcagttttcactagtgctggcgacgcgaatgctttacttcgatgcagattcacttgcgatctctactaaagctagcatagcctgtcattagggagcacatggcttattgtctccgtttattgtctgagtatataatttggcttggagatggctgcgtcaactgaccgattgcatttcatttcatttgtttcaagggcaggaggacgtccccactatccagacgcatagccacgctgcattgctcgtggaggatgcagaaggaagaagcagactaaaataggggtgtgtcctacataatagttccagtacagaaccaattcaagtcttcgg

SEQ ID NO: 29565 - DNA, 2358 bp, Muscodor strobelii
  misc_feature: SGI cDNA ID NO. 570156
  misc_feature: Reduced expression when VOC is produced
  misc_feature: Encodes the peptide sequence at SEQ ID NO 29566
atgggctgcagcaccgtcgacttgggatgtctctcgtctgtcgatggaagtgtgcgtgtgaactgtgtgggcagccattttggagcactcgcccggtactgtgcaaaacctcgctcttcttccacctcctctttcacacgagccccgatctcgagcagaacgcccttcataccgctcccatccgttccactcggagcgacactgacgcaccgcactctcgcaggccgatccggcaccagcacttcgacgtcgagtttctgcatctctaacacaacagcaccatcaactttgtgtcgagtgatctcccatcagcgataccacctcgagcctgcttcggccactgctgccgctccccagtgtgcgattgggttccgaccgtcccgcaaagcccccgtccactccatcgcagcgcagcgacggccagtccgctgcgggcgctccccgtcctccccatcttcccccccatattctacagccaagctcgccttggacacttccatagtccatcaggagaccaagatggcctcgggctcgcccattgagccgtatgcggccccttccgctggcttccacagtggcagcgcttcgcccggccggcccgtcaaccccaaacatgtccaattcgaactcctcttccccgacacccctcaatacaaagcacgcctcccactacgtgtccagatatacccccatgatgatacggaatccatcatctccacagtcaagaacttctacggcctgtaccggggtgacaaaggcgtcagcttcgaagatgatcggggcaacactctgattgcgcggtacgagaacttcagcaataacatggtcgtctacgtcagagtcatagaggaggctcctcaggcggacggtccgttcaatccgagcggctttcaacccgcctcggccgactaccctgcccaccaactgggcctccacacatcccgcccggcgtcgcgcacatcgcgcaaacgcagcccctctcccaacggaggccgcggacgacgtagcacgtctgtcagcaccaatccgatggccaagaaggctcgttcgcgctcctccaaggccaacggctcgagttacgaggacagtgccaatggctacagcagtggcgacggcgctcccggatctgtgtccagcaaagcaaaagaccagatcgggaacactgatatcagtgtagagaacatcgtcgagggtggtcgccgcaagcgcgccaagtttgaaagctcggaactgccgctatttgctccgccgcaaatgcctgctgccacgtcaaacccttccgtctcgcctgctcgtcgcatagaacaacgccttccattaccttttgtccaccctggccaaaatcccttcacacatcctcgccctctacagtctccccaaagctacagtggatatggtcatcagaatgctttcgcaacacccattgccgattcccgtcgtcaccgcggaagcattggcatgcctagcggatcaggtgttcttccgactccagatccgactatcggcagctgcgtgtctgaagaggacaaagatgtggcaatccagcttatgagactgggtgagatgtcaaacatctcccatgggaggacatcggcgtccactcttgatgacactttcagcggcaaggcagacgctgcatcttcaactggcgctactagtgatagcggcagcaacagcgaagatgagctgccgcctcctcgtcgccaaaagctcgacatcatgggcggcatgcgcaagatccaccctactacggacagccatttcgaagtaccccgcgagcatgctgaggccagtggagacgacgccgactacgaggacggtgcagacgattcaaaacaagacctccccttggatgacaacaaggccaagatgccaaatggtggtaaacctcgagcaacaggggtcaagcagaacaaacccaaagccgcaaaggcgcctaagaccaatgttgctaagcccaagaaagcggccaacgtggccgctagcccaatgtctcccgcgtctctccccaatcagtcgcgcaagccgtctatcgcaggttcggccatgtcaggccagattggagacgaagaacaccccgatctctccaccaaacctcgttgccagcgatgtcgcaagagcaagaaaggttgtgatcggcagagaccttgcggtcgttgtcgagatgcaggcctcagtgccgaccagtgcattagtgaagacgaaggcaacgggcgtaagggacgctatggccgtcacatgggtgtcccaatcaagacaatggatgtgccaggccctcctgctctcctgcccgccgctccgatcgcaccggtctccgcagcagcatcagctgataagaacaagaagcgcaagcgatag

SEQ ID NO: 29566 - protein, 785 aa, Muscodor strobelii
  misc_feature: SGI Peptide ID NO. 570156
  misc_feature (174)..(785): NCBI GI: 46125511 Blast Desc: FG07133.1 [Gibberella zeae PH-1]
  misc_feature (180)..(785): NCBI GI: 145612337 Blast Desc: MGG_07063 [Magnaporthe grisea 70-15] gi|145019524|gb|EDK03752.1| MGG_07063 [Magnaporthe grisea 70-15]
  misc_feature (191)..(785): NCBI GI: 156041180 Blast Desc: SS1G_11569 [Sclerotinia sclerotiorum 1980] gi|154695952|gb|EDN95690.1| SS1G_11569 [Sclerotinia sclerotiorum 1980]
  misc_feature (218)..(785): NCBI GI: 85098669 Blast Desc: NCU01243 [Neurospora crassa OR74A] gi|28922158|gb|EAA31410.1| [Neurospora crassa OR74A]
  misc_feature (192)..(767): NCBI GI: 171692293 Blast Desc: protein product [Podospora anserina] gi|170946095|emb|CAP72896.1| protein product [Podospora anserina]
  misc_feature (218)..(785): NCBI GI: 12718259 Blast Desc: conserved [Neurospora crassa]
  misc_feature (172)..(785): NCBI GI: 116206768 Blast Desc: CHGG_02677 [Chaetomium globosum CBS 148.51] gi|88183274|gb|EAQ90742.1| CHGG_02677 [Chaetomium globosum CBS 148.51]
  misc_feature (203)..(785): NCBI GI: 71002540 Blast Desc: C6 finger domain protein [Aspergillus fumigatus Af293] gi|66853589|gb|EAL93913.1| C6 finger domain protein, [Aspergillus fumigatus Af293] gi|159130008|gb|EDP55122.1| C6 finger domain
  misc_feature (182)..(785): NCBI GI: 238488493 Blast Desc: C6 finger domain protein, [Aspergillus flavus NRRL3357] gi|220697872|gb|EED54212.1| C6 finger domain protein, [Aspergillus flavus NRRL3357]
  misc_feature (203)..(785): NCBI GI: 119482103 Blast Desc: C6 finger domain protein, [Neosartorya fischeri NRRL 181] gi|119409234|gb|EAW19183.1| C6 finger domain protein, [Neosartorya fischeri NRRL 181]
  misc_feature: Useful for introducing or modulating the production of volatile compounds
MGCSTVDLGCLSSVDGSVRVNCVGSHFGALARYCAKPRSSSTSSFTRAPISSRTPFIPLPSVPLGATLTHRTLAGRSGTSTSTSSFCISNTTAPSTLCRVISHQRYHLEPASATAAAPQCAIGFRPSRKAPVHSIAAQRRPVRCGRSPSSPSSPPYSTAKLALDTSIVHQETKMASGSPIEPYAAPSAGFHSGSASPGRPVNPKHVQFELLFPDTPQYKARLPLRVQIYPHDDTESIISTVKNFYGLYRGDKGVSFEDDRGNTLIARYENFSNNMVVYVRVIEEAPQADGPFNPSGFQPASADYPAHQLGLHTSRPASRTSRKRSPSPNGGRGRRSTSVSTNPMAKKARSRSSKANGSSYEDSANGYSSGDGAPGSVSSKAKDQIGNTDISVENIVEGGRRKRAKFESSELPLFAPPQMPAATSNPSVSPARRIEQRLPLPFVHPGQNPFTHPRPLQSPQSYSGYGHQNAFATPIADSRRHRGSIGMPSGSGVLPTPDPTIGSCVSEEDKDVAIQLMRLGEMSNISHGRTSASTLDDTFSGKADAASSTGATSDSGSNSEDELPPPRRQKLDIMGGMRKIHPTTDSHFEVPREHAEASGDDADYEDGADDSKQDLPLDDNKAKMPNGGKPRATGVKQNKPKAAKAPKTNVAKPKKAANVAASPMSPASLPNQSRKPSIAGSAMSGQIGDEEHPDLSTKPRCQRCRKSKKGCDRQRPCGRCRDAGLSADQCISEDEGNGRKGRYGRHMGVPIKTMDVPGPPALLPAAPIAPVSAAASADKNKKRKR

SEQ ID NO: 29567 - DNA, 3474 bp, Muscodor strobelii
  misc_feature: SGI EST ID NO. CUFF.70090.0
  misc_feature: Variant of the nucleotide sequence at SEQ ID NO 29565
cgggctagcgggctgccacagcggccactcccaagaggtacttgcggtatgggctgcagcaccgtcgacttgggatgtctctcgtctgtcgatggaagtgtgcgtgtgaactgtgtgggcagccattttggagcactcgcccggtactgtgcaaaacctcgctcttcttccacctcctctttcacacgagccccgatctcgagcagaacgcccttcataccgctcccatccgttccagtaagtcctcatagtccatctcgtacccaacggccgatccggcaccagcacttcgacgtcgagtttctgcatctctaacacaacagcaccatcaactttgtgtcgagtgatctcccatcagcgataccacctcgagcctgcttcggccactgctgccgctccccagtgtgcgattgggttccgaccgtcgtctacctgactatctccctcgccgttcacgcccacgagacataccgttgcctttgcggcactcctggctgcagtagccaggccagagcctgaagaccgtgattgagagagctgtgccgactgggtgatggacctgtccagcctcttagccgcaaagcccccgtccactccatcgcagcgcagcgacggccagtccgctgcgggcgctccccgtcctccccatcttcccccccatattctacagccaagctcgccttggacacttccatagtccatcaggagaccaagatggcctcgggctcgcccattgagccgtatgcggccccttccgctggcttccacagtggcagcgcttcgcccggccggcccgtcaaccccaaacatgtccaattcgaactcctcttccccgacacccctcaatacaaagcacgcctcccactacgtgtccagatatacccccatgatgatacggaatccatcatctccacagtcaagaacttctacggcctgtaccggggtgacaaaggcgtcagcttcgaagatgatcggggcaacactctgattgcgcggtacgagaacttcagcaataacatggtcgtctacgtcagagtcatagaggaggctcctcaggcggacggtccgttcaatccgagcggctttcaacccgcctcggccgactaccctgcccaccaactgggcctccacacatcccgcccggcgtcgcgcacatcgcgcaaacgcagcccctctcccaacggaggccgcggacgacgtagcacgtctgtcagcaccaatccgatggccaagaaggctcgttcgcgctcctccaaggccaacggctcgagttacgaggacagtgccaatggctacagcagtggcgacggcgctcccggatctgtgtccagcaaagcaaaagaccagatcgggaacactgatatcagtgtagagaacatcgtcgagggtggtcgccgcaagcgcgccaagtttgaaagctcggaactgccgctatttgctccgccgcaaatgcctgctgccacgtcaaacccttccgtctcgcctgctcgtcgcatagaacaacgccttccattaccttttgtccaccctggccaaaatcccttcacacatcctcgccctctacagtctccccaaagctacagtggatatggtcatcagaatgctttcgcaacacccattgccgattcccgtcgtcaccgcggaagcattggcatgcctagcggatcaggtgttcttccgactccagatccgactatcggcagctgcgtgtctgaagaggacaaagatgtggcaatccagcttatgagactgggtgagatgtcaaacatctcccatgggaggacatcggcgtccactcttgatgacactttcagcggcaaggcagacgctgcatcttcaactggcgctactagtgatagcggcagcaacagcgaagatgagctgccgcctcctcgtcgccaaaagctcgacatcatgggcggcatgcgcaagatccaccctactacggacagccatttcgaagtaccccgcgagcatgctgaggccagtggagacgacgccgactacgaggacggtgcagacgattcaaaacaagacctccccttggatgacaacaaggccaagatgccaaatggtggtaaacctcgagcaacaggggtcaagcagaacaaacccaaagccgcaaaggcgcctaagaccaatgttgctaagcccaagaaagcggccaacgtggccgctagcccaatgtctcccgcgtctctccccaatcagtcgcgcaagccgtctatcgcaggttcggccatgtcaggccagattggagacgaagaacaccccgatctctccaccaaacctcgttgccagcgatgtcgcaagagcaagaaaggttgtgatcggcagagaccttgcggtcgttgtcgagatgcaggcctcagtgccgaccagtgcattagtgaagacgaaggcaacgggcgtaagggacgctatggccgtcacatgggtgtcccaatcaagacaatggatgtgccaggccctcctgctctcctgcccgccgctccgatcgcaccggtctccgcagcagcatcagctgataagaacaagaagcgcaagcgatagcatgttcggaacgcgcaacatcatcacccatgagcgctgcgactacatgagccacatcgatggcctgtattgctttttttccaaactcaagttacacgatttttgcgagggcgcgaatgtcgcaatgataggtgtattgctccaacttctacgaaaggctgacagcggcgttttgagcttgcaccggtatgcaatggaagaatctttccacactcactccgttgcgagatccggtacgaggcaaatatttctttagtaccatcggcgttacatattgtcttgcttcagaagtggcgcaacggatcaaggatttaattgagaggcccgcgagccattacattctttttctccaacagggctacgctgggaacgaaatctctacatgggatacttatgaattggcgttggatctgcgccggtgttgttactaatcaccaccacatcccacaaacaccgctgcgcacgcacacaacgacatagagagtgtgttggaaaagtgggactcagcggaagaaagatgacagtggtggttacagtccttttataagtcattggtggtgatcaaaaatctggggggagggcacacctgctgcaaggagaagacatacaatatcgagcagtattgtggacaatcacctcaaaataatccggcggaggcgatgtgtgcgcgaaaagatgttgaactatgggaaagtcgcttgtcagctatactgttggtggtggtcttgtttttggagctaatccgctatgatggtttcgtgtttcttagttattgtttctgatttcattttcctagctatctgccacttgtcatctcgtcctttagcaatcagtcagtcaaacagccaggaatgaatgcaaggtaccatgaaagtagtctacaacatgactatgttcaaacatacttaaagtggatgcata

SEQ ID NO: 29568 - DNA, 1500 bp, Muscodor strobelii
  misc_feature: SGI cDNA ID NO. 570157
  misc_feature: Elevated expression when VOC is produced
  misc_feature: Encodes the peptide sequence at SEQ ID NO 29569
atggcgacagctgagctttctggcgatgaccagaaagtagacccgatgcatgacactgtcatgctcgaggaaaagagtagcaactcaattgacgcgccagcatggaccgccgaagaagagaagagagttcgcaggaaattagacttgcaattggtgccgatggtcacgattttgtatcttctttgcttccttgatcgaatcaatatcggcaatgcccgcattcaaggtttagtgacggatctcaatcttatcggctaccgcttcaacattgctagcagtatcttctacgttgtatatctgctcgtcgaagttccttccaacatcctcctcaaacgtgtcggcccacgtttctatattccagggctagtcttgggcttcggcgccgtttccttggccacagcgtttgtccaaacatatgaacaactcgtcggtgtacgtgtgctactcgggatattcgagggtggtactttccctggtattgcattcttcctgagctcattctacaaacgagaagagttatacttccgagttggaatctacgtctcttccgcatccatcgcaggtggtctcggtggtttgctggctgccgggtttgttcaggttcccgaatggggtatcgctgggcacaagttgcacacatggcgcaatatcttcttctttgagggtgtcatcacgatgatagcagcgataattgcgccgttcgtgctgccgcagtctccaggccaatctaagtatctaaatgagcgggagaaatggatcgccaccgaaagacttcgattagagcacaaggccgctgcaaacgaactcgtccaattgcaccacgtcaagcgcgcagttctcaatgtcaacaactacgtttgtgcagctggatttttcttcatcaacatcactgtgcagggtctctcagtgtttctccctagcatcttgaacgggcttgggtgggaagctttagaggctcagtactatactgtacctgtttatgccgccgcgtcaatcattgccattgctatcggcttcatcagtgacaagacgagaatgcgtgggatctacctcgccgctttcacgttactggggatgacaggcttcgggttgctacgttggggttccggccacgctttgaagtatgctgctgtctatctgtgcgccgttggcgcgttccctggcggcccaggtttcctgtcatggggtatgaacaatgccgccggtccgtctgttcgcgctgtgtccggtggctacatcgtgtcgatcggtactgctggtggaattctcgcggtttgggcatatctgcctaatgatgcgccaaactttcctattggccactcaatcaatttcgctgcacaagtcgtgagtctgttccttgcgacatttggtattctctactgttaccgagaaaaccgtattcgagctagaggcggtcgcgaccacaggctcgaagggcttacggagcaagaaaagatagatctaggatacaggcatcctgacttcagatatatcccatag

SEQ ID NO: 29569 - protein, 499 aa, Muscodor strobelii
  misc_feature: SGI Peptide ID NO. 570157
  misc_feature (55)..(425): Pfam Id: PF07690 Pfam Desc: Major Facilitator Superfamily
  misc_feature (9)..(498): NCBI GI: 39977887 Blast Desc: MGG_06828 [Magnaporthe grisea 70-15] gi|145013616|gb|EDJ98257.1| MGG_06828 [Magnaporthe grisea 70-15]
  misc_feature (8)..(496): NCBI GI: 164423396 Blast Desc: NCU08715 [Neurospora crassa OR74A] gi|16944678|emb|CAB99379.2| conserved [Neurospora crassa] gi|157070075|gb|EAA34340.2| conserved [Neurospora crassa OR74A]
  misc_feature (11)..(498): NCBI GI: 189194733 Blast Desc: conserved [Pyrenophora tritici-repentis Pt-1C-BFP] gi|187979269|gb|EDU45895.1| conserved [Pyrenophora tritici-repentis Pt-1C-BFP]
  misc_feature (1)..(496): NCBI GI: 169617888 Blast Desc: SNOG_12126 [Phaeosphaeria nodorum SN15] gi|160703508|gb|EAT80538.2| SNOG_12126 [Phaeosphaeria nodorum SN15]
  misc_feature (47)..(497): NCBI GI: 116205567 Blast Desc: CHGG_10667 [Chaetomium globosum CBS 148.51] gi|88176795|gb|EAQ84263.1| CHGG_10667 [Chaetomium globosum CBS 148.51]
  misc_feature (60)..(497): NCBI GI: 171677057 Blast Desc: protein product [Podospora anserina] gi|170936596|emb|CAP61255.1| protein product [Podospora anserina]
  misc_feature (35)..(498): NCBI GI: 256728409 Blast Desc: NECHADRAFT_87817 [Nectria haematococca mpVI 77-13-4]
  misc_feature (9)..(499): NCBI GI: 258575057 Blast Desc: [Uncinocarpus reesii 1704] gi|237901976|gb|EEP76377.1| [Uncinocarpus reesii 1704]
  misc_feature (23)..(499): NCBI GI: 240105548 Blast Desc: major facilitator superfamily protein [Coccidioides posadasii C735 delta SOWgp]
  misc_feature (23)..(499): NCBI GI: 119193849 Blast Desc: CIMG_01299 [Coccidioides immitis RS]
  misc_feature: Useful for introducing or modulating the production of volatile compounds
MATAELSGDDQKVDPMHDTVMLEEKSSNSIDAPAWTAEEEKRVRRKLDLQLVPMVTILYLLCFLDRINIGNARIQGLVTDLNLIGYRFNIASSIFYVVYLLVEVPSNILLKRVGPRFYIPGLVLGFGAVSLATAFVQTYEQLVGVRVLLGIFEGGTFPGIAFFLSSFYKREELYFRVGIYVSSASIAGGLGGLLAAGFVQVPEWGIAGHKLHTWRNIFFFEGVITMIAAIIAPFVLPQSPGQSKYLNEREKWIATERLRLEHKAAANELVQLHHVKRAVLNVNNYVCAAGFFFINITVQGLSVFLPSILNGLGWEALEAQYYTVPVYAAASIIAIAIGFISDKTRMRGIYLAAFTLLGMTGFGLLRWGSGHALKYAAVYLCAVGAFPGGPGFLSWGMNNAAGPSVRAVSGGYIVSIGTAGGILAVWAYLPNDAPNFPIGHSINFAAQVVSLFLATFGILYCYRENRIRARGGRDHRLEGLTEQEKIDLGYRHPDFRYIP

SEQ ID NO: 29570 - DNA, 2716 bp, Muscodor strobelii
  misc_feature: SGI EST ID NO. CUFF.70000.0
  misc_feature: Variant of the nucleotide sequence at SEQ ID NO 29568
ccatggcgcaaacttgtggcttgtcgtgtggcttctatcatcccctggggcgccataccactgttggcggaatttcaaatctcgggcggcgcggaaagctttctaattcttgacaagacactcccttgttttctggggtagtgggtttcgtggggcatatcggtaggtagtacaacctcagtgttctgcccgacaacgtctgccgaactaaggtactgtactccatttcaatagttttgagctgactcgtagcgttgtctcagttcataacatgacaggggtagcttaatcgcgaagatccaagctacttggcagctctgggggcatatcgtttctacataatcccagtagatcaatgatcactgatggtttctacgaggcaactcagcttccatcgaaagtcaggttgcaattggacagagctctattactgtgtctgacaaaaagccgttagacaccgctatcccttgagactattgacattggtcaggttgtatccccgcatcgccaagcattggcactgccgttcagacaggccgtctgaccggagtaaacgcaatgcactgctaccccagctcgttttttaccaaccgtagcttgaatatccgtctaggcgagccaggggattaatatcggtgcaatcaagaacgtccatccatctgccgctccgtaatgccaccgcgttctagtgagtctgggcttgatgcctcggtggcgtgtgatgagaaaccctgagggtgtggaaggatctgaccaagactgaccaagattgtttatcactccgatgggttctccctgccggacagtagatatatagaagagtacaggttggccaagcttcgaaaacgggtcaggatttagggctagagacgctttctgtaccactgttgtcctaactcttctgttgttctttcattcatcgtcgctctagcagttgcaagggcttcaatctgctgcgatggcgacagctgagctttctggcgatgaccagaaagtagacccgatgcatgacactgtcatgctcgaggaaaagagtagcaactcaattgacgcgccagcatggaccgccgaagaagagaagagagttcgcaggaaattagacttgcaattggtgccgatggtcacgattttgtatcttctttgcttccttgatcgaatcaatatcggcaatgcccgcattcaaggtttagtgacggatctcaatcttatcggctaccgcttcaacattgctagcagtatcttctacgttgtatatctgctcgtcgaagttccttccaacatcctcctcaaacgtgtcggcccacgtttctatattccagggctagtcttgggcttcggcgccgtttccttggccacagcgtttgtccaaacatatgaacaactcgtcggtgtacgtgtgctactcgggatattcgagggtggtactttccctggtattgcattcttcctgagctcattctacaaacgagaagagttatacttccgagttggaatctacgtctcttccgcatccatcgcaggtggtctcggtggtttgctggctgccgggtttgttcaggttcccgaatggggtatcgctgggcacaagttgcacacatggcgcaatatcttcttctttgagggtgtcatcacgatgatagcagcgataattgcgccgttcgtgctgccgcagtctccaggccaatctaagtatctaaatgagcgggagaaatggatcgccaccgaaagacttcgattagagcacaaggccgctgcaaacgaactcgtccaattgcaccacgtcaagcgcgcagttctcaatgtcaacaactacgtttgtgcagctggatttttcttcatcaacatcactgtgcagggtctctcagtgtttctccctagcatcttgaacgggcttgggtgggaagctttagaggctcagtactatactgtacctgtttatgccgccgcgtcaatcattgccattgctatcggcttcatcagtgacaagacgagaatgcgtgggatctacctcgccgctttcacgttactggggatgacaggcttcgggttgctacgttggggttccggccacgctttgaagtatgctgctgtctatctgtgcgccgttggcgcgttccctggcggcccaggtttcctgtcatggggtatgaacaatgccgccggtccgtctgttcgcgctgtgtccggtggctacatcgtgtcgatcggtactgctggtggaattctcgcggtttgggcatatctgcctaatgatgcgccaaactttcctattggccactcaatcaatttcgctgcacaagtcgtgagtctgttccttgcgacatttggtattctctactgttaccgagaaaaccgtattcgagctagaggcggtcgcgaccacaggctcgaagggcttacggagcaagaaaagatagatctaggatacaggcatcctgacttcagatatatcccatagcacttggtgaaagttcaaggggttcgacgataaccgcgaaggagctattcatgaaacacttttatattcaattagaactctctgtatctatgatggtcgagatccaaagaaatggaatagcaactgcctcgagagttcagaatcaagtgcacatggtgactgtggagacagctattgcgagccatctacactgactacgatatctgttgtaccctcaaaataagtcttgaaatacatcatagtaaatgtagatattac

SEQ ID NO: 29571 - DNA, 900 bp, Muscodor strobelii
  misc_feature: SGI cDNA ID NO. 570158
  misc_feature: Encodes the peptide sequence at SEQ ID NO 29572
atggcagcatctcttaagtacacgaagcatcactatggtgccgaaaatgtgcttcagaatctcggggtatgggacgtggattccactgacaagagcaaatactgggttatctacatccacggcggcgcatggcgagaccccacaataacgcacgaaagcttcgtgccgaccatcaatcacattttagccactacacctgaatcaaagaagagcctgatcgccagctttgccgcaatagattaccgtcttagtgcgcacccaaggtttccccaggatcgctccacgacgccgccagctgagtatcgcggcgcaaagcatccagaccacataaacgatgtgcggtcagctctcgtctatttacaacaaatgtatgggtttggaagcaattatgtgctactgggtcactcagcaggcgcatctctgtgctttcaactgctctcatcgagcaaggatggcgccgctggtgaagcagcgacagacacgaaggagccgattcttccgcgtgctatggtccctttttgtgggttgtacgacttcgccggaatcaatgctcgctttgacgggcaatacgcagtattcttcaatggcgcctttggcgaatctcccgaagactgggccgcgggtagtccgattgaattttcggggaactacgtggagaaatggccgggcaagagatttattctcctcggatcatcgccaacggatagcctcatagacgagccagaaacacagaatatgttacgccgcctgcgcgagaaagatggttttacggagagtggtggagatcacgagatgttgttcgtatcagaccttgtcggtgaccatgatgagttgtgggagaagggtgagcatgtagcaaggatggcatggatcgcattagagaaggtcgggagcatatga

SEQ ID NO: 29572 - protein, 299 aa, Muscodor strobelii
  misc_feature: SGI Peptide ID NO. 570158
  misc_feature (5)..(296): NCBI GI: 256731317 Blast Desc: NECHADRAFT_84673 [Nectria haematococca mpVI 77-13-4]
  misc_feature (1)..(299): NCBI GI: 46125515 Blast Desc: FG07135.1 [Gibberella zeae PH-1]
  misc_feature (10)..(288): NCBI GI: 225559712 Blast Desc: conserved [Ajellomyces capsulatus G186AR]
  misc_feature (10)..(288): NCBI GI: 154280885 Blast Desc: [Ajellomyces capsulatus NAm1] gi|150411434|gb|EDN06822.1| [Ajellomyces capsulatus NAm1]
  misc_feature (1)..(298): NCBI GI: 145612345 Blast Desc: MGG_12328 [Magnaporthe grisea 70-15] gi|145019530|gb|EDK03758.1| MGG_12328 [Magnaporthe grisea 70-15]
  misc_feature (18)..(288): NCBI GI: 212542895 Blast Desc: conserved [Penicillium marneffei ATCC 18224] gi|210066509|gb|EEA20602.1| conserved [Penicillium marneffei ATCC 18224]
  misc_feature (10)..(299): NCBI GI: 226290230 Blast Desc: conserved [Paracoccidioides brasiliensis Pb18]
  misc_feature (10)..(299): NCBI GI: 226285294 Blast Desc: conserved [Paracoccidioides brasiliensis Pb01]
  misc_feature (11)..(299): NCBI GI: 121701995 Blast Desc: conserved [Aspergillus clavatus NRRL 1] gi|119397405|gb|EAW07836.1| conserved [Aspergillus clavatus NRRL 1]
  misc_feature (8)..(299): NCBI GI: 240111914 Blast Desc: CPC735_013770 [Coccidioides posadasii C735 delta SOWgp]
  misc_feature (12)..(274): SWISSPROT Homolog: EC 3.5.1.9 Arylformamidase
MAASLKYTKHHYGAENVLQNLGVWDVDSTDKSKYWVIYIHGGAWRDPTITHESFVPTINHILATTPESKKSLIASFAAIDYRLSAHPRFPQDRSTTPPAEYRGAKHPDHINDVRSALVYLQQMYGFGSNYVLLGHSAGASLCFQLLSSSKDGAAGEAATDTKEPILPRAMVPFCGLYDFAGINARFDGQYAVFFNGAFGESPEDWAAGSPIEFSGNYVEKWPGKRFILLGSSPTDSLIDEPETQNMLRRLREKDGFTESGGDHEMLFVSDLVGDHDELWEKGEHVARMAWIALEKVGSI

SEQ ID NO: 29573 - DNA, 1224 bp, Muscodor strobelii
  misc_feature: SGI EST ID NO. CUFF.70004.0
  misc_feature: Variant of the nucleotide sequence at SEQ ID NO 29571
agcgcctctagttttgatgccattcacacaatcgattgtggactgaagcccctcaccccgcggagtttccgttgtattactaaactcaacatttcaaccctctatataatccttcatccaggttcaccactcattcgcgactagctgtatctgaagtagttcaactaagcacacaatggcagcatctcttaagtacacgaagcatcactatggtgccgaaaatgtgcttcagaatctcggggtatgggacgtggattccactgacaagagcaaatactgggttatctacatccacggcggcgcatggcgagaccccacaataacgcacgaaagcttcgtgccgaccatcaatcacattttagccactacacctgaatcaaagaagagcctgatcgccagctttgccgcaatagattaccgtcttagtgcgcacccaaggtttccccaggatcgctccacgacgccgccagctgagtatcgcggcgcaaagcatccagaccacataaacgatgtgcggtcagctctcgtctatttacaacaaatgtatgggtttggaagcaattatgtgctactgggtcactcagcaggcgcatctctgtgctttcaactgctctcatcgagcaaggatggcgccgctggtgaagcagcgacagacacgaaggagccgattcttccgcgtgctatggtccctttttgtgggttgtacgacttcgccggaatcaatgctcgctttgacgggcaatacgcagtattcttcaatggcgcctttggcgaatctcccgaagactgggccgcgggtagtccgattgaattttcggggaactacgtggagaaatggccgggcaagagatttattctcctcggatcatcgccaacggatagcctcatagacgagccagaaacacagaatatgttacgccgcctgcgcgagaaagatggttttacggagagtggtggagatcacgagatgttgttcgtatcagaccttgtcggtgaccatgatgagttgtgggagaagggtgagcatgtagcaaggatggcatggatcgcattagagaaggtcgggagcatatgaagtaggaatataatccatcaactcccaccttcaagttttctctagctgcttgtggttcttccatggcccattgcgcgaatcacaacggttgtgctaacccgagaagtaaaagggggagtcatttggccaagatctatgtgattacggga

SEQ ID NO: 29574 - DNA, 1203 bp, Muscodor strobelii
  misc_feature: SGI cDNA ID NO. 570159
  misc_feature: Encodes the peptide sequence at SEQ ID NO 29575
atggccgctcaggatccaacagcgcccaaagatagcaatggcgctggtctgtatgtggctgccagtgtcacacttgccatatcatggctttctgttttgttgcgcacatatgtgcgtgcgtatatgacaaaatcgttccaggccgaggattgggttatgctagccggcctagctaacttcacggcctcatgcgggtttatttatgccggacttgactttggcctaggccatcacaacaaagccctttcacaatacaacgagatcaaagcactagagttccaagcattagcgacagcgagctatgtgtcgaatatgtggcttattaaactaagcatcgggctttttctctatcgtcttgccgttcaaaagagatataaatacacgcttggaatcagcatcgtcgtcgttgggatatggagcttggccttatttttctggaatatctttcaatgtcaccctgtcgatgcgcaatgggactacacgatactagagaaggacccgaaagctgcttgcgtttcagttgatgagattgttagcgcagcgtatgcgttgagtgctcttacgatattgtcggattggttatacgctcttctcccgatccccatgatatggacagtcaagatgacaccacaacaaaaagtgacagtcattgggatattaggactgggtgttttcgccagcattgctacacttatccggctaaagtttctatcagatctgaccgataccgcggacatcttattcgccggcacgaacgccatgatatggacactagtcgaacccggcatcgccatctcagccgcaagcctcgccaccatccggcccctactccgacgcctacgtatcaaagggttcaccagcagcaaccacagccacggcaacatatcaagccaaagaagccgaaaccccaggcgagtgagtcgaatgcccgccttcggctcccaagatctgacgttagtcgacatcgagcacggatcatcagctaaccggaaatcgcctctccccatcagcacacctttatcgaactttagccggccgataagtaaagtcttaagtaagagcgagacgtacgtctcggaacgcacaagatctcctccatctcctggcctcgcacgggtgcaggaagcttggcttagctctgagtcggaaaattcgtccgtggagaatatgacttttccgtggccgccacagcgtcagcattga

SEQ ID NO: 29575 - protein, 400 aa, Muscodor strobelii
  misc_feature: SGI Peptide ID NO. 570159
  misc_feature (1)..(390): NCBI GI: 256730940 Blast Desc: NECHADRAFT_48436 [Nectria haematococca mpVI 77-13-4]
  misc_feature (1)..(366): NCBI GI: 46125517 Blast Desc: FG07136.1 [Gibberella zeae PH-1]
  misc_feature (1)..(158): NCBI GI: 261351507 Blast Desc: conserved [Verticillium albo-atrum VaMs.102]
  misc_feature (1)..(385): NCBI GI: 154295897 Blast Desc: BC1G_13318 [Botryotinia fuckeliana B05.10] gi|150843868|gb|EDN19061.1| BC1G_13318 [Botryotinia fuckeliana B05.10]
  misc_feature (11)..(288): NCBI GI: 154304445 Blast Desc: BC1G_09098 [Botryotinia fuckeliana B05.10] gi|150854078|gb|EDN29270.1| BC1G_09098 [Botryotinia fuckeliana B05.10]
  misc_feature (8)..(300): NCBI GI: 189205935 Blast Desc: conserved [Pyrenophora tritici-repentis Pt-1C-BFP] gi|187975395|gb|EDU42021.1| conserved [Pyrenophora tritici-repentis Pt-1C-BFP]
  misc_feature (7)..(389): NCBI GI: 70992381 Blast Desc: integral membrane protein [Aspergillus fumigatus Af293] gi|66848672|gb|EAL89001.1| integral membrane protein, [Aspergillus fumigatus Af293] gi|159124610|gb|EDP49728.1| A1163]
  misc_feature (22)..(306): NCBI GI: 242805784 Blast Desc: integral membrane protein, [Talaromyces stipitatus ATCC 10500] gi|218715229|gb|EED14651.1| integral membrane protein, [Talaromyces stipitatus ATCC 10500]
  misc_feature (7)..(325): NCBI GI: 85109074 Blast Desc: NCU07649 [Neurospora crassa OR74A] gi|28924355|gb|EAA33496.1| [Neurospora crassa OR74A]
  misc_feature (7)..(389): NCBI GI: 119472085 Blast Desc: integral membrane protein, [Neosartorya fischeri NRRL 181] gi|119406425|gb|EAW16376.1| integral membrane protein, [Neosartorya fischeri NRRL 181]
MAAQDPTAPKDSNGAGLYVAASVTLAISWLSVLLRTYVRAYMTKSFQAEDWVMLAGLANFTASCGFIYAGLDFGLGHHNKALSQYNEIKALEFQALATASYVSNMWLIKLSIGLFLYRLAVQKRYKYTLGISIVVVGIWSLALFFWNIFQCHPVDAQWDYTILEKDPKAACVSVDEIVSAAYALSALTILSDWLYALLPIPMIWTVKMTPQQKVTVIGILGLGVFASIATLIRLKFLSDLTDTADILFAGTNAMIWTLVEPGIAISAASLATIRPLLRRLRIKGFTSSNHSHGNISSQRSRNPRRVSRMPAFGSQDLTLVDIEHGSSANRKSPLPISTPLSNFSRPISKVLSKSETYVSERTRSPPSPGLARVQEAWLSSESENSSVENMTFPWPPQRQH

SEQ ID NO: 29576 - DNA, 3150 bp, Muscodor strobelii
  misc_feature: SGI EST ID NO. CUFF.70052.0
  misc_feature: Variant of the nucleotide sequence at SEQ ID NO 29574
agcggctcttactcatggccgctcaggatccaacagcgcccaaagatagcaatggcgctggtctgtatgtggctgccagtgtcacacttgccatatcatggctttctgttttgttgcgcacatatgtgcgtgcgtatatgacaaaatcgttccaggccgaggattgggttatgctagccggcctagctaacttcacggcctcatgcgggtttatttatgccggacttgactttggcctaggccatcacaacaaagccctttcacaatacaacgagatcaaagcactagagttccaagcattagcgacagcgagctatgtgtcgaatatgtggcttattaaactaagcatcgggctttttctctatcgtcttgccgttcaaaagagatataaatacacgcttggaatcagcatcgtcgtcgttgggatatggagcttggccttatttttctggaatatctttcaatgtcaccctgtcgatgcgcaatgggactacacgatactagagaaggacccgaaagctgcttgcgtttcagttgatgagattgttagcgcagcgtatgcgttgagtgctcttacgatattgtcggattggttatacgctcttctcccgatccccatgatatggacagtcaagatgacaccacaacaaaaagtgacagtcattgggatattaggactgggtgttttcgccagcattgctacacttatccggctaaagtttctatcagatctgaccgataccgcggacatcttattcgccggcacgaacgccatgatatggacactagtcgaacccggcatcgccatctcagccgcaagcctcgccaccatccggcccctactccgacgcctacgtatcaaagggttcaccagcagcaaccacagccacggcaacatatcaagccaaagaagccgaaaccccaggcgacacggatcatcagctaaccggaaatcgcctctccccatcagcacacctttatcgaactttagccggccgataagtaaagtcttaagtaagagcgagacgtacgtctcggaacgcacaagatctcctccatctcctggcctcgcacgggtgcaggaagcttggcttagctctgagtcggaaaattcgtccgtggagaatatgacttttccgtggccgccacagcgtcagcattgaaaaggacgctgtaacttttccgcaatacgatcctcatcgcgattcttttctttaaatatagtatggcctcataacatgttacatgctttatcggagtacgcgtaggaacttatagacttggaggccaagaataggttgggacatgggcttggggaccggcgcattatacaataccatcgaaaactacctacttttcgaaaatggatgggatcttggtcagttgggtgtccaggtggtttatgggtatcgacaatatcattcatgtacaaatttgtacaatactactttgggtgaatattaacatactaggaaattagatctatcaagcgacgtcgtgctttgaaatggctgttatggtacactggcagtcttcgactctcatgccgtgtacatcatggcgttgcatgagatgacatatagcacaattatatattttcactttccctctgacggtttcttcttcttttgtggccttttcaaatcaatctatcttttgcctgtagcgcctggcagaattggcatcaagcgtatgcctgcgatgccgctcatcgtagaagggtatcatgcccatgctgccttatgctgcctcattttcgctaatcatacagagtatccttttgctatttatacaaggcatcccggtgtcccacaggtggaccaccatcgctgcagcaaatttatctcttttcccatgttttactcttaacgccacaaccatgccaaactcgtgattcgtcatcttttgggtatcaaagcgcgatgtccctggattccgtcgtaatcccgcaattcctatgccttgcgccatcatttagcgcctccttccgtgccattctcggcctccgtctctcgcggatcgatcatctcgggctcccagggttcttgttccggaagaggaacgccaaggacaaatttgccctcaactttacccatgccgtatgcagtaccagcattgtcgtctgggttctcaacagtctctttcagatcgaggaccatgcaggttgtcaagaaatcacttggggtacccgtgccgacacgcatcttcaatcctccccagtccagttcaacctttccagatttgcggacgatcaatttgccgatgtagccgccttcagcaggcatgtcgatcggtttctgtttcatgaagctcgcgttcgcgctttcgggaacgtcctcgaccttggcattggggttgttctcgtccatggcgtccacgtcgatggattcagactgcccgttcgaacgcttcttcagaggtggaagcacgggcggaaattggaagaagaacggcttcttgtctttccactgcgggggtactccttcctgacgttcctcgccttcagccggtgtagtgaactgcaaggttctcaacatgtaatctctctcctccatgtcgtaatagtactcggtatcttctgccatcttcttggctctcttgtcctggatctcagggtcaatggcggcgccgtcggcgccaacgagggccttcttcttgagctctggagactcggacgctttgggagctcgggggatatcggccatctcgacattgacgctatcttgacctgtgcctggctcggccttaacggattcttggctctgggacggaatggctgtattccagatcgcattgtcgttgctcgggcccatgcttcgcgcatctccagtcacgaacaggtcctcgtcgtctgagtcctggcgttcttcacgttcaagctcttcctgggtcttgatcttaacctcgggctcttcgtgtcgaatgcgaagcatgccgatgggcagggtgtcccgcgctatctgaacatcccagtctgcgggttggtagagtggggaaccgtcctcggcgaagccgtctgtgagtccattgagcaagtcaatgttgactcgatgctcgtgctcgcgtctgggagcgtaacgacgacggttcgaagattcgccatcggcaggcattctggcacctccgcggccgccagatgcccatgcacca

SEQ ID NO: 29577 - DNA, 1638 bp, Muscodor strobelii
  misc_feature: SGI cDNA ID NO. 570160
  misc_feature: Encodes the peptide sequence at SEQ ID NO 29578
atgccgtcgctcacacaggacctaaacaatggtaatgtccaaatgcaggagcatgtggcaggtgccaatcccagcaactcgacatcagagcccctcactgcgctctctacacctgcagctgcagcaacatccagctcagctgccaccacatctgctgcaacacccagctcagctgccaccacatctgctcgcggaactagtcgcttcaaacccaagaacgtcagacgagaccagtctgagcgtgacaggctagagcaagacagacagcgggacctaaacctccagaaccaggcagaaaagcgcgcgcagcgccgtgcgaaagtcggaaatcggggaagaggacgaggacgtggtcaaggacaaggaaggggcacttttgaataccgcggcttgatcagaagggaagttaccgctagtggaccattctccgccatggcagcagaaggtggatcaggccgtggtgcatgggcatctggcggccgcggaggtgccagaatgcctgccgatggcgaatcttcgaaccgtcgtcgttacgctcccagacgcgagcacgagcatcgagtcaacattgacttgctcaatggactcacagacggcttcgccgaggacggttccccactctaccaacccgcagactgggatgttcagatagcgcgggacaccctgcccatcggcatgcttcgcattcgacacgaagagcccgaggttaagatcaagacccaggaagagcttgaacgtgaagaacgccaggactcagacgacgaggacctgttcgtgactggagatgcgcgaagcatgggcccgagcaacgacaatgcgatctggaatacagccattccgtcccagagccaagaatccgttaaggccgagccaggcacaggtcaagatagcgtcaatgtcgagatggccgatatcccccgagctcccaaagcgtccgagtctccagagctcaagaagaaggccctcgttggcgccgacggcgccgccattgaccctgagatccaggacaagagagccaagaagatggcagaagataccgagtactattacgacatggaggagagagattacatgttgagaaccttgcagttcactacaccggctgaaggcgaggaacgtcaggaaggagtacccccgcagtggaaagacaagaagccgttcttcttccaatttccgcccgtgcttccacctctgaagaagcgttcgaacgggcagtctgaatccatcgacgtggacgccatggacgagaacaaccccaatgccaaggtcgaggacgttcccgaaagcgcgaacgcgagcttcatgaaacagaaaccgatcgacatgcctgctgaaggcggctacatcggcaaattgatcgtccgcaaatctggaaaggttgaactggactggggaggattgaagatgcgtgtcggcacgggtaccccaagtgatttcttgacaacctgcatggtcctcgatctgaaagagactgttgagaacccagacgacaatgctggtactgcatacggcatgggtaaagttgagggcaaatttgtccttggcgttcctcttccggaacaagaaccctgggagcccgagatgatcgatccgcgagagacggaggccgagaatggcacggaaggaggcgctaaatga

SEQ ID NO: 29578 - protein, 545 aa, Muscodor strobelii
  misc_feature: SGI Peptide ID NO. 570160
  misc_feature (382)..(518): Pfam Id: PF05132 Pfam Desc: RNA polymerase III RPC4
  misc_feature (441)..(514): Pfam Id: PF05132 Pfam Desc: RNA polymerase III RPC4
  misc_feature (21)..(533): NCBI GI: 116206774 Blast Desc: CHGG_02680 [Chaetomium globosum CBS 148.51] gi|88183277|gb|EAQ90745.1| CHGG_02680 [Chaetomium globosum CBS 148.51]
  misc_feature (68)..(539): NCBI GI: 85098677 Blast Desc: NCU01245 [Neurospora crassa OR74A] gi|12718257|emb|CAC28646.1| related to DNA-directed RNA polymerase III, 47 KD subunit [Neurospora crassa] [Neurospora
  misc_feature (41)..(514): NCBI GI: 46125519 Blast Desc: FG07137.1 [Gibberella zeae PH-1]
  misc_feature (218)..(525): NCBI GI: 256731318 Blast Desc: NECHADRAFT_84675 [Nectria haematococca mpVI 77-13-4]
  misc_feature (68)..(535): NCBI GI: 39958535 Blast Desc: MGG_09265 [Magnaporthe grisea 70-15] gi|145013285|gb|EDJ97926.1| MGG_09265 [Magnaporthe grisea 70-15]
  misc_feature (370)..(514): NCBI GI: 156041196 Blast Desc: SS1G_11577 [Sclerotinia sclerotiorum 1980] gi|154695960|gb|EDN95698.1| SS1G_11577 [Sclerotinia sclerotiorum 1980]
  misc_feature (318)..(524): NCBI GI: 171692287 Blast Desc: protein product [Podospora anserina] gi|170946092|emb|CAP72893.1| protein product [Podospora anserina]
  misc_feature (139)..(514): NCBI GI: 258566724 Blast Desc: [Uncinocarpus reesii 1704] gi|237905552|gb|EEP79953.1| [Uncinocarpus reesii 1704]
  misc_feature (387)..(514): NCBI GI: 255953001 Blast Desc: Pc21g01870 [Penicillium chrysogenum Wisconsin 54-1255] gi|211588964|emb|CAP95084.1| Pc21g01870 [Penicillium chrysogenum Wisconsin 54-1255]
  misc_feature (187)..(514): NCBI GI: 240107086 Blast Desc: RNA polymerase III RPC4 family protein [Coccidioides posadasii C735 delta SOWgp]
MPSLTQDLNNGNVQMQEHVAGANPSNSTSEPLTALSTPAAAATSSSAATTSAATPSSAATTSARGTSRFKPKNVRRDQSERDRLEQDRQRDLNLQNQAEKRAQRRAKVGNRGRGRGRGQGQGRGTFEYRGLIRREVTASGPFSAMAAEGGSGRGAWASGGRGGARMPADGESSNRRRYAPRREHEHRVNIDLLNGLTDGFAEDGSPLYQPADWDVQIARDTLPIGMLRIRHEEPEVKIKTQEELEREERQDSDDEDLFVTGDARSMGPSNDNAIWNTAIPSQSQESVKAEPGTGQDSVNVEMADIPRAPKASESPELKKKALVGADGAAIDPEIQDKRAKKMAEDTEYYYDMEERDYMLRTLQFTTPAEGEERQEGVPPQWKDKKPFFFQFPPVLPPLKKRSNGQSESIDVDAMDENNPNAKVEDVPESANASFMKQKPIDMPAEGGYIGKLIVRKSGKVELDWGGLKMRVGTGTPSDFLTTCMVLDLKETVENPDDNAGTAYGMGKVEGKFVLGVPLPEQEPWEPEMIDPRETEAENGTEGGAK

SEQ ID NO: 29579 - DNA, 3748 bp, Muscodor strobelii
  misc_feature: SGI EST ID NO. CUFF.70053.1
  misc_feature: Variant of the nucleotide sequence at SEQ ID NO 29577
gtcgcgggaacatcctcagagccgtgtctaatatccagtgtaacgcagatggtataaaacatgtcgtcgcgcggaggtgagagcagtggagcgactcgaggcggtcgaggtggaaggggtggaagaggtggaagaggtcgcggccgtggtgcagcctcagcctcagccgcatcccaagccgcatcttcagccatgccgtcgctcacacaggacctaaacaatggtaatgtccaaatgcaggagcatgtggcaggtgccaatcccagcaactcgacatcagagcccctcactgcgctctctacacctgcagctgcagcaacatccagctcagctgccaccacatctgctgcaacacccagctcagctgccaccacatctgctcgcggaactagtcgcttcaaacccaagaacgtcagacgagaccagtctgagcgtgacaggctagagcaagacagacagcgggacctaaacctccagaaccaggcagaaaagcgcgcgcagcgccgtgcgaaagtcggaaatcggggaagaggacgaggacgtggtcaaggacaaggaaggggcacttttgaataccgcggcttgatcagaagggaagttaccgctagtggaccattctccgccatggcagcagaaggtggatcaggccgtggtgcatgggcatctggcggccgcggaggtgccagaatgcctgccgatggcgaatcttcgaaccgtcgtcgttacgctcccagacgcgagcacgagcatcgagtcaacattgacttgctcaatggactcacagacggcttcgccgaggacggttccccactctaccaacccgcagactgggatgttcagatagcgcgggacaccctgcccatcggcatgcttcgcattcgacacgaagagcccgaggttaagatcaagacccaggaagagcttgaacgtgaagaacgccaggactcagacgacgaggacctgttcgtgactggagatgcgcgaagcatgggcccgagcaacgacaatgcgatctggaatacagccattccgtcccagagccaagaatccgttaaggccgagccaggcacaggtcaagatagcgtcaatgtcgagatggccgatatcccccgagctcccaaagcgtccgagtctccagagctcaagaagaaggccctcgttggcgccgacggcgccgccattgaccctgagatccaggacaagagagccaagaagatggcagaagataccgagtactattacgacatggaggagagagattacatgttgagaaccttgcagttcactacaccggctgaaggcgaggaacgtcaggaaggagtacccccgcagtggaaagacaagaagccgttcttcttccaatttccgcccgtgcttccacctctgaagaagcgttcgaacgggcagtctgaatccatcgacgtggacgccatggacgagaacaaccccaatgccaaggtcgaggacgttcccgaaagcgcgaacgcgagcttcatgaaacagaaaccgatcgacatgcctgctgaaggcggctacatcggcaaattgatcgtccgcaaatctggaaaggttgaactggactggggaggattgaagatgcgtgtcggcacgggtaccccaagtgatttcttgacaacctgcatggtcctcgatctgaaagagactgttgagaacccagacgacaatgctggtactgcatacggcatgggtaaagttgagggcaaatttgtccttggcgttcctcttccggaacaagaaccctgggagcccgagatgatcgatccgcgagagacggaggccgagaatggcacggaaggaggcgctaaatgatggcgcaaggcataggaattgcgggattacgacggaatccagggacatcgcgctttgatacccaaaagatgacgaatcacgagtttggcatggttgtggcgttaagagtaaaacatgggaaaagagataaatttgctgcagcgatggtggtccacctgtgggacaccgggatgccttgtataaatagcaaaaggatactctgtatgattagcgaaaatgaggcagcataaggcagcatgggcatgatacccttctacgatgagcggcatcgcaggcatacgcttgatgccaattctgccaggcgctacaggcaaaagatagattgatttgaaaaggccacaaaagaagaagaaaccgtcagagggaaagtgaaaatatataattgtgctatatgtcatctcatgcaacgccatgatgtacacggcatgagagtcgaagactgccagtgtaccataacagccatttcaaagcacgacgtcgcttgatagatctaatttcctagtatgttaatattcacccaaagtagtattgtacaaatttgtacatgaatgatattgtcgatacccataaaccacctggacacccaactgaccaagatcccatccattttcgaaaagtaggtagttttcgatggtattgtataatgcgccggtccccaagcccatgtcccaacctattcttggcctccaagtctataagttcctacgcgtactccgataaagcatgtaacatgttatgaggccatactatatttaaagaaaagaatcgcgatgaggatcgtattgcggaaaagttacagcgtccttttcaatgctgacgctgtggcggccacggaaaagtcatattctccacggacgaattttccgactcagagctaagccaagcttcctgcacccgtgcgaggccaggagatggaggagatcttgtgcgttccgagacgtacgtctcgctcttacttaagactttacttatcggccggctaaagttcgataaaggtgtgctgatggggagaggcgatttccggttagctgatgatccgtgctcgatgtcgactaacgtcagatcttgggagccgaaggcgggcattcgactcactcgcctggggtttcggcttctttggcttgatatgttgccgtggctgtggttgctgctggtgaaccctttgatacgtaggcgtcggagtaggggccggatggtggcgaggcttgcggctgagatggcgatgccgggttcgactagtgtccatatcatggcgttcgtgccggcgactttgagcagatgttagtgatctgtccagaaaggtgatattttgttccggtggataaggttaatgaagagtgtgactgacataagatgtccgcggtatcggtcagatctgatagaaactttagccggataagtgtagcaatgctggcgaaaacacccagtcctaatatcccaatgactgtcactttttgttgtggtgtcatcttgactgtccatatcatggggatcgggagaagagcgtataaccaatccgacaatatcgtaagagcactcaacgcatacgctgcgctaacaatctcatcaactgaaacgcaagcagctttcgggtccttctctagtatcgtgtagtcccattgcgcatcgacagggtgacattgaaagatattccagaaaaataaggccaagctccatatcccaacgacgacgatgctgattccaagcgtgtatttatatctcttttgaacggcaagacgatagagaaaaagcccgatgcttagtttaataagccacatattcgacacatagctcgctgtcgctaatgcttggaactctagtgctttgatctcgttgtattgtgaaagggctttgttgtgatggcctaggccaaagtcaagtccggcataaataaacccgcatgaggccgtgaagttag

SEQ ID NO: 29580 - DNA, 993 bp, Muscodor strobelii
  misc_feature: SGI cDNA ID NO. 570161
  misc_feature: Encodes the peptide sequence at SEQ ID NO 29581
atgacatcgcccttccctaaatcctcctcggcacccggcgagggtcgaatagtcgtcaagctgctgccgaacaatgtctctgccctggagaatctcacctaccagtatcctctcaagctgatctctccttcgcccaaacatgaccagccttgcgtcttggtcttcctcctctcatatggaggtggtcttgtcggcggagaccgagtcaacctgtccatcgaggttcaacctggcgccaagctcagcatcgtcacgcagggtcataccaaggtttttcagtcaatcactccagacgtagtgacaagacaggctcttcgggtgaccatcgcaaaggatgctgctctctgtcttctgcccgacccagttcagcccttcgaaaaaagtgtttacgagcagtttcagacattccacatggcagaaggttcatctttatgcttcttagattgggtgactcatggtcggtctgcccgaggcgaaaactggagtctgacccgatgggttgggcgcaacgaggtgtgggcaacggcgtcccaagaccagaagcctcggcttctagtccgcgatgccgttatccttgatggcggttcacgctcatcccagctccagagcttgccagaatcgatgtacaaaaatgcggtcgtaggcacacttatcttacggggcccgctcatgaagcaaaccggcgaatttttccttgcagaatttgataccctgccgagacttggtgctcgtgatttcagaagtgcggaaagaagagaaaaagatgctgctatctcacagtctcggacagaagtctggcgcgaagcaagacttagacaagagaaagagtccaatgtcctctggtcagcagccaatgttcgtggctgtgtgatcgtcaaatttggcgcggccactgtggaagccggccgtcactggataaactcgatgctccttcaggagggtagcgtcgagcggaattttggagaacaagcattgatgtgcgttcaatattga

SEQ ID NO: 29581 - protein, 330 aa, Muscodor strobelii
  misc_feature: SGI Peptide ID NO. 570161
  misc_feature (53)..(267): Pfam Id: PF01774 Pfam Desc: UreD urease accessory protein
  misc_feature (53)..(222): Pfam Id: PF01774 Pfam Desc: UreD urease accessory protein
  misc_feature (1)..(329): NCBI GI: 85098681 Blast Desc: NCU01246 [Neurospora crassa OR74A] gi|12718256|emb|CAC28645.1| conserved [Neurospora crassa] gi|28922161|gb|EAA31413.1| conserved [Neurospora crassa OR74A]
  misc_feature (1)..(329): NCBI GI: 116206776 Blast Desc: CHGG_02681 [Chaetomium globosum CBS 148.51] gi|88183278|gb|EAQ90746.1| CHGG_02681 [Chaetomium globosum CBS 148.51]
  misc_feature (1)..(329): NCBI GI: 171692285 Blast Desc: protein product [Podospora anserina] gi|170946091|emb|CAP72892.1| protein product [Podospora anserina]
  misc_feature (2)..(329): NCBI GI: 39958523 Blast Desc: MGG_09264 [Magnaporthe grisea 70-15] gi|145013286|gb|EDJ97927.1| MGG_09264 [Magnaporthe grisea 70-15]
  misc_feature (13)..(327): NCBI GI: 156040976 Blast Desc: SS1G_11466 [Sclerotinia sclerotiorum 1980] gi|154695850|gb|EDN95588.1| SS1G_11466 [Sclerotinia sclerotiorum 1980]
  misc_feature (13)..(329): NCBI GI: 46125521 Blast Desc: FG07138.1 [Gibberella zeae PH-1]
  misc_feature (13)..(329): NCBI GI: 256731319 Blast Desc: NECHADRAFT_105274 [Nectria haematococca mpVI 77-13-4]
  misc_feature (32)..(315): NCBI GI: 154305277 Blast Desc: BC1G_08933 [Botryotinia fuckeliana B05.10] gi|150853675|gb|EDN28867.1| BC1G_08933 [Botryotinia fuckeliana B05.10]
  misc_feature (1)..(329): NCBI GI: 261351505 Blast Desc: urease accessory protein UreD [Verticillium albo-atrum VaMs.102]
  misc_feature (1)..(329): NCBI GI: 169625561 Blast Desc: SNOG_16054 [Phaeosphaeria nodorum SN15] gi|111055513|gb|EAT76633.1| SNOG_16054 [Phaeosphaeria nodorum SN15]
MTSPFPKSSSAPGEGRIVVKLLPNNVSALENLTYQYPLKLISPSPKHDQPCVLVFLLSYGGGLVGGDRVNLSIEVQPGAKLSIVTQGHTKVFQSITPDVVTRQALRVTIAKDAALCLLPDPVQPFEKSVYEQFQTFHMAEGSSLCFLDWVTHGRSARGENWSLTRWVGRNEVWATASQDQKPRLLVRDAVILDGGSRSSQLQSLPESMYKNAVVGTLILRGPLMKQTGEFFLAEFDTLPRLGARDFRSAERREKDAAISQSRTEVWREARLRQEKESNVLWSAANVRGCVIVKFGAATVEAGRHWINSMLLQEGSVERNFGEQALMCVQY

SEQ ID NO: 29582 - DNA, 1134 bp, Muscodor strobelii
  misc_feature: SGI EST ID NO. CUFF.70031.0
  misc_feature: Variant of the nucleotide sequence at SEQ ID NO 29580
catacctatacttttcattgtagattcaacgtcagaccaggccacgaagagctctaagtgagcaagagcaatcatctgatatgattcaatttacttgacttgaagctcattaggagacgcttttagactctgaacgcttagaaacatctttatcgctatatacctcttatagtcctcagaaatgaacgaacctcctgtcaacctttgaacccaacgactctttaaacaagacgtagaaaggtcaattgcccacaaatttacaccagtatgacttctggttattatctaaagatcattttgcctcttttgtcaacatgacatcgcccttccctaaatcctcctcggcacccggcgagggtcgaatagtcgtcaagctgctgccgaacaatgtctctgccctggagaatctcacctaccagtatcctctcaagctgatctctccttcgcccaaacatgaccagccttgcgtcttggtcttcctcctctcatatggaggtggtcttgtcggcggagaccgagtcaacctgtccatcgaggttcaacctggcgccaagctcagcatcgtcacgcagggtcataccaaggtttttcagtcaatcactccagacgtagtgacaagacaggctcttcgggtgaccatcgcaaaggatgctgctctctgtcttctgcccgacccagttcagcccttcgaaaaaagtgtttacgagcagtttcagacattccacatggcagaaggttcatctttatgcttcttagattgggtgactcatggtcggtctgcccgaggcgaaaactggagtctgacccgatgggttgggcgcaacgaggtgtgggcaacggcgtcccaagaccagaagcctcggcttctagtccgcgatgccgttatccttgatggcggttcacgctcatcccagctccagagcttgccagaatcgatgtacaaaaatgcggtcgtaggcacacttatcttacggggcccgctcatgaagcaaaccggcgaatttttccttgcagaatttgataccctgccgagacttggtgctcgtgatttcagaagtgcggaaagaagagaaaaagatgctgctatctcacagtctcggacagaagtctggcgcgaagcaagacttagacaag

SEQ ID NO: 29583 - DNA, 3543 bp, Muscodor strobelii
  misc_feature: SGI cDNA ID NO. 570162
  misc_feature: Encodes the peptide sequence at SEQ ID NO 29584
atggagaccgacgacaacaacgcgacgagctcgcccgcgccgcgccgctccggacgcgccagggtcgcccctcagaaattcagcccgccgccgcacgcgtcacaggcccacgacaacgcctcgtccaagcgcaaacgggcccacgacaacgacggcgacgatgacgatgacgacgacctggagaacgaggccgatgcccccaacgaggacgacgagatcccggcaagcgacgacaacgacgcggacgaggacagcggcgccgacgtcgacgacgagcctgcacgccgatccaagaaatccagacctgcttccaagtcccgctccaagaagcccgccgccaagcgcacaaaagtcaatggcactgcgccaggccccctcgctgtccctgccgtcaaactgcctaatcggcccaagaagacagtcaagattgccagcgtcgcaaaccgcgaggcggacgatctctacgctgaggtcttcggatccggtcactcatccgacgacgtagcagcgcattggttccagcgctaccaggaggacgatgccaaagccttgaccgagctgatcaactgtgttcttctcgctgccggctgcgaacatcagctcacagacgacgatattcgagatccagaaaactcggccaacaggttgactgagctcgaggaggcctacgagcagactagcatctcagattatccactcatctcgagagccaagagcagcaagaacttccgcgaactcctcgtcggattcttcgactcgctcatcagtttacttcatcagaccgacactctctatagcgataccccactgctagacaacatacaacgatggttcggcatcatgtctgcctcggctctgaggccgttcaggcatacagccacgactgtcggtctggcgatgctgacatcactgatagatgttatgaagcaactggacgatcgcatggccaaatcaaatcagtccttacaaactgaaacccatcgccgcgggaagaacaaaaccttgatcgaaaacatgcagaaagccttggacactgcgaatgggaatcgcgagtttgtcgactctcgggtcaaggacctcttcgacatcattttcgtccaccggtatcgtgacatagatcccaaaattcgcgctgaatgtattgaagccctggggacgtgggtttgtacgttaccaacgatgtacatggctcccgaatatttacgatatctcggatggctactctctgacgtgaatgtcacaacacgtttggaggtactaaagcagctaggaagagtcttgaagcgagatgcagaaaaattggcccacttcatcgatcgattccgaccaagacttgtggagatggctacgaaggattcggaaatagctgttcgcgtcgctgcgatagctgttgtggacaccttgcgagcatctggcatgcttgagcccgaagaagttgatgccgtcagcaagatgctcttcgattcggagatccgagtgcgtaaagcagtcgtcgggtttttctctgaactagttcaggaacaaattgacaacaaggttgacgagatcggtggaagcgacgccctggaagaggtatttggcgatgccgaagatgacgattatgagtctttgagcaagaattggatcaatatcaaggcattggctgagaacttatcagtctatgacactcagctagatgctgaacaggatgaaatcagacatggcctcgatgttgctgcagacgtggtgaacgccaacataccagagagccgaattgcactagctgcacaggctctctgtgagaaaacaccggagatcgtgaactggcaagttatcgccggttacctactttatgatcacactacgagctccaagtccagatcctcaaaaacaaactcaaaagagcttgccacgaaaaaagcagtagcaccggagtcccaggaagaagctatcctacttgatgttcttgctactgcggtgaaagaaggcttggtctcttcggcagaccaggataagagtaggaggcgcccgcacagactggagggcgatgcgcaagacgatgcagcactccaactcgccggaattattccccgcctactgaacaaattcggtgctgatccggccatggctgctactgttctgcgtctagagcatttcttagatctggacgtcttcagacagctccggcaggattcaggcacctatgatctgctccttgatgagatagcgacacagttcagccgccatgtcgaccaggcgctacttaacgaagctatagcatctttccttcatgccagacagtacgacgagctagaggaacttgtcgattccaagatggcaatgctatgggaagactccattaatgctttacgcggtctagacaagatttgcgaactctcacaacgaggcaatctcgatagggtaaccctcacaagtttaagggaagtacttatgaaaatcagcaaattggtcgtagtatcagattgtattgaggtacttgaagctcctggcgactctgttgattcggatcagccaaccatcaagatcctagtggatatcgttgcccgtggacgtcttacagaatcagatgacgaactcgacgaccccgaggatgaggtcgtcgcttttgcaataaaagcgagtttgttgtacttcatgtggaagacacaaagactacgaaaggctatcgataatagcgaggacattcctaacgaagatttcgacaggtttgtcgttctacggaaagagtttattacaaacctgattcacacattctcgtctcgtgggttcaatgacgatcttcgcctcaatgctgttggtgtcgcttgcgaattcacggcgctctttgttttcctcagacaacacatagatgggccagagtccgccaaatacaggaaaacaaaggcgctcttagaagatatgccaacaggtctgatcacagcagaaattattcccatcttcgatgccgcagagagagcttacgctaagcgctcaaagaagaccctggccgagcccgcggacgacgatgagccacttgacgatgacttgccgccagaggacgatgaagaggaagagctaacagagcaagagcgcttcgccgctgagttaaaagcggagaagatactctgtgagctcacggggaagctggtcatagccatcctggccagaaccatcgaccactctggagtagaggcgggcaagctcaggaaacgaattcttcgcaataagactaagctcggacccaattttagagaggtcgtcgcatatctagacgagaatcatttgcgcgaattacagggaggaaagaagaaacctagtgccaagagtagaggcaaggaggtcgccaagaagccggctctgagcacggaactggtcatcgatgacgacgacgatgagatgccgcagatagaggacccattcgaggatatggagcccgaagagggaaccgcagaggatttaagacgaagagagctactggatgatccgattgaggacgatgacgaggaagaggaagcacccgccgagaatcaggcggatgaggatgatgatatcctaggcgattaa

SEQ ID NO: 29584 - protein, 1180 aa, Muscodor strobelii
  misc_feature: SGI Peptide ID NO. 570162
  misc_feature (226)..(348): Pfam Id: PF08514 Pfam Desc: STAG domain
  misc_feature (1)..(1180): NCBI GI: 116206776 Blast Desc: CHGG_02681 [Chaetomium globosum CBS 148.51] gi|88183278|gb|EAQ90746.1| CHGG_02681 [Chaetomium globosum CBS 148.51]
  misc_feature (5)..(1180): NCBI GI: 256730942 Blast Desc: NECHADRAFT_84677 [Nectria haematococca mpVI 77-13-4]
  misc_feature (1)..(1156): NCBI GI: 12718255 Blast Desc: related to nuclear protein SA-1 [Neurospora crassa]
  misc_feature (1)..(1109): NCBI GI: 171692283 Blast Desc: protein product [Podospora anserina] gi|170946090|emb|CAP72891.1| protein product [Podospora anserina]
  misc_feature (7)..(1180): NCBI GI: 46125523 Blast Desc: FG07139.1 [Gibberella zeae PH-1]
  misc_feature (1)..(1156): NCBI GI: 164426096 Blast Desc: NCU01247 [Neurospora crassa OR74A] gi|157071197|gb|EAA31414.2| [Neurospora crassa OR74A]
  misc_feature (1)..(1156): NCBI GI: 145612343 Blast Desc: MGG_07070 [Magnaporthe grisea 70-15] gi|145019529|gb|EDK03757.1| MGG_07070 [Magnaporthe grisea 70-15]
  misc_feature (6)..(1152): NCBI GI: 261351504 Blast Desc: mitotic cohesin complex [Verticillium albo-atrum VaMs.102]
  misc_feature (5)..(1163): NCBI GI: 156040974 Blast Desc: SS1G_11465 [Sclerotinia sclerotiorum 1980] gi|154695849|gb|EDN95587.1| SS1G_11465 [Sclerotinia sclerotiorum 1980]
  misc_feature (1)..(931): NCBI GI: 154305279 Blast Desc: BC1G_08934 [Botryotinia fuckeliana B05.10] gi|150853676|gb|EDN28868.1| BC1G_08934 [Botryotinia fuckeliana B05.10]
METDDNNATSSPAPRRSGRARVAPQKFSPPPHASQAHDNASSKRKRAHDNDGDDDDDDDLENEADAPNEDDEIPASDDNDADEDSGADVDDEPARRSKKSRPASKSRSKKPAAKRTKVNGTAPGPLAVPAVKLPNRPKKTVKIASVANREADDLYAEVFGSGHSSDDVAAHWFQRYQEDDAKALTELINCVLLAAGCEHQLTDDDIRDPENSANRLTELEEAYEQTSISDYPLISRAKSSKNFRELLVGFFDSLISLLHQTDTLYSDTPLLDNIQRWFGIMSASALRPFRHTATTVGLAMLTSLIDVMKQLDDRMAKSNQSLQTETHRRGKNKTLIENMQKALDTANGNREFVDSRVKDLFDIIFVHRYRDIDPKIRAECIEALGTWVCTLPTMYMAPEYLRYLGWLLSDVNVTTRLEVLKQLGRVLKRDAEKLAHFIDRFRPRLVEMATKDSEIAVRVAAIAVVDTLRASGMLEPEEVDAVSKMLFDSEIRVRKAVVGFFSELVQEQIDNKVDEIGGSDALEEVFGDAEDDDYESLSKNWINIKALAENLSVYDTQLDAEQDEIRHGLDVAADVVNANIPESRIALAAQALCEKTPEIVNWQVIAGYLLYDHTTSSKSRSSKTNSKELATKKAVAPESQEEAILLDVLATAVKEGLVSSADQDKSRRRPHRLEGDAQDDAALQLAGIIPRLLNKFGADPAMAATVLRLEHFLDLDVFRQLRQDSGTYDLLLDEIATQFSRHVDQALLNEAIASFLHARQYDELEELVDSKMAMLWEDSINALRGLDKICELSQRGNLDRVTLTSLREVLMKISKLVVVSDCIEVLEAPGDSVDSDQPTIKILVDIVARGRLTESDDELDDPEDEVVAFAIKASLLYFMWKTQRLRKAIDNSEDIPNEDFDRFVVLRKEFITNLIHTFSSRGFNDDLRLNAVGVACEFTALFVFLRQHIDGPESAKYRKTKALLEDMPTGLITAEIIPIFDAAERAYAKRSKKTLAEPADDDEPLDDDLPPEDDEEEELTEQERFAAELKAEKILCELTGKLVIAILARTIDHSGVEAGKLRKRILRNKTKLGPNFREVVAYLDENHLRELQGGKKKPSAKSRGKEVAKKPALSTELVIDDDDDEMPQIEDPFEDMEPEEGTAEDLRRRELLDDPIEDDDEEEEAPAENQADEDDDILGD

SEQ ID NO: 29585 - DNA, 1193 bp, Muscodor strobelii
  misc_feature: SGI EST ID NO. CUFF.70034.0
  misc_feature: Variant of the nucleotide sequence at SEQ ID NO 29583
gctttgagtaacacaagggtagatagggtagatagcgtaacagattcatgtcacatgttcgtcacaggggcaggagggtgagttgcgaacgacccgcttctactagagtatggggcatcctgcccgtgtttgggcgcggccccaccacgaccatcaaagcctggacaaacacgcgcccaccactttggcaagtgcggatgtactgtagtgtggtgtagtgtacagtagacatgtaccctggccagtccaacccacccagaatcgccaaaccagtctcgcgcacccgacctacaccatcaacaacaacgccaattccacccacacctcctgtattctgtcgcaacacctcgcggggagacatggtcgcgtcgcattgatttcgccaacattcatgtcctccgcccgattgcccctgatggagaccgacgacaacaacgcgacgagctcgcccgcgccgcgccgctccggacgcgccagggtcgcccctcagaaattcagcccgccgccgcacgcgtcacaggcccacgacaacgcctcgtccaagcgcaaacgggcccacgacaacgacggcgacgatgacgatgacgacgacctggagaacgaggccgatgcccccaacgaggacgacgagatcccggcaagcgacgacaacgacgcggacgaggacagcggcgccgacgtcgacgacgagcctgcacgccgatccaagaaatccagacctgcttccaagtcccgctccaagaagcccgccgccaagcgcacaaaagtcaatggcactgcgccaggccccctcgctgtccctgccgtcaaactgcctaatcggcccaagaagacagtcaagattgccagcgtcgcaaaccgcgaggcggacgatctctacgctgaggtcttcggatccggtcactcatccgacgacgtagcagcgcattggttccagcgctaccaggaggacgatgccaaagccttgaccgagctgatcaactgtgttcttctcgctgccggctgcgaacatcagctcacagacgacgatattcgagatccagaaaactcggccaacaggttgactgagctcgaggaggcctacgagcagactagcatctcagattatccactcatctcgagagccaagagcagcaagaacttccgcgaactcctcgtcggattcttcgactcgctcatcagtttacttcatc

SEQ ID NO: 29586 - DNA, 924 bp, Muscodor strobelii
  misc_feature: SGI cDNA ID NO. 570163
  misc_feature: Elevated expression when VOC is produced
  misc_feature: Encodes the peptide sequence at SEQ ID NO 29587
atgaataactcagccagttcacccgataaaacagacgaggaaaagattaccgaaatcaacaccaccggagctcactcacagatctcggaaacaaccttccacgaattcacacgactcccccctgagttgcgaatccaaatttacgctaacgcggctgcagcctcaccctcaatccgcactctcggaatctcccggtcaagccccttccttgctccccaagtctctatccacaccctccaacagcatcacccgctccacgcactctggcataccagcttcgagaccagagatgaaataaaacgcttatgtatagacctccccacgcgctacgtagacgatatcggcatcaacatgctcgatttaaaccaagaagagtacacaaggcggccagggaggacagcagagatggagcgaaaaatatatcatcgtgatacggtctttcttatggatgatgagactgctatcgatattttgttgaatgaagatgaggctgtgagtagtgttgtggaaaggctgacttgggtcaggagtttgatgctttatggaagtacgtttgagcacgtttgcctagagtgcgatgagccgtttaccgatgcgctgcttgcgaagttgcccaatttacagagagtttttgtggcttttatgaaacggtatgaagacgttgggcttgtcgaagggacttttgaggatgtgaccagggagatcgaggttgtgagggatggagaagggtggaaagtgtgcgttggtggcgatggaggaagattggaccttgaattgcaagcgatgatcattgagactatcagtcacacagatgaggaggttgaggagatgaagcaggctggtattgaggtaacttgggttgtggtagaggagggtgttgttaaggttccgtatttttgggattggcagtatttcatggattag

SEQ ID NO: 29587 - protein, 307 aa, Muscodor strobelii
  misc_feature: SGI Peptide ID NO. 570163
  misc_feature: Useful for introducing or modulating the production of volatile compounds
MNNSASSPDKTDEEKITEINTTGAHSQISETTFHEFTRLPPELRIQIYANAAAASPSIRTLGISRSSPFLAPQVSIHTLQQHHPLHALWHTSFETRDEIKRLCIDLPTRYVDDIGINMLDLNQEEYTRRPGRTAEMERKIYHRDTVFLMDDETAIDILLNEDEAVSSVVERLTWVRSLMLYGSTFEHVCLECDEPFTDALLAKLPNLQRVFVAFMKRYEDVGLVEGTFEDVTREIEVVRDGEGWKVCVGGDGGRLDLELQAMIIETISHTDEEVEEMKQAGIEVTWVVVEEGVVKVPYFWDWQYFMD

SEQ ID NO: 29588 - DNA, 926 bp, Muscodor strobelii
  misc_feature: SGI EST ID NO. CUFF.70040.0
  misc_feature: Variant of the nucleotide sequence at SEQ ID NO 29586
caaattccaacatcgaaatatatgagagtaacaacatgaataactcagccagttcacccgataaaacagacgaggaaaagattaccgaaatcaacaccaccggagctcactcacagatctcggaaacaaccttccacgaattcacacgactcccccctgagttgcgaatccaaatttacgctaacgcggctgcagcctcaccctcaatccgcactctcggaatctcccggtcaagccccttccttgctccccaagtctctatccacaccctccaacagcatcacccgctccacgcactctggcataccagcttcgagaccagagatgaaataaaacgcttatgtatagacctccccacgcgctacgtagacgatatcggcatcaacatgctcgatttaaaccaagaagagtacacaaggcggccagggaggacagcagagatggagcgaaaaatatatcatcgtgatacggtctttcttatggatgatgagactgctatcgatattttgttgaatgaagatgaggctgtgagtagtgttgtggaaaggctgacttgggtcaggagtttgatgctttatggaagtacgtttgagcacgtttgcctagagtgcgatgagccgtttaccgatgcgctgcttgcgaagttgcccaatttacagagagtttttgtggcttttatgaaacggtatgaagacgttgggcttgtcgaagggacttttgaggatgtgaccagggagatcgaggttgtgagggatggagaagggtggaaagtgtgcgttggtggcgatggaggaagattggaccttgaattgcaagcgatgatcattgagactatcagtcacacagatgaggaggttgaggagatgaagcaggctggtattgaggtaacttgggttgtggtagaggagggtgttgttaaggttccg

SEQ ID NO: 29589 - DNA, 1350 bp, Muscodor strobelii
  misc_feature: SGI cDNA ID NO. 570164
  misc_feature: Encodes the peptide sequence at SEQ ID NO 29590
atgcttcttgcggctggcaagtcttctttcgtagaagtcatcgaggaccatgacacatggcgaattgttgtatcaggtggcattggcgagtttcttgctggtctgtacgcttttaatattctctgtgttatctggaccgcagtcgatatgaggagatacaccacgggcctccgttggtatccaggatcacttgcgttgcaactagctcttgtacagggatctaacgtctctgagatattccccaacctcggattaacaggcatctatgatcgagttgctgcaatcgagaaacaagagaagcatggtggtttcaggctaggatattggaaacaccggagatcggggcaaattatacacggcatcaggtttgtctatcagcgacactcgtcagatgacgactatcgaccaggacatgacggagcattccacgcctcgctcgaaactgtccatagagagcatcctgactacacgtctagagagacgaataatccgagtactgcgcttatgacacacgataatacgttcccggacaatcgttcgcgccacagcagcctggatgatggtctcgctgaaggcctcgaggcaccacggaatcgccgagaaaatcactggaacggctttatcaccatagcttctagaaggcgtttctggaatccctatcttggagatatcactctcatctctctctctaccatcggcagttcttttctcgtcactgcaattgggttttgggcaaagggacaaatttccaaccatattacattcgacaacggaattctcatcagattcggtcctcttcttctatcttctttgcctgttatctttttcggcttcttcagctcatcactgctcgcatcggactaccagcaaagagcgatgacaccaattgatgttatggcatccacacccggaggggctttggcatcagattgcatccttgttgactatctttctgccaatcccgtcttaggcgtgctcaatgctatatctgcaggacactaccaagctgcatggagcatgctactcgctctagtatacccctataacaatctattgaccggtcgtcttttcatcttcaataccgtcagccgtcatgactataacataataactgccaatctggtccttccaaggttttatctagcccttgcactcttggcgttttcctgtgtagcaatatggatcccaaggcctcgtggacctagaagaagctgtttcctcctcgacaatttcgtcagcttaattggtattatttctcatagtccaattctgagatgtcctgaattcggcgcccagtctcaacaaatccaggagaatcacatcagagccatggcggtactcgcagattga

SEQ ID NO: 29590 - protein, 449 aa, Muscodor strobelii
  misc_feature: SGI Peptide ID NO. 570164
  misc_feature (2)..(424): NCBI GI: 212544380 Blast Desc: conserved [Penicillium marneffei ATCC 18224] gi|210065313|gb|EEA19407.1| conserved [Penicillium marneffei ATCC 18224]
  misc_feature (13)..(424): NCBI GI: 145234158 Blast Desc: An02g13190 [Aspergillus niger] gi|134057394|emb|CAK47732.1| protein product [Aspergillus niger]
  misc_feature (13)..(424): NCBI GI: 255939279 Blast Desc: Pc15g01940 [Penicillium chrysogenum Wisconsin 54-1255] gi|211585031|emb|CAP83080.1| Pc15g01940 [Penicillium chrysogenum Wisconsin 54-1255]
  misc_feature (13)..(424): NCBI GI: 159127874 Blast Desc: conserved [Aspergillus fumigatus A1163]
  misc_feature (13)..(424): NCBI GI: 146323339 Blast Desc: conserved [Aspergillus fumigatus Af293] gi|129558339|gb|EAL92822.2| conserved [Aspergillus fumigatus Af293]
  misc_feature (13)..(424): NCBI GI: 119492750 Blast Desc: NFIA_069680 [Neosartorya fischeri NRRL 181] gi|119411854|gb|EAW21797.1| conserved [Neosartorya fischeri NRRL 181]
  misc_feature (19)..(424): NCBI GI: 169595312 Blast Desc: SNOG_00394 [Phaeosphaeria nodorum SN15] gi|160701065|gb|EAT91889.2| SNOG_00394 [Phaeosphaeria nodorum SN15]
  misc_feature (2)..(424): NCBI GI: 242812324 Blast Desc: conserved [Talaromyces stipitatus ATCC 10500] gi|218714273|gb|EED13696.1| conserved [Talaromyces stipitatus ATCC 10500]
  misc_feature (15)..(424): NCBI GI: 154276036 Blast Desc: [Ajellomyces capsulatus NAm1] gi|150413936|gb|EDN09301.1| [Ajellomyces capsulatus NAm1]
  misc_feature (14)..(424): NCBI GI: 121705012 Blast Desc: conserved [Aspergillus clavatus NRRL 1] gi|119398915|gb|EAW09343.1| conserved [Aspergillus clavatus NRRL 1]
MLLAAGKSSFVEVIEDHDTWRIVVSGGIGEFLAGLYAFNILCVIWTAVDMRRYTTGLRWYPGSLALQLALVQGSNVSEIFPNLGLTGIYDRVAAIEKQEKHGGFRLGYWKHRRSGQIIHGIRFVYQRHSSDDDYRPGHDGAFHASLETVHREHPDYTSRETNNPSTALMTHDNTFPDNRSRHSSLDDGLAEGLEAPRNRRENHWNGFITIASRRRFWNPYLGDITLISLSTIGSSFLVTAIGFWAKGQISNHITFDNGILIRFGPLLLSSLPVIFFGFFSSSLLASDYQQRAMTPIDVMASTPGGALASDCILVDYLSANPVLGVLNAISAGHYQAAWSMLLALVYPYNNLLTGRLFIFNTVSRHDYNIITANLVLPRFYLALALLAFSCVAIWIPRPRGPRRSCFLLDNFVSLIGIISHSPILRCPEFGAQSQQIQENHIRAMAVLAD

SEQ ID NO: 29591 - DNA, 825 bp, Muscodor strobelii
  misc_feature: SGI EST ID NO. CUFF.70046.0
  misc_feature: Variant of the nucleotide sequence at SEQ ID NO 29589
ctcgcatcggactaccagcaaagagcgatgacaccaattgatgttatggcatccacacccggaggggctttggcatcagattgcatccttgttgactatctttctgccaatcccgtcttaggcgtgctcaatgctatatctgcaggacactaccaagctgcatggagcatgctactcgctctagtatacccctataacaatctattgaccggtcgtcttttcatcttcaataccgtcagccgtcatgactataacataataactgccaatctggtccttccaaggttttatctagcccttgcactcttggcgttttcctgtgtagcaatatggatcccaaggcctcgtggacctagaagaagctgtttcctcctcgacaatttcgtcagcttaattggtattatttctcatagtccaattctgagatgtcctgaattcggcgcccagtctcaacaaatccaggagaatcacatcagagccatggcggtactcgcagattgacgatatcgattcggcatatagtacggtctcgacagccagtctcatctcggcataacaacagattatctaccaacatggtccgcacagcctgccaatgatcaagaacgcctaatacatcaggtgtcaataacaaaagctacgctaaatggcgaattttatgatggacgttcgcagcagctcatcgatcaattaattggccgttgttcaaacctatgcaatggcaaacaggtattcttgttcctgaaaacatgtggcgggaaaatgggtggcgacgcttccgacgacgcttccgacgacgcaagagacaataggcaacaagcaggg

SEQ ID NO: 29592 - DNA, 1017 bp, Muscodor strobelii
  misc_feature: SGI cDNA ID NO. 570165
  misc_feature: Encodes the peptide sequence at SEQ ID NO 29593
atgataaaaccaaggaacacactttcaagcgggctttacgccctaacggccctcctatccaccagcgtcgcgcttcccagcacgccgcagcaaaccctcatctccatcaggcaagaggccaccggtaacccgatcgacgacggtggttggtggtacgctgacccggacgccatcaaagtcggcgatacttattggatctatgcaacgctttcaatcgcgttcgatgatcaaaagtcctttgacgcgttctcgagcccggatcttaagacgtggacgcggcatcagggcgtgtatcaggcggcacaatcttcttgggttgtagattcgctttgggcgccatgtgttgtgaaggggcaagaggatgataagtattatatgtacatcacggcgaacaatcccgttgcagacgagggagttgtcggtattggggttgctgtcgcggactcaccggctggtccctttctcgatatcggtgatggtcccatcgtaggagaccatattaacggtgcggatcctatggatcagcaggtgttccgcgacgatgatgggtctcagtatctcatctggggcggtagcgctgtgaatatcctgccgctagggtctgacatgacgacgctgggcgcgtggtctgacggctcgacggaggtaaaggacatcacgccgaatgaggggtttggtgagggttcctatatgctgaagcgcgacggggtatactactttatgtggagtgagggaggctacggaacgccagattaccgcgtcgcgtatgctatgtctgagaatctcacggggccgttcaaccgtatcggtctcatgctttcgaaggagggtagtgatgtcgctgatggtccgggacaccactcggtgatccgggaggaggttgatggcgaggagacatactggattgtctaccatcggcgatatattggcgatatggttgcggatgatcgcgttcttgctgtcgatcgtatgtactttaatgaggatgggacgattaagcccgtgatcatgacgtag

SEQ ID NO: 29593 - protein, 338 aa, Muscodor strobelii
  misc_feature: SGI Peptide ID NO. 570165
  misc_feature (45)..(332): Pfam Id: PF04616 Pfam Desc: Glycosyl hydrolases family 43
  misc_feature (52)..(267): Pfam Id: PF04616 Pfam Desc: Glycosyl hydrolases family 43
  misc_feature (9)..(338): NCBI GI: 237717354 Blast Desc: arabinan endo-1,5-alpha-L-arabinosidase A [Bacteroides sp. D1] gi|229443337|gb|EEO49128.1| arabinan endo-1,5-alpha-L-arabinosidase A [Bacteroides sp. D1]
  misc_feature (9)..(338): NCBI GI: 237720301 Blast Desc: arabinan endo-1,5-alpha-L-arabinosidase A [Bacteroides sp. 2_2_4] gi|262406119|ref|ZP_06082669.1| arabinan endo-1,5-alpha-L-arabinosidase A [Bacteroides sp. 2_1_22] A sp. A
  misc_feature (15)..(338): NCBI GI: 29348925 Blast Desc: arabinan endo-1,5-alpha-L-arabinosidase A precursor [Bacteroides thetaiotaomicron VPI-5482] gi|253573036|ref|ZP_04850430.1| arabinan [Bacteroides sp. 1_1_6]
  misc_feature (19)..(338): NCBI GI: 160886597 Blast Desc: BACOVA_04608 [Bacteroides ovatus ATCC 8483] gi|156107008|gb|EDO08753.1| BACOVA_04608 [Bacteroides ovatus ATCC 8483]
  misc_feature (12)..(338): NCBI GI: 167765368 Blast Desc: BACSTE_03756 [Bacteroides stercoris ATCC 43183] gi|167696996|gb|EDS13575.1| BACSTE_03756 [Bacteroides stercoris ATCC 43183]
  misc_feature (12)..(338): NCBI GI: 160890653 Blast Desc: BACUNI_03098 [Bacteroides uniformis ATCC 8492] gi|156859652|gb|EDO53083.1| BACUNI_03098 [Bacteroides uniformis ATCC 8492]
  misc_feature (12)..(338): NCBI GI: 270295753 Blast Desc: arabinan endo-1,5-alpha-L-arabinosidase A [Bacteroides sp. D20] gi|270273157|gb|EFA19019.1| arabinan endo-1,5-alpha-L-arabinosidase A [Bacteroides sp. D20]
  misc_feature (15)..(338): NCBI GI: 154492355 Blast Desc: PARMER_01989 [Parabacteroides merdae ATCC 43184] gi|154087580|gb|EDN86625.1| PARMER_01989 [Parabacteroides merdae ATCC 43184]
  misc_feature (37)..(338): NCBI GI: 237716609 Blast Desc: arabinan endo-1,5-alpha-L-arabinosidase A [Bacteroides sp. D1] gi|262405385|ref|ZP_06081935.1| arabinan endo-1,5-alpha-L-arabinosidase A [Bacteroides sp. 2_1_22] A sp. A
  misc_feature (37)..(338): NCBI GI: 160885337 Blast Desc: BACOVA_03336 [Bacteroides ovatus ATCC 8483] gi|156108959|gb|EDO10704.1| BACOVA_03336 [Bacteroides ovatus ATCC 8483]
  misc_feature (105)..(335): SWISSPROT Homolog: EC 3.2.1.37 Xylan 1,4-beta-xylosidase
MIKPRNTLSSGLYALTALLSTSVALPSTPQQTLISIRQEATGNPIDDGGWWYADPDAIKVGDTYWIYATLSIAFDDQKSFDAFSSPDLKTWTRHQGVYQAAQSSWVVDSLWAPCVVKGQEDDKYYMYITANNPVADEGVVGIGVAVADSPAGPFLDIGDGPIVGDHINGADPMDQQVFRDDDGSQYLIWGGSAVNILPLGSDMTTLGAWSDGSTEVKDITPNEGFGEGSYMLKRDGVYYFMWSEGGYGTPDYRVAYAMSENLTGPFNRIGLMLSKEGSDVADGPGHHSVIREEVDGEETYWIVYHRRYIGDMVADDRVLAVDRMYFNEDGTIKPVIMT

SEQ ID NO: 29594 - DNA, 1506 bp, Muscodor strobelii
  misc_feature: SGI EST ID NO. CUFF.70049.0
  misc_feature: Variant of the nucleotide sequence at SEQ ID NO 29592
atagagtcgagccaagctgctgtgccctggttcttttgacaactcccccgcattttgtgtcgaaggggtccatcgtgagttgcggggttggtgagtgacgtatcgtgggttgatactcacgatggtaagggtctttcgtatccgaataaatgctcgtgccgtccgccacagatagatcgtctgcttccaggatggaggtagcagatttcgaatgctgcactcggaacctcgttgccagtgtgtttccgacgtttagattaacgaagaggtgatacgacaggataatcacgattcatacattcattcgcggagagccctgcggcgtggtacacggcgactgaaggagaatatttagacctcaagaccacctcgtgataaaacaagagacacatggaatcagaacattcatagaccacatcactccttttcaacaatgataaaaccaaggaacacactttcaagcgggctttacgccctaacggccctcctatccaccagcgtcgcgcttcccagcacgccgcagcaaaccctcatctccatcaggcaagaggccaccggtaacccgatcgacgacggtggttggtggtacgctgacccggacgccatcaaagtcggcgatacttattggatctatgcaacgctttcaatcgcgttcgatgatcaaaagtcctttgacgcgttctcgagcccggatcttaagacgtggacgcggcatcagggcgtgtatcaggcggcacaatcttcttgggttgtagattcgctttgggcgccatgtgttgtgaaggggcaagaggatgataagtattatatgtacatcacggcgaacaatcccgttgcagacgagggagttgtcggtattggggttgctgtcgcggactcaccggctggtccctttctcgatatcggtgatggtcccatcgtaggagaccatattaacggtgcggatcctatggatcagcaggtgttccgcgacgatgatgggtctcagtatctcatctggggcggtagcgctgtgaatatcctgccgctagggtctgacatgacgacgctgggcgcgtggtctgacggctcgacggaggtaaaggacatcacgccgaatgaggggtttggtgagggttcctatatgctgaagcgcgacggggtatactactttatgtggagtgagggaggctacggaacgccagattaccgcgtcgcgtatgctatgtctgagaatctcacggggccgttcaaccgtatcggtctcatgctttcgaaggagggtagtgatgtcgctgatggtccgggacaccactcggtgatccgggaggaggttgatggcgaggagacatactggattgtctaccatcggcgatatattggcgatatggttgcggatgatcgcgttcttgctgtcgatcgtatgtactttaatgaggatgggacgattaagcccgtgatcatgacgtaggcgtcgtccgactagatatagaatatcttgataatcaaacaactatctgactctga

SEQ ID NO: 29595 - DNA, 2037 bp, Muscodor strobelii
  misc_feature: SGI cDNA ID NO. 570166
  misc_feature: Encodes the peptide sequence at SEQ ID NO 29596
atggctccaaagatgccctcaagctcagctcgacaggtcggtggtaagaatgagctaccacccgggtacaaaagcatccgtgatctgcttgctggaaatgtgcctcttcatcagttcaccaatgtcataggattagtcaaggatttccgagctcccattccatcgaaaggacaggactttaaatgtaccatcagtgtatatgataaatctgtagaggatgaaaacgctgaacttcgcatcgtggtttttcgcaaagaggctgaaatgccaaatcccgagcttggagatgttatggtcgcctcccaggtcaaggtccagtccttccgtgatgaaatatcagtcatcaccaactacaagagttccattcagatcttcgacgcttctcagatacctgaacctcccaagtctgccaaagtggctttgcgcaaaccatcagttctagatgagcgcaagaaactaggtgataaagagtacgactatatatcatggctgtatcatggcatcgacaagtattatctccccgctgtcgaagaattccaatcgcgagtcaataactccgttcacatcaaagacaaattctgcagactcgagaatgtggtttcaaataagtactacgatatcatcgtcaacgttgtgaaggcgccctatgacgaggtagacaagacgacgatctgggtttcagattacacagcaaacgatgaattttacaaccaccaatggcaagagcccaaccagtcagaggggcgtgatggtgatcccttcggttataccaatgctggcatccaaaccacaggcaaatggacaggaccatacggaaaacgctctatgcaagttacatgcttcggggagcaaggtctatttgccaatcaagacgtgaaattagaccagtggatccgtatccggaatattcgagtgaaacttgatcacaattaccgcaacctagaaggtgcagttcatgaagatcgtgattttcctggtcgccgtgctatcgatatcctgagcacagacgataaagaaaattgcgacgatcgtctcctagctgcaattcgacgcaaactagagtacaacaaactgaagaaaaagcagctcagagaaaaactagcgcctgatgacggcgctgctgctgggacaaagcgaaaggcggatgagcaagatgggcctagaatgaattcaaaagcaaggcgaaacgcaaaacgaaaagcacaattcagcaaagttgaggaagaagacaagagggccgatgagagactaggcctcagtgatcttgtcaaatgcgagagtctcgaacagcccatcactcctgtatcttcgattacgaaaccaattccgtggaaaacatcacttaacggcaaggaggtaacattgacactgccattctgttgcgccaagtaccgcgccaatgtccgcgtggtagactttcgtccaaagaagctggagaacttcgcaacatggcgcaagaacaccgaggcagatatgttgtccgatgtcagtagcgggggatcagatacggaatccggcgaggaagatcacagtaccttggagcgattttcggggaagaaaacctgggagtggcgctttgctctgcagcttgaggatgcagacccgaaagagcgagatggtagtgagagaatctgggttgtagtcgataatagggaagggcagcaactgactgctctcgatgcatctaatctacgcgccgacccggatgcgctttctcaacttcgcgagcagctcttcaagctatggggcaacttagaggaaatcaaggctcaacagcagcaaactctgctccaaaatcggaaacgaatggcagccaacctaccgcctccgagctcgccacctcccggtgacaagaacacagaccacgttcctggtgacaacagtaaagaaagcgccatatccaataagccattcggctgctgcattcaacaatatggcgtacgtgctcgagagtctaaccccaaacgtgctgatgctggggagggacatcggtatcaaagaatgttcgggctcttcggtacgaagatttgtatgtga

SEQ ID NO: 29596 - protein, 678 aa, Muscodor strobelii
  misc_feature: SGI Peptide ID NO. 570166
  misc_feature (110)..(677): NCBI GI: 256731320 Blast Desc: NECHADRAFT_105275 [Nectria haematococca mpVI 77-13-4]
  misc_feature (12)..(676): NCBI GI: 261351503 Blast Desc: conserved [Verticillium albo-atrum VaMs.102]
  misc_feature (20)..(677): NCBI GI: 39971491 Blast Desc: MGG_07061 [Magnaporthe grisea 70-15] gi|145019522|gb|EDK03750.1| MGG_07061 [Magnaporthe grisea 70-15]
  misc_feature (3)..(678): NCBI GI: 16944476 Blast Desc: conserved [Neurospora crassa]
  misc_feature (3)..(678): NCBI GI: 164426094 Blast Desc: NCU01248 [Neurospora crassa OR74A] gi|157071196|gb|EAA31415.2| [Neurospora crassa OR74A]
  misc_feature (68)..(676): NCBI GI: 171692281 Blast Desc: protein product [Podospora anserina] gi|170946089|emb|CAP72890.1| protein product [Podospora anserina]
  misc_feature (120)..(676): NCBI GI: 46125525 Blast Desc: FG07140.1 [Gibberella zeae PH-1]
  misc_feature (180)..(676): NCBI GI: 156040986 Blast Desc: SS1G_11471 [Sclerotinia sclerotiorum 1980] gi|154695855|gb|EDN95593.1| SS1G_11471 [Sclerotinia sclerotiorum 1980]
  misc_feature (5)..(345): NCBI GI: 116206778 Blast Desc: CHGG_02682 [Chaetomium globosum CBS 148.51] gi|88183279|gb|EAQ90747.1| CHGG_02682 [Chaetomium globosum CBS 148.51]
  misc_feature (18)..(676): NCBI GI: 258564708 Blast Desc: [Uncinocarpus reesii 1704] gi|237908606|gb|EEP83007.1| [Uncinocarpus reesii 1704]
MAPKMPSSSARQVGGKNELPPGYKSIRDLLAGNVPLHQFTNVIGLVKDFRAPIPSKGQDFKCTISVYDKSVEDENAELRIVVFRKEAEMPNPELGDVMVASQVKVQSFRDEISVITNYKSSIQIFDASQIPEPPKSAKVALRKPSVLDERKKLGDKEYDYISWLYHGIDKYYLPAVEEFQSRVNNSVHIKDKFCRLENVVSNKYYDIIVNVVKAPYDEVDKTTIWVSDYTANDEFYNHQWQEPNQSEGRDGDPFGYTNAGIQTTGKWTGPYGKRSMQVTCFGEQGLFANQDVKLDQWIRIRNIRVKLDHNYRNLEGAVHEDRDFPGRRAIDILSTDDKENCDDRLLAAIRRKLEYNKLKKKQLREKLAPDDGAAAGTKRKADEQDGPRMNSKARRNAKRKAQFSKVEEEDKRADERLGLSDLVKCESLEQPITPVSSITKPIPWKTSLNGKEVTLTLPFCCAKYRANVRVVDFRPKKLENFATWRKNTEADMLSDVSSGGSDTESGEEDHSTLERFSGKKTWEWRFALQLEDADPKERDGSERIWVVVDNREGQQLTALDASNLRADPDALSQLREQLFKLWGNLEEIKAQQQQTLLQNRKRMAANLPPPSSPPPGDKNTDHVPGDNSKESAISNKPFGCCIQQYGVRARESNPKRADAGEGHRYQRMFGLFGTKICM

SEQ ID NO: 29597 - DNA, 3055 bp, Muscodor strobelii
  misc_feature: SGI EST ID NO. CUFF.70057.2
  misc_feature: Variant of the nucleotide sequence at SEQ ID NO 29595
caggaattccccagttcgtcgctcttgcgtctgctagcggcggggttgcgcattcttttcaacgcctaagtatccaatcttcattttactttggatccttgggccaatgactcccaacaacaagcggaactatgcgaccctgcgcagtttagacagctttcctcaggtcctaagactataaagtttatcggtcttcctcactcttctccaatgtgcctctctcttgtcaagcttttcactttcagcgactaaggcaaggcacgatatgaatcatatacacatcggtgtcatttgcacaggtgcatactcatgtaacgtgtttcatgaactcctattaatgatagaatttgatcaatttattcaaagtatactgttgtgatacaccgtggcatcatcattggtagactcgtgcctcagtgactggcatgcagctgtttcaattccagaaaggctcagagagatgtctcccttttcaccacactatcaaagaccttggaggggctcctttggcggggaactgtaagccaatcagcagtaacttggaatggcgcacagatcacacttcttgaaccgtaaagatcatgtgactacgctcccgtcgaagaaaaatgtggatgccgaccagcatgtacctgtgctctaactcgcacagacttacacctcttaacgcgccttgaacgcgctgtccggggtgggaaatacgaactgattcttacaccctttgcctagcaattgtgattatagtttccaacagatggctacatcttttgggggcttccaatgtaacaaattacatcctcctcttacatcaaaccatggctccaaagatgccctcaagctcagctcgacaggtcggtggtaagaatgagctaccacccgggtacaaaagcatccgtgatctgcttgctggaaatgtgcctcttcatcagttcaccaatgtcataggattagtcaaggatttccgagctcccattccatcgaaaggacaggactttaaatgtaccatcagtgtatatgataaatctgtagaggatgaaaacgctgaacttcgcatcgtggtttttcgcaaagaggctgaaatgccaaatcccgagcttggagatgttatggtcgcctcccaggtcaaggtccagtccttccgtgatgaaatatcagtcatcaccaactacaagagttccattcagatcttcgacgcttctcagatacctgaacctcccaagtctgccaaagtggctttgcgcaaaccatcagttctagatgagcgcaagaaactaggtgataaagagtacgactatatatcatggctgtatcatggcatcgacaagtattatctccccgctgtcgaagaattccaatcgcgagtcaataactccgttcacatcaaagacaaattctgcagactcgagaatgtggtttcaaataagtactacgatatcatcgtcaacgttgtgaaggcgccctatgacgaggtagacaagacgacgatctgggtttcagattacacagcaaacgatgaattttacaaccaccaatggcaagagcccaaccagtcagaggggcgtgatggtgatcccttcggttataccaatgctggcatccaaaccacaggcaaatggacaggaccatacggaaaacgctctatgcaagttacatgcttcggggagcaaggtctatttgccaatcaagacgtgaaattagaccagtggatccgtatccggaatattcgagtgaaacttgatcacaattaccgcaacctagaaggtgcagttcatgaagatcgtgattttcctggtcgccgtgctatcgatatcctgagcacagacgataaagaaaattgcgacgatcgtctcctagctgcaattcgacgcaaactagagtacaacaaactgaagaaaaagcagctcagagaaaaactagcgcctgatgacggcgctgctgctgggacaaagcgaaaggcggatgagcaagatgggcctagaatgaattcaaaagcaaggcgaaacgcaaaacgaaaagcacaattcagcaaagttgaggaagaagacaagagggccgatgagagactaggcctcagtgatcttgtcaaatgcgagagtctcgaacagcccatcactcctgtatcttcgattacgaaaccaattccgtggaaaacatcacttaacggcaaggaggtaacattgacactgccattctgttgcgccaagtaccgcgccaatgtccgcgtggtagactttcgtccaaagaagctggagaacttcgcaacatggcgcaagaacaccgaggcagatatgttgtccgatgtcagtagcgggggatcagatacggaatccggcgaggaagatcacagtaccttggagcgattttcggggaagaaaacctgggagtggcgctttgctctgcagcttgaggatgcagacccgaaagagcgagatggtagtgagagaatctgggttgtagtcgataatagggaagggcagcaactgactgctctcgatgcatctaatctacgcgccgacccggatgcgctttctcaacttcgcgagcagctcttcaagctatggggcaacttagaggaaatcaaggctcaacagcagcaaactctgctccaaaatcggaaacgaatggcagccaacctaccgcctccgagctcgccacctcccggtgacaagaacacagaccacgttcctggtgacaacagtaaagaaagcgccatatccaataagccattcggctgctgcattcaacaatatggcgtacgtgctcgagagtctaaccccaaacgtgctgatgctggggagggacatcggtatcaaagaatgttcgggctcttcggtacgaagatttgtatgtgagaggctatgaagaggtctggtgcgctcccatgtattactgttgcgtttatttgtttgagtctgaggacaggcgttaaatgaagtaagacatgcttttgtgcaaggagttggcggttgcattgttatatacccaatatgcgtctggaattgccgagtaactagaatgatagcacagataccaaaaagtgggtttcaaatgacga

SEQ ID NO: 29598 - DNA, 1656 bp, Muscodor strobelii
  misc_feature: SGI cDNA ID NO. 570167
  misc_feature: Encodes the peptide sequence at SEQ ID NO 29599
atgtctgacaagtacatccccgagcatcgccgcaaccagtacaaggccaagagcaccttcaagcccgacgagctgcgtcggcgccgcgaggaggcccaggtcgagatccgcaaggccaagcgtgaagagaaccttgccaagcgtcgtggcatcggcaccggcgacgaccgtccaggcgcctctctgggtgctgcccccgacagcgacgatgacactgctcctaccgagagccagctcaacgaggacctccccctcatggtccagggagtcttctccgaccagatcgacctccagatttcttccactactaagttcagaaaactgctgtccaaagagcgaaacccgcctatcgaggaggtcatcaagaccggcgtcgtcacccgattcgtcgagttcctccgctctcctcacactctagtccagttcgaggccgcttgggctttgaccaacatcgcctcgggcagcgccacgcagacccaggtcgtcatcgaggccggtgccgtccccatcttcgtcgagctcctcgcctcccccgagcctgatgtccgcgagcaggccgtctgggctctcggcaacatcgccggagacagcccctcctgcagagactacgtcctcagctgtggcgccctcaagcccttgcttaatctgcttggcgacagccgcaagctgagcatgctgcgcaatgccacctggaccctcagcaacttctgcagaggcaagacccctcagcctgactgggccactatcgcccctgccctccctgttctcgctaagttggtgtactccttggatgacgaggtcctgattgatgcttgctgggctatctcctacttgtctgatggatccaacgacaagatccaggccgttatcgaggccggcatcccccgccgtctggtcgagctgctcatgcacgcctcaacttccgtccagacccctgctctccgatctgttggcaacatagtcactggcgacgacgtacagacgcaggtgattattaactgcggtgctctgtcatgcctgctcgctcttcttagctccaacaaggacggcatccgcaaggaggcttgctggaccatctccaacatcactgccggcaattcgcagcagatccaaggggtcatcgatgccaacatcattccccctcttatccacctgctttccaacggcgatcttaagacgcgcaaggaagcatgctgggccatcagcaacgctaccagtggtgggcttcagaagcccgagcagattcggtaccttgtctctcaaggctgcatcaagcctctctgcgacctgctcgcgtgccctgacaataagatcatccaggtcgctctggacggcttggagaatatcctcaaggtcggcgacctcgataagcaggctgctggcgagggccctgactcgatcaaccgttatgcgctgtacatcgaggaatgtggcggcatggagaagattcacgattgccagacgaacgccaatgaggagatttacatgaagtcatacaacatcatcgagaagtacttctccgacgaggacgagaacgcagatgagggtatgggtggccaagccacgggagctaatggcacctttggttttggtacccagggtggcgctcagggcggcttcaacttcgccaacggcgccgactccatggacatgtag

SEQ ID NO: 29599 - protein, 551 aa, Muscodor strobelii
  misc_feature: SGI Peptide ID NO. 570167
  misc_feature (161)..(197): Pfam Id: PF02985 Pfam Desc: HEAT repeat
  misc_feature (155)..(195): Pfam Id: PF00514 Pfam Desc: Armadillo/beta-catenin-like repeat
  misc_feature (366)..(406): Pfam Id: PF00514 Pfam Desc: Armadillo/beta-catenin-like repeat
  misc_feature (324)..(364): Pfam Id: PF00514 Pfam Desc: Armadillo/beta-catenin-like repeat
  misc_feature (113)..(153): Pfam Id: PF00514 Pfam Desc: Armadillo/beta-catenin-like repeat
  misc_feature (197)..(238): Pfam Id: PF00514 Pfam Desc: Armadillo/beta-catenin-like repeat
  misc_feature (282)..(322): Pfam Id: PF00514 Pfam Desc: Armadillo/beta-catenin-like repeat
  misc_feature (411)..(451): Pfam Id: PF00514 Pfam Desc: Armadillo/beta-catenin-like repeat
  misc_feature (240)..(280): Pfam Id: PF00514 Pfam Desc: Armadillo/beta-catenin-like repeat
  misc_feature (2)..(104): Pfam Id: PF01749 Pfam Desc: Importin beta binding domain
  misc_feature (1)..(551): NCBI GI: 46125527 Blast Desc: FG07141.1 [Gibberella zeae PH-1]
  misc_feature (1)..(551): NCBI GI: 256730943 Blast Desc: [Nectria haematococca mpVI 77-13-4]
  misc_feature (1)..(551): NCBI GI: 156040988 Blast Desc: SS1G_11472 [Sclerotinia sclerotiorum 1980] gi|154695856|gb|EDN95594.1| SS1G_11472 [Sclerotinia sclerotiorum 1980]
  misc_feature (1)..(551): NCBI GI: 39971489 Blast Desc: MGG_07060 [Magnaporthe grisea 70-15] gi|145019521|gb|EDK03749.1| MGG_07060 [Magnaporthe grisea 70-15]
  misc_feature (1)..(551): NCBI GI: 85098694 Blast Desc: importin alpha subunit [Neurospora crassa OR74A] gi|12718253|emb|CAC28642.1| importin alpha SRP1 [Neurospora crassa] gi|28922164|gb|EAA31416.1| importin alpha subunit crassa
  misc_feature (1)..(551): NCBI GI: 116206780 Blast Desc: CHGG_02683 [Chaetomium globosum CBS 148.51] gi|88183280|gb|EAQ90748.1| CHGG_02683 [Chaetomium globosum CBS 148.51]
  misc_feature (1)..(551): NCBI GI: 154305335 Blast Desc: BC1G_08962 [Botryotinia fuckeliana B05.10] gi|150853704|gb|EDN28896.1| BC1G_08962 [Botryotinia fuckeliana B05.10]
  misc_feature (1)..(551): NCBI GI: 171692279 Blast Desc: protein product [Podospora anserina] gi|170946088|emb|CAP72889.1| protein product [Podospora anserina]
  misc_feature (1)..(551): NCBI GI: 189199832 Blast Desc: importin subunit alpha-1 [Pyrenophora tritici-repentis Pt-1C-BFP] gi|187983352|gb|EDU48840.1| importin subunit alpha-1 [Pyrenophora tritici-repentis Pt-1C-BFP]
  misc_feature (1)..(551): NCBI GI: 261200291 Blast Desc: importin alpha subunit [Ajellomyces dermatitidis SLH14081] gi|239593618|gb|EEQ76199.1| importin alpha subunit [Ajellomyces dermatitidis SLH14081] gi|239607504|gb|EEQ84491.1|
MSDKYIPEHRRNQYKAKSTFKPDELRRRREEAQVEIRKAKREENLAKRRGIGTGDDRPGASLGAAPDSDDDTAPTESQLNEDLPLMVQGVFSDQIDLQISSTTKFRKLLSKERNPPIEEVIKTGVVTRFVEFLRSPHTLVQFEAAWALTNIASGSATQTQVVIEAGAVPIFVELLASPEPDVREQAVWALGNIAGDSPSCRDYVLSCGALKPLLNLLGDSRKLSMLRNATWTLSNFCRGKTPQPDWATIAPALPVLAKLVYSLDDEVLIDACWAISYLSDGSNDKIQAVIEAGIPRRLVELLMHASTSVQTPALRSVGNIVTGDDVQTQVIINCGALSCLLALLSSNKDGIRKEACWTISNITAGNSQQIQGVIDANIIPPLIHLLSNGDLKTRKEACWAISNATSGGLQKPEQIRYLVSQGCIKPLCDLLACPDNKIIQVALDGLENILKVGDLDKQAAGEGPDSINRYALYIEECGGMEKIHDCQTNANEEIYMKSYNIIEKYFSDEDENADEGMGGQATGANGTFGFGTQGGAQGGFNFANGADSMDM

SEQ ID NO: 29600 - DNA, 2765 bp, Muscodor strobelii
  misc_feature: SGI EST ID NO. CUFF.70084.0
  misc_feature: Variant of the nucleotide sequence at SEQ ID NO 29598
ttccacttcctcccatttcctgccattttctatctgtctctcttccgtcgccaacactgcaggtgcttgttgcatttgcatttgcacgagaggttgttttctgttctccatttgggcgcacgcagtctgatctgccttcccttcgtagtaccggggctttgtgtgtggcaaggactggcatttggggtctatcgtaccaaaaatcaccccgcctcgacttctcctccacccacgcaaactctcccgctgcatctcctctgcatcccactctcgcaacgcacgtcactgtctgccaccagcgtctgtcgccgacagccagccgcagccatgtctgacaagtacatccccgagcatcgccgcaaccagtacaaggccaagagcaccttcaagcccgacgagctgcgtcggcgccgcgaggaggcccaggtcgagatccgcaaggccaagcgtgaagagaaccttgccaagcgtcgtggcatcggcaccggcgacgaccgtccaggcgcctctctgggtgctgcccccgacagcgacgatgacactgctcctaccgagagccagctcaacgaggacctccccctcatggtccagggagtcttctccgaccagatcgacctccagatttcttccactactaagttcagaaaactgctgtccaaagagcgaaacccgcctatcgaggaggtcatcaagaccggcgtcgtcacccgattcgtcgagttcctccgctctcctcacactctagtccagttcgaggccgcttgggctttgaccaacatcgcctcgggcagcgccacgcagacccaggtcgtcatcgaggccggtgccgtccccatcttcgtcgagctcctcgcctcccccgagcctgatgtccgcgagcaggccgtctgggctctcggcaacatcgccggagacagcccctcctgcagagactacgtcctcagctgtggcgccctcaagcccttgcttaatctgcttggcgacagccgcaagctgagcatgctgcgcaatgccacctggaccctcagcaacttctgcagaggcaagacccctcagcctgactgggccactatcgcccctgccctccctgttctcgctaagttggtgtactccttggatgacgaggtcctgattgatgcttgctgggctatctcctacttgtctgatggatccaacgacaagatccaggccgttatcgaggccggcatcccccgccgtctggtcgagctgctcatgcacgcctcaacttccgtccagacccctgctctccgatctgttggcaacatagtcactggcgacgacgtacagacgcaggtgattattaactgcggtgctctgtcatgcctgctcgctcttcttagctccaacaaggacggcatccgcaaggaggcttgctggaccatctccaacatcactgccggcaattcgcagcagatccaaggggtcatcgatgccaacatcattccccctcttatccacctgctttccaacggcgatcttaagacgcgcaaggaagcatgctgggccatcagcaacgctaccagtggtgggcttcagaagcccgagcagattcggtaccttgtctctcaaggctgcatcaagcctctctgcgacctgctcgcgtgccctgacaataagatcatccaggtcgctctggacggcttggagaatatcctcaaggtcggcgacctcgataagcaggctgctggcgagggccctgactcgatcaaccgttatgcgctgtacatcgaggaatgtggcggcatggagaagattcacgattgccagacgaacgccaatgaggagatttacatgaagtcatacaacatcatcgagaagtacttctccgacgaggacgagaacgcagatgagggtatgggtggccaagccacgggagctaatggcacctttggttttggtacccagggtggcgctcagggcggcttcaacttcgccaacggcgccgactccatggacatgtagatgcactgggcatattcccgatgcatccataccctataccatcgcaagccgacgtactaggcttgctctcgatctggtccatcgctcccacctccttacataagctgcaacgtcacaacactcatacccaaatccccatccccttagccttgcatagcacaacacagcacagcagtttccccaccacatcactcgagtcacatcatgaaccggcgttaatgaagtcaataatgaggagtatggcgacgcggccaaagagagaaagccagcgcattggtcgctttaaagctccagcgcgaagagaggaaggagagaagatagtaggggattatcacatgcacggtagagggtcgataatggttgcttaaaagctccaaccctcaatagaccagttgcagccagagtgttcgtcagaagatgtcttgaggcgctatcggcgcgacaggtctttcatcgcggcggccacatcaagcgcgtcgctagagttgatttctactgagatatcccaagtgggcgtagtacgagtatcgacgcatgcagaggcgatcaattgctacgatagcctagaccaagtggctttagactatttgacaaattgtagcatatgatcgcgaaggcacctggctcttagtgtgtgctaaagtctggtctttaaaataagtaaaattgctcacctaacctttgctttcatcgtgtaatttgtgatcgtgtaacgacagtcaggaaggcgggccccgaaagcttcatgggggaacgacgtatatgacagtcgcacatcaatt

SEQ ID NO: 29601 - DNA, 1305 bp, Muscodor strobelii
  misc_feature: SGI cDNA ID NO. 570168
  misc_feature: Encodes the peptide sequence at SEQ ID NO 29602
atgccttcactctcgtcttttcttctctcgctaacgctggttgtcagcccagctgttgcatttcctgcccatttatctgaagccttcctccatcttcgaggctcaagcgagacccgatcgactaccaaggcgattgaaggttgtccctttgcgaggcgacaagccgcgggtgtgacgcctccgttcgatgctgaaatacagtatgtaagcaacacaggcgaacatgccttccgcccgccttcaaataatgacaagagaggtccatgtcctgggctcaacgccatggcgaatcatggatatctccctcacaacggcgtgggaaccattgaccaattcatatctgggaccatggaggccttcgggatgggtctggacctagccacctttcttgccatttacggcgccatcttcgacggtgatctgacttcgtattccatcggtggccctgctggatccctactaaacctcggtggtctcctcggtgcgccgcaaggtctctccggctcgcataacaaatacgaaggagatgcatctccagtccacagagacttatatcaatatggcgataatctcccggcagtatcccaattcaaagccctctacgaactcggccaacaaaacggcgattcagttgacctcaacgtcctaacaaaataccgcaagcaacgcttcgacgaatccgtatccggaaacccgtacttcttcctcgcacccttcagcggccccgtcgtgacctcagctgcatacacattcatataccgcttcatggccaacaagacagccgagaacccagagggcgttctcgacggtgagactctaaagtctttctacgctatcactggcgactaccccgacttcacggtaacacccgggcacgagaagttcccggataactggtataagcgtaatcccgtcgactactacacaatcccctacctcgttgaggatactctagccatgcagttgcaacatcccgaatttctctcaatcggcggaaacctcggaaaaaccaactccttcgtcggtgtagatcccgccgatctgacgggcggcgtgctcaacgccggggatttgttagagggcaacaatgcgttttgcttcgctactgagcttgtgctgcagatggctcctgatatacttggcggtctcttcgatgacattacatctgcgctgaacaagttgactggggctgtcacggatgctactaaggggatggattgtccggcgtttgatgttgatgatagtctgctgcagcagttccctggatatactaagttgaaggggaatgggatgtataaacgctaa

SEQ ID NO: 29602 - protein, 434 aa, Muscodor strobelii
  misc_feature: SGI Peptide ID NO. 570168
  misc_feature (84)..(105): Pfam Id: PF01328 Pfam Desc: Peroxidase, family 2
  misc_feature (8)..(422): NCBI GI: 154296872 Blast Desc: BC1G_12525 [Botryotinia fuckeliana B05.10] gi|150843179|gb|EDN18372.1| BC1G_12525 [Botryotinia fuckeliana B05.10]
  misc_feature (8)..(391): NCBI GI: 156043950 Blast Desc: SS1G_10078 [Sclerotinia sclerotiorum 1980] gi|154694467|gb|EDN94205.1| SS1G_10078 [Sclerotinia sclerotiorum 1980]
  misc_feature (11)..(427): NCBI GI: 156054154 Blast Desc: SS1G_05925 [Sclerotinia sclerotiorum 1980] gi|154703705|gb|EDO03444.1| SS1G_05925 [Sclerotinia sclerotiorum 1980]
  misc_feature (4)..(433): NCBI GI: 154297227 Blast Desc: BC1G_12449 [Botryotinia fuckeliana B05.10] gi|150842976|gb|EDN18169.1| BC1G_12449 [Botryotinia fuckeliana B05.10]
  misc_feature (1)..(422): NCBI GI: 154303231 Blast Desc: BC1G_09364 [Botryotinia fuckeliana B05.10] gi|150854927|gb|EDN30119.1| BC1G_09364 [Botryotinia fuckeliana B05.10]
  misc_feature (43)..(429): NCBI GI: 46139423 Blast Desc: FG11226.1 [Gibberella zeae PH-1]
  misc_feature (59)..(425): NCBI GI: 189198417 Blast Desc: conserved [Pyrenophora tritici-repentis Pt-1C-BFP] gi|187981494|gb|EDU48120.1| conserved [Pyrenophora tritici-repentis Pt-1C-BFP]
  misc_feature (18)..(410): NCBI GI: 242791746 Blast Desc: oxidase, [Talaromyces stipitatus ATCC 10500] gi|218718404|gb|EED17824.1| oxidase, [Talaromyces stipitatus ATCC 10500]
  misc_feature (60)..(427): NCBI GI: 169613060 Blast Desc: SNOG_09659 [Phaeosphaeria nodorum SN15] gi|111061804|gb|EAT82924.1| SNOG_09659 [Phaeosphaeria nodorum SN15]
  misc_feature (46)..(425): NCBI GI: 225561896 Blast Desc: conserved [Ajellomyces capsulatus G186AR]
MPSLSSFLLSLTLVVSPAVAFPAHLSEAFLHLRGSSETRSTTKAIEGCPFARRQAAGVTPPFDAEIQYVSNTGEHAFRPPSNNDKRGPCPGLNAMANHGYLPHNGVGTIDQFISGTMEAFGMGLDLATFLAIYGAIFDGDLTSYSIGGPAGSLLNLGGLLGAPQGLSGSHNKYEGDASPVHRDLYQYGDNLPAVSQFKALYELGQQNGDSVDLNVLTKYRKQRFDESVSGNPYFFLAPFSGPVVTSAAYTFIYRFMANKTAENPEGVLDGETLKSFYAITGDYPDFTVTPGHEKFPDNWYKRNPVDYYTIPYLVEDTLAMQLQHPEFLSIGGNLGKTNSFVGVDPADLTGGVLNAGDLLEGNNAFCFATELVLQMAPDILGGLFDDITSALNKLTGAVTDATKGMDCPAFDVDDSLLQQFPGYTKLKGNGMYKR

SEQ ID NO: 29603 - DNA, 511 bp, Muscodor strobelii
  misc_feature: SGI EST ID NO. CUFF.70063.0
  misc_feature: Variant of the nucleotide sequence at SEQ ID NO 29601
gcgaggcgacaagccgcgggtgtgacgcctccgttcgatgctgaaatacagtatgtaagcaacacaggcgaacatgccttccgcccgccttcaaataatgacaagagaggtccatgtcctgggctcaacgccatggcgaatcatggatatctccctcacaacggcgtgggaaccattgaccaattcatatctgggaccatggaggccttcgggatgggtctggacctagccacctttcttgccatttacggcgccatcttcgacggtgatctgacttcgtattccatcggtggccctgctggatccctactaaacctcggtggtctcctcggtgcgccgcaaggtctctccggctcgcataacaaatacgaaggagatgcatctccagtccacagagacttatatcaatagtaagtctttttacttcgttctactcctatctacacacatacggtctcgcaatcaacccataaactaagattatcatcaaatagtggcgataatctcccgg

SEQ ID NO: 29604 - DNA, 3408 bp, Muscodor strobelii
  misc_feature: SGI cDNA ID NO. 570169
  misc_feature: Encodes the peptide sequence at SEQ ID NO 29605
atggagcaccaagaggggcctacggatgtcgtccatcctgaggttcgggctcatgttaacagtcttgtttctgctcttggtggtttctctgccgacgatgaccaaggaaaatatgttcttggagactcagctaccgaagttctgcgcgacatcaagaaatggatccgtttctacgatgagaagacaaaccgaatggatgtcgcccgatgtctcgccgaagccaacctcattgatggcgatcttctacacatcctcgccacttggcccgaaaatgcaaccgagaacaagttcaaggcacgaattgccctagcctgcttcgagatcatggtccccctgacctggcccttggaccgagatatcgaccagatgaccgtcaatcatcaccgccatcttcccgtgctccagctcgctcaggtgggctataagcgagccatcatcaactatgatgctgccgcaattctacatacagctgtacgagtcgccttgccttccatggccctctcgcggggcgaccgaagtacccgcgaccaaggcatcatcaaacttgtcctccttttcttgcgaaatgtcgccatgataacaccgccgcctggtgcccagtacgatggcgatgaatctcagatctcccgatctgctctgatcgatgctttctcctatcaggatatcctcataaccattttaaccattgcctcaaacatgggagacgatttcaaccaagaatgtgttattttgatggagatcatcttccatctcgttaaacgagtcgacattactaagctgttcatggaggaaaagttactcagcaaaacgaaggcaaatgaacttaccgccatgatgaataaagaagcggcgatgcatagaccgtataatcgcaaagctccgtctagacataaccgatggggagcaatggtctgggtggatcgtggcgatggcaaggtatctgccatctctggccaggatgcactgctggatgcagctaccagacaacagaagatggacaacagcaaagttttccgcccacctcgaagaccaaggaaagaagaaatggagcctagagatcttgggcctccagtgtcactcaacactcgagcacgggagcaactgaagggatttgtcgaagaatttctagactccggtttcaatcccttgttccagctgatccggaagaaattagatgaacagaaggagtacatttttgactatcattcccgacaattcttttacctcgtctcgtggttcttggaagcggaacgagttaggaagaaagctaccaaaagcaattcgtctaaggacgtggcagacatcacatcattcaacctcgtcgctggcgtcctggaccaacagatgttcatcacattaaatcgagcgatgtcagaatcgatggagaacaagcgctggcaggacttgtgtgcgaccatgagatgctttactcagatcttactaacggtccaagaaatgtctgaatcgggcaacgaagatgacgaagaaattgcagagaacataatgagtcgtatcttctatgaagacgagacacatgatcgtgtggctacaattgccaaaacttacaaagatcaagggttcgagtaccttgatgcttgcactgacctaactcacacttatctgcgagttctagaggcatactcgaaacagaatgtagatatgcaagtccgatctcgacgacgggttcgaaagaagaagagggcagcgagagtggctggagaagatggcgagaacccaatcgaggaacaggacgattctgaaaacgacgaggccaacgctgaaaaaacatcgaaagagcgaaagttcgactttagcagattctccaaccgctttattgcgcaaggtgtcgtcgatacatttgcctcctttaccaaatactatcatgatttgaacgactcacaattgaaacgcgcccataggtatttttatcgaatcgctttcaagcaggaaatgagtgtcatgctctttcgagtcgacatcatccagctaatttatagcatgataaagggcggagagcctttggataagcattgcagcttgttcaaggagtgggaagagttggtgaagcagatcctcagaaaatgcatccgcaaaatcgaggatcgcccgcaactcatcatcgaaatgctcttctcaaaaatcggcgccactgctcactatctagaatttggctatgaaaagcaaacgatctcaactacgacacctaaacctgctgctgagcttgaatttcgacacattgttgagcgagaccagcaaattgcaattgctgtgggcgttttgctggacaagaatctggcgcatcacatcaaatgggtcaaggaccacctcagcagtgctatggttgaaaggaaggcttgggaagacgcagaaagagccatgccctctgtagagacaccgccatccgaggtagaacgtggggagcaagccctagcaaaagacgcctcgccgtattcaatcaaacctgatgatgatgcccgtcgtacagccatgttcaagaactcacatcttaggcttctcatgaatctagtcggtattgggtgtcttacgcctacgctcgaagaaactccagaatctgcttgggctatactgggctcagtgacgtctgaacagctacaagactcgattgacttgatcaataaagccgagtttgacccgcctacattcgacgatggtacattggctcaagatcagctgaggcgcaagactgccccacggaagaaagcagtttttgatgacgacgaagacgccgatgaagatgacgagatcctcttccctgccggcggccccacggctaggaaagtcgctgacgccgacaagccaaaaaaactacggcgtcggcgtcgccgggctagtgatgcggagccattaacggaagagcagcttgaagaaaaggagcgtgccagacgagagaaggagaaagcaaaagcaagacgattcaagagtgaactgtttgtgaatgcatcagatgatgaatctgacgatgagggtaaatgggccgaattctatgccaatgaagaagccattagacagcggcaaaaagccgccgcgctaggattttcaaagctcagtgacaatccaaaagcaaccgaaaagcgcaaggctatcactgttttatcggacgatagcgataatgacgacgatcttgtgatgacgcaagactcgactttaagccggaagcgcggagtggttgatgatgaggatgaagatgcgtctggcactgatgatacgccattgtcgtcgagtccgaatgcgtcgacgtcgagtaagagaagaagggtatcgaaagacgcgactcctgcggatgtagatatggaggatgcagatgatgaagacgtgcctatcgcgaaaccggtcagacgaccgagaggtagagctggattccttgtagatagtagcgacgaagagtga

SEQ ID NO: 29605 - protein, 1135 aa, Muscodor strobelii
  misc_feature: SGI Peptide ID NO. 570169
  misc_feature (34)..(315): Pfam Id: PF04821 Pfam Desc: Timeless protein
  misc_feature (641)..(1134): Pfam Id: PF05029 Pfam Desc: Timeless protein C terminal region
  misc_feature (641)..(787): Pfam Id: PF05029 Pfam Desc: Timeless protein C terminal region
  misc_feature (8)..(787): NCBI GI: 5305385 Blast Desc: AF072683_1 drug resistance protein MdrA [Emericella nidulans]
  misc_feature (10)..(793): NCBI GI: 145248668 Blast Desc: An14g00440 [Aspergillus niger] gi|134081340|emb|CAK41843.1| protein product [Aspergillus niger]
  misc_feature (7)..(1134): NCBI GI: 226289595 Blast Desc: topoisomerase 1-associated factor 1 [Paracoccidioides brasiliensis Pb18]
  misc_feature (10)..(1068): NCBI GI: 154273126 Blast Desc: [Ajellomyces capsulatus NAm1] gi|150415927|gb|EDN11271.1| [Ajellomyces capsulatus NAm1]
  misc_feature (102)..(1077): NCBI GI: 239608436 Blast Desc: topoisomerase 1-associated factor 1 [Ajellomyces dermatitidis ER-3]
  misc_feature (165)..(1070): NCBI GI: 258577863 Blast Desc: UREG_02629 [Uncinocarpus reesii 1704] gi|237903379|gb|EEP77780.1| UREG_02629 [Uncinocarpus reesii 1704]
  misc_feature (7)..(1077): NCBI GI: 261187843 Blast Desc: topoisomerase 1-associated factor 1 [Ajellomyces dermatitidis SLH14081] gi|239593456|gb|EEQ76037.1| topoisomerase 1-associated factor 1 [Ajellomyces dermatitidis SLH14081]
  misc_feature (1)..(1135): NCBI GI: 39943960 Blast Desc: MGG_03991 [Magnaporthe grisea 70-15] gi|158514084|sp|A4R4R3.1|TOF1_MAGGR RecName: Full=Topoisomerase 1-associated factor 1 gi|145014710|gb|EDJ99278.1| MGG_03991
  misc_feature (1)..(1135): NCBI GI: 256731384 Blast Desc: NECHADRAFT_96220 [Nectria haematococca mpVI 77-13-4]
  misc_feature (1)..(1034): NCBI GI: 261351698 Blast Desc: topoisomerase 1-associated factor 1 [Verticillium albo-atrum VaMs.102]
MEHQEGPTDVVHPEVRAHVNSLVSALGGFSADDDQGKYVLGDSATEVLRDIKKWIRFYDEKTNRMDVARCLAEANLIDGDLLHILATWPENATENKFKARIALACFEIMVPLTWPLDRDIDQMTVNHHRHLPVLQLAQVGYKRAIINYDAAAILHTAVRVALPSMALSRGDRSTRDQGIIKLVLLFLRNVAMITPPPGAQYDGDESQISRSALIDAFSYQDILITILTIASNMGDDFNQECVILMEIIFHLVKRVDITKLFMEEKLLSKTKANELTAMMNKEAAMHRPYNRKAPSRHNRWGAMVWVDRGDGKVSAISGQDALLDAATRQQKMDNSKVFRPPRRPRKEEMEPRDLGPPVSLNTRAREQLKGFVEEFLDSGFNPLFQLIRKKLDEQKEYIFDYHSRQFFYLVSWFLEAERVRKKATKSNSSKDVADITSFNLVAGVLDQQMFITLNRAMSESMENKRWQDLCATMRCFTQILLTVQEMSESGNEDDEEIAENIMSRIFYEDETHDRVATIAKTYKDQGFEYLDACTDLTHTYLRVLEAYSKQNVDMQVRSRRRVRKKKRAARVAGEDGENPIEEQDDSENDEANAEKTSKERKFDFSRFSNRFIAQGVVDTFASFTKYYHDLNDSQLKRAHRYFYRIAFKQEMSVMLFRVDIIQLIYSMIKGGEPLDKHCSLFKEWEELVKQILRKCIRKIEDRPQLIIEMLFSKIGATAHYLEFGYEKQTISTTTPKPAAELEFRHIVERDQQIAIAVGVLLDKNLAHHIKWVKDHLSSAMVERKAWEDAERAMPSVETPPSEVERGEQALAKDASPYSIKPDDDARRTAMFKNSHLRLLMNLVGIGCLTPTLEETPESAWAILGSVTSEQLQDSIDLINKAEFDPPTFDDGTLAQDQLRRKTAPRKKAVFDDDEDADEDDEILFPAGGPTARKVADADKPKKLRRRRRRASDAEPLTEEQLEEKERARREKEKAKARRFKSELFVNASDDESDDEGKWAEFYANEEAIRQRQKAAALGFSKLSDNPKATEKRKAITVLSDDSDNDDDLVMTQDSTLSRKRGVVDDEDEDASGTDDTPLSSSPNASTSSKRRRVSKDATPADVDMEDADDEDVPIAKPVRRPRGRAGFLVDSSDEE

SEQ ID NO: 29606 - DNA, 7169 bp, Muscodor strobelii
  misc_feature: SGI EST ID NO. CUFF.70130.1
  misc_feature: Variant of the nucleotide sequence at SEQ ID NO 29604
ccaccataatgcgcactggatcttagcgtcgcttctactgtcgcgggcaagttttctaagctttccctagtgtgctaagagtctagagcatcctgcaatttgtgacacgggaaagagaaaccgacctttcacagaggctggctcgacaagtacaggtgcctggatcagacccagaatggcctcaagcctcgagacatgtagtcagcattttctggccttcttcggaaaataacctatgacctcattcagccaaagtgtagctaggcacatgtgtagatacatgcgtcctgctacaggacttatactacggtggcaggtaacgtaagtgtggcggatgagcagttacccactaactcgtttgaattaacggcagcagccgggatgtcatgtcttctgtcccctgttcgagatgcatccctaggtggcttgaggacggtgaggacttgattgcatttttggcgtttttcttactcaataaattcacgatgctttcgcgccaggacgcctatcctaagccaggtggttcgaatttgtcatatcaaacggaggatgcctttcggcagcttgttgtattcaattaaggggtctgttcgctttcctcaatgctacaatattcgagctcttgcgggtatgatctcgtgatgttaaaattcttcttgggtggatacggtcggatccagtcatgagcctccttggatcaaagtgtcgtttttcttcaggagctagtagaaaatgttgcattgatagacatcggctttcgcgcttctgtacgaatcatcaacggcgcgattggatcattgatttgacccctcaatacccctccatattcacgctattctccaacatttgccgttcttctatctactcccccagtttctgggcacacgagacagatctggtgtgcagcgatatctcctagctcaaccaaatgtgttgattttgggaatagctcccgttctagacctcatcaacctatttctggtttcctgtcgtaggacagggaaacaatgtcgtcggacaaaaccgggagtgcccttgacaggacgatgcaatgtgcctattccatcgagatcttgtcgcttttgtattcaaatgcagggggaaaaacacctgacgatttcctaaatgtatcaaaagctgcaggggattgcattcgggagcatgccgcaaatgtgctccatatagtcggccccgctccgagactttcggacgtagctctcgccaacccgaagttgtcgcattgcccatgaagcatcgaaagccagatcctgaatgaatgacccccgcctagtaggtggtcttcatctatgcacgactcaggaatcaggcacaggtacgcacctgtaacgctttcattaacagtctcaattggccttttcaggagtcatatcaagaagagttcacataattaggggtttgagtttacgccctatgatcgtgactgacctcgaagctatcccagctcgatggtacgaaaacgatccggagctagtttcctttagcccatgagcgatgaggcatatgggcgtcaggaacgtttggccatccgggttatatgtgaacagtgtcagaccattacgatgaggcgtagtatgagcccatgattatcaaacgagacagttttcgtaaagtttcttttgaaatttccgtgaacttcaacctatgtagtaacaaatacgaaggggctttttaacgggcgcacagacgcccccatcatgctgcttagtcaagctcgttactacctatgagcactcgactaactaatgaatatgctagattgtcgcatctattacgtatgcgacgtgacattcgactaataggtacgctaggctgaagcttgcttgcaaagcgcagcaggtcactcaatcagaatggcacgttaagtcatgaccgttagccactgtgggacatgttacgttgaagtaatctctaataatcatagaacccctttccactcttctttccgagccaaccggcatcgaccatcttggtgagcagcacgctgggtctgtattttgaatcgcctgtttcctggtgcaaaaccttcatgatagccaagcacgtatcgagcccgatgaagtcagcgagctggagagggcccataggaacatttgtgccattcttcatgatggcgtcgatagagtcccggtcaccgactccagtttccaagcatatgacggcttcgttgatgtaaggcatcagaatgcggttcgcgagaaagcctggcgagtcagccgagaccgacgtgacctttcccatggccttgcagaaagccacagcagtctccaaagtctcagcacttgtttgtaagccactgatgatttctacacccttctgtacaggcacggggttcatgaaatgtgtcgacacaacacgtgagctagcagacgtgtctttgggatcctttgtcgtcgcagcggctatttttgtaatggatatcgatgatgtgttggtagcaagaatggcgtgtttgggacatatttctgccagtttggcgaatatgtcaaacttgagattcgggatttcgggcactgcctcgatgacaaagtcgacatttgccaattcgtcaattgaggtagtaggtgtcaatttggatcgagcctcgtcggcctgttcctgggtaatacgtgatttagacacatccttagccaggagggtgtctacatgtatgtcaatgaggcaacccctctaggtggttcgagttcaccaacctgcgaattttaaccctttatccaaagatgcctgtgagttatcgacgacggtgacgggcacaccggctctctgagcagctaccagcgcaatgcccaagccctaccttgtgttagacgatcacccagactttttgccaacccttcttgacgaaaagactcaccatctggccggcgccaatgactcctagacgcttcacctgtgcagcatctcgagccggacttgaactgaagcaccttgcttgcctcgcaagatgcgttgcatgtgttcttgtgaaaatgcttgccattttgtgccgtgtcaatcgtgcggcgtattcgtagactgcaacgtgaacaggtcgcagttcagtttcgcaacaatgatgaagatgaaggtcggatagcctcggtgatccttgcggataaaagtggatctttcgactgaacttcacctcggaactgacctcatctgggcagccacatttcacaagccattgtttaaggtatccgatgttcaggcccgcttgcttgtcgatattatctattaggctctgtctgcagggttcaaataagcaccattgagatcaatgcatggcgttgtgatggtggctgaaggggtcggcactttaatccttgcgaatggcgcgtcgcgtccccgctgtattttagcaattaattctaccccctcaacgcgtctttccaccgcgtcgttagcgttacagacatatgctgatggaatgcaacatgctgaattcaaggcaaattgattttcaaacccgaattttgttatgctcaagagtaccgctgaatcgatgagattgtgcaagaatttgccagttattttctcaattggctgagacagcccatctcctccctgctagccaacatggagcaccaagaggggcctacggatgtcgtccatcctgaggttcgggctcatgttaacagtcttgtttctgctcttggtggtttctctgccgacgatgaccaaggaaaatatgttcttggagactcagctaccgaagttctgcgcgacatcaagaaatggatccgtttctacgatgagaagacaaaccgaatggatgtcgcccgatgtctcgccgaagccaacctcattgatggcgatcttctacacatcctcgccacttggcccgaaaatgcaaccgagaacaagttcaaggcacgaattgccctagcctgcttcgagatcatggtccccctgacctggcccttggaccgagatatcgaccagatgaccgtcaatcatcaccgccatcttcccgtgctccagctcgctcaggtgggctataagcgagccatcatcaactatgatgctgccgcaattctacatacagctgtacgagtcgccttgccttccatggccctctcgcggggcgaccgaagtacccgcgaccaaggcatcatcaaacttgtcctccttttcttgcgaaatgtcgccatgataacaccgccgcctggtgcccagtacgatggcgatgaatctcagatctcccgatctgctctgatcgatgctttctcctatcaggatatcctcataaccattttaaccattgcctcaaacatgggagacgatttcaaccaagaatgtgttattttgatggagatcatcttccatctcgttaaacgagtcgacattactaagctgttcatggaggaaaagttactcagcaaaacgaaggcaaatgaacttaccgccatgatgaataaagaagcggcgatgcatagaccgtataatcgcaaagctccgtctagacataaccgatggggagcaatggtctgggtggatcgtggcgatggcaaggtatctgccatctctggccaggatgcactgctggatgcagctaccagacaacagaagatggacaacagcaaagttttccgcccacctcgaagaccaaggaaagaagaaatggagcctagagatcttgggcctccagtgtcactcaacactcgagcacgggagcaactgaagggatttgtcgaagaatttctagactccggtttcaatcccttgttccagctgatccggaagaaattagatgaacagaaggagtacatttttgactatcattcccgacaattcttttacctcgtctcgtggttcttggaagcggaacgagttaggaagaaagctaccaaaagcaattcgtctaaggacgtggcagacatcacatcattcaacctcgtcgctggcgtcctggaccaacagatgttcatcacattaaatcgagcgatgtcagaatcgatggagaacaagcgctggcaggacttgtgtgcgaccatgagatgctttactcagatcttactaacggtccaagaaatgtctgaatcgggcaacgaagatgacgaagaaattgcagagaacataatgagtcgtatcttctatgaagacgagacacatgatcgtgtggctacaattgccaaaacttacaaagatcaagggttcgagtaccttgatgcttgcactgacctaactcacacttatctgcgagttctagaggcatactcgaaacagaatgtagatatgcaagtccgatctcgacgacgggttcgaaagaagaagagggcagcgagagtggctggagaagatggcgagaacccaatcgaggaacaggacgattctgaaaacgacgaggccaacgctgaaaaaacatcgaaagagcgaaagttcgactttagcagattctccaaccgctttattgcgcaaggtgtcgtcgatacatttgcctcctttaccaaatactatcatgatttgaacgactcacaattgaaacgcgcccataggtatttttatcgaatcgctttcaagcaggaaatgagtgtcatgctctttcgagtcgacatcatccagctaatttatagcatgataaagggcggagagcctttggataagcattgcagcttgttcaaggagtgggaagagttggtgaagcagatcctcagaaaatgcatccgcaaaatcgaggatcgcccgcaactcatcatcgaaatgctcttctcaaaaatcggcgccactgctcactatctagaatttggctatgaaaagcaaacgatctcaactacgacacctaaacctgctgctgagcttgaatttcgacacattgttgagcgagaccagcaaattgcaattgctgtgggcgttttgctggacaagaatctggcgcatcacatcaaatgggtcaaggaccacctcagcagtgctatggttgaaaggaaggcttgggaagacgcagaaagagccatgccctctgtagagacaccgccatccgaggtagaacgtggggagcaagccctagcaaaagacgcctcgccgtattcaatcaaacctgatgatgatgcccgtcgtacagccatgttcaagaactcacatcttaggcttctcatgaatctagtcggtattgggtgtcttacgcctacgctcgaagaaactccagaatctgcttgggctatactgggctcagtgacgtctgaacagctacaagactcgattgacttgatcaataaagccgagtttgacccgcctacattcgacgatggtacattggctcaagatcagctgaggcgcaagactgccccacggaagaaagcagtttttgatgacgacgaagacgccgatgaagatgacgagatcctcttccctgccggcggccccacggctaggaaagtcgctgacgccgacaagccaaaaaaactacggcgtcggcgtcgccgggctagtgatgcggagccattaacggaagagcagcttgaagaaaaggagcgtgccagacgagagaaggagaaagcaaaagcaagacgattcaagagtgaactgtttgtgaatgcatcagatgatgaatctgacgatgagggtaaatgggccgaattctatgccaatgaagaagccattagacagcggcaaaaagccgccgcgctaggattttcaaagctcagtgacaatccaaaagcaaccgaaaagcgcaaggctatcactgttttatcggacgatagcgataatgacgacgatcttgtgatgacgcaagactcgactttaagccggaagcgcggagtggttgatgatgaggatgaagatgcgtctggcactgatgatacgccattgtcgtcgagtccgaatgcgtcgacgtcgagtaagagaagaagggtatcgaaagacgcgactcctgcggatgtagatatggaggatgcagatgatgaagacgtgcctatcgcgaaaccggtcagacgaccgagaggtagagctggattccttgtagatagtagcgacgaagagtgatgaacgtttgtcgggattacagcattcagcatggcgtttcagtatgagaggttcacatgaattgggttatggtacggaaggttgtaaatgcaagggataagaatttaatgaggttagaaatgactcaagaactcgattacgaatgggttgcgtttcagcataactttacttttttatacttagga

SEQ ID NO: 29607 - DNA, 957 bp, Muscodor strobelii
  misc_feature: SGI cDNA ID NO. 570170
  misc_feature: Encodes the peptide sequence at SEQ ID NO 29608
atggcaagcattttcacaagaacacatgcaacgcatcttgcgaggcaagcaaggtgcttcagttcaagtccggctcgagatgctgcacaggtgaagcgtctaggagtcattggcgccggccagatgggcttgggcattgcgctggtagctgctcagagagccggtgtgcccgtcaccgtcgtcgataactcacaggcatctttggataaagggttaaaattcgcagacaccctcctggctaaggatgtgtctaaatcacgtattacccaggaacaggccgacgaggctcgatccaaattgacacctactacctcaattgacgaattggcaaatgtcgactttgtcatcgaggcagtgcccgaaatcccgaatctcaagtttgacatattcgccaaactggcagaaatatgtcccaaacacgccattcttgctaccaacacatcatcgatatccattacaaaaatagccgctgcgacgacaaaggatcccaaagacacgtctgctagctcacgtgttgtgtcgacacatttcatgaaccccgtgcctgtacagaagggtgtagaaatcatcagtggcttacaaacaagtgctgagactttggagactgctgtggctttctgcaaggccatgggaaaggtcacgtcggtctcggctgactcgccaggctttctcgcgaaccgcattctgatgccttacatcaacgaagccgtcatatgcttggaaactggagtcggtgaccgggactctatcgacgccatcatgaagaatggcacaaatgttcctatgggccctctccagctcgctgacttcatcgggctcgatacgtgcttggctatcatgaaggttttgcaccaggaaacaggcgattcaaaatacagacccagcgtgctgctcaccaagatggtcgatgccggttggctcggaaagaagagtggaaaggggttctatgattattag

SEQ ID NO: 29608 - protein, 318 aa, Muscodor strobelii
  misc_feature: SGI Peptide ID NO. 570170
  misc_feature (222)..(318): Pfam Id: PF00725 Pfam Desc: 3-hydroxyacyl-CoA dehydrogenase, C-terminal domain
  misc_feature (33)..(220): Pfam Id: PF02737 Pfam Desc: 3-hydroxyacyl-CoA dehydrogenase, NAD binding domain
  misc_feature (31)..(70): Pfam Id: PF03446 Pfam Desc: NAD binding domain of 6-phosphogluconate dehydrogenase
  misc_feature (9)..(318): NCBI GI: 116206228 Blast Desc: conserved [Chaetomium globosum CBS 148.51] gi|88183004|gb|EAQ90472.1| conserved [Chaetomium globosum CBS 148.51]
  misc_feature (1)..(318): NCBI GI: 261351697 Blast Desc: 3-hydroxybutyryl-CoA dehydrogenase [Verticillium albo-atrum VaMs.102]
  misc_feature (1)..(318): NCBI GI: 145609229 Blast Desc: MGG_13390 [Magnaporthe grisea 70-15] gi|145016620|gb|EDK01050.1| MGG_13390 [Magnaporthe grisea 70-15]
  misc_feature (4)..(318): NCBI GI: 85091172 Blast Desc: NCU09553 [Neurospora crassa OR74A] gi|28920156|gb|EAA29536.1| NCU09553 [Neurospora crassa OR74A] gi|38566850|emb|CAE76156.1| 3-hydroxybutyryl-CoA dehydrogenase
  misc_feature (1)..(314): NCBI GI: 156065323 Blast Desc: SS1G_00672 [Sclerotinia sclerotiorum 1980] gi|154691531|gb|EDN91269.1| SS1G_00672 [Sclerotinia sclerotiorum 1980]
  misc_feature (1)..(318): NCBI GI: 256730997 Blast Desc: [Nectria haematococca mpVI 77-13-4]
  misc_feature (1)..(318): NCBI GI: 46124871 Blast Desc: FG06813.1 [Gibberella zeae PH-1]
  misc_feature (17)..(317): NCBI GI: 115388817 Blast Desc: ATEG_02736 [Aspergillus terreus NIH2624] gi|114195998|gb|EAU37698.1| ATEG_02736 [Aspergillus terreus NIH2624]
  misc_feature (13)..(318): NCBI GI: 189205076 Blast Desc: 3-hydroxybutyryl-CoA dehydrogenase [Pyrenophora tritici-repentis Pt-1C-BFP] gi|187985972|gb|EDU51460.1| 3-hydroxybutyryl-CoA dehydrogenase [Pyrenophora tritici-repentis
  misc_feature (18)..(318): NCBI GI: 121714333 Blast Desc: 3-hydroxybutyryl-CoA dehydrogenase, [Aspergillus clavatus NRRL 1] gi|119402931|gb|EAW13351.1| 3-hydroxybutyryl-CoA dehydrogenase, [Aspergillus clavatus NRRL 1]
  misc_feature (30)..(318): SWISSPROT Homolog: EC 1.1.1.157 3-hydroxybutyryl-CoA dehydrogenase
MASIFTRTHATHLARQARCFSSSPARDAAQVKRLGVIGAGQMGLGIALVAAQRAGVPVTVVDNSQASLDKGLKFADTLLAKDVSKSRITQEQADEARSKLTPTTSIDELANVDFVIEAVPEIPNLKFDIFAKLAEICPKHAILATNTSSISITKIAAATTKDPKDTSASSRVVSTHFMNPVPVQKGVEIISGLQTSAETLETAVAFCKAMGKVTSVSADSPGFLANRILMPYINEAVICLETGVGDRDSIDAIMKNGTNVPMGPLQLADFIGLDTCLAIMKVLHQETGDSKYRPSVLLTKMVDAGWLGKKSGKGFYDY

SEQ ID NO: 29609 - DNA, 7161 bp, Muscodor strobelii
  misc_feature: SGI EST ID NO. CUFF.70129.0
  misc_feature: Variant of the nucleotide sequence at SEQ ID NO 29607
tcctaagtataaaaaagtaaagttatgctgaaacgcaacccattcgtaatcgagttcttgagtcatttctaacctcattaaattcttatcccttgcatttacaaccttccgtaccataacccaattcatgtgaacctctcatactgaaacgccatgctgaatgctgtaatcccgacaaacgttcatcactcttcgtcgctactatctacaaggaatccagctctacctctcggtcgtctgaccggtttcgcgataggcacgtcttcatcatctgcatcctccatatctacatccgcaggagtcgcgtctttcgatacccttcttctcttactcgacgtcgacgcattcggactcgacgacaatggcgtatcatcagtgccagacgcatcttcatcctcatcatcaaccactccgcgcttccggcttaaagtcgagtcttgcgtcatcacaagatcgtcgtcattatcgctatcgtccgataaaacagtgatagccttgcgcttttcggttgcttttggattgtcactgagctttgaaaatcctagcgcggcggctttttgccgctgtctaatggcttcttcattggcatagaattcggcccatttaccctcatcgtcagattcatcatctgatgcattcacaaacagttcactcttgaatcgtcttgcttttgctttctccttctctcgtctggcacgctccttttcttcaagctgctcttccgttaatggctccgcatcactagcccggcgacgccgacgccgtagtttttttggcttgtcggcgtcagcgactttcctagccgtggggccgccggcagggaagaggatctcgtcatcttcatcggcgtcttcgtcgtcatcaaaaactgctttcttccgtggggcagtcttgcgcctcagctgatcttgagccaatgtaccatcgtcgaatgtaggcgggtcaaactcggctttattgatcaagtcaatcgagtcttgtagctgttcagacgtcactgagcccagtatagcccaagcagattctggagtttcttcgagcgtaggcgtaagacacccaataccgactagattcatgagaagcctaagatgtgagttcttgaacatggctgtacgacgggcatcatcatcaggtttgattgctacatttcgttagcgacggtccgaaattcgtacacagaagacttacaatacggcgaggcgtcttttgctagggcttgctccccacgttctacctcggatggcggtgtctctacagagggcatggctctttctgcgtcttcccaagccttcctttcaaccatagcactgctgaggtggtccttgacccatttgatgtgatgcgccagattcttgtccagcaaaacgcccacagcaattgcaatttgctggtctcgctcaacaatgtgtcgaaattcaagctcagcagcaggtttaggtgtcgtagttgagatcgtttgcttttcatagccaaattctagatagtgagcagtggcgccgatttttgagaagagcatttcgatgatgagttgcgggcgatcctcgattttgcggatgcattttctgaggatctgcttcaccaactcttcccactccttgaacaagctgcaatgcttatccaaaggctctccgccctttatcatgctataaattagctggatgatgtcgactcgaaagagcatgacactcatttcctgcttgaaagcgattcgataaaaatacctatgggcgcgtttcaattgtgagtcgttcaaatcatgatagtatttggtaaaggaggcaaatgtatcgacgacaccttgcgcaataaagcggttggagaatctgctaaagtcgaactttcgctctttcgatgttttttcagcgttggcctcgtcgttttcagaatcgtcctgttcctcgattgggttctcgccatcttctccagccactctcgctgccctcttcttctttcgaacccgtcgtcgagatcggacttgcatatctacattctgtttcgagtatgcctctagaactcgcagataagtgtgagttaggtcagtgcaagcatcaaggtactcgaacccttgatctttgtaagttttggcaattgtagccacacgatcatgtgtctcgtcttcatagaagatacgactcattatgttctctgcaatttcttcgtcatcttcgttgcccgattcagacatttcttggaccgttagtaagatctgagtaaagcatctcatggtcgcacacaagtcctgccagcgcttgttctccatcgattctgacatcgctcgatttaatgtgatgaacatctgttggtccaggacgccagcgacgaggttgaatgatgtgatgtctgccacgtccttagacgaattgcttttggtagctttcttcctaactcgttccgcttccaagaaccacgagacgaggtaaaagaattgtcgggaatgatagtcaaaaatgtactccttctgttcatctaatttcttccggatcagctggaacaagggattgaaaccggagtctagaaattcttcgacaaatcccttcagttgctcccgtgctcgagtgttgagtgacactggaggcccaagatctctaggctccatttcttctttccttggtcttcgaggtgggcggaaaactttgctgttgtccatcttctgttgtctggtagctgcatccagcagtgcatcctggccagagatggcagataccttgccatcgccacgatccacccagaccattgctccccatcggttatgtctagacggagctttgcgattatacggtctatgcatcgccgcttctttattcatcatggcggtaagttcatttgccttcgttttgctgagtaacttttcctccatgaacagcttagtaatgtcgactcgtttaacgagatggaagatgatctccatcaaaataacacattcttggttgaaatcgtctcccatgtttgaggcaatggttaaaatggttatgaggatatcctgataggagaaagcatcgatcagagcagatcgggagatctgagattcatcgccatcgtactgggcaccaggcggcggtgttatcatggcgacatttcgcaagaaaaggaggacaagtttgatgatgccttggtcgcgggtacttcggtcgccccgcgagagggccatggaaggcaaggcgactcgtacagctgtatgtagaattgcggcagcatcatagttgatgatggctcgcttatagcccacctgagcgagctggagcacgggaagatggcggtgatgattgacggtcatctggtcgatatctcggtccaagggccaggtcagggggaccatgatctcgaagcaggctagggcaattcgtgccttgaacttgttctcggttgcattttcgggccaagtggcgaggatgtgtagaagatcgccatcaatgaggttggcttcggcgagacatcgggcgacatccattcggtttgtcttctcatcgtagaaacggatccatttcttgatgtcgcgcagaacttcggtagctgagtctccaagaacatattttccttggtcatcgtcggcagagaaaccaccaagctgagcgacccctcaagtcagacataaacgaagtcgtccattcgatgtatgacttacagcagaaacaagactgttaacatgagcccgaacctcaggatggacgacatccgtaggcccctcttggtgctccatgttggctagcagggaggagatgggctgtctcagccaattgagaaaataactggcaaattcttgcacaatctcatcgattcagcggtactcttgagcataacaaaattcgggtttgaaaatcaatttgccttgaattcagcatgttgcattccatcagcatatgtctgtaacgctaacgacgcggtggaaagacgcgttgagggggtagaattaattgctaaaatacagcggggacgcgacgcgccattcgcaaggattaaagtgccgaccccttcagccaccatcacaacgccatgcattgatctcaatggtgcttatttgaaccctgcagacagagcctaatagataatatcgacaagcaagcgggcctgaacatcggataccttaaacaatggcttgtgaaatgtggctgcccagatgaggtcagttccgaggtgaagttcagtcgaaagatccacttttatccgcaaggatcaccgaggctatccgaccttcatcttcatcattgttgcgaaactgaactgcgacctgttcacgttgcagtctacgaatacgccgcacgattgacacggcacaaaatggcaagcattttcacaagaacacatgcaacgcatcttgcgaggcaagcaaggtgcttcagttcaagtccggctcgagatgctgcacaggtgaagcgtctaggagtcattggcgccggccagatgggcttgggcattgcgctggtagctgctcagagagccggtgtgcccgtcaccgtcgtcgataactcacaggcatctttggataaagggttaaaattcgcagacaccctcctggctaaggatgtgtctaaatcacgtattacccaggaacaggccgacgaggctcgatccaaattgacacctactacctcaattgacgaattggcaaatgtcgactttgtcatcgaggcagtgcccgaaatcccgaatctcaagtttgacatattcgccaaactggcagaaatatgtcccaaacacgccattcttgctaccaacacatcatcgatatccattacaaaaatagccgctgcgacgacaaaggatcccaaagacacgtctgctagctcacgtgttgtgtcgacacatttcatgaaccccgtgcctgtacagaagggtgtagaaatcatcagtggcttacaaacaagtgctgagactttggagactgctgtggctttctgcaaggccatgggaaaggtcacgtcggtctcggctgactcgccaggctttctcgcgaaccgcattctgatgccttacatcaacgaagccgtcatatgcttggaaactggagtcggtgaccgggactctatcgacgccatcatgaagaatggcacaaatgttcctatgggccctctccagctcgctgacttcatcgggctcgatacgtgcttggctatcatgaaggttttgcaccaggaaacaggcgattcaaaatacagacccagcgtgctgctcaccaagatggtcgatgccggttggctcggaaagaagagtggaaaggggttctatgattattagagattacttcaacgtaacatgtcccacagtggctaacggtcatgacttaacgtgccattctgattgagtgacctgctgcgctttgcaagcaagcttcagcctagcgtacctattagtcgaatgtcacgtcgcatacgtaatagatgcgacaatctagcatattcattagttagtcgagtgctcataggtagtaacgagcttgactaagcagcatgatgggggcgtctgtgcgcccgttaaaaagccccttcgtatttgttactacataggttgaagttcacggaaatttcaaaagaaactttacgaaaactgtctcgtttgataatcatgggctcatactacgcctcatcgtaatggtctgacactgttcacatataacccggatggccaaacgttcctgacgcccatatgcctcatcgctcatgggctaaaggaaactagctccggatcgttttcgtaccatcgagctgggatagcttcgaggtcagtcacgatcatagggcgtaaactcaaacccctaattatgtgaactcttcttgatatgactcctgaaaaggccaattgagactgttaatgaaagcgttacaggtgcgtacctgtgcctgattcctgagtcgtgcatagatgaagaccacctactaggcgggggtcattcattcaggatctggctttcgatgcttcatgggcaatgcgacaacttcgggttggcgagagctacgtccgaaagtctcggagcggggccgactatatggagcacatttgcggcatgctcccgaatgcaatcccctgcagcttttgatacatttaggaaatcgtcaggtgtttttccccctgcatttgaatacaaaagcgacaagatctcgatggaataggcacattgcatcgtcctgtcaagggcactcccggttttgtccgacgacattgtttccctgtcctacgacaggaaaccagaaataggttgatgaggtctagaacgggagctattcccaaaatcaacacatttggttgagctaggagatatcgctgcacaccagatctgtctcgtgtgcccagaaactgggggagtagatagaagaacggcaaatgttggagaatagcgtgaatatggaggggtattgaggggtcaaatcaatgatccaatcgcgccgttgatgattcgtacagaagcgcgaaagccgatgtctatcaatgcaacattttctactagctcctgaagaaaaacgacactttgatccaaggaggctcatgactggatccgaccgtatccacccaagaagaattttaacatcacgagatcatacccgcaagagctcgaatattgtagcattgaggaaagcgaacagaccccttaattgaatacaacaagctgccgaaaggcatcctccgtttgatatgacaaattcgaaccacctggcttaggataggcgtcctggcgcgaaagcatcgtgaatttattgagtaagaaaaacgccaaaaatgcaatcaagtcctcaccgtcctcaagccacctagggatgcatctcgaacaggggacagaagacatgacatcccggctgctgccgttaattcaaacgagttagtgggtaactgctcatccgccacacttacgttacctgccaccgtagtataagtcctgtagcaggacgcatgtatctacacatgtgcctagctacactttggctgaatgaggtcataggttattttccgaagaaggccagaaaatgctgactacatgtctcgaggcttgaggccattctgggtctgatccaggcacctgtacttgtcgagccagcctctgtgaaaggtcggtttctctttcccgtgtcacaaattgcaggatgctctagactcttagcacactagggaaagcttagaaaacttgcccgcgacagtagaagcgacgctaagatccagtgcgcattatggtgg

SEQ ID NO: 29610 - DNA, 2691 bp, Muscodor strobelii
  misc_feature: SGI cDNA ID NO. 570171
  misc_feature: Reduced expression when VOC is produced
  misc_feature: Encodes the peptide sequence at SEQ ID NO 29611
atgaaaaagactcgtcttcgaaaaaacgagctccagttgccgaaccagatggttcagggaaagttactaaaagacgtgccgctcgagcctgcgtttcatgccggacacgcaagaaagagtatctttgatcacgaccttcatgcctccgcgctccccgagaatggtacaaattgcggtcctcatcaccatgccgaggcacaactactcaaggcgaaaacggtcctaccaaacgaaagcttagaggcgactagaagcgtgaacttcaatggttccgtcgacattgcaccaatccctcgacgccacagtacggttcatatgacgactcttcttgacggccctagtttgggaggagtcaaccaacatggcagccttgacggccgtgtccccaagcttctaccaaacccggatttaagattagacccaacattactacctttccaggcgaataatccacaacaaagatggcctcgtacttggcccggcccgactgcagctcaaatcgcgaatccaagtccgaattcgaattccagtgctgatcctggcgtcgtacggacaccgacttttagcccgttggacgttaagatcgaggtcccagagttgcctggtttcatctgcccgttgcccgcaaaaattgcccctgaagacgttgaatacctacgagtgaaaggtgcattatcgcttcctagccttgcgttccaggatagtctcttacgtgcatacattgagtatatacacccatatgtgcctctcttggagcttcatgatctattggccgccatcgacgcccgtgacggatcacgcggtcgcatcagtctcttcctctaccaggctatcatgttctcagctgtggcgttcgtaaaattagataccttgaaagaaaatggttacccgtctacgaaagtagcccgcagggtctttttctaccaaaccaggctactttacgacatggactatgagaatgaccgcctcgtgctgatccaggggttgctgttgatgtcatactggtacgagacacccgacgaccaaaaggacacatggcattggatgggcgtggctatttcactggctcacacaatcggtctacaccgagacacagcaaccaggggggctatgacacttcgaacacgaagattatggaaacgaatatggtggtcctgcttcatacgcgaccgcatggttgctctgggaatgcgacgaccaactcgaataaaagatgaagacttcgatgttcccatgctagaagaagacgatttcgagataagagcgctccctgatgacattcaagttgtcagttcggaatgtttgtcactacgcaatttggaaatgcagcatgacctcgctcttatgtgcattgtcaaggccaagctctgtctttgcgtcagccatctgctcagaacccagtattctgtttccacatgcacgaattcacaacctgagaatacggtcaacagcaggatgatgttggctccaaatgagcagtgcgacaacatggatgctgttgcgatttgtgacggggaactcattgactggttcagaacactaccgccctgttgcgagcaaccatccacagaagatttagatctcaatccagatcatatccccatgcttattcaccgcaatgttttgcatttaacatactatacggcagtatctgcattgcaccgcccacaatttttgcgcaagagtataaaagtaacggaggaagcccaaagttatgcacgcttgcgggtctgggagtcctctaggggtatcacaaacataatcagccagctgaaaggctacggtttagtgaaatacatgccaaccacgagtgtcactttcattctccccgccatgatcatccagatgctccagatgaaaatcccaataccccgcattcaggaggaggcaaagcagggcttcaacgattgcatggaggtcatgaaacgcttgagtgaagtttacgcttctgctgactacgctattgtgttcgtgagtgccgccatgaacaaatgcctattaggccccagatctatgctgcggacacaatatctctgcaggaaagacaaaggtaagggacctgccaatatcaacggcatggcaaatcctgccttgccactgcaatatccgaacagcggcggttctgcacacgccggcctccaaaacgtgacgactccgccctcagaaagcgagtcttttctcatggagaatcagaccttaccagactttgaaggcgtcttgccgctcgacgcttacattgctcatcaatccataccgcctgcagatttcatcgagccatctgtactatcatccgaggacaactctgagatcagtactaatggagctagagaggatgccgttcgagctcactcacctcccatgtccgtgagtatggagaataacggaccatcgccagaaggcaacgatgctggtgcggccgatgtcgaccccaacacagtctcggctggggatcaccccgctgactttgattggagctcgttggaccctgattcgaatctcgatttcgaggaatggctacaatttccagctgcaacagaacggcctttcgctgcaatgactccgcgctccatcatggggacgccgaccatgaacagtcatgaagccccagccacaaatttccatgccaaccatttgcatggtcctagtggtaacaacgaatctgatggattagctcagttgttgtgtaattaa

SEQ ID NO: 29611 - protein, 896 aa, Muscodor strobelii
  misc_feature: SGI Peptide ID NO. 570171
  misc_feature (322)..(417): Pfam Id: PF04082 Pfam Desc: Fungal specific transcription factor domain
  misc_feature (110)..(842): NCBI GI: 1706177 Blast Desc: CTF1B_FUSSO RecName: Full=Cutinase transcription factor 1 beta gi|1262914|gb|AAA96825.1| cutinase transcription factor 1 [Nectria haematococca mpVI]
  misc_feature (198)..(842): NCBI GI: 46125629 Blast Desc: CT1B_FUSSO CUTINASE TRANSCRIPTION FACTOR 1 BETA [Gibberella zeae PH-1]
  misc_feature (117)..(842): NCBI GI: 189031176 Blast Desc: transcription factor CTF1 [Hypocrea lixii]
  misc_feature (180)..(843): NCBI GI: 116206446 Blast Desc: CHGG_02516 [Chaetomium globosum CBS 148.51] gi|88183113|gb|EAQ90581.1| CHGG_02516 [Chaetomium globosum CBS 148.51]
  misc_feature (170)..(667): NCBI GI: 145612263 Blast Desc: MGG_08199 [Magnaporthe grisea 70-15] gi|145019458|gb|EDK03686.1| MGG_08199 [Magnaporthe grisea 70-15]
  misc_feature (198)..(663): NCBI GI: 171693643 Blast Desc: protein product [Podospora anserina] gi|170946770|emb|CAP73574.1| protein product [Podospora anserina]
  misc_feature (181)..(790): NCBI GI: 169608129 Blast Desc: SNOG_07131 [Phaeosphaeria nodorum SN15] gi|160701570|gb|EAT85782.2| SNOG_07131 [Phaeosphaeria nodorum SN15]
  misc_feature (186)..(664): NCBI GI: 189189648 Blast Desc: cutinase transcription factor 1 alpha [Pyrenophora tritici-repentis Pt-1C-BFP] gi|187972769|gb|EDU40268.1| cutinase transcription factor 1 alpha [Pyrenophora tritici-repentis
  misc_feature (170)..(726): NCBI GI: 12718376 Blast Desc: CUTINASE TRANSCRIPTION FACTOR 1 BETA [Neurospora crassa]
  misc_feature (170)..(726): NCBI GI: 164426787 Blast Desc: NCU03643 [Neurospora crassa OR74A] gi|157071477|gb|EAA32134.2| [Neurospora crassa OR74A]
  misc_feature: Useful for introducing or modulating the production of volatile compounds
MKKTRLRKNELQLPNQMVQGKLLKDVPLEPAFHAGHARKSIFDHDLHASALPENGTNCGPHHHAEAQLLKAKTVLPNESLEATRSVNFNGSVDIAPIPRRHSTVHMTTLLDGPSLGGVNQHGSLDGRVPKLLPNPDLRLDPTLLPFQANNPQQRWPRTWPGPTAAQIANPSPNSNSSADPGVVRTPTFSPLDVKIEVPELPGFICPLPAKIAPEDVEYLRVKGALSLPSLAFQDSLLRAYIEYIHPYVPLLELHDLLAAIDARDGSRGRISLFLYQAIMFSAVAFVKLDTLKENGYPSTKVARRVFFYQTRLLYDMDYENDRLVLIQGLLLMSYWYETPDDQKDTWHWMGVAISLAHTIGLHRDTATRGAMTLRTRRLWKRIWWSCFIRDRMVALGMRRPTRIKDEDFDVPMLEEDDFEIRALPDDIQVVSSECLSLRNLEMQHDLALMCIVKAKLCLCVSHLLRTQYSVSTCTNSQPENTVNSRMMLAPNEQCDNMDAVAICDGELIDWFRTLPPCCEQPSTEDLDLNPDHIPMLIHRNVLHLTYYTAVSALHRPQFLRKSIKVTEEAQSYARLRVWESSRGITNIISQLKGYGLVKYMPTTSVTFILPAMIIQMLQMKIPIPRIQEEAKQGFNDCMEVMKRLSEVYASADYAIVFVSAAMNKCLLGPRSMLRTQYLCRKDKGKGPANINGMANPALPLQYPNSGGSAHAGLQNVTTPPSESESFLMENQTLPDFEGVLPLDAYIAHQSIPPADFIEPSVLSSEDNSEISTNGAREDAVRAHSPPMSVSMENNGPSPEGNDAGAADVDPNTVSAGDHPADFDWSSLDPDSNLDFEEWLQFPAATERPFAAMTPRSIMGTPTMNSHEAPATNFHANHLHGPSGNNESDGLAQLLCN

SEQ ID NO: 29612 - DNA, 4354 bp, Muscodor strobelii
  misc_feature: SGI EST ID NO. CUFF.70151.0
  misc_feature: Variant of the nucleotide sequence at SEQ ID NO 29610
tgattatgttccacctaatagccaacccttcttgagctcctctcatgctgccactcaaggtctacgttgtaaacgcgcggtgtggacgtcaggatctgtaccctcagaggtatcagaagatgaaataattcctatcagctttttgcctcaccgtcactcctaaactctcgactacggaaagactagtcaaggtcacattcgagacaacacaagagcgagcgccacgcagaactctattttcttaacagatagtcctaattaggaatcgcgaaatattactcgatatccaatcaggttcaatcatctgagatatacgagccttactaagggcttgcttgatatttgagaaatgccggagaaccatggcgctcatacgccagagagcgaatcatctagtaacaatgatggaaatactatggccaataagtcttctaacgggaaaaagtcgtcaacacattcgaatgagaagcatgaaaaagactcgtcttcgaaaaaacgagctccagttgccgaaccagatggttcagggaaagttactaaaagacgtgccgctcgagcctgcgtttcatgccggacacgcaaggtcagatgcgatgtagtcgaaaattacccatgtgggaactgcaaatgggatggtgtgcattgtgaagtgcagccgagtcgcagacgaaaaaagagtatctttgatcacgaccttcatgcctccgcgctccccgagaatggtacaaattgcggtcctcatcaccatgccgaggcacaactactcaaggcgaaaacggtcctaccaaacgaaagcttagaggcgactagaagcgtgaacttcaatggttccgtcgacattgcaccaatccctcgacgccacagtacggttcatatgacgactcttcttgacggccctagtttgggaggagtcaaccaacatggcagccttgacggccgtgtccccaagcttctacgtaagttattgcactttccacggtagaagcctgcgataccaagcagtcaaaaagcaacacctctggtattccaatactcttctctacacatgccctcaggaagtgtcaggacgtgctgcaaaattccggactgacttgtgcccgcagcaaacccggatttaagattagacccaacattactacctttccaggcgaataatccacaacaaagatggcctcgtacttggcccggcccgactgcagctcaaatcgcgaatccaagtccgaattcgaattccagtgctgatcctggcgtcgtacggacaccgacttttagcccgttggacgttaagatcgaggtcccagagttgcctggtttcatctgcccgttgcccgcaaaaattgcccctgaagacgttgaatacctacgagtgaaaggtgcattatcgcttcctagccttgcgttccaggatagtctcttacgtgcatacattgagtatatacacccatatgtgcctctcttggagcttcatgatctattggccgccatcgacgcccgtgacggatcacgcggtcgcatcagtctcttcctctaccaggctatcatgttctcagctgtggcgttcgtaaaattagataccttgaaagaaaatggttacccgtctacgaaagtagcccgcagggtctttttctaccaaaccaggctactttacgacatggactatgagaatgaccgcctcgtgctgatccaggggttgctgttgatgtcatactggtacgagacacccgacgaccaaaaggacacatggcattggatgggcgtggctatttcactggctcacacaatcggtctacaccgagacacagcaaccaggggggctatgacacttcgaacacgaagattatggaaacgaatatggtggtcctgcttcatacgcgaccgcatggttgctctgggaatgcgacgaccaactcgaataaaagatgaagacttcgatgttcccatgctagaagaagacgatttcgagataagagcgctccctgatgacattcaagttgtcagttcggaatgtttgtcactacgcaatttggaaatgcagcatgacctcgctcttatgtgcattgtcaaggccaagctctgtctttgcgtcagccatctgctcagaacccagtattctgtttccacatgcacgaattcacaacctgagaatacggtcaacagcaggatgatgttggctccaaatgagcagtgcgacaacatggatgctgttgcgatttgtgacggggaactcattgactggttcagaacactaccgccctgttgcgagcaaccatccacagaagatttagatctcaatccagatcatatccccatgcttattcaccgcaatgttttgcatttaacatactatacggcagtatctgcattgcaccgcccacaatttttgcgcaagagtataaaagtaacggaggaagcccaaagttatgcacgcttgcgggtctgggagtcctctaggggtatcacaaacataatcagccagctgaaaggctacggtttagtgaaatacatgccaaccacgagtgtcactttcattctccccgccatgatcatccagatgctccagatgaaaatcccaataccccgcattcaggaggaggcaaagcagggcttcaacgattgcatggaggtcatgaaacgcttgagtgaagtttacgcttctgctgactacgctattgtgttcgtgagtgccgccatgaacaaatgcctattaggccccagatctatgctgcggacacaatatctctgcaggaaagacaaaggtaagggacctgccaatatcaacggcatggcaaatcctgccttgccactgcaatatccgaacagcggcggttctgcacacgccggcctccaaaacgtgacgactccgccctcagaaagcgagtcttttctcatggagaatcagaccttaccagactttgaaggcgtcttgccgctcgacgcttacattgctcatcaatccataccgcctgcagatttcatcgagccatctgtactatcatccgaggacaactctgagatcagtactaatggagctagagaggatgccgttcgagctcactcacctcccatgtccgtgagtatggagaataacggaccatcgccagaaggcaacgatgctggtgcggccgatgtcgaccccaacacagtctcggctggggatcaccccgctgactttgattggagctcgttggaccctgattcgaatctcgatttcgaggaatggctacaatttccagctgcaacagaacggcctttcgctgcaatgactccgcgctccatcatggggacgccgaccatgaacagtcatgaagccccagccacaaatttccatgccaaccatttgcatggtcctagtggtaacaacgaatctgatggattagctcagttgttgtgtaattaaactaagagcttccgtatattccgcactgggttcattacttcgacttgggctcgattgcccgacggttgaatagtgtaatggctatcacatcggagatatctacacggactaatgaagctctaagagccgaggatggccgccagaacggatgtgccacgctcacaatggtacagcgaatgccctttggtttttgctaatctatccaccatatcctgaaaggtgaagggcgtggtgacgagtttcaatgtctcgtgcagatatctccggaaatctgggttcaattcccagttcgatcaattcttcttccccagagagagatagtcgcactatctgttctctgacgttaattcttatcaactaaatcattccatggcctaaattttggccttcggaccttgattcttacatgagctttcgatttcaccaatagcatgacggcacgattaatagactacagttcggcgttggggataatgagagggtttacttcagcatcatgattcacatcgcttctgcatcagacatttttaatgctgttcatttcagatacccacggtaatcggcggagggaaatatgggtttttttctttcttttttgaggaaaacgatttttttaatcgcattttcacttcatcttcaaaagttttacatcacatgtctgtggggagcgatggtacttggtgcatagcctagattaagtagagagtcttgactcacagggtacgagtttatgactgagaggaaaaagaagacgatcccatgtttcggggacagaccagaagagtttcgtctagaatatgtggctaacctttgtagatgatctagcaagactgccgtagttgggcatcacatcaaactagcattcatggcaaaatttctcagagcagagtcgtgagcggttgtgagtggttccgtcacgcttcgccagggatgatcccttctttgctttgatttctc

SEQ ID NO: 29613 - DNA, 1203 bp, Muscodor strobelii
  misc_feature: SGI cDNA ID NO. 570172
  misc_feature: Encodes the peptide sequence at SEQ ID NO 29614
atgaccagaaccgtcgttgtcttgggagccggccaggctggcctcccaatcgctcactacctgcttcgcaacacctcgaagcatcactcagatctgaaagtggtgctcgtgacacctcacgatgcattctaccacaagatcgcatcagtccgctttgtggtacctgagaccataccggaggataaatacttattcccgctcatggagcagttcgccgaatacccggcctcgaaattcgagctcgtgatcggtagcgctgagactttgataccagagacaaatacagtcaaagtcagactcagcggagacggaaaggcaccatccgtcgacgcctcgagctccggctcactccgggaaatcccctaccacactctagtcatcgcaacaggatcacgatacagcgaagacatgccctggaaagaagtcggcaacaccgcgcaaacgaaggccagcatcgccaaacttcaatctgacatccgcgccgcaaagtccatcatcgtcgcgggcgctggcgtaaccggctccgagttcgcaggagagctcggctcggcctacggcaaatcaaaacaaaagaccatcaaactaattggcaacgagtcactccccctcacatcaccaatcaaagactccatccgcaagaacgtgaagaacgaactagcaaagatgaacgtccaatacatcggcaacgcccgcgtaaccacggagaagggatccaagaccgtcctcctcacaaaatccgacggaagcacacagactctcaccgccgatctagtagtacccacgttcggcattcaacccaataccgagttcgcacccgcttctatgatagacgtgaagtcctcgcgcctcatccaaggcactgacctccgcgcgccgggccacaagaacatattcatcatcggcgacgcagggaacctgcaagcgccccaagccgcattcgccggcaaccagacgcgtcacctcatgtcgaacttcaagtcctacttctcttcgataggtgaagtgaagccttacaccgccgacaacaaacccatgatcgcattgaccctcggtcgtgaccgtggaactggacagatcggcaactggggtcttccgagcatcctcgtctggttcttaaagggtcgtactctaggcacggacaagatcgagtcgtttgctaagggattgaccgatggacttggctccgcatggcctaagtcttaa

SEQ ID NO: 29614 - protein, 400 aa, Muscodor strobelii
  misc_feature: SGI Peptide ID NO. 570172
  misc_feature (164)..(263): Pfam Id: PF00070 Pfam Desc: Pyridine nucleotide-disulphide oxidoreductase
  misc_feature (4)..(308): Pfam Id: PF07992 Pfam Desc: Pyridine nucleotide-disulphide oxidoreductase
  misc_feature (1)..(388): NCBI GI: 261351593 Blast Desc: conserved [Verticillium albo-atrum VaMs.102]
  misc_feature (2)..(388): NCBI GI: 46126023 Blast Desc: FG07389.1 [Gibberella zeae PH-1]
  misc_feature (3)..(388): NCBI GI: 256730917 Blast Desc: NECHADRAFT_101554 [Nectria haematococca mpVI 77-13-4]
  misc_feature (1)..(397): NCBI GI: 116199317 Blast Desc: CHGG_07814 [Chaetomium globosum CBS 148.51] gi|88179093|gb|EAQ86561.1| CHGG_07814 [Chaetomium globosum CBS 148.51]
  misc_feature (2)..(388): NCBI GI: 145612257 Blast Desc: MGG_08196 [Magnaporthe grisea 70-15] gi|145019454|gb|EDK03682.1| MGG_08196 [Magnaporthe grisea 70-15]
  misc_feature (1)..(395): NCBI GI: 256728951 Blast Desc: NECHADRAFT_80122 [Nectria haematococca mpVI 77-13-4]
  misc_feature (1)..(388): NCBI GI: 256726095 Blast Desc: NECHADRAFT_42979 [Nectria haematococca mpVI 77-13-4]
  misc_feature (3)..(388): NCBI GI: 256728391 Blast Desc: NECHADRAFT_53988 [Nectria haematococca mpVI 77-13-4]
  misc_feature (1)..(388): NCBI GI: 46111627 Blast Desc: FG02695.1 [Gibberella zeae PH-1]
  misc_feature (1)..(388): NCBI GI: 156045061 Blast Desc: SS1G_09719 [Sclerotinia sclerotiorum 1980] gi|154694114|gb|EDN93852.1| SS1G_09719 [Sclerotinia sclerotiorum 1980]
  misc_feature (5)..(306): SWISSPROT Homolog: EC 1.18.1.1 Rubredoxin--NAD(+) reductase
MTRTVVVLGAGQAGLPIAHYLLRNTSKHHSDLKVVLVTPHDAFYHKIASVRFVVPETIPEDKYLFPLMEQFAEYPASKFELVIGSAETLIPETNTVKVRLSGDGKAPSVDASSSGSLREIPYHTLVIATGSRYSEDMPWKEVGNTAQTKASIAKLQSDIRAAKSIIVAGAGVTGSEFAGELGSAYGKSKQKTIKLIGNESLPLTSPIKDSIRKNVKNELAKMNVQYIGNARVTTEKGSKTVLLTKSDGSTQTLTADLVVPTFGIQPNTEFAPASMIDVKSSRLIQGTDLRAPGHKNIFIIGDAGNLQAPQAAFAGNQTRHLMSNFKSYFSSIGEVKPYTADNKPMIALTLGRDRGTGQIGNWGLPSILVWFLKGRTLGTDKIESFAKGLTDGLGSAWPKS

SEQ ID NO: 29615 - DNA, 2541 bp, Muscodor strobelii
  misc_feature: SGI cDNA ID NO. 570173
  misc_feature: Encodes the peptide sequence at SEQ ID NO 29616
atgaccaccacgggcaccactatagggaccgctcattctcgccatcttctaggaagcggcacaggagcggaagtccaccatcgttcgcccctcggccgaaaaggtctcgacgcgaaaaagaacgtgatcgtcgccgtcggatggagagggaggagagatttgaccgagatagagccaagcccccctcatcgtcgcgacccgaccgtccatattccccgcctcgaaggcgatcgccgtcaccccgatacgacaactcgagacggagatatcatgatcaaggtgatgacatcgatggacctcgtcaccgtcgtcgaacccgatccccatcccgcgaacctcggtcaccgcgacctgattctcgtcggtcatcgttctcgcttacgcactcaccgcctcattcaacagctcggcctccacctcgtggcccctctgatgtcaggatactctctcgacgcttctggcgccaacagcattgaagttggctcatttagaaggggtgatcggcggaacagctatgaagatacggggtcgtacagagatgatgctcaagggtatcccgacggttcccaccttggtcaagcgagtccccatacacaaactagttcacctcatcgtggctccccacggtcgccagctttttacgacaaagctcgcatagcacaaggctacgatggccactatcccacacgaagtcaacactctcctccgatttccaaaggcagccgtaggacttcagtgggacctcccgagcgtcgtaagccaagtcgctccccggatcgcccgcccaccggaccattccaatctcatgctcgaggtcgaggattttctcgaggaggtttcagaggtggcttcaactcggctcgaggtggtctgggtgataacaggtcgtcgagaccagactcgcatattggacacttcgatccagatcgacacccttccagtccttctcggcatgcgactcccacccactctgaccatgaggctgtcggacaagaggagattgctccgcacagcccatccatgtcgttgcagaatggccagattgacagtcaagatgatccgagagagcttgacgaacacatgccgcccccgcgacctccccccacagctccgactggcccatctggctcgaagttcagcttcgcgtttaagacttcgactaaaaacccagtcgcaacaccaaagccagagatatcccagaagtttagcgccgccccaaagaaggaacagccactaatcgtggacgatcgggaccgggatctgccgaaagacacgcccagagagcctgcgtctgcgcgtgctcgagctgataatcaccaccaccatcgactagctgaacgaccacccccacctgaacggcctaggactcgcaaagtcataaaagtacgccggaaactcaagcccaagccttcattggacccagaggttgccggatccgagtcggtttatttccgcaagccgggcgataaatcagtcatcggatcgggtacgtatggcaaggtcttcaaaggaaagcatgtttacacgcaaaaattggtcgccttgaagagaatcagaatggaaggagagcgagacggctttcctgtgaccgccatgcgtgaggtcaagcttcttcagtctctaaggcacccaaacatcgtgcatttgtatgagatgatgattgagaaaaatgactgctacatggttttcgagtacctgtcccacgatctgactggtctcctgaatcacccgtcatacaaacttgaggctgcacacaagaagcatcttgccatgcagatattcgagggcctggattatctccacaaacgaggggttctacatcgcgatatcaaggctgcaaatattctggtcagcagcgacggcatcctcaaacttgctgacttcgggttagctcgcttctatgcgaagcggcatcagcttgactacacgaatcgagtcatcactatctggtacaggtctcctgagctgcttctaggcgagacacaatatggcgctgccgtcgatatatggagcgctgcgtgcgtgatggtggagatattcaccagacacgcaatatttccgggcgatggtggtgaaatcagccagctcgagaagatctacaatatactgggtactccaaaccggaaggaatggcctgggcttgctgaaacgccctggttcgagttactacgcccgagctatcgaaagccaaacacctttgcggaaaaatatagagagcgactccctgccgccgccttcgaccttctcgccgaaatgttccaatatgatccattgaagcgaccctcagctgcagatgtactcgagcatccttatttcacggttgagcagccggcaccccggcaggccatcgaacttaaggatatccagggtgactggcacgagttcgagtctaaacagttccgacgtgagaaggaaaaacaggaaaaagaaaagagggaggcacggcgcgcggccgaaaaggagaaaaagcgtcctacatcatcacatgacactgaacctgagcccaagagacagcacgtagaaggtcaaccacaaaagtaa

SEQ ID NO: 29616 - protein, 846 aa, Muscodor strobelii
  misc_feature: SGI Peptide ID NO. 570173
  misc_feature (489)..(772): Pfam Id: PF00069 Pfam Desc: Protein kinase domain
  misc_feature (492)..(632): Pfam Id: PF07714 Pfam Desc: Protein tyrosine kinase
  misc_feature (152)..(837): NCBI GI: 154317886 Blast Desc: BC1G_02926 [Botryotinia fuckeliana B05.10] gi|150843584|gb|EDN18777.1| BC1G_02926 [Botryotinia fuckeliana B05.10]
  misc_feature (152)..(837): NCBI GI: 156050171 Blast Desc: SS1G_07672 [Sclerotinia sclerotiorum 1980] gi|154692073|gb|EDN91811.1| SS1G_07672 [Sclerotinia sclerotiorum 1980]
  misc_feature (143)..(841): NCBI GI: 116199185 Blast Desc: CHGG_07748 [Chaetomium globosum CBS 148.51] gi|88179027|gb|EAQ86495.1| CHGG_07748 [Chaetomium globosum CBS 148.51]
  misc_feature (342)..(844): NCBI GI: 39971951 Blast Desc: MGG_07291 [Magnaporthe grisea 70-15] gi|145019796|gb|EDK04024.1| MGG_07291 [Magnaporthe grisea 70-15]
  misc_feature (152)..(814): NCBI GI: 28949924 Blast Desc: related to CELL DIVISION CYCLE 2-RELATED PROTEIN KINASE 7 [Neurospora crassa]
  misc_feature (417)..(844): NCBI GI: 261355625 Blast Desc: CTD kinase subunit alpha [Verticillium albo-atrum VaMs.102]
  misc_feature (362)..(819): NCBI GI: 164424732 Blast Desc: NCU06685 [Neurospora crassa OR74A] gi|157070636|gb|EAA31764.2| conserved [Neurospora crassa OR74A]
  misc_feature (363)..(824): NCBI GI: 46124831 Blast Desc: FG06793.1 [Gibberella zeae PH-1]
  misc_feature (447)..(822): NCBI GI: 189209854 Blast Desc: serine/threonine-protein kinase bur1 [Pyrenophora tritici-repentis Pt-1C-BFP] gi|187977352|gb|EDU43978.1| serine/threonine-protein kinase bur1 [Pyrenophora Pt-1C-BFP]
  misc_feature (463)..(837): NCBI GI: 169616157 Blast Desc: SNOG_11252 [Phaeosphaeria nodorum SN15] gi|160703126|gb|EAT81751.2| SNOG_11252 [Phaeosphaeria nodorum SN15]
MTTTGTTIGTAHSRHLLGSGTGAEVHHRSPLGRKGLDAKKNVIVAVGWRGRRDLTEIEPSPPHRRDPTVHIPRLEGDRRHPDTTTRDGDIMIKVMTSMDLVTVVEPDPHPANLGHRDLILVGHRSRLRTHRLIQQLGLHLVAPLMSGYSLDASGANSIEVGSFRRGDRRNSYEDTGSYRDDAQGYPDGSHLGQASPHTQTSSPHRGSPRSPAFYDKARIAQGYDGHYPTRSQHSPPISKGSRRTSVGPPERRKPSRSPDRPPTGPFQSHARGRGFSRGGFRGGFNSARGGLGDNRSSRPDSHIGHFDPDRHPSSPSRHATPTHSDHEAVGQEEIAPHSPSMSLQNGQIDSQDDPRELDEHMPPPRPPPTAPTGPSGSKFSFAFKTSTKNPVATPKPEISQKFSAAPKKEQPLIVDDRDRDLPKDTPREPASARARADNHHHHRLAERPPPPERPRTRKVIKVRRKLKPKPSLDPEVAGSESVYFRKPGDKSVIGSGTYGKVFKGKHVYTQKLVALKRIRMEGERDGFPVTAMREVKLLQSLRHPNIVHLYEMMIEKNDCYMVFEYLSHDLTGLLNHPSYKLEAAHKKHLAMQIFEGLDYLHKRGVLHRDIKAANILVSSDGILKLADFGLARFYAKRHQLDYTNRVITIWYRSPELLLGETQYGAAVDIWSAACVMVEIFTRHAIFPGDGGEISQLEKIYNILGTPNRKEWPGLAETPWFELLRPSYRKPNTFAEKYRERLPAAAFDLLAEMFQYDPLKRPSAADVLEHPYFTVEQPAPRQAIELKDIQGDWHEFESKQFRREKEKQEKEKREARRAAEKEKKRPTSSHDTEPEPKRQHVEGQPQK

SEQ ID NO: 29617 - DNA, 7805 bp, Muscodor strobelii
  misc_feature: SGI EST ID NO. CUFF.70210.0
  misc_feature: Variant of the nucleotide sequence at SEQ ID NO 29615
cttggagtggttttcatcaataccgacgatgttcagcgacaatgcatctcgcccacgaggctgtaggcattatcgagatctttgcctctcctacttgacatgcctagcagcccgattgttggagtctatctgctctgttcctccagcgactgcattggcagtcaatagtcgactgctgacagtagccacaaccatggcgccgccttactcaacaaatgcccccataaccatcgcctctgaccgcccatcgcccgtaaaagtcggctccatcaaatcacgcggagatatatgtgcggatgcttagaagtctatcaatagaagtcatgtcgtcaatctgggatccgtagccgtatgcccctcctgggagatcgcgccagcatcgtacaaccgaccgccccgcatgccaacggtcaacttcgatctctacagcatgattccgaacgacccgaattcaaagcgaaaagttaggtgtgagtcaattgacaccatctaggcactatggtatagtcctttagatgcttggttgtggtcaagctgggggacgtgaatatccgatgttgtttcatttgcagatcaagctttctaactactgcaccgcgccttgtctgatcatgaacattttatcatctcttggccctacgggcgccgtattgtaccagacataaccagccaccaagaagacagcagaccatgcgtactaactggaggcttatttggtgcttacacttcacctcagagcgacagcaagaaaagcatcgggagccaggactgttatttggcttgtattcagaccaccgcagagctttggtatcccattcaactcttggacataatcggtggcaggcatatcgcatgagcaaggacaagataagactgagaacccatttctggaagacacaatggatagccacggatttcaggtatagtaatggcacgtgattagccattaccgcctcgtctcaccctgcaccacccatttcgactgatgaatgagttcacagttgtgcgtgggaacggcaacactatggctgccgcctgaaattttcttggttgcccgtggcgggttgctagttttgacttgggtgtcaacatacgcctgcaagactaagaccatgctctagacagggcagtatgacttattgcacactcagaagaatcgcagcatctcacataagggacttgggcctattctccgtgcgacgaccatgttgagaattgtcacgtatgactcattgtcagccagcaggtactttggggtaattgggaattagaaaggtggcttgtagatagtgatatggtgggtgcatagcactccatcgccacaagtcctctggttttgttgaccaggggccgtatctgtggatagggttccaagatcagcccggatgatgatgatcgtgaggtacaggtgctgattatttatcaggcttggcatggcatggtacggtatgggttgcagaatccggcagcatcacggaacactctcagagaacgagtgtcggtctgctcggtgtatggggatggtacttttcatcagacagatcttgcatcggcgtgcctgctcgttgagaatctcttgccactgcactgagcatgccttgcctacaaccggcggctgcccaaggctaccatctacgatgactctgggtcgaagaggggccggaccaattgatctgtctgcttgctaccgttgcgctcttgcgcactgggagccccgcgccggatcacgtcttgattgacgtgtgctattgctgggttggtgctggtgctcgccgcacgcggccagggctaccccaaattaccggctcaactagctggccaaggcggagtgctggttcagagtttcgagccccagaaatttttccattttagtacgggccgctgtgcattcagaccgaaccacatccaccaccgttggtttgcccaccttgactggtcgaaggtccatgttgagcatctcatagcttgcgtgtctgtcgaggacgttgcacgctcagccgccatatgtttccccgtcgcgatttttgctcacaccattgcgcatcttcagtatttatctgtgcatcgagcatcttacgagggggaggttccatttgcacaccacttcagcttacctaaggactggctggcgtgctgatcaaagccagtcttctgggtgcctgtcgctcatctttgcaggttgctcttccaccacccaccaacaccagcgttggcatcgagaagtcaaggactgaaaggccacacctcatcatttctattgggtcagcatctgcttgagcaacaaacagtgtttgaagactgtcgccgtaaggctgcctctcactctccaaggtggcccaacccatgtctcggcgacataattctgccgtatcgctcggcctgctagcctgctcgtctgcctgtctgttatccacaacatacaatcaaaatggccgatattgatgcagcacccccaacgcgtcaatcccgccgtgaatcttttacgtctccttcaacgtctcatccacaccctcgacacagaagcccccctcctttgcggcatgcggcaatggggcgtggcggcagtagagacggccgtgatggctcgcgaggaaatgtcagatcagatatgaaccatcgtggctctttcaacagcgctcgcccgaggttacgatcgtcatcgccagccaatcgcgcgcctcacaattatcgtgaccgtgatcgtgatcgtgataggacacataacgatgacgaggctccgggggagcgtaaagatccacggggggatgggagacatcggggccgatcatctgaccgccgtggccgccacatggacgactcatcaaggttagatgattcaacacgagactcgaatttcgaccccagaaagcgacatcatcggtcaccatcaccgaggtatcgttccaaggccaatgaccaccacgggcaccactatagggaccgctcattctcgccatcttctaggaagcggcacaggagcggaagtccaccatcgttcgcccctcggccgaaaaggtctcgacgcgaaaaagaacgtgatcgtcgccgtcggatggagagggaggagagatttgaccgagatagagccaagcccccctcatcgtcgcgacccgaccgtccatattccccgcctcgaaggcgatcgccgtcaccccgatacgacaactcgagacggagatatcatgatcaaggtgatgacatcgatggacctcgtcaccgtcgtcgaacccgatccccatcccgcgaaccgtacgccgaggaacctcccactaaatcaatagctcgttctcgtggtgactctaaaccccgacacggcagtcggtcaccgcgacctgattctcgtcggtcatcgttctcgcttacgcactcaccgcctcattcaacagctcggcctccacctcgtggcccctctgatgtcaggatactctctcgacgttcgtcgccctctcacgagtcatcacgcccgaattacccccctcgttctccgaaaggcggctctcgtcgggctcggaaaaagataaagcaacgtgacgagcctcgtttcgcccctcaggcttctggcgccaacagcattgaagttggctcatttagaaggggtgatcggcggaacagctatgaagatacggggtcgtacagagatgatgctcaagggtatcccgacggttcccaccttggtcaagcgagtccccatacacaaactagttcacctcatcgtggctccccacggtcgccagctttttacgacaaagctcgcatagcacaaggctacgatggccactatcccacacgaaggtatgacatggcgtttccccaagtggcacaagatgctaagattaaacacagtcaacactctcctccgatttccaaaggcagccgtaggacttcagtgggacctcccgagcgtcgtaagccaagtcgctccccggatcgcccgcccaccggaccattccaatctcatgctcgaggtcgaggattttctcgaggaggtttcagaggtggcttcaactcggctcgaggtggtctgggtgataacaggtcgtcgagaccagactcgcatattggacacttcgatccagatcgacacccttccagtccttctcggcatgcgactcccacccactctgaccatgaggctgtcggacaagaggagattgctccgcacagcccatccatgtcgttgcagaatggccagattgacagtcaagatgatccgagagagcttgacgaacacatgccgcccccgcgacctccccccacagctccgactggcccatctggctcgaagttcagcttcgcgtttaagacttcgactaaaaacccagtcgcaacaccaaagccagagatatcccagaagtttagcgccgccccaaagaaggaacagccactaatcgtggacgatcgggaccgggatctgccgaaagacacgcccagagagcctgcgtctgcgcgtgctcgagctgataatcaccaccaccatcgactagctgaacgaccacccccacctgaacggcctaggactcgcaaagtcataaaagtacgccggaaactcaagcccaagccttcattggacccagaggttgccggatccgagtcggtttatttccgcaagccgggcgataaatcagtcatcggatcgggtacgtatggcaaggtcttcaaaggaaagcatgtttacacgcaaaaattggtcgccttgaagagaatcagaatggaaggagagcgagacggctttcctgtgaccgccatgcgtgaggtcaagcttcttcagtctctaaggcacccaaacatcgtgcatttgtatgagatgatgattgagaaaaatgactgctacatggttttcgagtacctgtcccacgatctgactggtctcctgaatcacccgtcatacaaacttgaggctgcacacaagaagcatcttgccatgcagatattcgagggcctggattatctccacaaacgaggggttctacatcgcgatatcaaggctgcaaatattctggtcagcagcgacggcatcctcaaacttgctgacttcgggttagctcgcttctatgcgaagcggcatcagcttgactacacgaatcgagtcatcactatctggtacaggtctcctgagctgcttctaggcgagacacaatatggcgctgccgtcgatatatggagcgctgcgtgcgtgatggtggagatattcaccagacacgcaatatttccgggcgatggtggtgaaatcagccagctcgagaagatctacaatatactgggtactccaaaccggaaggaatggcctgggcttgctgaaacgccctggttcgagttactacgcccgagctatcgaaagccaaacacctttgcggaaaaatatagagagcgactccctgccgccgccttcgaccttctcgccgaaatgttccaatatgatccattgaagcgaccctcagctgcagatgtactcgagcatccttatttcacggttgagcagccggcaccccggcaggccatcgaacttaaggatatccagggtgactggcacgagttcgagtctaaacagttccgacgtgagaaggaaaaacaggaaaaagaaaagagggaggcacggcgcgcggccgaaaaggagaaaaagcgtcctacatcatcacatgacactgaacctgagcccaagagacagcacgtagaaggtcaaccacaaaagtaaagtcttggaccgtcaactcaaccattgcatcggaaggcaaccgataaccctcgaggtacttggacggccgtttcagatgtggaactagacgacttcagctacagcccgccattgccttgttctgatccatgattgtgtcggtctatcagagaggggttcgttgttataatagttaattgtatgaagaagcgtagatcatggatgtgcctatgatcttcttgtttattcgattgattcccgtgtgcctgtggtaatggttaaattgagacgtttggactgtacgtctctacttgggcagttatatgcaatcttatgtaacttgcttacctaagtcaagccagcctatcttcagattcacacaattgttgttattttcgatcgaacaataccattggctcgggaaatgaagtcaatattatcttgtttaaatcattataggacggattagaatcctttctatgaacgctcctcctctcacatgggtatcaagaactttgtaaatcaccctaaggttgttcccatacaatctcaaaatctactttaagacttaggccatgcggagccaagtccatcggtcaatcccttagcaaacgactcgatcttgtccgtgcctagagtacgaccctttaagaaccagacgaggatgctcggaagaccccagttgccgatctgtccagttccacggtcacgaccgagggtcaatgcgatcatgggtttgttgtcggcggtgtaaggcttcacttcacctatcgaagagaagtaggacttgaagttcgacatgaggtgacgcgtctggttgccggcgaatgcggcttggggcgcttgcaggttccctgcgtcgccgatgatgaatatgttcttgtggcccggcgcgcggaggtcagtgccttggatgaggcgcgaggacttcacgtctatcatagaagcgggtgcgaactcggtattgggttgaatgccgaacgtgggtactactagatcggcggtgagagtctgtgtgcttccgtcggattttgtgaggaggacggtcttggatcccttctccgtggttacgcgggcgttgccgatgtattggacgttcatctttgctagttcgttcttcacgttcttgcggatggagtctttgattggtgatgtgagggggagtgactcgttgccaattagtttgatggtcttttgttttgatttgccgtaggccgagccgagctctcctgcgaactcggagccggttacgccagcgcccgcgacgatgatggactttgcggcgcggatgtcagattgaagtttggcgatgctggccttcgtttgcgcggtgttgccgacttctttccagggcatgtcttcgctgtatcgtgatcctgttgcgatgactagagtgtggtaggggatttcccggagtgagccggagctcgaggcgtcgacggatggtgcctttccgtctccgctgagtctgactttgactgtatttgtctctggtatcaaagtctcagcgctaccgatcacgagctcgaatttcgaggccgggtattcggcgaactgctccatgagcgggaataagtatttatcctccggtatggtctcaggtaccacaaagcggactgatgcgatcttgtggtagaatgcatcgtgaggtgtcacgagcaccactttcagatctgagtgatgcttcgaggtgttgcgaagcaggtagtgagcgattgggaggccagcctggccggctcccaagacaacgacggttctggtcatgattaggtctgtataggagagttacttcaataagttgtagagcttgaggctgtcactgtcgtctaaggtctttgtaccagcgtgttagcataactgtcacgagaagccatcgtcaactagcgggcaggcggaattccactactttatagtctttccgctgcgcatcccacgggcttgtagctggccgtaagacatgaccatttaagctacgacccgcttgaaaggtcctgagagtagaattagacatgatcattgacacgcaatcgcgaggctgattccaggaatcaaggttgtcagttgtagcctagaccagaagcaagggcaaaagttgtcgacaaaaatgtccgggttggaacttagcgcatttccg

SEQ ID NO: 29618 - DNA, 828 bp, Muscodor strobelii
  misc_feature: SGI cDNA ID NO. 570174
  misc_feature: Encodes the peptide sequence at SEQ ID NO 29619
atgctgcctcatctcatcacgaggaaagacgtacgcagaggggacttgttcgactcagagacatctgaccaagaagacattgaacacaacgagcaagccgaatcagcggcgagggcaaaactgaatgcccaactctccggtctttttgatctgagcttcactgtcccggtggtgcaagagcagaatcaacaaccgaaatcctctattgaatcacagatcaagaatgaagatattttaccggatgctggaaaaggagaggagcaagaattagacgaagacaatacttttattttccgccttttccgcgatgaggatccgtcccacaccgtagtactcgcacgggaagatgagatcctacctggagagggcgcatttgtgaaccccaaacgtccaaaatcatactatctcgccgccccattatcatccacacacgtctcacaataccgcaacgtggcagtatcacctgagtttctcttcacggacgcgaagtcccggcgatggggtctggaaaagccatggagagtaattcacatcaacgcagatcagtcctcaacccccaccccagaaccagagaaatcaaagggaaataagacgcgaccaggcaaaaagcaccgcatactccttcgcatgaaggaaaaggcgaagcgcgagcgagaagagaaagtaaaacagcaggctgtcgataaagagctgcatctacaagagaaaaagaagagattgaatcgagagcgtaaactcaagcggagacagaaagaacgagagaagaagaaaagtgcgaatccagatactgcgaaagatggaggcgacagtgaatctgacggggactag

SEQ ID NO: 29619 - protein, 275 aa, Muscodor strobelii
  misc_feature: SGI Peptide ID NO. 570174
  misc_feature (2)..(275): NCBI GI: 171693509 Blast Desc: protein product [Podospora anserina] gi|170946703|emb|CAP73506.1| protein product [Podospora anserina]
  misc_feature (9)..(273): NCBI GI: 256730954 Blast Desc: NECHADRAFT_84695 [Nectria haematococca mpVI 77-13-4]
  misc_feature (9)..(241): NCBI GI: 46125561 Blast Desc: FG07158.1 [Gibberella zeae PH-1]
  misc_feature (131)..(273): NCBI GI: 261355693 Blast Desc: [Verticillium albo-atrum VaMs.102]
  misc_feature (121)..(274): NCBI GI: 255932175 Blast Desc: Pc12g08120 [Penicillium chrysogenum Wisconsin 54-1255] gi|211582263|emb|CAP80439.1| Pc12g08120 [Penicillium chrysogenum Wisconsin 54-1255]
  misc_feature (122)..(256): NCBI GI: 115400521 Blast Desc: [Aspergillus terreus NIH2624] gi|114191515|gb|EAU33215.1| [Aspergillus terreus NIH2624]
  misc_feature (121)..(258): NCBI GI: 225557453 Blast Desc: conserved [Ajellomyces capsulatus G186AR]
  misc_feature (121)..(268): NCBI GI: 154274786 Blast Desc: [Ajellomyces capsulatus NAm1] gi|150414684|gb|EDN10046.1| [Ajellomyces capsulatus NAm1]
  misc_feature (121)..(256): NCBI GI: 159124363 Blast Desc: conserved [Aspergillus fumigatus A1163]
  misc_feature (121)..(256): NCBI GI: 70991905 Blast Desc: conserved [Aspergillus fumigatus Af293] gi|66848434|gb|EAL88763.1| conserved [Aspergillus fumigatus Af293]
MLPHLITRKDVRRGDLFDSETSDQEDIEHNEQAESAARAKLNAQLSGLFDLSFTVPVVQEQNQQPKSSIESQIKNEDILPDAGKGEEQELDEDNTFIFRLFRDEDPSHTVVLAREDEILPGEGAFVNPKRPKSYYLAAPLSSTHVSQYRNVAVSPEFLFTDAKSRRWGLEKPWRVIHINADQSSTPTPEPEKSKGNKTRPGKKHRILLRMKEKAKREREEKVKQQAVDKELHLQEKKKRLNRERKLKRRQKEREKKKSANPDTAKDGGDSESDGD

SEQ ID NO: 29620 - DNA, 2037 bp, Muscodor strobelii
  misc_feature: SGI cDNA ID NO. 570175
  misc_feature: Encodes the peptide sequence at SEQ ID NO 29621
atgtccaccacaacgactttaacggcgaccatggcagagttgaagccggagccaacaggtagtctttggtcgaactacggtggcccagtgcctctatcaactcggtttccaagcaccatggactcgtcggcggcggcgacgacctcctcttcacaacatccgggacggccccggagcagccacaccaccattgaccacccatactcgtactcaaattactctcgggaagaggaatatgacaggtatccgcagacatctttgacgcatactcacagctttccgaatttgaagcggccccatcatggtggcgacgcgcagacgggacagccgccaccgccgcatccgccataccaagagatcgtacaagacatgcgggacgacgcgaaactgacagtgaatcacgatcataagttgttgtcattccgacgggtgcaagataagcacaccatcgtagaccaacatgggaggatgcagcagttggaactatcggcgcagttgcatggcatgtttttcctatcagagatgcctacgaatgctggcgacggctccttgctccagccggagcttacgtgttatcggcggaatctattccagatcagtggatcgctcatcacgccacgcggtcagctgtccgtgattttggccgaaacgggggaaacgatccccgtcagcaacacggaggtcacgatatcggccatcgagtctgtagacggacacccaattcgccttatcgtgattccatggaagacgcctccaccaaattcccctgagctcccacagacaccagaccaggagcccccttcgctaccactcattccattcccagacgatggacaagagcaggagggcgagtatgccgtgtatcctattggatggcggcgcctacaatttcgaatagccaccgccaataacggaagacggaaagagttacagcagcactttgtgttgcacctcaaggtgatgggatccctagcgaatggccaaaaagtagcgctcgcggaatctacaacggctccgatcgtagtgcgaggacgcagtccacggaatttccaagcccgcaaggaaataccgctgttgggttcgagcgcaggttcgcgcggccaggcactagttgagacgggtttgggtattgttgcgggcccattggcagtgaagcctcctcctgacgcgtcaaaattgagaaacctaacaaaccttgaattgccgagaacggcgttcactttcaatgcctccaagatcccagggagccccatgtcgatgaggtcgaactcatatcctagctggaatccgccggcccagttacatctgtctggattgccgtcgtcggctacggctagttatccggcgagcaccataccagcggatccttaccagaagatgccggtgtccgggacgactggctacactcatgaaccatcagatataccgcttcagacatcaatgccatctgtacagctatctttggcatcaactgagcaacctccaccaattcgaacgcagtacgcatacgtcccagggacttctgcgccctcacaaatatcagttccatcaacgactttggggagtgcaactggaggtgccgatcatagcgcattgagcgtgccgcgatacgtcgattcaaacccacgaccgtctaagagcccgcggcacggtcatacgagctccctcaccaacgacgcaagttcggagtatagatatggtccgccgacaacgtatgacaacccgtcttcgacatacggtgccagtactgcggagagcacaagcgctgtctcagctattgcaggtacgggcactcctcattcagccccgccccgtgactactacccaccaactacatcttggaccacgacagccggcgagcactcaacctccacagtgcacgcatatcacaatggacaaacaggcggggacaacagaccttataccttttcggaccaatacaaaaccggtcactcgatgcctgtgaagagtgagcaccctcctgctccggtgagctatgctccagcagtgagtcactattcatggagccaaacgtga

SEQ ID NO: 29621 - protein, 678 aa, Muscodor strobelii
  misc_feature: SGI Peptide ID NO. 570175
  misc_feature (188)..(353): Pfam Id: PF05224 Pfam Desc: NDT80 / PhoG like DNA-binding family
  misc_feature (4)..(643): NCBI GI: 171693661 Blast Desc: protein product [Podospora anserina] gi|170946779|emb|CAP73583.1| protein product [Podospora anserina]
  misc_feature (11)..(648): NCBI GI: 46125559 Blast Desc: FG07157.1 [Gibberella zeae PH-1]
  misc_feature (11)..(678): NCBI GI: 74623918 Blast Desc: VIB1_NEUCR RecName: Full=Transcription factor vib-1; AltName: Full=Vegetative incompatibility blocked protein 1 gi|12718281|emb|CAC28843.1| related to acid phosphatase crassa]
  misc_feature (11)..(678): NCBI GI: 39974249 Blast Desc: MGG_00729 [Magnaporthe grisea 70-15] gi|145018340|gb|EDK02619.1| MGG_00729 [Magnaporthe grisea 70-15]
  misc_feature (1)..(678): NCBI GI: 164426844 Blast Desc: NCU03725 [Neurospora crassa OR74A] gi|157071499|gb|EAA32265.2| conserved [Neurospora crassa OR74A]
  misc_feature (11)..(609): NCBI GI: 116206460 Blast Desc: CHGG_02523 [Chaetomium globosum CBS 148.51] gi|88183120|gb|EAQ90588.1| CHGG_02523 [Chaetomium globosum CBS 148.51]
  misc_feature (87)..(623): NCBI GI: 154322409 Blast Desc: BC1G_00547 [Botryotinia fuckeliana B05.10] gi|150847881|gb|EDN23074.1| BC1G_00547 [Botryotinia fuckeliana B05.10]
  misc_feature (91)..(623): NCBI GI: 156065363 Blast Desc: SS1G_00692 [Sclerotinia sclerotiorum 1980] gi|154691551|gb|EDN91289.1| SS1G_00692 [Sclerotinia sclerotiorum 1980]
  misc_feature (160)..(354): NCBI GI: 261355694 Blast Desc: VIB-1 [Verticillium albo-atrum VaMs.102]
  misc_feature (115)..(366): NCBI GI: 225681463 Blast Desc: conserved [Paracoccidioides brasiliensis Pb03]
MSTTTTLTATMAELKPEPTGSLWSNYGGPVPLSTRFPSTMDSSAAATTSSSQHPGRPRSSHTTIDHPYSYSNYSREEEYDRYPQTSLTHTHSFPNLKRPHHGGDAQTGQPPPPHPPYQEIVQDMRDDAKLTVNHDHKLLSFRRVQDKHTIVDQHGRMQQLELSAQLHGMFFLSEMPTNAGDGSLLQPELTCYRRNLFQISGSLITPRGQLSVILAETGETIPVSNTEVTISAIESVDGHPIRLIVIPWKTPPPNSPELPQTPDQEPPSLPLIPFPDDGQEQEGEYAVYPIGWRRLQFRIATANNGRRKELQQHFVLHLKVMGSLANGQKVALAESTTAPIVVRGRSPRNFQARKEIPLLGSSAGSRGQALVETGLGIVAGPLAVKPPPDASKLRNLTNLELPRTAFTFNASKIPGSPMSMRSNSYPSWNPPAQLHLSGLPSSATASYPASTIPADPYQKMPVSGTTGYTHEPSDIPLQTSMPSVQLSLASTEQPPPIRTQYAYVPGTSAPSQISVPSTTLGSATGGADHSALSVPRYVDSNPRPSKSPRHGHTSSLTNDASSEYRYGPPTTYDNPSSTYGASTAESTSAVSAIAGTGTPHSAPPRDYYPPTTSWTTTAGEHSTSTVHAYHNGQTGGDNRPYTFSDQYKTGHSMPVKSEHPPAPVSYAPAVSHYSWSQT

SEQ ID NO: 29622 - DNA, 3436 bp, Muscodor strobelii
  misc_feature: SGI EST ID NO. CUFF.70336.1
  misc_feature: Variant of the nucleotide sequence at SEQ ID NO 29620
ccaggctctcgtacctagtcttcggatcgttaacggtaaacaccacccccctctcagttgtggaccttgccgttgtatctgtacaaagcccccatctcaacgcaacatctaccgcgtcccaaacccatcttatacaagtatagttcggcctgcgaccttaccttccacaagcccatactctattctgaccacacaaggctctgcgtgagcccatccgtcccacctctaaggtagaatactcacaacagttaaacattctgttacgaacaatcctccaacaaggtactgtcaaaatatactcagaaatcgtgtctctaccccaagcatcgacggacacgttggcaaggtggacaagtagagagagtaaagggaattctgcggcacagcgcgcaaagcctacgccaatatcgcgacagaaaggacagagaatcatgctcccatgtccaccacaacgactttaacggcgaccatggcagagttgaagccggagccaacaggtagtctttggtcgaactacggtggcccagtgcctctatcaactcggtttccaagcaccatggactcgtcggcggcggcgacgacctcctcttcacaacatccgggacggccccggagcagccacaccaccattgaccacccatactcgtactcaaattactctcgggaagaggaatatgacaggtatccgcagacatctttgacgcatactcacagctttccgaatttgaagcggccccatcatggtggcgacgcgcagacgggacagccgccaccgccgcatccgccataccaagagatcgtacaagacatgcgggacgacgcgaaactgacagtgaatcacgatcataagttgttgtcattccgacgggtgcaagataagcacaccatcgtagaccaacatgggaggatgcagcagttggaactatcggcgcagttgcatggcatgtttttcctatcagagatgcctacgaatgctggcgacggctccttgctccagccggagcttacgtgttatcggcggaatctattccagatcagtggatcgctcatcacgccacgcggtcagctgtccgtgattttggccgaaacgggggaaacgatccccgtcagcaacacggaggtcacgatatcggccatcgagtctgtagacggacacccaattcgccttatcgtgattccatggaagacgcctccaccaaattcccctgagctcccacagacaccagaccaggagcccccttcgctaccactcattccattcccagacgatggacaagagcaggagggcgagtatgccgtgtatcctattggatggcggcgcctacaatttcgaatagccaccgccaataacggaagacggaaagagttacagcagcactttgtgttgcacctcaaggtgatgggatccctagcgaatggccaaaaagtagcgctcgcggaatctacaacggctccgatcgtagtgcgaggacgcagtccacggaatttccaagcccgcaaggaaataccgctgttgggttcgagcgcaggttcgcgcggccaggcactagttgagacgggtttgggtattgttgcgggcccattggcagtgaagcctcctcctgacgcgtcaaaattgagaaacctaacaaaccttgaattgccgagaacggcgttcactttcaatgcctccaagatcccagggagccccatgtcgatgaggtcgaactcatatcctagctggaatccgccggcccagttacatctgtctggattgccgtcgtcggctacggctagttatccggcgagcaccataccagcggatccttaccagaagatgccggtgtccgggacgactggctacactcatgaaccatcagatataccgcttcagacatcaatgccatctgtacagctatctttggcatcaactgagcaacctccaccaattcgaacgcagtacgcatacgtcccagggacttctgcgccctcacaaatatcagttccatcaacgactttggggagtgcaactggaggtgccgatcatagcgcattgagcgtgccgcgatacgtcgattcaaacccacgaccgtctaagagcccgcggcacggtcatacgagctccctcaccaacgacgcaagttcggagtatagatatggtccgccgacaacgtatgacaacccgtcttcgacatacggtgccagtactgcggagagcacaagcgctgtctcagctattgcaggtacgggcactcctcattcagccccgccccgtgactactacccaccaactacatcttggaccacgacagccggcgagcactcaacctccacagtgcacgcatatcacaatggacaaacaggcggggacaacagaccttataccttttcggaccaatacaaaaccggtcactcgatgcctgtgaagagtgagcaccctcctgctccggtgagctatgctccagcagtgagtcactattcatggagccaaacgtgagggacatctatgatatcttgcgattgaaaacgattctcctagcgcgtcatgaagacttgacagatggaaaagggttctattttccgagcctacatccacgactgttagttagtcgtgtgtacaatatcccttttgtgcgtctgtgtttcgaacatcggtgtctcaacatcctggaggagtaagtgatatacgcagccgaacaaaaggcagggaagaagatgtgttcttttgacattgggcctcaaaaatatgaggaaagggcacatgataatcgatggagtttttcgctacgcaacacgaattgacggatacctggaatgaagacatggttgtatttgagcgctggacgaacggagtgacggagttgaataccatatccacataagggctgcaaggaaagcgatgggcgccgttggacttctagggtgttataccaggaactttgtagggggctgctcttgatactctaccgatagcgatgctgtatctggtcttttatttgattcccttcgatggacggattgtttattctttttatgtctccatcaacgtacaacatctatcaaccgagaaagcaagaatcgagcggtgttggtcgtcgcaagagcatattaagctgattctgtgaagtggatgctcctgaagtgctgtcggcacgcactggtcgtcgtcgtcgccgttgcccccctttgccatcttcgcttgggccatttgctgatggcgagatttgatgtttgtcctatcgatgtacgacatgtcgtccgtcgtcgccttccttcagcagacttgtgcagcgaggggccaaaatgcattagttacttatacttactgactcgaagagtcgaaagctgagctgagcagcatgagtgcatcgatgtgtatagtataacagacgtgtagttaggaaaccaaggcaggaaccaagacatgatcgactccgcttctcacgttgcaattata

SEQ ID NO: 29623 - DNA, 1872 bp, Muscodor strobelii
  misc_feature: SGI cDNA ID NO. 570176
  misc_feature: Encodes the peptide sequence at SEQ ID NO 29624
atggacgacgatatccgcgatgtggagcttgagactctcgcagcaatctatcccgagctccaaatcaacgaagacaaccctcacaagttttcaatagagctcccagtgagtctggcaaagccgctcacagttctatttccggcagccacagaaactgcgtctacgattgtatccgcagaaactgccgttgcggtcataccggagatagactcccagtctcttcagcatctaccggctttgcaagtcgatatatctcttcctcgtggctatccagagcagctaccaccagtgattgcgatatcgacgtcaccgccatggctaagccccgatattctgagaaaactcgaggctaacgccaccagactttgggatgagatgggccatgaccaggtcattttcacttatatcgacgatcttcagcactcagctgaagacgtgttcggtttggtcagtactcaagaccctaagaaaggcgccgtctgtcataagatgctagattgcgggcatgtcttctgcgtcccgtgcttacaagatttttacaaccaagcgatcacacaaggcgacgttacttccatcgtgtgcctcgagcctaactgtgcgaaagagcgtgagactgcagccacgggagagggaacgacaaagaaagtcaagacgttcatcagtcccagcgagcttttacagatacctatcgagcccgataccgtgaagcgttatgtcatgctgaagcacaagatcaaactcgaatctgataaaaacaccatttactgcccacggtcctggtgtcaaggagctgcccggtcgaaaaagcacaagaaacctaaggacttcgaaatcgctgagtctgatgacgaagaagatgaagataccggcctacttgcaatttgcgaagactgtggcttcgcgttttgctcccgctgtgaacaaagttggcatggtgagttcaaatactgccgggaaaaagtaagggcaggggagatcacagaagaagaacgggcgaccttagaatatctcaagtatcacacatcaccatgtccaacatgcgctgctcctgttcagaagacccacggttgcaatcacatgatctgtggaagatgtcggacgcacttctgctatctctgttcatcatggctcgacccttccaatccatacaagcattacaatactcagcctggtgggaaagttacgagttgctatatgagactatgggaactggagggcggcgacggtgacgacgttggggcagactatgaagggggcaacgcaatgcgtaatcgtaaccaggctgctgggcagtacggagaacatcttgagattgcacaaggacctcgtcctgctcgagaacaagaggaagagccccagaaccaagagccacaacctctggagccacggcccgagcccgcgcaacctcaccagcaacaccaacaggagcagcaagaggtaagaccagccgtagttgcgcgcgaaggaccccttgttcttcgaattgatggtggagtgcctgctgctcgtccgccgcccgttgtagagccccagcctcaagtaaggggtaacgcgggccatcgtggtggccgcggaattttccgaggtcgaggtgctgccgctgcgaaccaacagcaggaccgaaaccaaaaccaaaatcaaggacaggccaaccgtcgaccaccttataacgcgaacgggaggccgattcgaggcggtcgcaacgcacagcaagcaaatcccggagcagtcccgttgcaccatcttcgagcacgcgggaacgcggatgcgaatgcaaaccagttggatccagtacaagaagcttggattcgacagttcgtgcagttggctctgaacgacgaggaggatgaatgggacagtgatgaagaatga

SEQ ID NO: 29624 - protein, 623 aa, Muscodor strobelii
  misc_feature: SGI Peptide ID NO. 570176
  misc_feature (1)..(143): Pfam Id: PF05773 Pfam Desc: RWD domain
  misc_feature (236)..(317): Pfam Id: PF01485 Pfam Desc: IBR domain
  misc_feature (3)..(623): NCBI GI: 156048662 Blast Desc: SS1G_09063 [Sclerotinia sclerotiorum 1980] gi|154693459|gb|EDN93197.1| SS1G_09063 [Sclerotinia sclerotiorum 1980]
  misc_feature (3)..(623): NCBI GI: 39974247 Blast Desc: MGG_00730 [Magnaporthe grisea 70-15] gi|145018339|gb|EDK02618.1| MGG_00730 [Magnaporthe grisea 70-15]
  misc_feature (3)..(495): NCBI GI: 256730952 Blast Desc: NECHADRAFT_96150 [Nectria haematococca mpVI 77-13-4]
  misc_feature (3)..(411): NCBI GI: 116206456 Blast Desc: CHGG_02521 [Chaetomium globosum CBS 148.51] gi|88183118|gb|EAQ90586.1| CHGG_02521 [Chaetomium globosum CBS 148.51]
  misc_feature (3)..(496): NCBI GI: 85103323 Blast Desc: NCU03719 [Neurospora crassa OR74A] gi|16944498|emb|CAC28847.2| related to HFB30 [Neurospora crassa] gi|28923041|gb|EAA32259.1| NCU03719 [Neurospora crassa OR74A]
  misc_feature (3)..(623): NCBI GI: 154297497 Blast Desc: BC1G_12345 [Botryotinia fuckeliana B05.10] gi|150858541|gb|EDN33733.1| BC1G_12345 [Botryotinia fuckeliana B05.10]
  misc_feature (3)..(495): NCBI GI: 46125555 Blast Desc: FG07155.1 [Gibberella zeae PH-1]
  misc_feature (1)..(412): NCBI GI: 171693663 Blast Desc: protein product [Podospora anserina] gi|170946780|emb|CAP73584.1| protein product [Podospora anserina]
  misc_feature (3)..(409): NCBI GI: 121703768 Blast Desc: RING finger protein [Aspergillus clavatus NRRL 1] gi|119398292|gb|EAW08722.1| RING finger protein [Aspergillus clavatus NRRL 1]
  misc_feature (1)..(411): NCBI GI: 159122442 Blast Desc: RING finger protein [Aspergillus fumigatus A1163]
MDDDIRDVELETLAAIYPELQINEDNPHKFSIELPVSLAKPLTVLFPAATETASTIVSAETAVAVIPEIDSQSLQHLPALQVDISLPRGYPEQLPPVIAISTSPPWLSPDILRKLEANATRLWDEMGHDQVIFTYIDDLQHSAEDVFGLVSTQDPKKGAVCHKMLDCGHVFCVPCLQDFYNQAITQGDVTSIVCLEPNCAKERETAATGEGTTKKVKTFISPSELLQIPIEPDTVKRYVMLKHKIKLESDKNTIYCPRSWCQGAARSKKHKKPKDFEIAESDDEEDEDTGLLAICEDCGFAFCSRCEQSWHGEFKYCREKVRAGEITEEERATLEYLKYHTSPCPTCAAPVQKTHGCNHMICGRCRTHFCYLCSSWLDPSNPYKHYNTQPGGKVTSCYMRLWELEGGDGDDVGADYEGGNAMRNRNQAAGQYGEHLEIAQGPRPAREQEEEPQNQEPQPLEPRPEPAQPHQQHQQEQQEVRPAVVAREGPLVLRIDGGVPAARPPPVVEPQPQVRGNAGHRGGRGIFRGRGAAAANQQQDRNQNQNQGQANRRPPYNANGRPIRGGRNAQQANPGAVPLHHLRARGNADANANQLDPVQEAWIRQFVQLALNDEEDEWDSDEE

SEQ ID NO: 29625 - DNA, 717 bp, Muscodor strobelii
  misc_feature: SGI cDNA ID NO. 570177
  misc_feature: Encodes the peptide sequence at SEQ ID NO 29626
atgtcggccgacatggcgcctttggcgcctttggcgtctctgtcgctaactcatgtccactatgaccccaccgaccgaatctcgttcctttgtgcatggcttgcgttgatcccccagggtctctgcgtcatgtacgcgacactcatctggtcgacacgtgaagtcgagatagcacttctgtttgcgggtcaacttgcctgtgaggcactcaactttgccctcaagcgactcatcaaggaggagcgccctcagcgcatgaatggcaaaggctacggtatgcccagcagccacgcgcaatttgtcgcatactttgctgtctctatggccctctttctacttcttcgccaccagcctccaaaacccgaacggaggagaggaaaccacacacccatgtctctgccggagcgggcattttggagtgtagtcggagtgggcatggcactcgccgtggcgtggagtcgcatctacctcaactatcatacgcagaagcaggtgcttgtaggatgtgccgctggatcagtgagtgccatcgcctggtttacgtttacaactattctgcgacagacagggtggattgggtgggctatggacacacccgtagcgagatggttcagagtcagggacctggttgtggaagaggatctctgccaagctggatgggagaaatgggatgatagaatgacggtactgaagtcacgggataagaagaagaactga

SEQ ID NO: 29626 - protein, 238 aa, Muscodor strobelii
  misc_feature: SGI Peptide ID NO. 570177
  misc_feature (56)..(188): Pfam Id: PF01569 Pfam Desc: PAP2 superfamily
  misc_feature (9)..(236): NCBI GI: 46125553 Blast Desc: FG07154.1 [Gibberella zeae PH-1]
  misc_feature (9)..(238): NCBI GI: 156048660 Blast Desc: SS1G_09062 [Sclerotinia sclerotiorum 1980] gi|154693458|gb|EDN93196.1| SS1G_09062 [Sclerotinia sclerotiorum 1980]
  misc_feature (5)..(236): NCBI GI: 256731327 Blast Desc: [Nectria haematococca mpVI 77-13-4]
  misc_feature (9)..(238): NCBI GI: 145610999 Blast Desc: MGG_00727 [Magnaporthe grisea 70-15] gi|145018342|gb|EDK02621.1| MGG_00727 [Magnaporthe grisea 70-15]
  misc_feature (10)..(238): NCBI GI: 154297495 Blast Desc: dolichyl pyrophosphate phosphatase [Botryotinia fuckeliana B05.10] gi|150858540|gb|EDN33732.1| dolichyl pyrophosphate phosphatase [Botryotinia fuckeliana B05.10]
  misc_feature (8)..(238): NCBI GI: 85103319 Blast Desc: NCU03718 [Neurospora crassa OR74A] gi|45476972|sp|Q9C2M6.1|DOPP_NEUCR RecName: Full= dolichyldiphosphatase; AltName: Full=Dolichyl pyrophosphate to
  misc_feature (6)..(234): NCBI GI: 242780977 Blast Desc: PAP2 domain protein [Talaromyces stipitatus ATCC 10500] gi|218719855|gb|EED19274.1| PAP2 domain protein [Talaromyces stipitatus ATCC 10500]
  misc_feature (10)..(226): NCBI GI: 189195980 Blast Desc: DOLPP1 protein [Pyrenophora tritici-repentis Pt-1C-BFP] gi|187980207|gb|EDU46833.1| DOLPP1 protein [Pyrenophora tritici-repentis Pt-1C-BFP]
  misc_feature (6)..(234): NCBI GI: 212526460 Blast Desc: PAP2 domain protein [Penicillium marneffei ATCC 18224] gi|210072785|gb|EEA26872.1| PAP2 domain protein [Penicillium marneffei ATCC 18224]
  misc_feature (9)..(235): NCBI GI: 225561005 Blast Desc: PAP2 domain-containing protein [Ajellomyces capsulatus G186AR]
  misc_feature (17)..(238): SWISSPROT Homolog: EC 3.6.1.43 Dolichyldiphosphatase
MSADMAPLAPLASLSLTHVHYDPTDRISFLCAWLALIPQGLCVMYATLIWSTREVEIALLFAGQLACEALNFALKRLIKEERPQRMNGKGYGMPSSHAQFVAYFAVSMALFLLLRHQPPKPERRRGNHTPMSLPERAFWSVVGVGMALAVAWSRIYLNYHTQKQVLVGCAAGSVSAIAWFTFTTILRQTGWIGWAMDTPVARWFRVRDLVVEEDLCQAGWEKWDDRMTVLKSRDKKKN

SEQ ID NO: 29627 - DNA, 1038 bp, Muscodor strobelii
  misc_feature: SGI EST ID NO. CUFF.70148.0
  misc_feature: Variant of the nucleotide sequence at SEQ ID NO 29625
catgacagcacctcgaattcaagctgggtattctttgaatcctcgttgcgcagctagagaccaacacgactcaggtcttgttgaaccaacaacgacggattgtagcaataggttcttcaaatttcagccccattgcttctgtatccttttcttaccgagacaatgcattcatgacccatcaaccgctacttctacgtacacattctcccaaacattttctacgtcgcgatgtcggccgacatggcgcctttggcgcctttggcgtctctgtcgctaactcatgtccactatgaccccaccgaccgaatctcgttcctttgtgcatggcttgcgttgatcccccagggtctctgcgtcatgtacgcgacactcatctggtcgacacgtgaagtcgagatagcacttctgtttgcgggtcaacttgcctgtgaggcactcaactttgccctcaagcgactcatcaaggaggagcgccctcagcgcatgaatggcaaaggctacggtatgcccagcagccacgcgcaatttgtcgcatactttgctgtctctatggccctctttctacttcttcgccaccagcctccaaaacccgaacggaggagaggaaaccacacacccatgtctctgccggagcgggcattttggagtgtagtcggagtgggcatggcactcgccgtggcgtggagtcgcatctacctcaactatcatacgcagaagcaggtgcttgtaggatgtgccgctggatcagtgagtgccatcgcctggtttacgtttacaactattctgcgacagacagggtggattgggtgggctatggacacacccgtagcgagatggttcagagtcagggacctggttgtggaagaggatctctgccaagctggatgggagaaatgggatgatagaatgacggtactgaagtcacgggataagaagaagaactgaagagctcgtgcgctgctagtgatagactggacatgatgatgacatagcgaagcaattcacgaaagatgataccaagaacgtcctccatcaatg

SEQ ID NO: 29628 - DNA, 3078 bp, Muscodor strobelii
  misc_feature: SGI cDNA ID NO. 570178
  misc_feature: Encodes the peptide sequence at SEQ ID NO 29629
atgaactccctgtggtcctcgagggctgcgggcgacggcgacgctgccaacgagccggttaagaacccaattgacggcgccaacaccgagattgccgatcttggcccctcgctgaccaggcccgactcgaacccgctgcccacccggccgctgctccagcgtaaccagctgccaccgaatcctcccactcagccgccgcccgccgccccgacacaccaggccaccgactcgctctcgctggcacagattaggcgtatcgtgtctgagtttcctaaggcggagacagctgcgtacgactttgagtacaaagatgtggcctcccacgccgaggagctagacgagtggttcacctaccagtcgtcgcagttcgtgcgtcttaacaatgcgcagagagcctacgagtcgcagtgggaacatgacttggccgctaaggaggacgaggtcacgtgggacgaggcatctcagcccatgaaggatgctttcatccaacaagcccttggcggcatcaggtcttccgacggcgctacgcgcgctactgccagtggcaagctcgtgtatcttgttctggggcgatggacagagactgctggatcccactccggtgacacacctaagttgaggtccttggcgacgacgtcccagctggccgccatcaagtctggcgtcaagtccgtagctgcgctaggtggtattgccatcgtctggcaggcccttcagcatgcctttgatgccgcatttgccgacgatccgcctaaaagcacggctcatagtaaacaagaagctcaggacgatcttcacaacttaatgacaatcatgtatatgtttatgcaagtaacattgggcgatgctgaagggatggagtcggcccgaggtgacctaatctccttatcgccttcgctacccgttactttatttgaagtgacggccaagttccgattttttgatccaagagaggactcgattattgtcccgagcactcagacgctcttgatgctttggaaatctatcatacttgtcttcggaggcacgtcagaaactgaaagcacgaaacaggctctggggagagatattgatgacaatgacaaaagcaaaatcacagcttcacctttggattatcatgcgttccgacaggaaatcacctccaagtatcctgcatacgtgcctccgcagtcgaagataccgttagatgcagataatatctcactactaccacctctgcccaaccatcccaccaggaataacggttcaaacgggatcttgcctgttcctccaggcacgcagagcagtggagcatctatcctccatcagcctgtgcatatcgcgactcctgccccttctcctccgccgtcgccagccattggtggaaagggcggcaagaaacagaattatcagactaatcagaactttcctttcatgtacccgcctttagatgagactagtaacagcgctggaggtaaaggtgccgccggtatgcaggaaagtctggttggacgaaaatgggagggtagcagtgtgccagcgtctatcttggaagcaggcaagctgttctctgaaagagtgcggatgacacgcgccactagacaactctgggacgaacgtcaaagatttcaaaaatttgagagaggttgggagcgatctgacgaagaggaggagagtgatgagctggacgaattggatcttgatgcccttggtgatgatgatgagcatgtcgacactgacaagcttcttgcttttatcgagcaaaggcacaagaagaaggaatcaaagaaacccaaagacgaagatggtatcccttcagatttccccgaggacatgaaacggcgtcttgattccgtcgaaaatttctacaaaagttctttgccacagctgcaatccctcgtgatcgttctgatgaaaggtgtcttggcatctgtcaccgcatcaatctcgaacacgggcttcaatccgccaaacggacctatcccatctaatgctcgcgagtatagcagacccgtttggagtcggtccatcgatacgcagccggcagttaatggctctactcatatcgacttaccagcacatcctacagatgcagatctagcgggccggagtttggagattgaatcgaaagccgcgacgggaatccttcttcttctattgaaatggctcaaaatatcacatgtcttaaaatttgagtatctgactcagctccttttggactctaattatctgccgctggtactcaaattgtttgctcatcaagatattcagcaagtggttgacagcaaagccgaccgtatcgagcatagcttctttcacttttgtaatcagcgcgcccacccaagcgacaagctgctcgtcgagcctacagagatcgatatcggtgatgatgaaagtgaagatgaggccgtgccacctccgattaagcgtcgcccttcaccaccaaaggccgaggatgtccaggacgagggcgaagattcaaaaagatccgaggaacaaggtccttccgctcgtcccgaagtcgatgagctgggctatcctgtcaaccccttgccaaaggaacccattaccgatttctcatggcgcaatttcttcgcactgatcaactatctgcgcatcatgcagaaaatctgcaagcacaaagcccacaggaaccttctgctggtacaatacaagtcatcaaatatcatccgcaaatccctcaagattccgcaaaacgaactgcgtctgtacaccctgaaattgttcaaaaatcaggtcccctactgtggccgtaagtggcgacagagcaatatgcgtgtgattaccgcagtgtacctacattgccgcccggagctacgcgatgaatggctcgccggcagtgacgtcgatgcggaggttgaagaggcgctgcccctcgaacaagcgctgagaagtctcacgcattggttcaatgtcagacaatatcccgaccaaatggcgccagaaatcagggccatgttgcgcgatcagcaagattttttcaaacgtgaattggaaaaaacggaggtttggaacgagggaaatgtaacacaggaggagtgggacggccagctggggatgggacaggcttggggatag

SEQ ID NO: 29629 - protein, 1025 aa, Muscodor strobelii
  misc_feature: SGI Peptide ID NO. 570178
  misc_feature (80)..(399): Pfam Id: PF07923 Pfam Desc: N1221-like protein
  misc_feature (1)..(1024): NCBI GI: 46125563 Blast Desc: FG07159.1 [Gibberella zeae PH-1]
  misc_feature (1)..(1003): NCBI GI: 256730955 Blast Desc: [Nectria haematococca mpVI 77-13-4]
  misc_feature (1)..(1002): NCBI GI: 16944494 Blast Desc: Protein required for hyphal anastomosis (HAM-2) [Neurospora crassa]
  misc_feature (1)..(1002): NCBI GI: 164426846 Blast Desc: HAM-2, protein required for hyphal anastomosis [Neurospora crassa OR74A] gi|157071500|gb|EAA32267.2| HAM-2, protein required for hyphal anastomosis [Neurospora crassa OR74A]
  misc_feature (1)..(1002): NCBI GI: 84616325 Blast Desc: pro22 [Sordaria macrospora]
  misc_feature (76)..(1000): NCBI GI: 171693655 Blast Desc: protein product [Podospora anserina] gi|170946776|emb|CAP73580.1| protein product [Podospora anserina]
  misc_feature (63)..(1000): NCBI GI: 261355686 Blast Desc: HAM-2 [Verticillium albo-atrum VaMs.102]
  misc_feature (76)..(1002): NCBI GI: 116206462 Blast Desc: CHGG_02524 [Chaetomium globosum CBS 148.51] gi|88183121|gb|EAQ90589.1| CHGG_02524 [Chaetomium globosum CBS 148.51]
  misc_feature (293)..(1016): NCBI GI: 145610997 Blast Desc: MGG_00731 [Magnaporthe grisea 70-15] gi|145018338|gb|EDK02617.1| MGG_00731 [Magnaporthe grisea 70-15]
  misc_feature (74)..(999): NCBI GI: 242780983 Blast Desc: transmembrane hyphal anastomosis protein Ham2/Far11 [Talaromyces stipitatus ATCC 10500] gi|218719856|gb|EED19275.1| transmembrane hyphal anastomosis protein Ham2/Far11 [Talaromyces
MNSLWSSRAAGDGDAANEPVKNPIDGANTEIADLGPSLTRPDSNPLPTRPLLQRNQLPPNPPTQPPPAAPTHQATDSLSLAQIRRIVSEFPKAETAAYDFEYKDVASHAEELDEWFTYQSSQFVRLNNAQRAYESQWEHDLAAKEDEVTWDEASQPMKDAFIQQALGGIRSSDGATRATASGKLVYLVLGRWTETAGSHSGDTPKLRSLATTSQLAAIKSGVKSVAALGGIAIVWQALQHAFDAAFADDPPKSTAHSKQEAQDDLHNLMTIMYMFMQVTLGDAEGMESARGDLISLSPSLPVTLFEVTAKFRFFDPREDSIIVPSTQTLLMLWKSIILVFGGTSETESTKQALGRDIDDNDKSKITASPLDYHAFRQEITSKYPAYVPPQSKIPLDADNISLLPPLPNHPTRNNGSNGILPVPPGTQSSGASILHQPVHIATPAPSPPPSPAIGGKGGKKQNYQTNQNFPFMYPPLDETSNSAGGKGAAGMQESLVGRKWEGSSVPASILEAGKLFSERVRMTRATRQLWDERQRFQKFERGWERSDEEEESDELDELDLDALGDDDEHVDTDKLLAFIEQRHKKKESKKPKDEDGIPSDFPEDMKRRLDSVENFYKSSLPQLQSLVIVLMKGVLASVTASISNTGFNPPNGPIPSNAREYSRPVWSRSIDTQPAVNGSTHIDLPAHPTDADLAGRSLEIESKAATGILLLLLKWLKISHVLKFEYLTQLLLDSNYLPLVLKLFAHQDIQQVVDSKADRIEHSFFHFCNQRAHPSDKLLVEPTEIDIGDDESEDEAVPPPIKRRPSPPKAEDVQDEGEDSKRSEEQGPSARPEVDELGYPVNPLPKEPITDFSWRNFFALINYLRIMQKICKHKAHRNLLLVQYKSSNIIRKSLKIPQNELRLYTLKLFKNQVPYCGRKWRQSNMRVITAVYLHCRPELRDEWLAGSDVDAEVEEALPLEQALRSLTHWFNVRQYPDQMAPEIRAMLRDQQDFFKRELEKTEVWNEGNVTQEEWDGQLGMGQAWG

SEQ ID NO: 29630 - DNA, 4045 bp, Muscodor strobelii
  misc_feature: SGI EST ID NO. CUFF.70175.0
  misc_feature: Variant of the nucleotide sequence at SEQ ID NO 29628
ttttgaaccacacagtagctattgagttgttgaacttgcgatatgactgtcattcgtgatgtctggttacttacatgtacctaccacctacatgtatatatctttaggtagcagaatgttcttgccattttgtcgttgtcgaggaggtgctactgcctgtacgcatgaggttgctagaggtgggctgtggcaccccgacagctactagctacacccatacctttcccgctgatccagcgcgtccctcacagagctctcttcacatcccacttcgtactctgtatgatatgcagcaccgcgtcaaccgcacatgctagagagctactgtcgcgtcaaacagtagctctatccgccacgtcttcttctttggtagcgtatatgtttcatgttagcttgatcgtgctgcacgtgcccatgctacagcctcccacgtcattatgaatgcccctctagcaagacacatcttgtcagccccggatcgccaggcaacatgaactccctgtggtcctcgagggctgcgggcgacggcgacgctgccaacgagccggttaagaacccaattgacggcgccaacaccgagattgccgatcttggcccctcgctgaccaggcccgactcgaacccgctgcccacccggccgctgctccagcgtaaccagctgccaccgaatcctcccactcagccgccgcccgccgccccgacacaccaggccaccgactcgctctcgctggcacagattaggcgtatcgtgtctgagtttcctaaggcggagacagctgcgtacgactttgagtacaaagatgtggcctcccacgccgaggagctagacgagtggttcacctaccagtcgtcgcagttcgtgcgtcttaacaatgcgcagagagcctacgagtcgcagtgggaacatgacttggccgctaaggaggacgaggtcacgtgggacgaggcatctcagcccatgaaggatgctttcatccaacaagcccttggcggcatcaggtcttccgacggcgctacgcgcgctactgccagtggcaagctcgtgtatcttgttctggggcgatggacagagactgctggatcccactccggtgacacacctaagttgaggtccttggcgacgacgtcccagctggccgccatcaagtctggcgtcaagtccgtagctgcgctaggtggtattgccatcgtctggcaggcccttcagcatgcctttgatgccgcatttgccgacgatccgcctaaaagcacggctcatagtaaacaagaagctcaggacgatcttcacaacttaatgacaatcatgtatatgtttatgcaagtaacattgggcgatgctgaagggatggagtcggcccgaggtgacctaatctccttatcgccttcgctacccgttactttatttgaagtgacggccaagttccgattttttgatccaagagaggactcgattattgtcccgagcactcagacgctcttgatgctttggaaatctatcatacttgtcttcggaggcacgtcagaaactgaaagcacgaaacaggctctggggagagatattgatgacaatgacaaaagcaaaatcacagcttcacctttggattatcatgcgttccgacaggaaatcacctccaagtatcctgcatacgtgcctccgcagtcgaagataccgttagatgcagataatatctcactactaccacctctgcccaaccatcccaccaggaataacggttcaaacgggatcttgcctgttcctccaggcacgcagagcagtggagcatctatcctccatcagcctgtgcatatcgcgactcctgccccttctcctccgccgtcgccagccattggtggaaagggcggcaagaaacagaattatcagactaatcagaactttcctttcatgtacccgcctttagatgagactagtaacagcgctggaggtaaaggtgccgccggtatgcaggaaagtctggttggacgaaaatgggagggtagcagtgtgccagcgtctatcttggaagcaggcaagctgttctctgaaagagtgcggatgacacgcgccactagacaactctgggacgaacgtcaaagatttcaaaaatttgagagaggttgggagcgatctgacgaagaggaggagagtgatgagctggacgaattggatcttgatgcccttggtgatgatgatgagcatgtcgacactgacaagcttcttgcttttatcgagcaaaggcacaagaagaaggaatcaaagaaacccaaagacgaagatggtatcccttcagatttccccgaggacatgaaacggcgtcttgattccgtcgaaaatttctacaaaagttctttgccacagctgcaatccctcgtgatcgttctgatgaaaggtgtcttggcatctgtcaccgcatcaatctcgaacacgggcttcaatccgccaaacggacctatcccatctaatgctcgcgagtatagcagacccgtttggagtcggtccatcgatacgcagccggcagttaatggctctactcatatcgacttaccagcacatcctacagatgcagatctagcgggccggagtttggagattgaatcgaaagccgcgacgggaatccttcttcttctattgaaatggctcaaaatatcacatgtcttaaaatttgagtatctgactcagctccttttggactctaattatctgccgctggtactcaaattgtttgctcatcaagatattcagcaagtggttgacagcaaagccgaccgtatcgagcatagcttctttcacttttgtaatcagcgcgcccacccaagcgacaagctgctcgtcgagcctacagagatcgatatcggtgatgatgaaagtgaagatgaggccgtgccacctccgattaagcgtcgcccttcaccaccaaaggccgaggatgtccaggacgagggcgaagattcaaaaagatccgaggaacaaggtccttccgctcgtcccgaagtcgatgagctgggctatcctgtcaaccccttgccaaaggaacccattaccgatttctcatggcgcaatttcttcgcactgatcaactatctgcgcatcatgcagaaaatctgcaagcacaaagcccacaggaaccttctgctggtacaatacaagtcatcaaatatcatccgcaaatccctcaagattccgcaaaacgaactgcgtctgtacaccctgaaattgttcaaaaatcaggtcccctactgtggccgtaagtggcgacagagcaatatgcgtgtgattaccgcagtgtacctacattgccgcccggagctacgcgatgaatggctcgccggcagtgacgtcgatgcggaggttgaagaggcgctgcccctcgaacaagcgctgagaagtctcacgcattggttcaatgtcagacaatatcccgaccaaatggcgccagaaatcagggccatgttgcgcgatcagcaagattttttcaaacgtgaattggaaaaaacggaggtttggaacgagggaaatgtaacacaggaggagtgggacggccagctggggatgggacaggcttggggatagaaacccaggtgcataggtggtgaagggcaaaccactgagtttgataagaaaggaagagggaaagggaaagagatagagagaagtggaagtggtgataggaaagtaaaaggaatagaaagcactaaagttgatagtgcgggaggcgaagaggaggtaggcgaaagagagaaaagcgaaagtgagggaaataaagaggagaaaaaagccgagagcccaaaagtcgccggcgacgagtacgacagacccgagttgcagctccataggtgtccatcttccgctcggtattagtgatgccttctttgagccgatgctgcatctttacgaggtatgggtagcgagtcaactagtcagacacaaaacattaattatgcttgagacagcgacattgatgccttagctcactgacagagagtagttgctagtagtgttacgaaaatgctattactgaacatatttgattggtcgtgtgttagtgaa

SEQ ID NO: 29631 - DNA, 1047 bp, Muscodor strobelii
  misc_feature: SGI cDNA ID NO. 570179
  misc_feature: Encodes the peptide sequence at SEQ ID NO 29632
atggacttagcccagaagctgcaatacttcacactcgatgtcatcagctgcatcggcttcaacaagtgctttggattactcgaagctgacgatgacccagacgagtatgtcaaatccaccgaagccggattcaagatgagcaacagacagatcgcgcttggtacctggtggatgaattcgctacctcttatcggcttcaaaatggacgcagatctcaagactgcgaaggggttcgaaaagatgcgtgcactcagcgcggatatggccgagatgagagagagagcctttcaggagcagaaagaggccggggtggtcaacagagcggatatgcttacctcgttcatgaagaacggcttgtctggtggtgagctcaagaccgagatcgtactccaaatcgtcgcagggtcagatacgaccgttggaggactgcgatgcattcttctctacattttgacgaatccaagagtgtataagaagctacagacggagatagatgatgcagtccgatcgggtaaggcgccctccacagcagagatcatcagctacgcacaagcaaaacagctctcgtatctgcaggcggtcatccgtgagggcaacaggatttgtccccccttaaacaacccgtttgcccgcgacaccccgccacacggcgatactgttgttattgatggagaagaggtgtatttgcctggaggcattagcatcattccaaatttcgccgcaatgcaaaggaacaagactgtatttggagacgatgtagaagttttccgtcctgaacgctggcttgaggagccagatgagggcaaacttgaagttatgaaacgcacgaatgatgccatattcggtggtgggcggtggcagtgtcttggtaagaatattgcgctactcgagatgagcaaaatagtcttcgagttgctcaaaaatttcgaatggggtataaacaacccacaggatccgtggaagcaggctactctgataggactgcgttccatcacagacttttgggtgcacgttgaggcgcgagaccccttacaggggtcccactga

SEQ ID NO: 29632 - protein, 348 aa, Muscodor strobelii
  misc_feature: SGI Peptide ID NO. 570179
  misc_feature (1)..(337): Pfam Id: PF00067 Pfam Desc: Cytochrome P450
  misc_feature (1)..(264): Pfam Id: PF00067 Pfam Desc: Cytochrome P450
  misc_feature (281)..(337): Pfam Id: PF00067 Pfam Desc: Cytochrome P450
  misc_feature (1)..(343): NCBI GI: 255938213 Blast Desc: Pc13g14720 [Penicillium chrysogenum Wisconsin 54-1255] gi|211584497|emb|CAP92541.1| Pc13g14720 [Penicillium chrysogenum Wisconsin 54-1255]
  misc_feature (1)..(341): NCBI GI: 67904618 Blast Desc: AN9296.2 [Aspergillus nidulans FGSC A4] gi|40747207|gb|EAA66363.1| AN9296.2 [Aspergillus nidulans FGSC A4] gi|259488130|tpe|CBF87351.1| TPA: cytochrome P450, (Eurofung)
  misc_feature (1)..(341): NCBI GI: 256735641 Blast Desc: NECHADRAFT_103282 [Nectria haematococca mpVI 77-13-4]
  misc_feature (1)..(341): NCBI GI: 116204147 Blast Desc: CHGG_09957 [Chaetomium globosum CBS 148.51] gi|88176085|gb|EAQ83553.1| CHGG_09957 [Chaetomium globosum CBS 148.51]
  misc_feature (1)..(342): NCBI GI: 169599416 Blast Desc: SNOG_02529 [Phaeosphaeria nodorum SN15] gi|160704605|gb|EAT90741.2| SNOG_02529 [Phaeosphaeria nodorum SN15]
  misc_feature (1)..(341): NCBI GI: 261354174 Blast Desc: cytochrome P450 52A11 [Verticillium albo-atrum VaMs.102]
  misc_feature (1)..(342): NCBI GI: 189204898 Blast Desc: pisatin demethylase [Pyrenophora tritici-repentis Pt-1C-BFP] gi|187985883|gb|EDU51371.1| pisatin demethylase [Pyrenophora tritici-repentis Pt-1C-BFP]
  misc_feature (1)..(342): NCBI GI: 171679852 Blast Desc: protein product [Podospora anserina] gi|170939552|emb|CAP64779.1| protein product [Podospora anserina]
  misc_feature (1)..(341): NCBI GI: 145604324 Blast Desc: MGG_08500 [Magnaporthe grisea 70-15] gi|145012340|gb|EDJ96996.1| MGG_08500 [Magnaporthe grisea 70-15]
  misc_feature (1)..(305): NCBI GI: 238502047 Blast Desc: benzoate 4-monooxygenase cytochrome P450, [Aspergillus flavus NRRL3357] gi|220691067|gb|EED47415.1| benzoate 4-monooxygenase cytochrome P450, [Aspergillus flavus NRRL3357]
  misc_feature (1)..(311): SWISSPROT Homolog: EC 1.14.13.12 Benzoate 4-monooxygenase
MDLAQKLQYFTLDVISCIGFNKCFGLLEADDDPDEYVKSTEAGFKMSNRQIALGTWWMNSLPLIGFKMDADLKTAKGFEKMRALSADMAEMRERAFQEQKEAGVVNRADMLTSFMKNGLSGGELKTEIVLQIVAGSDTTVGGLRCILLYILTNPRVYKKLQTEIDDAVRSGKAPSTAEIISYAQAKQLSYLQAVIREGNRICPPLNNPFARDTPPHGDTVVIDGEEVYLPGGISIIPNFAAMQRNKTVFGDDVEVFRPERWLEEPDEGKLEVMKRTNDAIFGGGRWQCLGKNIALLEMSKIVFELLKNFEWGINNPQDPWKQATLIGLRSITDFWVHVEARDPLQGSH

SEQ ID NO: 29633 - DNA, 3096 bp, Muscodor strobelii
  misc_feature: SGI cDNA ID NO. 570180
  misc_feature: Reduced expression when VOC is produced
  misc_feature: Encodes the peptide sequence at SEQ ID NO 29634
atgtctgaacatcacctctcgacgcctttggggccaagaggcaccctccgggcccgtccatctcctctacgtgcgaaatcaccttctccggctcgccagtatctcaatcccgacgatttactctctcgcctgacgccatcaactgtcgtcgacgtcctacaaactcccacgggatccctgaagaaatgtttggatcgagcctcgacttcggagcaggcgtttgctatgaaaacggccatcgcttcgaagtccattaacggatggcttgtggagctgtcggcctggcattggcctcagacggggacgtctgccggttttgaaatgcctccatctaagcgaaggaagttgttcgaacctgagacacctcaagctagccacgagcctaccccacattccgaaccaacctactttggcagtctccctgccgacgatgtcagccgatatgagactcggctggagcagatccagtatgatatcgagggtctagacttggaggatatcaagaatcaagtccttcataaccatatcctcccgttatcgcgacctggcactccattttctgacgccggacgctccgttgcatctgcctatacatttaccagaatggaagatctgacggccgtggtcactgcaataacgattcaaaccttgcctgcgctgtccaggttgtcacggctactgaacacttggaatgtgcggctaatcgttctgcgcaaggtccctgctttgttagtgatgatcaaggatgctgagatcgctattgagtctggacgcaatgcgatagaaccatcgatttcgggcccttcggaatctccagataccaataagagcgatcagaaactacctgagcaactctccaagaaagacttcgaggtcatgagatctgtcttgcagcagaaagtttcgaaaccaggacgggctctcgattctatgcttgatctgctcgaaggaatgcctgacacgctaccggacgaatggttggatcgtatggagactatcgaacgagactatgtcgaatggacagttacagcggagaggaaagtcagagaggcagcatggtcagacttctctagtgcgcttaaggcacacaaaacaagtcggccacagagtccattgaaggatacgttgaagcaagcacgctcaacagaagatctatcgattcctgcgcctattacaccacccgagtcttcttcgacggatagtgaaacaacggctaatatcgacgcacaaaccggacgctcagctactggacgtcggaaaccaatcaagccacttaccgacccgaaatcgaatgcgggttcgagcaaattcaaccctggctcgatcacgagagttgttgaatcggcaaagcgacccacgcagaagcgaactgccgacagaccggctcttatcaagagtcgaagtgcgacgacacatcaagacgatgctaatagaaagattgccagtactcaatcagccagtgctaatacactggcctcgtcagctcggggacatcctactcgaccgattaaggagtcgcgaaataggacttatgatggatcaaaagatccggttgatcaaatccaaacttccaatcccattttgtctgaagtgaaccgcaacattgtccgtcaccctttgaacgagccaagcagacgcgaggaattagttttgaaacctgcgtctgatgacgatgaattcgagccgtcaatactagaatcagtcaatgaggaagatgaggaattggagttgccttcaccacccaggagacggcaaggaagctatccttctgtcgcagatactgtattgcatggctcttcaaattactcacccgaccgctctgatgacgctcgcttccgtgatgcgtctctcgagcccgagttgccgcgcctgccggatcctgatgagccattctcaagtgatgctataagcccaccaagctcacccccgctacgattcaagccaagatcaacttccgtcacgttcaaagaagtaccagagattgcactgctccccgaagcagatgggtcgcctccacaaactccacgcgaaccaccagaagttttcgatcccgacacgtcatttgagtgggagagccaactcggcagccccagtcgtatgagcacgataagtacaatgagcgacgacgatcatttacagagacagatccgagaagtgcttgaaactattccggccaagatcgaattgaagaaaagagccatcaatctcaatcctcccgatctgatactccctcctcgacctaaggctcgccactctgatcctagacgcccgacttctgccctctcttcacggacgggttctcgagctgggacgccttcatattcacgcagcggaacaccagccttcatgctagctcccatccgagaaagccgtcccagatctacgagcagccagggaattagagcttttcatctctcgagatctggcgaagcgcccgtcaaacttttcatccgctgcgttggcgagaacaacgaaagagtaatggtacgtgttggtggtggctggtctgacttgggtgaatatttacgtgactacgctttccaccatggttcccgatcgaagggcgagggcaaagttgaagtcaatgacgcttcagcaactgcgaccggtcgtataggatccagtccagccagtcgaccgggttctgcactcgacaacccaatgacgccccttaccgtccggaagactagaaggagtctgggccaagaaggggccccaagctttaccaaaacaccccttacgaaaagcaatctggaagacagcgcggacacgcccggatcacaggcttctgctcgatcacgtgcctcatcttataccgtcgattgggacgaagaggattcctcgctcggcctcgctggacccaaagcgaataagcgccgagaaatcagtgacgagagcaaagcttgggtcgagagcatgaaagagaaggtccggctcgttagtggggagcggatcccatctcaagtctcgaccgaacagcttagaccactgtcccagacgtcacagcgaggtccgctgaagaaaaagccagatacggaggcttttggcgacatggggaaagtgggcagtacgaagcggctttttaggaagaattag

SEQ ID NO: 29634 - protein, 1031 aa, Muscodor strobelii
  misc_feature: SGI Peptide ID NO. 570180
  misc_feature (824)..(842): Pfam Id: PF02187 Pfam Desc: Growth-Arrest-Specific Protein 2 Domain
  misc_feature (29)..(901): NCBI GI: 261355559 Blast Desc: conserved [Verticillium albo-atrum VaMs.102]
  misc_feature (29)..(350): NCBI GI: 116206444 Blast Desc: CHGG_02515 [Chaetomium globosum CBS 148.51] gi|88183112|gb|EAQ90580.1| CHGG_02515 [Chaetomium globosum CBS 148.51]
  misc_feature (19)..(351): NCBI GI: 85102632 Blast Desc: NCU03645 [Neurospora crassa OR74A] gi|12718374|emb|CAC28682.1| conserved [Neurospora crassa] gi|28922916|gb|EAA32136.1| [Neurospora crassa OR74A]
  misc_feature (38)..(403): NCBI GI: 156048642 Blast Desc: SS1G_09053 [Sclerotinia sclerotiorum 1980] gi|154693449|gb|EDN93187.1| SS1G_09053 [Sclerotinia sclerotiorum 1980]
  misc_feature (38)..(350): NCBI GI: 46125631 Blast Desc: FG07193.1 [Gibberella zeae PH-1]
  misc_feature (38)..(351): NCBI GI: 39946156 Blast Desc: MGG_08198 [Magnaporthe grisea 70-15] gi|145019456|gb|EDK03684.1| MGG_08198 [Magnaporthe grisea 70-15]
  misc_feature (38)..(399): NCBI GI: 154297469 Blast Desc: BC1G_12331 [Botryotinia fuckeliana B05.10] gi|150858527|gb|EDN33719.1| BC1G_12331 [Botryotinia fuckeliana B05.10]
  misc_feature (576)..(1030): NCBI GI: 171693645 Blast Desc: protein product [Podospora anserina] gi|170946771|emb|CAP73575.1| protein product [Podospora anserina]
  misc_feature (649)..(1031): NCBI GI: 39946156 Blast Desc: MGG_08198 [Magnaporthe grisea 70-15] gi|145019456|gb|EDK03684.1| MGG_08198 [Magnaporthe grisea 70-15]
  misc_feature (637)..(1030): NCBI GI: 256730970 Blast Desc: NECHADRAFT_48840 [Nectria haematococca mpVI 77-13-4]
  misc_feature: Useful for introducing or modulating the production of volatile compounds
MSEHHLSTPLGPRGTLRARPSPLRAKSPSPARQYLNPDDLLSRLTPSTVVDVLQTPTGSLKKCLDRASTSEQAFAMKTAIASKSINGWLVELSAWHWPQTGTSAGFEMPPSKRRKLFEPETPQASHEPTPHSEPTYFGSLPADDVSRYETRLEQIQYDIEGLDLEDIKNQVLHNHILPLSRPGTPFSDAGRSVASAYTFTRMEDLTAVVTAITIQTLPALSRLSRLLNTWNVRLIVLRKVPALLVMIKDAEIAIESGRNAIEPSISGPSESPDTNKSDQKLPEQLSKKDFEVMRSVLQQKVSKPGRALDSMLDLLEGMPDTLPDEWLDRMETIERDYVEWTVTAERKVREAAWSDFSSALKAHKTSRPQSPLKDTLKQARSTEDLSIPAPITPPESSSTDSETTANIDAQTGRSATGRRKPIKPLTDPKSNAGSSKFNPGSITRVVESAKRPTQKRTADRPALIKSRSATTHQDDANRKIASTQSASANTLASSARGHPTRPIKESRNRTYDGSKDPVDQIQTSNPILSEVNRNIVRHPLNEPSRREELVLKPASDDDEFEPSILESVNEEDEELELPSPPRRRQGSYPSVADTVLHGSSNYSPDRSDDARFRDASLEPELPRLPDPDEPFSSDAISPPSSPPLRFKPRSTSVTFKEVPEIALLPEADGSPPQTPREPPEVFDPDTSFEWESQLGSPSRMSTISTMSDDDHLQRQIREVLETIPAKIELKKRAINLNPPDLILPPRPKARHSDPRRPTSALSSRTGSRAGTPSYSRSGTPAFMLAPIRESRPRSTSSQGIRAFHLSRSGEAPVKLFIRCVGENNERVMVRVGGGWSDLGEYLRDYAFHHGSRSKGEGKVEVNDASATATGRIGSSPASRPGSALDNPMTPLTVRKTRRSLGQEGAPSFTKTPLTKSNLEDSADTPGSQASARSRASSYTVDWDEEDSSLGLAGPKANKRREISDESKAWVESMKEKVRLVSGERIPSQVSTEQLRPLSQTSQRGPLKKKPDTEAFGDMGKVGSTKRLFRKN

SEQ ID NO: 29635 - DNA, 4370 bp, Muscodor strobelii
  misc_feature: SGI EST ID NO. CUFF.70188.0
  misc_feature: Variant of the nucleotide sequence at SEQ ID NO 29633
ctgctcaacgcctgcttcttttactcgtcatttttgcgggacaaaagggtgcgtctgacggtgaggaaagcaagtacgtgatgtgttgagagtttgtctgtcgcattatgcggaaactgctttagcgaccaacagcactggtcatatgtcattctgctcatagcagtcgacaatctgggccgaacaaccaccaccactcgttcgaccatctgtgccgcccagcgaatttcagcatacatcgatcctatcccgtcgctcgtcttgaatttctcaccgattagatcgccttttcgctttttctttcatctcgtgccactacatttcaccggccctttttcctcgttttttttccattgctaaaccaagacgtcaaagtcagtgatccaacttggcgcctgcaactgctcaacaagaaagcagcattgcccaccggtgcccatcgtccctccttcaatccagcgctttcacttacatcacagccacataccgccattcgtgtctctcgatccttgttccatcctgatatcttgcttgcttccactctgcgaccacccgatcttcccgagactcttctttctacagccacctatatgccagaatcacgacgacccacctagaacctgctcctactttgtactaccatctgcacggcgctggggaactcgtgggacgggtgaggaagcgatcagaattcctctatcctgtccggggctatgagggtaacaagtgacatgatcgatccgtcgtccgacatcatgggcccctccacctaagccagtcgcatcgctcccgagttgacttgtcagattcaactagaaatgtcatcagcggcaacaaggattcgtgaaaggaacactaacaacacagctgtcgaataccatgtctgaacatcacctctcgacgcctttggggccaagaggcaccctccgggcccgtccatctcctctacgtgcgaaatcaccttctccggctcgccagtatctcaatcccgacgatttactctctcgcctgacgccatcaactgtcgtcgacgtcctacaaactcccacgggatccctgaagaaatgtttggatcgagcctcgacttcggagcaggcgtttgctatgaaaacggccatcgcttcgaagtccattaacggatggcttgtggagctgtcggcctggcattggcctcagacggggacgtctgccggttttgaaatgcctccatctaagcgaaggaagttgttcgaacctgagacacctcaagctagccacgagcctaccccacattccgaaccaacctactttggcagtctccctgccgacgatgtcagccgatatgagactcggctggagcagatccagtatgatatcgagggtctagacttggaggatatcaagaatcaagtccttcataaccatatcctcccgttatcgcgacctggcactccattttctgacgccggacgctccgttgcatctgcctatacatttaccagaatggaagatctgacggccgtggtcactgcaataacgattcaaaccttgcctgcgctgtccaggttgtcacggctactgaacacttggaatgtgcggctaatcgttctgcgcaaggtccctgctttgttagtgatgatcaaggatgctgagatcgctattgagtctggacgcaatgcgatagaaccatcgatttcgggcccttcggaatctccagataccaataagagcgatcagaaactacctgagcaactctccaagaaagacttcgaggtcatgagatctgtcttgcagcagaaagtttcgaaaccaggacgggctctcgattctatgcttgatctgctcgaaggaatgcctgacacgctaccggacgaatggttggatcgtatggagactatcgaacgagactatgtcgaatggacagttacagcggagaggaaagtcagagaggcagcatggtcagacttctctagtgcgcttaaggcacacaaaacaagtcggccacagagtccattgaaggatacgttgaagcaagcacgctcaacagaagatctatcgattcctgcgcctattacaccacccgagtcttcttcgacggatagtgaaacaacggctaatatcgacgcacaaaccggacgctcagctactggacgtcggaaaccaatcaagccacttaccgacccgaaatcgaatgcgggttcgagcaaattcaaccctggctcgatcacgagagttgttgaatcggcaaagcgacccacgcagaagcgaactgccgacagaccggctcttatcaagagtcgaagtgcgacgacacatcaagacgatgctaatagaaagattgccagtactcaatcagccagtgctaatacactggcctcgtcagctcggggacatcctactcgaccgattaaggagtcgcgaaataggacttatgatggatcaaaagatccggttgatcaaatccaaacttccaatcccattttgtctgaagtgaaccgcaacattgtccgtcaccctttgaacgagccaagcagacgcgaggaattagttttgaaacctgcgtctgatgacgatgaattcgagccgtcaatactagaatcagtcaatgaggaagatgaggaattggagttgccttcaccacccaggagacggcaaggaagctatccttctgtcgcagatactgtattgcatggctcttcaaattactcacccgaccgctctgatgacgctcgcttccgtgatgcgtctctcgagcccgagttgccgcgcctgccggatcctgatgagccattctcaagtgatgctataagcccaccaagctcacccccgctacgattcaagccaagatcaacttccgtcacgttcaaagaagtaccagagattgcactgctccccgaagcagatgggtcgcctccacaaactccacgcgaaccaccagaagttttcgatcccgacacgtcatttgagtgggagagccaactcggcagccccagtcgtatgagcacgataagtacaatgagcgacgacgatcatttacagagacagatccgagaagtgcttgaaactattccggccaagatcgaattgaagaaaagagccatcaatctcaatcctcccgatctgatactccctcctcgacctaaggctcgccactctgatcctagacgcccgacttctgccctctcttcacggacgggttctcgagctgggacgccttcatattcacgcagcggaacaccagccttcatgctagctcccatccgagaaagccgtcccagatctacgagcagccagggaattagagcttttcatctctcgagatctggcgaagcgcccgtcaaacttttcatccgctgcgttggcgagaacaacgaaagagtaatggtacgtgttggtggtggctggtctgacttgggtgaatatttacgtgactacgctttccaccatggttcccgatcgaagggcgagggcaaagttgaagtcaatgacgcttcagcaactgcgaccggtcgtataggatccagtccagccagtcgaccgggttctgcactcgacaacccaatgacgccccttaccgtccggaagactagaaggagtctgggccaagaaggggccccaagctttaccaaaacaccccttacgaaaagcaatctggaagacagcgcggacacgcccggatcacaggcttctgctcgatcacgtgcctcatcttataccgtcgattgggacgaagaggattcctcgctcggcctcgctggacccaaagcgaataagcgccgagaaatcagtgacgagagcaaagcttgggtcgagagcatgaaagagaaggtccggctcgttagtggggagcggatcccatctcaagtctcgaccgaacagcttagaccactgtcccagacgtcacagcgaggtccgctgaagaaaaagccagatacggaggcttttggcgacatggggaaagtgggcagtacgaagcggctttttaggaagaattaggagcatctttttgaccgatttgcttgagcccgctatcccacttgtcgcctcattcatcagggcaggtttagttggagtatggctgggtatgttggagtggtatgaggattctagggggactcggtggaagggtggttcgagaatatttacaaacgcgcacatgcattacgacgtagtccggtgttcaaaatacggtcttgtctggtgctggttgaaggcatgacttatctagtcttgtctttctctcctttttacaattgtcttgctgagcctagccattgttttcttttttctgttttcgaattagtgttatgttgatatcaaatacccatatttctgtttgacttttacctgcttacgggtcttatgaaaagtgctcatcattttaatcatcg

SEQ ID NO: 29636 - DNA, 834 bp, Muscodor strobelii
  misc_feature: SGI cDNA ID NO. 570181
  misc_feature: Reduced expression when VOC is produced
  misc_feature: Encodes the peptide sequence at SEQ ID NO 29637
atgatctttctcgaactcgtgtccgccctatttgggtgggtgtatacgatatgttggtcactgtccttttacccgcagatgatcctcaatttccgcaagaagtcgacagcgggaacaaccgtcgatttcccgtttctcaacatccttggatttcttgcttatatgatttacacttctactctttactggtcaccagccattagacaccaatacgcacttcgccataataatctcactccgactgttgccttcaatgactttgctttcgcgcttcacgctgtgttaaccacttctgtcttgaacacccagtatttctttccttcgctttgggggtttgaacgagcgcccggccgaaaaccttctcgcttcatcgttggagtttttaccggttgcatagtcggcgtgctcatagtgatcttcgtcgttgccggacagccgcctgatgctaacccaagaacttcatgggcctggttagacgtgatctacgtcatatcttatgtcaaactcatagtgactatcgtcaaatatgtcccacaactggtgtacaatcagcgcaatcgcagtacaaagggatggagcatctcgcagatcttgttcgatttctcgggcggcatcttgagcatcgcacagctggggatcgattcctatctgcagcgcgactggtcgggtgtcacaggcaaccccgcgaaattcgtattgggcaatgtcagcatgttgtacgatatattgttcatcacacagcactactgtctgtttagggataaggcgcagggcaagaatggggaacaggagtctcttttagagaatggcgaggttgatagaagactagattaa

SEQ ID NO: 29637 - protein, 277 aa, Muscodor strobelii
  misc_feature: SGI Peptide ID NO. 570181
  misc_feature (4)..(70): Pfam Id: PF04193 Pfam Desc: PQ loop repeat
  misc_feature (158)..(220): Pfam Id: PF04193 Pfam Desc: PQ loop repeat
  misc_feature (1)..(277): NCBI GI: 116206758 Blast Desc: CHGG_02672 [Chaetomium globosum CBS 148.51] gi|88183269|gb|EAQ90737.1| CHGG_02672 [Chaetomium globosum CBS 148.51]
  misc_feature (3)..(277): NCBI GI: 261351498 Blast Desc: cystinosin [Verticillium albo-atrum VaMs.102]
  misc_feature (3)..(276): NCBI GI: 256731314 Blast Desc: [Nectria haematococca mpVI 77-13-4]
  misc_feature (1)..(277): NCBI GI: 39971505 Blast Desc: MGG_07068 [Magnaporthe grisea 70-15] gi|145019528|gb|EDK03756.1| MGG_07068 [Magnaporthe grisea 70-15]
  misc_feature (3)..(271): NCBI GI: 46125503 Blast Desc: FG07129.1 [Gibberella zeae PH-1]
  misc_feature (3)..(276): NCBI GI: 164426091 Blast Desc: NCU01250 [Neurospora crassa OR74A] gi|16944475|emb|CAC28641.2| related to CTNS protein [Neurospora crassa] gi|157071195|gb|EAA31417.2| NCU01250 [Neurospora crassa
  misc_feature (3)..(277): NCBI GI: 156041170 Blast Desc: SS1G_11564 [Sclerotinia sclerotiorum 1980] gi|154695947|gb|EDN95685.1| SS1G_11564 [Sclerotinia sclerotiorum 1980]
  misc_feature (2)..(264): NCBI GI: 145229229 Blast Desc: An01g04970 [Aspergillus niger] gi|134055024|emb|CAK37031.1| protein product [Aspergillus niger]
  misc_feature (3)..(266): NCBI GI: 67515987 Blast Desc: AN0275.2 [Aspergillus nidulans FGSC A4] gi|40746992|gb|EAA66148.1| AN0275.2 [Aspergillus nidulans FGSC A4] gi|259489506|tpe|CBF89833.1| TPA: lysosomal L-cystine FGSC
  misc_feature (2)..(262): NCBI GI: 261196380 Blast Desc: cystinosin [Ajellomyces dermatitidis SLH14081] gi|239595838|gb|EEQ78419.1| cystinosin [Ajellomyces dermatitidis SLH14081]
  misc_feature: Useful for introducing or modulating the production of volatile compounds
MIFLELVSALFGWVYTICWSLSFYPQMILNFRKKSTAGTTVDFPFLNILGFLAYMIYTSTLYWSPAIRHQYALRHNNLTPTVAFNDFAFALHAVLTTSVLNTQYFFPSLWGFERAPGRKPSRFIVGVFTGCIVGVLIVIFVVAGQPPDANPRTSWAWLDVIYVISYVKLIVTIVKYVPQLVYNQRNRSTKGWSISQILFDFSGGILSIAQLGIDSYLQRDWSGVTGNPAKFVLGNVSMLYDILFITQHYCLFRDKAQGKNGEQESLLENGEVDRRLD

SEQ ID NO: 29638 - DNA, 1863 bp, Muscodor strobelii
  misc_feature: SGI EST ID NO. CUFF.70182.0
  misc_feature: Variant of the nucleotide sequence at SEQ ID NO 29636
caagtacatacatgtatgtaggtagaaagtacaacttggattgatcatttcgctaaatccgatgtactccatgtatcaagacccgcctggactgtacgcagtatgcagtccagcatcgtgttggaatacctaatgcagagtgtggtcaagcgttaaaaatcgtttgtcctatggcatctgataaatgttctatctcaggagtcgggttttttggtctcaagcgaaaatattcgcgcctcaatgataaagacctattgagtgtctggacttattgagccacaatagcagttgtcgtagcgctaggtcgtgacttgcacctgacgtgcttcgattacgggccagtgacgcttaccatatcggcgatagcgggggctcaccaagcatgacccagatctcatgatagctccgatatgtcatctcacctcctagcaatgctgtcgtgatacgcttcatcttttgcactacattattgcgcttcacaagcctctttcactccagcaacttttccaacagcatggccgctatgtaaagcatttggtccgaatctgaacaggatcaacgatcctctgtgcctgtccgacaagaaccgactcttcagctagggattcaagggcatcattattcaacgtcaatcttatccaattatcttcaactgctcaacgcttacatcatgatctttctcgaactcgtgtccgccctatttgggtgggtgtatacgatatgttggtcactgtccttttacccgcagatgatcctcaatttccgcaagaagtcgacagcgggaacaaccgtcgatttcccgtttctcaacatccttggatttcttgcttatatgatttacacttctactctttactggtcaccagccattagacaccaatacgcacttcgccataataatctcactccgactgttgccttcaatgactttgctttcgcgcttcacgctgtgttaaccacttctgtcttgaacacccagtatttctttccttcgctttgggggtttgaacgagcgcccggccgaaaaccttctcgcttcatcgttggagtttttaccggttgcatagtcggcgtgctcatagtgatcttcgtcgttgccggacagccgcctgatgctaacccaagaacttcatgggcctggttagacgtgatctacgtcatatcttatgtcaaactcatagtgactatcgtcaaatatgtcccacaactggtgtacaatcagcgcaatcgcagtacaaagggatggagcatctcgcagatcttgttcgatttctcgggcggcatcttgagcatcgcacagctggggatcgattcctatctgcagcgcgactggtcgggtgtcacaggcaaccccgcgaaattcgtattgggcaatgtcagcatgttgtacgatatattgttcatcacacagcactactgtctgtttagggataaggcgcagggcaagaatggggaacaggagtctcttttagagaatggcgaggttgatagaagactagattaagatatgtacgaagactgtccatagacctatcgagccagggtagtctatattgttcatagtattatagagagaacgaagttttgcctgtcttcaatatgcagaaggaagactgcacatgaaagtcgcagtaatttttttccgccatgagccaattcgtctccatatgtaattcgtggagttgtacgagaactcgatatagcgagaggatttgatcggaccagctgtcggacagcgatatctacatgtagacatctaatgaaatgaatcatctgtttgatctgtgatcggctatgcagcgggccgtcagatcttgcattccgctggagatgaagcacagattatccaaagtagaaccctag

SEQ ID NO: 29639 - DNA, 1437 bp, Muscodor strobelii
  misc_feature: SGI cDNA ID NO. 570182
  misc_feature: Elevated expression when VOC is produced
  misc_feature: Encodes the peptide sequence at SEQ ID NO 29640
atgtgtcgcctgcttgtcttccggagcagcgaggagatgctcctctccaaactcatcctcgacccgacacattccatcctcaaacaatcattcgattctcggctacgactggatacgagacgtggccagaacaatgcagatggctttggcattggtttctacaccgatcccaagctaggggctgccccgtgccttttcacatccaccatccctgcctggaactgcacaaacctccagcgcatcgcctccaagaccgcctcccgacttgtcttcgcacatgtacgagccaccaccgaaggctcactcagcgaggacaactgccatcctttctaccacaacagcttgatgtggatgcacaatggcggccttgggggttggaaatacatcaagcgcaagctcggcgagcgcctgcatgacaagtggtatctgaacgtccagggcggcaccgacagcgagtgggcattcgccttgttcctagaccgtctggagcgtttgggtgtcgatccaagctcgcagcccaagaagggcttcggtcctgtactgctgcgaaaagccatgctgcagaccatcgaggtcatcaacgaattgactatgagcattccagagagcactgttcagcgcgagaacgttgacacacgaagtctgcttaacttctgcctcacagacggccactccatcatctgcacccgttatgtgagcagcaagacggacgacgctgccagtctctacttctcatctgggacacagtgggagacgaagccaaagtcatcagacgacaaggactatcagatgtcacgacgggataagggagctgatatcgttctcgttgccagcgagccgctgacgttcgaacgagagaactgggttaacgtcccgaccaactccatacttacaattcacggccagacagtcatggtcaatcccatcatcgatgccttctcggaccgtgacccttgcaacaagcgatcatctgctttggcccaggctaagggcttgacaacgaacgaaaaggtggcgcaacgtgcggcggctaccaccccagtgccagtaccggcaactggtatcgaccccgagaaccatcgacgtctcatggcatctctgcttccagctggtatgggccgctcccgaacaccagagactccctcgatcccagttaggaccaggagcccactcacatcatcggacaacgtcccctcatccgatatccgcaccgttacggaactgcccaactcacgtcccgaaccggcgtctaagctcccctctcagggtaacatcaaaaagaaacgacgctcgctcaattacggagaaattgcgcatccagttgaatacatcgaggaaatgcaaacaccacccagccccgaacaaccaacgtcgacgagaaacccggattacatgactgccgagaaggcggcccgagttctgggcatggccctctag

SEQ ID NO: 29640 - protein, 478 aa, Muscodor strobelii
  misc_feature: SGI Peptide ID NO. 570182
  misc_feature (1)..(455): NCBI GI: 261351496 Blast Desc: Dug3p [Verticillium albo-atrum VaMs.102]
  misc_feature (1)..(462): NCBI GI: 256731058 Blast Desc: [Nectria haematococca mpVI 77-13-4]
  misc_feature (1)..(432): NCBI GI: 28950312 Blast Desc: conserved [Neurospora crassa]
  misc_feature (1)..(432): NCBI GI: 46123539 Blast Desc: FG06147.1 [Gibberella zeae PH-1]
  misc_feature (1)..(474): NCBI GI: 171692099 Blast Desc: protein product [Podospora anserina] gi|170945998|emb|CAP72799.1| protein product [Podospora anserina]
  misc_feature (1)..(474): NCBI GI: 116206546 Blast Desc: CHGG_02566 [Chaetomium globosum CBS 148.51] gi|88183163|gb|EAQ90631.1| CHGG_02566 [Chaetomium globosum CBS 148.51]
  misc_feature (1)..(349): NCBI GI: 240106686 Blast Desc: CPC735_014700 [Coccidioides posadasii C735 delta SOWgp]
  misc_feature (1)..(349): NCBI GI: 119174074 Blast Desc: CIMG_09019 [Coccidioides immitis RS]
  misc_feature (46)..(424): NCBI GI: 154290238 Blast Desc: BC1G_15721 [Botryotinia fuckeliana B05.10] gi|150847825|gb|EDN23018.1| BC1G_15721 [Botryotinia fuckeliana B05.10]
  misc_feature (1)..(349): NCBI GI: 238841258 Blast Desc: Dug3p [Microsporum canis CBS 113480]
  misc_feature: Useful for introducing or modulating the production of volatile compounds
MCRLLVFRSSEEMLLSKLILDPTHSILKQSFDSRLRLDTRRGQNNADGFGIGFYTDPKLGAAPCLFTSTIPAWNCTNLQRIASKTASRLVFAHVRATTEGSLSEDNCHPFYHNSLMWMHNGGLGGWKYIKRKLGERLHDKWYLNVQGGTDSEWAFALFLDRLERLGVDPSSQPKKGFGPVLLRKAMLQTIEVINELTMSIPESTVQRENVDTRSLLNFCLTDGHSIICTRYVSSKTDDAASLYFSSGTQWETKPKSSDDKDYQMSRRDKGADIVLVASEPLTFERENWVNVPTNSILTIHGQTVMVNPIIDAFSDRDPCNKRSSALAQAKGLTTNEKVAQRAAATTPVPVPATGIDPENHRRLMASLLPAGMGRSRTPETPSIPVRTRSPLTSSDNVPSSDIRTVTELPNSRPEPASKLPSQGNIKKKRRSLNYGEIAHPVEYIEEMQTPPSPEQPTSTRNPDYMTAEKAARVLGMAL

SEQ ID NO: 29641 - DNA, 2086 bp, Muscodor strobelii
  misc_feature: SGI EST ID NO. CUFF.70234.0
  misc_feature: Variant of the nucleotide sequence at SEQ ID NO 29639
ggaaaatccacatgtccatcctccctgcaggacggatcggcatccgacttgagatccatattggtcgctttcacagcaatttcaaccttaagaacccaacacaagaacaatatcgtgccagcgattgaagttctccatccttcataacgacagagctggtctcctaccgtcccttcacttcgcttccaccagctcccttccatcttttttccgccttctttctctccaatcctacctacgaataacaagtgcgatatcacagcccgcccttcactgactacagcgcacacgaccaccatgtgtcgcctgcttgtcttccggagcagcgaggagatgctcctctccaaactcatcctcgacccgacacattccatcctcaaacaatcattcgattctcggctacgactggatacgagacgtggccagaacaatgcagatggctttggcattggtttctacaccgatcccaagctaggggctgccccgtgccttttcacatccaccatccctgcctggaactgcacaaacctccagcgcatcgcctccaagaccgcctcccgacttgtcttcgcacatgtacgagccaccaccgaaggctcactcagcgaggacaactgccatcctttctaccacaacagcttgatgtggatgcacaatggcggccttgggggttggaaatacatcaagcgcaagctcggcgagcgcctgcatgacaagtggtatctgaacgtccagggcggcaccgacagcgagtgggcattcgccttgttcctagaccgtctggagcgtttgggtgtcgatccaagctcgcagcccaagaagggcttcggtcctgtactgctgcgaaaagccatgctgcagaccatcgaggtcatcaacgaattgactatgagcattccagagagcactgttcagcgcgagaacgttgacacacgaagtctgcttaacttctgcctcacagacggccactccatcatctgcacccgttatgtgagcagcaagacggacgacgctgccagtctctacttctcatctgggacacagtgggagacgaagccaaagtcatcagacgacaaggactatcagatgtcacgacgggataagggagctgatatcgttctcgttgccagcgagccgctgacgttcgaacgagagaactgggttaacgtcccgaccaactccatacttacaattcacggccagacagtcatggtcaatcccatcatcgatgccttctcggaccgtgacccttgcaacaagcgatcatctgctttggcccaggctaagggcttgacaacgaacgaaaaggtggcgcaacgtgcggcggctaccaccccagtgccagtaccggcaactggtatcgaccccgagaaccatcgacgtctcatggcatctctgcttccagctggtatgggccgctcccgaacaccagagactccctcgatcccagttaggaccaggagcccactcacatcatcggacaacgtcccctcatccgatatccgcaccgttacggaactgcccaactcacgtcccgaaccggcgtctaagctcccctctcagggtaacatcaaaaagaaacgacgctcgctcaattacggagaaattgcgcatccagttgaatacatcgaggaaatgcaaacaccacccagccccgaacaaccaacgtcgacgagaaacccggattacatgactgccgagaaggcggcccgagttctgggcatggccctctagaggaggaccccgataccttcaagtttcgtttgagctgccttgcttttctttaagttttgattaagagccagcacagaaaaattgtcagataatgagcggttgggtatggaatagggattgagcctggcgttggggcccgattgttacggattgcttattgcttactgctttgtcaaagtgttgtatgatagaaattgctgcatatttcggtcgagctacatacccagaattgattcttgttgaaggtccctaagctatctcgtcttgaaagatcataatagtccctttaatatgctacaattcacacttaaagcgaagcaaattactgccgagcgacgatattgcatccaac

SEQ ID NO: 29642 - DNA, 2775 bp, Muscodor strobelii
  misc_feature: SGI cDNA ID NO. 570183
  misc_feature: Reduced expression when VOC is produced
  misc_feature: Encodes the peptide sequence at SEQ ID NO 29643
atgagcgggcggcttatagcagcggccgggcgcctgtcgacggcgcgttcggccagcgcccgtgccgtgcgtgaataccaccagctgccttctggtggcctcctgcgagccgatgcctccgtacgcgctgcgcgacggcgaatgtggttcccagttaactccttccacaatgcagtcgccgtacgcaatgcctccttcgctcgattcctccccagactcgtcgttaagttcataaggatacccgccatggctggaggtgtcgcaatagggggtctcgcctggttgcagtatcaagctactcaggcggggaactacgcctgggatgttttcaatactactaaggacacggtatcgaccaccgcgacgacgttgtatggaggcgccagagatatcgccgatcagactatgagaggctggcagagtacgaaagagcaggtcgagatgcccgaatggatgcaaaaggtactacgaattcatgaggaagtgggaactgggaaaggggacggcggtcctgggggggaggaaccaccaaagcagagtaaagtaggcgctggtgcagctgcggctaccgctgccgcatatggatctgaacaatcatcagaagacgaccctcgggacccagaggagatggcccaggatgaccagatgatggttctgaccaagaagatgattgagatacggaacatcttggcaagagttggacaatcacaaaccttgactctgccatccatcgttgtcatcggctcacagtcttctgggaagagttccgtgttggaggcgattgttggacacgaatttctccctaagggctctaacatggtcacacgaaggccgattgaactcactttaatcaacaccccaaatacacgtgcggaatatgccgagttcccagatcttggtctaggcaaggtctccgatttctcctctgtccaaaggactttgacggaactcaatcaagctgtgccagacgcacaatgcgtttcagacgacccgatccgtctttctatatcgtcaccaaatgttccagacttatcactcatcgatcttcctggttatattcaagtcgttggacacaaccaaccccttgaacttaagcagaaaatccaggaactttgcgacaagtatattcaagcaccaaacgtcatactagcgatatcagctgcggatgtcgatttagccaactctacagcgctgcgtgctagtcgaagggtggacccaagaggcgaacggacgattggagttgtgaccaagatggatctcgttgacccggtcaggggtgctgcaattctcactgacaagcaatacccgcttcgcctaggctatgttggggttgtatcgcgggtgcctacgaccacgactctgttcaagaagggagacgccaacctgacatctgccatcacgaagaatgagaatgcatacttctcatcacatcccctggagtttggagcaggatccgatgtgactgttgggacgtccacactgcgtaagaagctcatgcatgtccttgagcagacaatgtcagctagcttgcagagcacgagtgatgccatccgtcaagaactcgaagaagcaacttatgagttcaaggtgcaatacaacgaccgacccttgtcagccgaatcatacctggcagagagtttagatgctttcaagcactctttcaaacaattcgctgaagaattcggccggccacaaatgcatgagctcttgaagaatgagctcgatcaaagagtgctagaccttcttgctgcaagatattggaacaagccgatctatgatctcggcgcgtccattccggagccagacagtctaaccgatctgccgaaggctgatccggattctttgttctggcgccggcgacttgatgcatctacctcatcacttaccaaacttggtgttggtcgactagccacgaatgtgattgctagctcgatccaatctcacgttgacagccttatcggccagtctacattcgtcaatcacccattcgctcgccaggctattacggaggctgcctcaactatcttaaatgatagattctacagtactagtgatcaagtcgagaactgtattaagcccttcaaatttgacattgacatggaagagcgcgaatggactgcaggacgggaacacgtccagggcgttctgaagaaagaactctctgcttgtgagggcgccatgaaagatctagaaacgaacgttgggggtaggcggaagctgagagaggtcatgacctttattgataaggccaagaaaggtgatattgtcgtcgagggtgaaggtcagagcggcgcgggtggattcagcgctgcgcttttgacgaaaggccgagaagcgatattccttcgcgaccgcgcagacatcatcaaaatgcgcatgctcgcggtaaaatctaaacaatgcgcaaacatgaagaacaaatatcactgcccggaggtattccttgatgtagttgcgacaaaactcgcgtccacggccgtcctattcctgaacgtcgagttactctcagaattctactacaacttcccgagggaactagacatgaggctaggacgccatctgagcgatgaggatgtggagaaatttgcgaaagaggatccgaagattaggaggcatttggaggttattagacggaaggagttgcttgagttggtgctggagaaaatggatagtctgagggcgcttgaggggcgggaacgggagagggagagagggaggagggagaataagaagagtggtagtggagagaaggccgggcgatggggcattttctag

SEQ ID NO: 29643 - protein, 924 aa, Muscodor strobelii
  misc_feature: SGI Peptide ID NO. 570183
  misc_feature (244)..(418): Pfam Id: PF00350 Pfam Desc: Dynamin family
  misc_feature (1)..(924): NCBI GI: 145606220 Blast Desc: MGG_11902 [Magnaporthe grisea 70-15] gi|145013937|gb|EDJ98578.1| MGG_11902 [Magnaporthe grisea 70-15]
  misc_feature (1)..(924): NCBI GI: 261351495 Blast Desc: msp1 [Verticillium albo-atrum VaMs.102]
  misc_feature (6)..(924): NCBI GI: 46126151 Blast Desc: FG07453.1 [Gibberella zeae PH-1]
  misc_feature (89)..(924): NCBI GI: 145616889 Blast Desc: MGG_14430 [Magnaporthe grisea 70-15] gi|145022569|gb|EDK06518.1| MGG_14430 [Magnaporthe grisea 70-15]
  misc_feature (1)..(924): NCBI GI: 156041160 Blast Desc: SS1G_11559 [Sclerotinia sclerotiorum 1980] gi|154695942|gb|EDN95680.1| SS1G_11559 [Sclerotinia sclerotiorum 1980]
  misc_feature (1)..(922): NCBI GI: 154290236 Blast Desc: BC1G_15720 [Botryotinia fuckeliana B05.10] gi|150847824|gb|EDN23017.1| BC1G_15720 [Botryotinia fuckeliana B05.10]
  misc_feature (31)..(924): NCBI GI: 145239791 Blast Desc: An08g04250 [Aspergillus niger] gi|134077055|emb|CAK39928.1| protein product [Aspergillus niger]
  misc_feature (31)..(924): NCBI GI: 119495564 Blast Desc: mitochondrial dynamin GTPase (Msp1), [Neosartorya fischeri NRRL 181] gi|119412726|gb|EAW22667.1| mitochondrial dynamin GTPase (Msp1), [Neosartorya fischeri NRRL 181]
  misc_feature (31)..(924): NCBI GI: 115491707 Blast Desc: protein MGM1, mitochondrial precursor [Aspergillus terreus NIH2624] gi|114197341|gb|EAU39041.1| protein MGM1, mitochondrial precursor [Aspergillus terreus NIH2624]
  misc_feature (1)..(924): NCBI GI: 121701617 Blast Desc: mitochondrial dynamin GTPase (Msp1), [Aspergillus clavatus NRRL 1] gi|119397216|gb|EAW07647.1| mitochondrial dynamin GTPase (Msp1), [Aspergillus clavatus NRRL 1]
  misc_feature: Useful for introducing or modulating the production of volatile compounds
MSGRLIAAAGRLSTARSASARAVREYHQLPSGGLLRADASVRAARRRMWFPVNSFHNAVAVRNASFARFLPRLVVKFIRIPAMAGGVAIGGLAWLQYQATQAGNYAWDVFNTTKDTVSTTATTLYGGARDIADQTMRGWQSTKEQVEMPEWMQKVLRIHEEVGTGKGDGGPGGEEPPKQSKVGAGAAAATAAAYGSEQSSEDDPRDPEEMAQDDQMMVLTKKMIEIRNILARVGQSQTLTLPSIVVIGSQSSGKSSVLEAIVGHEFLPKGSNMVTRRPIELTLINTPNTRAEYAEFPDLGLGKVSDFSSVQRTLTELNQAVPDAQCVSDDPIRLSISSPNVPDLSLIDLPGYIQVVGHNQPLELKQKIQELCDKYIQAPNVILAISAADVDLANSTALRASRRVDPRGERTIGVVTKMDLVDPVRGAAILTDKQYPLRLGYVGVVSRVPTTTTLFKKGDANLTSAITKNENAYFSSHPLEFGAGSDVTVGTSTLRKKLMHVLEQTMSASLQSTSDAIRQELEEATYEFKVQYNDRPLSAESYLAESLDAFKHSFKQFAEEFGRPQMHELLKNELDQRVLDLLAARYWNKPIYDLGASIPEPDSLTDLPKADPDSLFWRRRLDASTSSLTKLGVGRLATNVIASSIQSHVDSLIGQSTFVNHPFARQAITEAASTILNDRFYSTSDQVENCIKPFKFDIDMEEREWTAGREHVQGVLKKELSACEGAMKDLETNVGGRRKLREVMTFIDKAKKGDIVVEGEGQSGAGGFSAALLTKGREAIFLRDRADIIKMRMLAVKSKQCANMKNKYHCPEVFLDVVATKLASTAVLFLNVELLSEFYYNFPRELDMRLGRHLSDEDVEKFAKEDPKIRRHLEVIRRKELLELVLEKMDSLRALEGRERERERGRRENKKSGSGEKAGRWGIF

SEQ ID NO: 29644 - DNA, 3198 bp, Muscodor strobelii
  misc_feature: SGI EST ID NO. CUFF.70197.0
  misc_feature: Variant of the nucleotide sequence at SEQ ID NO 29642
ttgagcaacaccctgatagtgcatgatcgtagtggggccgttgcatgaatggtacatgaggtacctcattaattcctgaagctcctacttctgacgccacttttgtcttggacaaccatcgcgacaatcacgattttcaaattccgaacgactcaccgcattgtactgataacccaacagcagctctcgttgatggtccccaacgccagtcctcccgagtgcctccgcgtctcgtcagcggcatgagcgggcggcttatagcagcggccgggcgcctgtcgacggcgcgttcggccagcgcccgtgccgtgcgtgaataccaccagctgccttctggtggcctcctgcgagccgatgcctccgtacgcgctgcgcgacggcgaatgtggttcccagttaactccttccacaatgcagtcgccgtacgcaatgcctccttcgctcgattcctccccagactcgtcgttaagttcataaggatacccgccatggctggaggtgtcgcaatagggggtctcgcctggttgcagtatcaagctactcaggcggggaactacgcctgggatgttttcaatactactaaggacacggtatcgaccaccgcgacgacgttgtatggaggcgccagagatatcgccgatcagactatgagaggctggcagagtacgaaagagcaggtcgagatgcccgaatggatgcaaaaggtactacgaattcatgaggaagtgggaactgggaaaggggacggcggtcctgggggggaggaaccaccaaagcagagtaaagtaggcgctggtgcagctgcggctaccgctgccgcatatggatctgaacaatcatcagaagacgaccctcgggacccagaggagatggcccaggatgaccagatgatggttctgaccaagaagatgattgagatacggaacatcttggcaagagttggacaatcacaaaccttgactctgccatccatcgttgtcatcggctcacagtcttctgggaagagttccgtgttggaggcgattgttggacacgaatttctccctaagggctctaacatggtcacacgaaggccgattgaactcactttaatcaacaccccaaatacacgtgcggaatatgccgagttcccagatcttggtctaggcaaggtctccgatttctcctctgtccaaaggactttgacggaactcaatcaagctgtgccagacgcacaatgcgtttcagacgacccgatccgtctttctatatcgtcaccaaatgttccagacttatcactcatcgatcttcctggttatattcaagtcgttggacacaaccaaccccttgaacttaagcagaaaatccaggaactttgcgacaagtatattcaagcaccaaacgtcatactagcgatatcagctgcggatgtcgatttagccaactctacagcgctgcgtgctagtcgaagggtggacccaagaggcgaacggacgattggagttgtgaccaagatggatctcgttgacccggtcaggggtgctgcaattctcactgacaagcaatacccgcttcgcctaggctatgttggggttgtatcgcgggtgcctacgaccacgactctgttcaagaagggagacgccaacctgacatctgccatcacgaagaatgagaatgcatacttctcatcacatcccctggagtttggagcaggatccgatgtgactgttgggacgtccacactgcgtaagaagctcatgcatgtccttgagcagacaatgtcagctagcttgcagagcacgagtgatgccatccgtcaagaactcgaagaagcaacttatgagttcaaggtgcaatacaacgaccgacccttgtcagccgaatcatacctggcagagagtttagatgctttcaagcactctttcaaacaattcgctgaagaattcggccggccacaaatgcatgagctcttgaagaatgagctcgatcaaagagtgctagaccttcttgctgcaagatattggaacaagccgatctatgatctcggcgcgtccattccggagccagacagtctaaccgatctgccgaaggctgatccggattctttgttctggcgccggcgacttgatgcatctacctcatcacttaccaaacttggtgttggtcgactagccacgaatgtgattgctagctcgatccaatctcacgttgacagccttatcggccagtctacattcgtcaatcacccattcgctcgccaggctattacggaggctgcctcaactatcttaaatgatagattctacagtactagtgatcaagtcgagaactgtattaagcccttcaaatttgacattgacatggaagagcgcgaatggactgcaggacgggaacacgtccagggcgttctgaagaaagaactctctgcttgtgagggcgccatgaaagatctagaaacgaacgttgggggtaggcggaagctgagagaggtcatgacctttattgataaggccaagaaaggtgatattgtcgtcgagggtgaaggtcagagcggcgcgggtggattcagcgctgcgcttttgacgaaaggccgagaagcgatattccttcgcgaccgcgcagacatcatcaaaatgcgcatgctcgcggtaaaatctaaacaatgcgcaaacatgaagaacaaatatcactgcccggaggtattccttgatgtagttgcgacaaaactcgcgtccacggccgtcctattcctgaacgtcgagttactctcagaattctactacaacttcccgagggaactagacatgaggctaggacgccatctgagcgatgaggatgtggagaaatttgcgaaagaggatccgaagattaggaggcatttggaggttattagacggaaggagttgcttgagttggtgctggagaaaatggatagtctgagggcgcttgaggggcgggaacgggagagggagagagggaggagggagaataagaagagtggtagtggagagaaggccgggcgatggggcattttctagttgtgataccttactttgcagtgatgaacattcatgaagagctggagttgggcggtgttgggaatgggatatcgccgctttgtcacgcgtttctctactctgtggtattggtttactaaatacctactgtattgtatggagtatattctagacttgatcaatacttcggttctttccaatc

SEQ ID NO: 29645 - DNA, 2829 bp, Muscodor strobelii
  misc_feature: SGI cDNA ID NO. 570184
  misc_feature: Reduced expression when VOC is produced
  misc_feature: Encodes the peptide sequence at SEQ ID NO 29646
atgagcgggcggcttatagcagcggccgggcgcctgtcgacggcgcgttcggccagcgcccgtgccgtgcgtgaataccaccagctgccttctggtggcctcctgcgagccgatgcctccgtacgcgctgcgcgacggcgaatgtggttcccagttaactccttccacaatgcagtcgccgtacgcaatgcctccttcgctcgattcctccccagactcgtcgttaagttcataaggatacccgccatggctggaggtgtcgcaatagggggtctcgcctggttgcagtatcaagctactcaggcggggaactacgcctgggatgttttcaatactactaaggacacggtatcgaccaccgcgacgacgttgtatggaggcgccagagatatcgccgatcagactatgagaggctggcagagtacgaaagagcaggtcgagatgcccgaatggatgcaaaaggtactacgaattcatgaggaagtgggaactgggaaaggggacggcggtcctgggggggaggaaccaccaaagcagagtaaagtaggcgctggtgcagctgcggctaccgctgccgcatatggatctgaacaatcatcagaagacgaccctcgggacccagaggagatggcccaggatgaccagatgatggttctgaccaagaagatgattgagatacggaacatcttggcaagagttggacaatcacaaaccttgactctgccatccatcgttgtcatcggctcacagtcttctgggaagagttccgtgttggaggcgattgttggacacgaatttctccctaagggctctaacatggtcacacgaaggccgattgaactcactttaatcaacaccccaaatacacgtgcggaatatgccgagttcccagatcttggtctaggcaaggtctccgatttctcctctgtccaaaggactttgacggaactcaatcaagctgtgccagacgcacaatgcgtttcagacgacccgatccgtctttctatatcgtcaccaaatgttccagacttatcactcatcgatcttcctggttatattcaagtcgttggacacaaccaaccccttgaacttaagcagaaaatccaggaactttgcgacaagtatattcaagcaccaaacgtcatactagcgatatcagctgcggatgtcgatttagccaactctacagcgctgcgtgctagtcgaagggtggacccaagaggcgaacggacgattggagttgtgaccaagatggatctcgttgacccggtcaggggtgctgcaattctcactgacaagcaatacccgcttcgcctaggctatgttggggttgtatcgcgggtgcctacgaccacgactctgttcaagaagggagacgccaacctgacatctgccatcacgaagaatgagaatgcatacttctcatcacatcccctggagtttggagcaggatccgatgtgactgttgggacgtccacactgcgtaagaagctcatgcatgtccttgagcagacaatgtcagctagcttgcagagcacgagtgatgccatccgtcaagaactcgaagaagcaacttatgagttcaaggtgcaatacaacgaccgacccttgtcagccgaatcatacctggcagagagtttagatgctttcaagcactctttcaaacaattcgctgaagaattcggccggccacaaatgcatgagctcttgaagaatgagctcgatcaaagagtgctagaccttcttgctgcaagatattggaacaagccgatctatgatctcggcgcgtccattccggagccagacagtctaaccgatctgccgaaggctgatccggattctttgttctggcgccggcgacttgatgcatctacctcatcacttaccaaacttggtgttggtcgactagccacgaatgtgattgctagctcgatccaatctcacgttgacagccttatcggccagtctacattcgtcaatcacccattcgctcgccaggctattacggaggctgcctcaactatcttaaatgatagattctacagtactagtgatcaagtcgagaactgtattaagcccttcaaatttgacattgacatggaagagcgcgaatggactgcaggacgggaacacgtccagggcgttctgaagaaagaactctctgcttgtgagggcgccatgaaagatctagaaacgaacgttgggggtaggcggaagctgagagaggtcatgacctttattgataaggccaagaaaggtgatattgtcgtcgagggtgaaggtcagagcggcgcgggtggattcagcgctgcgcttttgacgaaaggtttgtttcgcccctatccttgcaagaaaatacgccagaagctaacagacacaggccgagaagcgatattccttcgcgaccgcgcagacatcatcaaaatgcgcatgctcgcggtaaaatctaaacaatgcgcaaacatgaagaacaaatatcactgcccggaggtattccttgatgtagttgcgacaaaactcgcgtccacggccgtcctattcctgaacgtcgagttactctcagaattctactacaacttcccgagggaactagacatgaggctaggacgccatctgagcgatgaggatgtggagaaatttgcgaaagaggatccgaagattaggaggcatttggaggttattagacggaaggagttgcttgagttggtgctggagaaaatggatagtctgagggcgcttgaggggcgggaacgggagagggagagagggaggagggagaataagaagagtggtagtggagagaaggccgggcgatggggcattttctag

SEQ ID NO: 29646 - protein, 942 aa, Muscodor strobelii
  misc_feature: SGI Peptide ID NO. 570184
  misc_feature (244)..(418): Pfam Id: PF00350 Pfam Desc: Dynamin family
  misc_feature (216)..(914): NCBI GI: 254567970 Blast Desc: Mitochondrial GTPase related to dynamin, present in a complex containing Ugo1p and Fzo1p [Pichia pastoris GS115] gi|238030892|emb|CAY68815.1| Mitochondrial GTPase related to in a
  misc_feature (215)..(933): NCBI GI: 255721135 Blast Desc: protein MGM1, mitochondrial precursor [Candida tropicalis MYA-3404] gi|240135991|gb|EER35544.1| protein MGM1, mitochondrial precursor [Candida tropicalis MYA-3404]
  misc_feature (59)..(910): NCBI GI: 146414710 Blast Desc: PGUG_04054 [Pichia guilliermondii ATCC 6260]
  misc_feature (54)..(914): NCBI GI: 19113244 Blast Desc: mitochondrial GTPase Msp1 [Schizosaccharomyces pombe] gi|15214069|sp|P87320.2|MSP1_SCHPO RecName: Full=Protein msp1, mitochondrial; Flags: Precursor gi|7106063|emb|CAB75996.1| GTPase
  misc_feature (215)..(931): NCBI GI: 199434342 Blast Desc: DEHA2G19096p [Debaryomyces hansenii]
  misc_feature (54)..(914): NCBI GI: 2231082 Blast Desc: dynamin-related protein [Schizosaccharomyces pombe]
  misc_feature (215)..(931): NCBI GI: 50427515 Blast Desc: DEHA0G20273g [Debaryomyces hansenii CBS767]
  misc_feature (1)..(942): NCBI GI: 256731264 Blast Desc: [Nectria haematococca mpVI 77-13-4]
  misc_feature (1)..(942): NCBI GI: 145606220 Blast Desc: MGG_11902 [Magnaporthe grisea 70-15] gi|145013937|gb|EDJ98578.1| MGG_11902 [Magnaporthe grisea 70-15]
  misc_feature (1)..(942): NCBI GI: 261351495 Blast Desc: msp1 [Verticillium albo-atrum VaMs.102]
  misc_feature: Useful for introducing or modulating the production of volatile compounds
MSGRLIAAAGRLSTARSASARAVREYHQLPSGGLLRADASVRAARRRMWFPVNSFHNAVAVRNASFARFLPRLVVKFIRIPAMAGGVAIGGLAWLQYQATQAGNYAWDVFNTTKDTVSTTATTLYGGARDIADQTMRGWQSTKEQVEMPEWMQKVLRIHEEVGTGKGDGGPGGEEPPKQSKVGAGAAAATAAAYGSEQSSEDDPRDPEEMAQDDQMMVLTKKMIEIRNILARVGQSQTLTLPSIVVIGSQSSGKSSVLEAIVGHEFLPKGSNMVTRRPIELTLINTPNTRAEYAEFPDLGLGKVSDFSSVQRTLTELNQAVPDAQCVSDDPIRLSISSPNVPDLSLIDLPGYIQVVGHNQPLELKQKIQELCDKYIQAPNVILAISAADVDLANSTALRASRRVDPRGERTIGVVTKMDLVDPVRGAAILTDKQYPLRLGYVGVVSRVPTTTTLFKKGDANLTSAITKNENAYFSSHPLEFGAGSDVTVGTSTLRKKLMHVLEQTMSASLQSTSDAIRQELEEATYEFKVQYNDRPLSAESYLAESLDAFKHSFKQFAEEFGRPQMHELLKNELDQRVLDLLAARYWNKPIYDLGASIPEPDSLTDLPKADPDSLFWRRRLDASTSSLTKLGVGRLATNVIASSIQSHVDSLIGQSTFVNHPFARQAITEAASTILNDRFYSTSDQVENCIKPFKFDIDMEEREWTAGREHVQGVLKKELSACEGAMKDLETNVGGRRKLREVMTFIDKAKKGDIVVEGEGQSGAGGFSAALLTKGLFRPYPCKKIRQKLTDTGREAIFLRDRADIIKMRMLAVKSKQCANMKNKYHCPEVFLDVVATKLASTAVLFLNVELLSEFYYNFPRELDMRLGRHLSDEDVEKFAKEDPKIRRHLEVIRRKELLELVLEKMDSLRALEGRERERERGRRENKKSGSGEKAGRWGIF

SEQ ID NO: 29647 - DNA, 3198 bp, Muscodor strobelii; identical to SEQ ID NO: 29644
  misc_feature: SGI EST ID NO. CUFF.70197.0
  misc_feature: Variant of the nucleotide sequence at SEQ ID NO 29645

SEQ ID NO: 29648 - DNA, 1674 bp, Muscodor strobelii
  misc_feature: SGI cDNA ID NO. 570185
  misc_feature: Encodes the peptide sequence at SEQ ID NO 29649
atgccccggtccagaggacatccagctcgaccgtcaaaggcctgccaggcctgtcgagagaagagacgaaaatgtgacctaaaggagccagaatgctcgcaatgtcggagggcaaagatcccatgctcagggtatcgagattcgttcacgttgcgcctgcgcaatcacgcactatccactgcacttgaagactcatctcagactccatctcatcaagccttgagtaccactggatctgaccggtcgtctgcaactgaccacgcaggaacgtcgtcattacttacctctcaagatgagcagcctaggacagccttcgtctacaacacaaataccaaatcgatcaaaaagaacataccagttcgcacgctgcagaatgcaccctctctttacaccgctcgctttctgacaccgaaagtcactgagttcgcattaagctacttcatgcaaagctacgcaacatctaatcctttcttttacgttccagatctatacagttcattatccaaagagcatcgcagtcagctcgagtttatgatctccatgccggctctaatccagctatcccataagcttcaagactctcgcctcaaacaaatcgcgtatatgcgccatggacaggcgataacgtatttacaatttgccttagcgtctcccgagctagttgcaacagatattactcttttgtccgttctacttcttggactgttcgaggcattggtctttcggggcaggcaaatacctgacagttggctgaaacatgtcgaagggtccgcggcacttcttgaaatcagaggcaagtctcaactcgacacacctttaggtcaacagctcttcatgcactgcgctcaaaacgtaatctcaacatgcggcgcgcgaaaagcccctataccatcttgcattaaaccactgcaaatgcacgcctggagcacggtagcggtgggtaacatcgagattcggctagcattacttaacaccgatatcgcgatttggagaggcgacatgaggagctcgccgctggagtttctgcctagagggcaagagctcaacgatcaaatttcggatcttatggaatccatggaactgtatgccccgtatcgagttgtcgaaggaggcgtatgggatgggggaaaagtctgcgcttataaggatcgtttccacgttttccgaagcctgaaggcggcgagggactggaatacgttgcgtgtattgcggtgggttataatcatggacacggcgagtcttctgaggaatatggaggggcatgcattagaagatggtgaagccgtagccaagcggccaaggagtgccttgtggccgaaatcttatgaaacattgtctgcagagacagcggacgacctactctacagcttaccataccacatcgaattatcatccaaccccttcatgacagcccgatcatcaatcttcttcctcactacagtaatcgcagcacctttcgcagacgccgaggcaaaggtctatgcacaggatcgtctagctcatttacgtgtagaatatggcctgggccaagaagttgacgccgttgatctggaaatccaggacggtgaggatgagacgctggtaagggcatgtctccagcatgttatcgaccagttggacatccagcgtatgcagcatgttatcgacgaattggatatccagcgacagacatga

SEQ ID NO: 29649 - protein, 557 aa, Muscodor strobelii
  misc_feature: SGI Peptide ID NO. 570185
  misc_feature (13)..(52): Pfam Id: PF00172 Pfam Desc: Fungal Zn(2)-Cys(6) binuclear cluster domain
  misc_feature (9)..(524): NCBI GI: 242806133 Blast Desc: conserved [Talaromyces stipitatus ATCC 10500] gi|218715307|gb|EED14729.1| conserved [Talaromyces stipitatus ATCC 10500]
  misc_feature (9)..(517): NCBI GI: 212528002 Blast Desc: conserved [Penicillium marneffei ATCC 18224] gi|210073556|gb|EEA27643.1| conserved [Penicillium marneffei ATCC 18224]
  misc_feature (9)..(410): NCBI GI: 145231074 Blast Desc: An01g14020 [Aspergillus niger] gi|134055929|emb|CAK37406.1| protein product [Aspergillus niger]
  misc_feature (9)..(466): NCBI GI: 119494733 Blast Desc: C6 finger domain protein, [Neosartorya fischeri NRRL 181] gi|119412344|gb|EAW22285.1| C6 finger domain protein, [Neosartorya fischeri NRRL 181]
  misc_feature (9)..(317): NCBI GI: 156053814 Blast Desc: SS1G_05755 [Sclerotinia sclerotiorum 1980] gi|154703535|gb|EDO03274.1| SS1G_05755 [Sclerotinia sclerotiorum 1980]
  misc_feature (9)..(337): NCBI GI: 116191783 Blast Desc: CHGG_05609 [Chaetomium globosum CBS 148.51] gi|88181522|gb|EAQ88990.1| CHGG_05609 [Chaetomium globosum CBS 148.51]
  misc_feature (9)..(465): NCBI GI: 121700851 Blast Desc: C6 finger domain protein, [Aspergillus clavatus NRRL 1] gi|119396833|gb|EAW07264.1| C6 finger domain protein, [Aspergillus clavatus NRRL 1]
  misc_feature (9)..(407): NCBI GI: 255930461 Blast Desc: Pc06g01850 [Penicillium chrysogenum Wisconsin 54-1255] gi|211581403|emb|CAP79178.1| Pc06g01850 [Penicillium chrysogenum Wisconsin 54-1255]
  misc_feature (9)..(425): NCBI GI: 145257544 Blast Desc: An04g04080 [Aspergillus niger] gi|134058689|emb|CAK38673.1| protein product [Aspergillus niger]
  misc_feature (9)..(404): NCBI GI: 154321385 Blast Desc: BC1G_01567 [Botryotinia fuckeliana B05.10] gi|150852105|gb|EDN27297.1| BC1G_01567 [Botryotinia fuckeliana B05.10]
MPRSRGHPARPSKACQACREKRRKCDLKEPECSQCRRAKIPCSGYRDSFTLRLRNHALSTALEDSSQTPSHQALSTTGSDRSSATDHAGTSSLLTSQDEQPRTAFVYNTNTKSIKKNIPVRTLQNAPSLYTARFLTPKVTEFALSYFMQSYATSNPFFYVPDLYSSLSKEHRSQLEFMISMPALIQLSHKLQDSRLKQIAYMRHGQAITYLQFALASPELVATDITLLSVLLLGLFEALVFRGRQIPDSWLKHVEGSAALLEIRGKSQLDTPLGQQLFMHCAQNVISTCGARKAPIPSCIKPLQMHAWSTVAVGNIEIRLALLNTDIAIWRGDMRSSPLEFLPRGQELNDQISDLMESMELYAPYRVVEGGVWDGGKVCAYKDRFHVFRSLKAARDWNTLRVLRWVIIMDTASLLRNMEGHALEDGEAVAKRPRSALWPKSYETLSAETADDLLYSLPYHIELSSNPFMTARSSIFFLTTVIAAPFADAEAKVYAQDRLAHLRVEYGLGQEVDAVDLEIQDGEDETLVRACLQHVIDQLDIQRMQHVIDELDIQRQT

SEQ ID NO: 29650 - DNA, 3519 bp, Muscodor strobelii
  misc_feature: SGI EST ID NO. CUFF.70264.0
  misc_feature: Variant of the nucleotide sequence at SEQ ID NO 29648
ggacaacagactcacaacagtacgtgagaagggttagtgttcggcgaggtctttgatggtctgcaaaagtcaacatcaaacctaagatgatcccaacacccgtcacaatgcttggagtccttaggtgtgatatcggacgactatcatatctctaccgctatcgtaaaatccgtaatatattactggtgggtctccgaaggtaggccgatgacttcgctgctgaaagagttgctgcattcgtaagacatctcccgcggcttccgaatgtcttgcttacaatcaaacataacattgatctgggcttgaggaatttctgtactcattcacattcccattctcagtctcgttaatggagagaggataaagttggttgtagcatagactattcctaaaaaggaaattcgctcgatgtttgtacgccgtatacatcccctcataggttccatgcaggaatccggtacccaaacggccgcacttcacagtctaccacctatgggacgacgacttgaaatgccatgccccggtccagaggacatccagctcgaccgtcaaaggcctgccaggcctgtcgagagaagagacgaaaatgtgacctaaaggagccagaatgctcgcaatgtcggagggcaaagatcccatgctcagggtatcgagattcgttcacgttgcgcctgcgcaatcacgcactatccactgcacttgaagactcatctcagactccatctcatcaagccttgagtaccactggatctgaccggtcgtctgcaactgaccacgcaggaacgtcgtcattacttacctctcaagatgagcagcctaggacagccttcgtctacaacacaaataccaaatcgatcaaaaagaacataccagttcgcacgctgcagaatgcaccctctctttacaccgctcgctttctgacaccgaaagtcactgagttcgcattaagctacttcatgcaaagctacgcaacatctaatcctttcttttacgttccagatctatacagttcattatccaaagagcatcgcagtcagctcgagtttatgatctccatgccggctctaatccagctatcccataagcttcaagactctcgcctcaaacaaatcgcgtatatgcgccatggacaggcgataacgtatttacaatttgccttagcgtctcccgagctagttgcaacagatattactcttttgtccgttctacttcttggactgttcgaggcattggtctttcggggcaggcaaatacctgacagttggctgaaacatgtcgaagggtccgcggcacttcttgaaatcagaggcaagtctcaactcgacacacctttaggtcaacagctcttcatgcactgcgctcaaaacgtaatctcaacatgcggcgcgcgaaaagcccctataccatcttgcattaaaccactgcaaatgcacgcctggagcacggtagcggtgggtaacatcgagattcggctagcattacttaacaccgatatcgcgatttggagaggcgacatgaggagctcgccgctggagtttctgcctagagggcaagagctcaacgatcaaatttcggatcttatggaatccatggaactgtatgccccgtatcgagttgtcgaaggaggcgtatgggatgggggaaaagtctgcgcttataaggatcgtttccacgttttccgaagcctgaaggcggcgagggactggaatacgttgcgtgtattgcggtgggttataatcatggacacggcgagtcttctgaggaatatggaggggcatgcattagaagatggtgaagccgtagccaagcggccaaggagtgccttgtggccgaaatcttatgaaacattgtctgcagagacagcggacgacctactctacagcttaccataccacatcgaattatcatccaaccccttcatgacagcccgatcatcaatcttcttcctcactacagtaatcgcagcacctttcgcagacgccgaggcaaaggtctatgcacaggatcgtctagctcatttacgtgtagaatatggcctgggccaagaagttgacgccgttgatctggaaatccaggacggtgaggatgagacgctggtaagggcatgtctccagcatgttatcgaccagttggacatccagcgtatgcagcatgttatcgacgaattggatatccagcgacagacatgataacggatggacttttatgagacaaattgcgacgaggatacgaggctagaaatgtcaaaaggaggttccaaataccacactacgccaacttagtatcgtaggatcatgatcgatcttatggactttataccaccatgctagttgactgttcgccggccacttcacgaaatgccatcctttaatctgaaaaccaaatgtagcatatccttactcagataaaccaggaaatttttcgaacactccctcatctcccttcagcctttcattcagtagcgtcccaatccgtcggaggtcttccgagtcgctctgtcatctctttctcgatcttcctaaaatcatcatcctcatctccagtctccgggtgctttataccctcatacgcaggtaagaacacactctcatcaacctcagtgtagactccatgatccacatggatcaactgaccgtttctctgctcatcagccatcaaaaacacaaccgcctttgctactgcggaggcaggctgatgatatatactctgacttgagaggacatttccctgcaccatgtgggaatctgtccagcttggtgcgacggcgttaagccgaataggtagcgatgtaagggacaggcgcttgtgcatgccccgaagcacacctagagttccatgtttcgagatgactacggtcgttagaacaatatttgaatcgtacacaagcgttaactcaccatagtcaacaatcctactcctctgcaaacctttaacggaactcgatataaccacgctccccgttctcttactctggcgaatgtaatgcaaacctagagtcgttgtgtttaccacagacataagattgacgtcaagtgtgactgtcgtgggctctaccgggtctccattcgagtcgagagataagttgatgtaatccgctcttgggcctatacccgcattcgcactataccctgcgttaggccgcgagtcttatgaaggggaaaagacttactgcacatgatccacacctccaaagcgtttcatcgcttccttaaagagcctcactagttcctcccatttcgtgacgtccgtcttcacaaacgcaaacctttctcctttcgattcttcaggctcctgtgtatcgcccccgaccacactcgccccaagctcaagtaataattctacggttgctagaccaatcccggacgtactgcccgtcacgaccacgattttgtctttgagcggggcgagatccgcagtgtcaatcgtgcatttcgacattgttcaaggaaatcccaatcttagtctcgaactttgatactatccttgtcgaacaaaaaaaatatctaactcatatctttt

SEQ ID NO: 29651 - DNA, 891 bp, Muscodor strobelii
  misc_feature: SGI cDNA ID NO. 570186
  misc_feature: Encodes the peptide sequence at SEQ ID NO 29652
atgtcgaaatgcacgattgacactgcggatctcgccccgctcaaagacaaaatcgtggtcgtgacgggcagtacgtccgggattggtctagcaaccgtagaattattacttgagcttggggcgagtgtggtcgggggcgatacacaggagcctgaagaatcgaaaggagaaaggtttgcgtttgtgaagacggacgtcacgaaatgggaggaactagtgaggctctttaaggaagcgatgaaacgctttggaggtgtggatcatgtgcatgcgaatgcgggtataggcccaagagcggattacatcaacttatctctcgactcgaatggagacccggtagagcccacgacagtcacacttgacgtcaatcttatgtctgtggtaaacacaacgactctaggtttgcattacattcgccagagtaagagaacggggagcgtggttatatcgagttccgttaaaggtttgcagaggagtaggattgttgactatgtcatctcgaaacatggaactctaggtgtgcttcggggcatgcacaagcgcctgtcccttacatcgctacctattcggcttaacgccgtcgcaccaagctggacagattcccacatggtgcagggaaatgtcctctcaagtcagagtatatatcatcagcctgcctccgcagtagcaaaggcggttgtgtttttgatggctgatgagcagagaaacggtcagttgatccatgtggatcatggagtctacactgaggttgatgagagtgtgttcttacctgcgtatgagggtataaagcacccggagactggagatgaggatgatgattttaggaagatcgagaaagagatgacagagcgactcggaagacctccgacggattgggacgctactgaatga

SEQ ID NO: 29652 - protein, 296 aa, Muscodor strobelii
  misc_feature: SGI Peptide ID NO. 570186
  misc_feature (17)..(183): Pfam Id: PF00106 Pfam Desc: short chain dehydrogenase
  misc_feature (17)..(95): Pfam Id: PF00106 Pfam Desc: short chain dehydrogenase
  misc_feature (19)..(89): Pfam Id: PF01370 Pfam Desc: NAD dependent epimerase/dehydratase family
  misc_feature (1)..(279): NCBI GI: 46109900 Blast Desc: FG01832.1 [Gibberella zeae PH-1]
  misc_feature (1)..(277): NCBI GI: 256734282 Blast Desc: NECHADRAFT_92184 [Nectria haematococca mpVI 77-13-4]
  misc_feature (1)..(274): NCBI GI: 242772400 Blast Desc: hydroxyacyl dehydrogenase, [Talaromyces stipitatus ATCC 10500] gi|218721651|gb|EED21069.1| hydroxyacyl dehydrogenase, [Talaromyces stipitatus ATCC 10500]
  misc_feature (1)..(274): NCBI GI: 156048875 Blast Desc: SS1G_08144 [Sclerotinia sclerotiorum 1980] gi|154692543|gb|EDN92281.1| SS1G_08144 [Sclerotinia sclerotiorum 1980]
  misc_feature (1)..(270): NCBI GI: 169609050 Blast Desc: SNOG_07609 [Phaeosphaeria nodorum SN15] gi|111063955|gb|EAT85075.1| SNOG_07609 [Phaeosphaeria nodorum SN15]
  misc_feature (1)..(270): NCBI GI: 189194023 Blast Desc: conserved [Pyrenophora tritici-repentis Pt-1C-BFP] gi|187978914|gb|EDU45540.1| conserved [Pyrenophora tritici-repentis Pt-1C-BFP]
  misc_feature (1)..(267): NCBI GI: 240110062 Blast Desc: oxidoreductase,short chain dehydrogenase, [Coccidioides posadasii C735 delta SOWgp]
  misc_feature (1)..(277): NCBI GI: 212531217 Blast Desc: 15-hydroxyprostaglandin dehydrogenase, [Penicillium marneffei ATCC 18224] gi|210071129|gb|EEA25218.1| 15-hydroxyprostaglandin dehydrogenase, [Penicillium marneffei
  misc_feature (1)..(267): NCBI GI: 119179075 Blast Desc: CIMG_08324 [Coccidioides immitis RS]
  misc_feature (1)..(271): NCBI GI: 154317200 Blast Desc: BC1G_03502 [Botryotinia fuckeliana B05.10] gi|150844919|gb|EDN20112.1| BC1G_03502 [Botryotinia fuckeliana B05.10]
  misc_feature (14)..(246): SWISSPROT Homolog: EC 1.1.1.100 3-oxoacyl-[acyl-carrier-protein] reductase
MSKCTIDTADLAPLKDKIVVVTGSTSGIGLATVELLLELGASVVGGDTQEPEESKGERFAFVKTDVTKWEELVRLFKEAMKRFGGVDHVHANAGIGPRADYINLSLDSNGDPVEPTTVTLDVNLMSVVNTTTLGLHYIRQSKRTGSVVISSSVKGLQRSRIVDYVISKHGTLGVLRGMHKRLSLTSLPIRLNAVAPSWTDSHMVQGNVLSSQSIYHQPASAVAKAVVFLMADEQRNGQLIHVDHGVYTEVDESVFLPAYEGIKHPETGDEDDDFRKIEKEMTERLGRPPTDWDATE

SEQ ID NO: 29653 - DNA, 1498 bp, Muscodor strobelii
  misc_feature: SGI EST ID NO. CUFF.70265.1
  misc_feature: Variant of the nucleotide sequence at SEQ ID NO 29651
tcaaagttcgagactaagattgggatttccttgaacaatgtcgaaatgcacgattgacactgcggatctcgccccgctcaaagacaaaatcgtggtcgtgacgggcagtacgtccgggattggtctagcaaccgtagaattattacttgagcttggggcgagtgtggtcgggggcgatacacaggagcctgaagaatcgaaaggagaaaggtttgcgtttgtgaagacggacgtcacgaaatgggaggaactagtgaggctctttaaggaagcgatgaaacgctttggaggtgtggatcatgtgcatgcgaatgcgggtataggcccaagagcggattacatcaacttatctctcgactcgaatggagacccggtagagcccacgacagtcacacttgacgtcaatcttatgtctgtggtaaacacaacgactctaggtttgcattacattcgccagagtaagagaacggggagcgtggttatatcgagttccgttaaaggtttgcagaggagtaggattgttgactatgtcatctcgaaacatggaactctaggtgtgcttcggggcatgcacaagcgcctgtcccttacatcgctacctattcggcttaacgccgtcgcaccaagctggacagattcccacatggtgcagggaaatgtcctctcaagtcagagtatatatcatcagcctgcctccgcagtagcaaaggcggttgtgtttttgatggctgatgagcagagaaacggtcagttgatccatgtggatcatggagtctacactgaggttgatgagagtgtgttcttacctgcgtatgagggtataaagcacccggagactggagatgaggatgatgattttaggaagatcgagaaagagatgacagagcgactcggaagacctccgacggattgggacgctactgaatgaaaggctgaagggagatgagggagtgttcgaaaaatttcctggtttatctgagtaaggatatgctacatttggttttcagattaaaggatggcatttcgtgaagtggccggcgaacagtcaactagcatggtggtataaagtccataagatcgatcatgatcctacgatactaagttggcgtagtgtggtatttggaacctccttttgacatttctagcctcgtatcctcgtcgcaatttgtctcataaaagtccatccgttatcatgtctgtcgctggatatccaattcgtcgataacatgctgcatacgctggatgtccaactggtcgataacatgctggagacatgcccttaccagcgtctcatcctcaccgtcctggatttccagatcaacggcgtcaacttcttggcccaggccatattctacacgtaaatgagctagacgatcctgtgcatagacctttgcctcggcgtctgcgaaaggtgctgcgattactgtagtgaggaagaagattgatgatcgggctgtcatgaaggggttggatgataattcgatgtggtatggtaact

SEQ ID NO: 29654 - DNA, 858 bp, Muscodor strobelii
  misc_feature: SGI cDNA ID NO. 570187
  misc_feature: Encodes the peptide sequence at SEQ ID NO 29655
atgtgtcgtccctttctgccttcgctgtggaccgccaaaggaacctctggtatacgacagttcacaagtaatatccagatgtacagctgtcgagtcacagatatttggtacacggttcccgtctccgtcacagtaaaaggcgaaggaaatctttctctcgcatcgtcggctatatatagtcgctatgttgccgggtctccgcagaagtcgttcatcattatatttctcagatacaattggaagaacaccagtttaaacaacagaccgactcaggactttgccgatctcttaagcaagttcaatgtacccctgcagatgctcaactcagacactcgtcgaacacccaacggctgtcaatggcatcttggaccccaggtcgcgtactttgggctattctcctcagcagtacagtatactaatatggcttttaaggaagtcaagattcaccaggagttgacgagtgaaaacgagcataccactattagcatacggtccatacatcttcgattgaaatttctacacgaggagattgaaaatctacggtccatatgtacgacccttgacttcctctataagtattggcttgatgcggctgttaaagagcaagaagttcaggattctactggtgtcagctcgatagacgatctatttatactcagggatgagttcgatgtgcagatgagacgtcgagacgaattaattaagaggttgagcaatgttcaaaacctatacttcaacctaacaacctccaagattgcccaagcttcgaagtcagatagcactgcgatgaagaccattgccatcgtcactgctgttttcttcccggctactttcatagcaacttcagacctttcttag

SEQ ID NO: 29655 - protein, 285 aa, Muscodor strobelii
  misc_feature: SGI Peptide ID NO. 570187
  misc_feature (229)..(280): NCBI GI: 145248261 Blast Desc: An13g02410 [Aspergillus niger] gi|134081130|emb|CAK41640.1| protein product [Aspergillus niger]
  misc_feature (205)..(281): NCBI GI: 46137951 Blast Desc: FG10490.1 [Gibberella zeae PH-1]
  misc_feature (233)..(281): NCBI GI: 67526207 Blast Desc: AN3561.2 [Aspergillus nidulans FGSC A4] gi|40740579|gb|EAA59769.1| AN3561.2 [Aspergillus nidulans FGSC A4] gi|259481916|tpe|CBF75884.1| TPA: [Aspergillus nidulans FGSC
MCRPFLPSLWTAKGTSGIRQFTSNIQMYSCRVTDIWYTVPVSVTVKGEGNLSLASSAIYSRYVAGSPQKSFIIIFLRYNWKNTSLNNRPTQDFADLLSKFNVPLQMLNSDTRRTPNGCQWHLGPQVAYFGLFSSAVQYTNMAFKEVKIHQELTSENEHTTISIRSIHLRLKFLHEEIENLRSICTTLDFLYKYWLDAAVKEQEVQDSTGVSSIDDLFILRDEFDVQMRRRDELIKRLSNVQNLYFNLTTSKIAQASKSDSTAMKTIAIVTAVFFPATFIATSDLS

SEQ ID NO: 29656 - DNA, 1260 bp, Muscodor strobelii
  misc_feature: SGI EST ID NO. CUFF.70207.0
  misc_feature: Variant of the nucleotide sequence at SEQ ID NO 29654
cttgattcgaagacaatgatgttccagtctgggagtaacaatgcacagccaccactcaagaaaacgcctcgctcaggcggacaccataataaggatgatgcgcggcgactccaatcgcagccgtctttttattgtgctaacttatttatatgtagtattgagccaagtgaggcatagggaaaattgcaatattgatctaccggtcaagattgctgcgaataatcaagatggcgatgccaccgagagggtcacatatcccaccagtagagttgaagccgaaacgatcaattccatctcgcccattcccacgttggaaatcgttcgagttgcagttttccatagatcgccctaatcttacatccatactcgatcacatcacagatgcagaggacgtatatgaaacaagacttttctcgaccggatcgaagatcaggacgttccgaccagatgcatcttgggaatcgacgattttgaaaactacccgtgatctatcacttaaagagacacctgttgcgcatactattgcagattttcttcaggcgtgggaatcggctttagctgaaggtcgtggtagggggattcctagacaactcattgcgcttatagatacagcaccttgcgagaacaggaacgctgcgccagtgttctcgatttcaccagagagttgtgacgaactgacctcgacgttacgcatgtgtcgtccctttctgccttcgctgtggaccgccaaaggaacctctggtatacgacagttcacaagtaatatccagatgtacagctgtcgagtcacagatatttggtacacggttcccgtctccgtcacagtaaaaggcgaaggaaatctttctctcgcatcgtcggctatatatagtcgctatgttgccgggtctccgcagaagtcgttcatcattatatttctcagatacaattggaagaacaccagtttaaacaacagaccgactcaggactttgccgatctcttaagcaagttcaatgtacccctgcagatgctcaactcagacactcgtcgaacacccaacggctgtcaatggcatcttggaccccaggtcgcgtactttggtatggcacttggtttatggcgtgagggtctcttgttcttgaactcttttactcatgatcaagtatattcatgaagtcaagattcaccaggagttgacgagtgaaaacgagcataccactattagcatacggtccatacatcttcgattgaaatttctacacgaggagattgaaaatcta

SEQ ID NO: 29657 - DNA, 2061 bp, Muscodor strobelii
  misc_feature: SGI cDNA ID NO. 570188
  misc_feature: Reduced expression when VOC is produced
  misc_feature: Encodes the peptide sequence at SEQ ID NO 29658
atggccggacgcaggaagcgcgcatcttccacctcgaccgtcgctaccatcgaccagtccaatatcacacactacaaagagaccgccattctcaggcccgcccctgccacccagcacttcgacgattggccctgcttcaccctcaccgacgccgccgtctatcaccgcgatggcaccttcgccaaccagctcaatgccgagctcgaagggcccttcatcgtccgcggcatcctcgagaccgacaaagacaccgaacagtatctcgtcaacaggaacatgcggtccaagtcccaccgcatccagatcgaggcctccagcaagttctcgatagcctgcgacgagagcgggagtgcccccatcgtctgggccagtggccagggaggctggttcgagatcgtgccctcccaacagtaccgccccatctgcgacctcatgttccaggccgtctgccttcacttcgccctcctagacgcctacgaggaagaactcgccaagtctcgtaaatctaagaagaggtacaaaattgacttggaggagctccttttcaaatatgctttgcgctccggcgatgggctcgtcctcgacgaagcctacgatcgactagatgagcaagccatcttcgtgctgtcacatttcaccaaaggcaccattgtacacaactatctaactaataagtttcctgacatcgctcaagaacttgccaagaaagctgctaatcccgaggcggaccaacattccaacttgaaaccgagccctttgaaggcatacgactacactcatcgcgacaaatccacttcgctagaggttaccgatagccagaagaaacccagagggcgtccgaggaagaatagttctagaaacacacagtctagccagacgccagacctggaagcggtcacaaaatcgtccaggtccaaacagaaaccaaagtcggccagcgcatcaaacgatgacataatcatggccgactccaacgatgatcattcacaccctacgaagacgtctcagagtcacgagcccgaaggtgctgaaaacgacattccagattcaagccaggaatcagcccgcgtattagcatctgctttacgagatgtccgagaagatatagaaagagaaatcgctcttggcaagcggaagggagctgtcggtgatgtcaccgccaatcgttggcgaacattggcatacctggaatgtagtatcaaagactacaggagccttaatgatcactttgtgtatcatgcggaaaacttggtcagacttctaggtcctgcttgggcagacacacaaatctatttgtgggctgaagagaatgcgtctgaaactccaacgttcgagcacgtaacagaggccgaaattctccagctcaagcggcgagtcaaagtcaagaaggcggaccgcgccactcgtgcagagaagtctacaaatagtagcccaccacgaaagagttcagcttatgctgggaagcagacgcctcggaacgcccgccctgcaggcaaatttggtgggttacggccatctactggaagtaagaagcgcttgcgacatgaagtggacttcgacgacgacatcgatgtcgatgagtatggaactttgacgaagaagtcgaaaaattcgagtttcgatctggaagaggttgatgaagaggacgaggacgatgacgtgtctagcgacgatgacgcgttgcctgacaccagtgccgtaccccttactccccttgttcttcgtgctgaaagattgccatcaacccaaccgcaaggacctggccatacatggacttgtgacgagccagattgtggctttgtcgtccgagacgcccacggagaagccggccaacaactgatcagctctcattgcgaagagcacgatagcaatgctcgtgaagttgcgcaagaggtggcagtcaacagggtcaatcttgctgtacaagaggcgaccagaggacacatgccaatcaatcatctcctcgagaaaatccgccgccttggcgagaaatccggtaaacgagaggaaattaatgggaaacctgtgccggagccaattaaacgagcgctcatcatctaa

SEQ ID NO: 29658 - protein, 686 aa, Muscodor strobelii
  misc_feature: SGI Peptide ID NO. 570188
  misc_feature (27)..(686): NCBI GI: 85102282 Blast Desc: NCU04152 [Neurospora crassa OR74A] gi|16944408|emb|CAD11409.1| [Neurospora crassa] gi|28922851|gb|EAA32072.1| [Neurospora crassa OR74A]
  misc_feature (1)..(686): NCBI GI: 256730981 Blast Desc: NECHADRAFT_49001 [Nectria haematococca mpVI 77-13-4]
  misc_feature (18)..(653): NCBI GI: 116197963 Blast Desc: CHGG_07137 [Chaetomium globosum CBS 148.51] gi|88178416|gb|EAQ85884.1| CHGG_07137 [Chaetomium globosum CBS 148.51]
  misc_feature (5)..(686): NCBI GI: 261355600 Blast Desc: conserved [Verticillium albo-atrum VaMs.102]
  misc_feature (16)..(654): NCBI GI: 171693969 Blast Desc: protein product [Podospora anserina] gi|170946933|emb|CAP73737.1| protein product [Podospora anserina]
  misc_feature (5)..(668): NCBI GI: 39947748 Blast Desc: MGG_08625 [Magnaporthe grisea 70-15] gi|145010248|gb|EDJ94904.1| MGG_08625 [Magnaporthe grisea 70-15]
  misc_feature (476)..(686): NCBI GI: 46125899 Blast Desc: FG07327.1 [Gibberella zeae PH-1]
  misc_feature (1)..(161): NCBI GI: 46125899 Blast Desc: FG07327.1 [Gibberella zeae PH-1]
  misc_feature (27)..(183): NCBI GI: 189199688 Blast Desc: [Pyrenophora tritici-repentis Pt-1C-BFP] gi|187983280|gb|EDU48768.1| [Pyrenophora tritici-repentis Pt-1C-BFP]
  misc_feature (26)..(228): NCBI GI: 242777196 Blast Desc: conserved [Talaromyces stipitatus ATCC 10500] gi|218722604|gb|EED22022.1| conserved [Talaromyces stipitatus ATCC 10500]
  misc_feature: Useful for introducing or modulating the production of volatile compounds
MAGRRKRASSTSTVATIDQSNITHYKETAILRPAPATQHFDDWPCFTLTDAAVYHRDGTFANQLNAELEGPFIVRGILETDKDTEQYLVNRNMRSKSHRIQIEASSKFSIACDESGSAPIVWASGQGGWFEIVPSQQYRPICDLMFQAVCLHFALLDAYEEELAKSRKSKKRYKIDLEELLFKYALRSGDGLVLDEAYDRLDEQAIFVLSHFTKGTIVHNYLTNKFPDIAQELAKKAANPEADQHSNLKPSPLKAYDYTHRDKSTSLEVTDSQKKPRGRPRKNSSRNTQSSQTPDLEAVTKSSRSKQKPKSASASNDDIIMADSNDDHSHPTKTSQSHEPEGAENDIPDSSQESARVLASALRDVREDIEREIALGKRKGAVGDVTANRWRTLAYLECSIKDYRSLNDHFVYHAENLVRLLGPAWADTQIYLWAEENASETPTFEHVTEAEILQLKRRVKVKKADRATRAEKSTNSSPPRKSSAYAGKQTPRNARPAGKFGGLRPSTGSKKRLRHEVDFDDDIDVDEYGTLTKKSKNSSFDLEEVDEEDEDDDVSSDDDALPDTSAVPLTPLVLRAERLPSTQPQGPGHTWTCDEPDCGFVVRDAHGEAGQQLISSHCEEHDSNAREVAQEVAVNRVNLAVQEATRGHMPINHLLEKIRRLGEKSGKREEINGKPVPEPIKRALII

SEQ ID NO: 29659 - DNA, 3337 bp, Muscodor strobelii
  misc_feature: SGI EST ID NO. CUFF.70360.1
  misc_feature: Variant of the nucleotide sequence at SEQ ID NO 29657
taggtcgtgaagcagcgccggatgtggccatcttgataatccgcgcaggctgcattcgaaagtggtaggtgtatgcgataaggaggccctggggaaagtctcgtttacgaagagagtaattgagtttccccgaagcacctccaggcggagaggatcttgcgtcttgctaccaaagtaaccttcgcaggaagacagacgaaggcgcgcaagaagagaggactggaggtcgcgacagactttgaagtctgcaggtgttttaagcaggtgacaccggcgggacctgaggctgtctctggcttatgtgcggtgcttcagatggaaagaaaaatgcgctgcaattgagctgacaggaacaaatttggcgggcaggtgcttatcgattgattggtagttcaagtagctgtacaagtttcactgtactactagcagcactttccatgagagggtacaacctttggtggggtcgtagcagctttgtacttagattgttcggagggtacctgttggctttgcggttgcacttaacttgctctggatgtcgcgttaagtggtagtcccagtagcagttgccgtgcagcagcgggaagacaccgcggcgcgtctcccgcatgacaatactcatagtttcgcagcacattgtctccgtgtgtcttgggcaagcaacccaccattgcgcttgctcgctttccactactccgtcacccacacaacatcaattcccctcctcaccgtccatatcttttcgtcgtctcccatatctatctttattgctcagactagatctccggaactctccaatcactcctgcaactcgtcgattggcatttgatcctcccagtcgctccggcgcatcccccgccatcaccatggccggacgcaggaagcgcgcatcttccacctcgaccgtcgctaccatcgaccagtccaatatcacacactacaaagagaccgccattctcaggcccgcccctgccacccagcacttcgacgattggccctgcttcaccctcaccgacgccgccgtctatcaccgcgatggcaccttcgccaaccagctcaatgccgagctcgaagggcccttcatcgtccgcggcatcctcgagaccgacaaagacaccgaacagtatctcgtcaacaggaacatgcggtccaagtcccaccgcatccagatcgaggcctccagcaagttctcgatagcctgcgacgagagcgggagtgcccccatcgtctgggccagtggccagggaggctggttcgagatcgtgccctcccaacagtaccgccccatctgcgacctcatgttccaggccgtctgccttcacttcgccctcctagacgcctacgaggaagaactcgccaagtctcgtaaatctaagaagaggtacaaaattgacttggaggagctccttttcaaatatgctttgcgctccggcgatgggctcgtcctcgacgaagcctacgatcgactagatgagcaagccatcttcgtgctgtcacatttcaccaaaggcaccattgtacacaactatctaactaataagtttcctgacatcgctcaagaacttgccaagaaagctgctaatcccgaggcggaccaacattccaacttgaaaccgagccctttgaaggcatacgactacactcatcgcgacaaatccacttcgctagaggttaccgatagccagaagaaacccagagggcgtccgaggaagaatagttctagaaacacacagtctagccagacgccagacctggaagcggtcacaaaatcgtccaggtccaaacagaaaccaaagtcggccagcgcatcaaacgatgacataatcatggccgactccaacgatgatcattcacaccctacgaagacgtctcagagtcacgagcccgaaggtgctgaaaacgacattccagattcaagccaggaatcagcccgcgtattagcatctgctttacgagatgtccgagaagatatagaaagagaaatcgctcttggcaagcggaagggagctgtcggtgatgtcaccgccaatcgttggcgaacattggcatacctggaatgtagtatcaaagactacaggagccttaatgatcactttgtgtatcatgcggaaaacttggtcagacttctaggtcctgcttgggcagacacacaaatctatttgtgggctgaagagaatgcgtctgaaactccaacgttcgagcacgtaacagaggccgaaattctccagctcaagcggcgagtcaaagtcaagaaggcggaccgcgccactcgtgcagagaagtctacaaatagtagcccaccacgaaagagttcagcttatgctgggaagcagacgcctcggaacgcccgccctgcaggcaaatttggtgggttacggccatctactggaagtaagaagcgcttgcgacatgaagtggacttcgacgacgacatcgatgtcgatgagtatggaactttgacgaagaagtcgaaaaattcgagtttcgatctggaagaggttgatgaagaggacgaggacgatgacgtgtctagcgacgatgacgcgttgcctgacaccagtgccgtaccccttactccccttgttcttcgtgctgaaagattgccatcaacccaaccgcaaggacctggccatacatggacttgtgacgagccagattgtggctttgtcgtccgagacgcccacggagaagccggccaacaactgatcagctctcattgcgaagagcacgatagcaatgctcgtgaagttgcgcaagaggtggcagtcaacagggtcaatcttgctgtacaagaggcgaccagaggacacatgccaatcaatcatctcctcgagaaaatccgccgccttggcgagaaatccggtaaacgagaggaaattaatgggaaacctgtgccggagccaattaaacgagcgctcatcatctaacctcgccagtcattccagcgaaccaagagggtttcgacttcttgcatttcggagctcgttcaatttgttttcacccggttcctcaaatagcatgcgcacctagctgttcggtcgagccacaacccccagtctttcacctcgaaatctctggttcaatacagattaatgaccgatacgataatccacaacttagcggttggacaggcgttgatcgggcggattggcatgagtttaagggccggagatcttgaaaggatgataccccgtggcttgcttttgccttgatttttttcgagatgcttgtatgtagattacaaaagctttataccatgaagccaggtagctactatgaaggtcaattgtcctctgctcagacgtcttcgttacacgttatgcgacgttggattgtg

SEQ ID NO: 29660 - DNA, 2346 bp, Muscodor strobelii
  misc_feature: SGI cDNA ID NO. 570189
  misc_feature: Encodes the peptide sequence at SEQ ID NO 29661
atggccggacgcaggaagcgcgcatcttccacctcgaccgtcgctaccatcgaccagtccaatatcacacactacaaagagaccgccattctcaggcccgcccctgccacccagcacttcgacgattggccctgcttcaccctcaccgacgccgccgtctatcaccgcgatggcaccttcgccaaccagctcaatgccgagctcgaagggcccttcatcgtccgcggcatcctcgagaccgacaaagacaccgaacagtatctcgtcaacaggaacatgcggtccaagtcccaccgcatccagatcgaggcctccagcaagttctcgatagcctgcgacgagagcgggagtgcccccatcgtctgggccagtggccagggaggctggttcgagatcgtgccctcccaacagtaccgccccatctgcgacctcatgttccaggccgtctgccttcacttcgccctcctagacgcctacgaggaagaactcgccaagtctcgtaaatctaagaagaggtacaaaattgacttggaggagctccttttcaaatatgctttgcgctccggcgatgggctcgtcctcgacgaagcctacgatcgactagatgagcaagccatcttcgtgctgtcacatttcaccaaaggcaccattgtacacaactatctaactaataagtttcctgacatcgctcaagaacttgccaagaaagctgctaatcccgaggcggaccaacattccaacttgaaaccgagccctttgaaggcatacgactacactcatcgcgacaaatccacttcgctagaggttaccgatagccagaagaaacccagagggcgtccgaggaagaatagttctagaaacacacagtctagccagacgccagacctggaagcggtcacaaaatcgtccaggtccaaacagaaaccaaagtcggccagcgcatcaaacgatgacataatcatggccgactccaacgatgatcattcacaccctacgaagacgtctcagagtcacgagcccgaaggtgctgaaaacgacattccagattcaagccaggaatcagcccgcgtattagcatctgctttacgagatgtccgagaagatatagaaagagaaatcgctcttggcaagcggaagggagctgtcggtgatgtcaccgccaatcgttggcgaacattggcatacctggaatgtagtatcaaagactacaggagccttaatgatcactttgtgtatcatgcggaaaacttggtcagacttctaggtcctgcttgggcagacacacaaatctatttgtgggctgaagagaatgcgtctgaaactccaacgttcgagcacgtaacagaggccgaaattctccagctcaagcggcgagtcaaagtcaagaaggcggaccgcgccactcgtgcagagaagtctacaaatagtagcccaccacgaaagagttcagcttatgctgggaagcagacgcctcggaacgcccgccctgcaggcaaatttggtgggttacggccatctactggaagtaagaagcgcttgcgacatgaagtggacttcgacgacgacatcgatgtcgatgagtatggaactttgacgaagaagtcgaaaaattcgagtttcgatctggaagaggttgatgaagaggacgaggacgatgacgtgtctagcgacgatgacgcgttgcctgacaccagtgccgtaccccttactccccttgttcttcgtgctgaaagattgccatcaacccaaccgcaaggacctggccatacatggacttgtgacgagccagattgtggctttgtcgtccgagacgcccacggagaagccggccaacaactgatcagctctcattgcgaagagcacgatagcaatgctcgtgaagttgcgcaagaggtggcagtcaacagggtcaatcttgctgtacaagaggcgaccagaggacacatgccaatcaagtatgtctactcccctcctacccttattatgattcagcttccatcccgtgtctgggatatcccagaacacgaaaccatggatcagatggtgagcctagcggctcgtgtacttgtaggacaaggtccacacttactacagccatctttcaattttggactcgcgaccgagatcctactatttgcgcctcaggggagaacgcggtctcaacgagttcccctaccagccgcatcaaagttgcgttcatcgcttccggttggccagcctcactctccgtcaaagacaagtcatctcctcgagaaaatccgccgccttggcgagaaatccggtaaacgagaggaaattaatgggaaacctgtgccggagccaattaaacgagcgctcatcatctaa

SEQ ID NO: 29661 - protein, 781 aa, Muscodor strobelii
  misc_feature: SGI Peptide ID NO. 570189
  misc_feature (18)..(668): NCBI GI: 116197963 Blast Desc: CHGG_07137 [Chaetomium globosum CBS 148.51] gi|88178416|gb|EAQ85884.1| CHGG_07137 [Chaetomium globosum CBS 148.51]
  misc_feature (27)..(649): NCBI GI: 85102282 Blast Desc: NCU04152 [Neurospora crassa OR74A] gi|16944408|emb|CAD11409.1| [Neurospora crassa] gi|28922851|gb|EAA32072.1| [Neurospora crassa OR74A]
  misc_feature (16)..(657): NCBI GI: 171693969 Blast Desc: protein product [Podospora anserina] gi|170946933|emb|CAP73737.1| protein product [Podospora anserina]
  misc_feature (1)..(654): NCBI GI: 256730981 Blast Desc: NECHADRAFT_49001 [Nectria haematococca mpVI 77-13-4]
  misc_feature (5)..(651): NCBI GI: 261355600 Blast Desc: conserved [Verticillium albo-atrum VaMs.102]
  misc_feature (5)..(651): NCBI GI: 39947748 Blast Desc: MGG_08625 [Magnaporthe grisea 70-15] gi|145010248|gb|EDJ94904.1| MGG_08625 [Magnaporthe grisea 70-15]
  misc_feature (1)..(161): NCBI GI: 46125899 Blast Desc: FG07327.1 [Gibberella zeae PH-1]
  misc_feature (476)..(654): NCBI GI: 46125899 Blast Desc: FG07327.1 [Gibberella zeae PH-1]
  misc_feature (27)..(183): NCBI GI: 189199688 Blast Desc: [Pyrenophora tritici-repentis Pt-1C-BFP] gi|187983280|gb|EDU48768.1| [Pyrenophora tritici-repentis Pt-1C-BFP]
  misc_feature (26)..(228): NCBI GI: 242777196 Blast Desc: conserved [Talaromyces stipitatus ATCC 10500] gi|218722604|gb|EED22022.1| conserved [Talaromyces stipitatus ATCC 10500]
MAGRRKRASSTSTVATIDQSNITHYKETAILRPAPATQHFDDWPCFTLTDAAVYHRDGTFANQLNAELEGPFIVRGILETDKDTEQYLVNRNMRSKSHRIQIEASSKFSIACDESGSAPIVWASGQGGWFEIVPSQQYRPICDLMFQAVCLHFALLDAYEEELAKSRKSKKRYKIDLEELLFKYALRSGDGLVLDEAYDRLDEQAIFVLSHFTKGTIVHNYLTNKFPDIAQELAKKAANPEADQHSNLKPSPLKAYDYTHRDKSTSLEVTDSQKKPRGRPRKNSSRNTQSSQTPDLEAVTKSSRSKQKPKSASASNDDIIMADSNDDHSHPTKTSQSHEPEGAENDIPDSSQESARVLASALRDVREDIEREIALGKRKGAVGDVTANRWRTLAYLECSIKDYRSLNDHFVYHAENLVRLLGPAWADTQIYLWAEENASETPTFEHVTEAEILQLKRRVKVKKADRATRAEKSTNSSPPRKSSAYAGKQTPRNARPAGKFGGLRPSTGSKKRLRHEVDFDDDIDVDEYGTLTKKSKNSSFDLEEVDEEDEDDDVSSDDDALPDTSAVPLTPLVLRAERLPSTQPQGPGHTWTCDEPDCGFVVRDAHGEAGQQLISSHCEEHDSNAREVAQEVAVNRVNLAVQEATRGHMPIKYVYSPPTLIMIQLPSRVWDIPEHETMDQMVSLAARVLVGQGPHLLQPSFNFGLATEILLFAPQGRTRSQRVPLPAASKLRSSLPVGQPHSPSKTSHLLEKIRRLGEKSGKREEINGKPVPEPIKRALII

SEQ ID NO: 29662 - DNA, 3337 bp, Muscodor strobelii; identical to SEQ ID NO: 29659
  misc_feature: SGI EST ID NO. CUFF.70360.1
  misc_feature: Variant of the nucleotide sequence at SEQ ID NO 29660

SEQ ID NO: 29663 - DNA, 1470 bp, Muscodor strobelii
  misc_feature: SGI cDNA ID NO. 570190
  misc_feature: Encodes the peptide sequence at SEQ ID NO 29664
atggccacatccggcgctgcttcacgacctattctggacggtgtcttcggtattaataaacccgttggcatgagttctgctcaagtcattcgagatgtccagcaccatttcaacccgtcggctctgttcaagcctatgatcgacaatgagattgccaccaggaagcaagagtccaacagctcgagaaagaagcgccgattcggcaagaatgacattcgggtgaagatgggtcacggaggtactcttgaccctctcgcttcaggcgtactgattctcggtgtcggaaagggaaccaaacagttgcagggtttcctagattgcacaaagacttacgagacggtggtcttgttcggtgccagtactgatacctacgatcgcgttggcaagatcttgaagaagactgcttatgaccatatcacccgacccatggtcgaagaagcactcaatggctttcgaggcacattccaacaagtgccgccactatattcggctctcaagatggagggaaagcctctatacgagtacgctcgagagggcaagccaattccccgcgagattgccactagggaagtcaccgtcacagagctcgaattggtcgagtggtacgaacccggtacgcacaatcaccgatggcccgcggaggaagccacgaatttcgagcgcagcttcgccgagcaggtctggaaggtggagaaggatcaaatgaccaacccaaagctcacgcccgaagaggaggaggccgacagtaaagctcgagacgaacacgagaactttaagaggaaggctgacgagagcgtagatgctcttgtctatgaccgctctagcaagcgcaagaagaataataaccatcgggaaccgcccatgatgtcgggcgcactcggcactatgccccctgtgcctggcaaaggatcaaacctcatcccggatgcgccagatgcggacacacctcctccctggagtgacaaaggcccaccggctgcgaggatacgaatgacagtaacgtcaggtttctatgttcgcagtttctgtcatgacctgggcacaaaggtttcttcctctgcttgcatggcagagctatgtaggagtcggcagcgtgacttcgttctcggctccccgaattgcatggagtattccgatctggcgaaaggtgaagagatatggggacctagggtgaaagagatgatagaccagtggaactctcagagccatgatatcactccacacgctgccaacagggcgaagaagaatgtacgcccgtcgaatggagatccgaagcgtagagtagaggaggagccaaaggaaccagaacagaacgacaacaagatccagcgcagatcgcgatcgcaatcgcctccaagggccaaggactctccgaagcgggcttcgtcaccagtccgcactaaggagacggatgatgaatcctggcacggttttgcagacacacccaaggaggcactgggccaggcttaa

SEQ ID NO: 29664 - protein, 489 aa, Muscodor strobelii
  misc_feature: SGI Peptide ID NO. 570190
  misc_feature (64)..(221): Pfam Id: PF01509 Pfam Desc: TruB family pseudouridylate synthase (N terminal domain)
  misc_feature (64)..(198): Pfam Id: PF01509 Pfam Desc: TruB family pseudouridylate synthase (N terminal domain)
  misc_feature (7)..(480): NCBI GI: 256731368 Blast Desc: NECHADRAFT_96198 [Nectria haematococca mpVI 77-13-4]
  misc_feature (11)..(469): NCBI GI: 46125897 Blast Desc: FG07326.1 [Gibberella zeae PH-1]
  misc_feature (11)..(480): NCBI GI: 261355601 Blast Desc: tRNA pseudouridine synthase B [Verticillium albo-atrum VaMs.102]
  misc_feature (12)..(400): NCBI GI: 39947759 Blast Desc: MGG_08626 [Magnaporthe grisea 70-15] gi|145010249|gb|EDJ94905.1| MGG_08626 [Magnaporthe grisea 70-15]
  misc_feature (7)..(401): NCBI GI: 85102286 Blast Desc: NCU04153 [Neurospora crassa OR74A] gi|16944407|emb|CAC28752.2| related to pseudouridine synthase [Neurospora crassa] gi|28922852|gb|EAA32073.1| NCU04153 crassa
  misc_feature (1)..(405): NCBI GI: 171693971 Blast Desc: protein product [Podospora anserina] gi|170946934|emb|CAP73738.1| protein product [Podospora anserina]
  misc_feature (11)..(403): NCBI GI: 154305357 Blast Desc: BC1G_08973 [Botryotinia fuckeliana B05.10] gi|150853715|gb|EDN28907.1| BC1G_08973 [Botryotinia fuckeliana B05.10]
  misc_feature (11)..(402): NCBI GI: 156041108 Blast Desc: SS1G_11533 [Sclerotinia sclerotiorum 1980] gi|154695916|gb|EDN95654.1| SS1G_11533 [Sclerotinia sclerotiorum 1980]
  misc_feature (12)..(401): NCBI GI: 119174546 Blast Desc: CIMG_09255 [Coccidioides immitis RS]
  misc_feature (12)..(401): NCBI GI: 240106869 Blast Desc: TruB family pseudouridylate synthase containing protein [Coccidioides posadasii C735 delta SOWgp]
MATSGAASRPILDGVFGINKPVGMSSAQVIRDVQHHFNPSALFKPMIDNEIATRKQESNSSRKKRRFGKNDIRVKMGHGGTLDPLASGVLILGVGKGTKQLQGFLDCTKTYETVVLFGASTDTYDRVGKILKKTAYDHITRPMVEEALNGFRGTFQQVPPLYSALKMEGKPLYEYAREGKPIPREIATREVTVTELELVEWYEPGTHNHRWPAEEATNFERSFAEQVWKVEKDQMTNPKLTPEEEEADSKARDEHENFKRKADESVDALVYDRSSKRKKNNNHREPPMMSGALGTMPPVPGKGSNLIPDAPDADTPPPWSDKGPPAARIRMTVTSGFYVRSFCHDLGTKVSSSACMAELCRSRQRDFVLGSPNCMEYSDLAKGEEIWGPRVKEMIDQWNSQSHDITPHAANRAKKNVRPSNGDPKRRVEEEPKEPEQNDNKIQRRSRSQSPPRAKDSPKRASSPVRTKETDDESWHGFADTPKEALGQA

SEQ ID NO: 29665 - DNA, 3594 bp, Muscodor strobelii
  misc_feature: SGI EST ID NO. CUFF.70359.2
  misc_feature: Variant of the nucleotide sequence at SEQ ID NO 29663
caggaaacttattagttagatagttgtgtacaatggtgcctttggtgaaatgtgacagcacgaagatggcttgctcatctagtcgatcgtaggcttcgtcgaggacgagcccatcgccggagcgcaaagcatatttgaaaaggagctcctccaagtcaattttgtacctcttcttagatttacgagacttggcgagttcttcctcgtaggcgtctaggagggcgaagtgaaggcagacggcctggaacatgaggtcgcagatggggcggtactgttgggagggcacgatctcgaaccagcctccctggccactggcccagacgatgggggcactcccgctctcgtcgcaggctatcgagaacttgctggaggcctcgatctggatgcggtgggacttggaccgcatgttcctgttgacgagatactgttcggtgtctttgtcggtctcgaggatgccgcggacgatgaagggcccttcgagctcggcattgagctggttggcgaaggtgccatcgcggtgatagacggcggcgtcggtgagggtgaagcagggccaatcgtcgaagtgctgggtggcaggggcgggcctgagaatggcggtctctttgtagtgtgtgatattggactggtcgatggtagcgacggtcgaggtggaagatgcgcgcttcctgcgtccggccatggtgatggcgggggatgcgccggagcgactgggaggatcaaatgccaatcgacgagttgcaggagtgattggagagttccggagatctagtctgagcaataaagatagatatgggagacgacgaaaagatatggacggtgaggaggggaattgatgttgtgtgggtgacggagtagtggaaagcgagcaagcgcaatggtgggttgcttgcccaagacacacggagacaatgtgctgcgaaactatgagtattgtcatgcgggagacgcgccgcggtgtcttcccgctgctgcacggcaactgctactgggactaccacttaacgcgacatccagagcaagttaagtgcaaccgcaaagccaacaggtaccctccgaacaatctaagtacaaagctgctacgaccccaccaaaggttgtaccctctcatggaaagtgctgctagtagtacagtgaaacttgtacagctacttgaactaccaatcaatcgataagcacctgcccgccaaatttgttcctgtcagctcaattgcagcgcatttttctttccatctgaagcaccgcacataagccagagacagcctcaggtcccgccggtgtcacctgcttaaaacacctgcagacttcaaagtctgtcgcgacctccagtcctctcttcttgcgcgccttcgtctgtcttcctgcgaaggttactttggtagcaagacgcaagatcctctccgcctggaggtgcttcggggaaactcaattactctcttcgtaaacgagactttccccagggcctccttatcgcatacacctaccactttcgaatgcagcctgcgcggattatcaagatggccacatccggcgctgcttcacgacctattctggacggtgtcttcggtattaataaacccgttggcatgagttctgctcaagtcattcgagatgtccagcaccatttcaacccgtcggctctgttcaagcctatgatcgacaatgagattgccaccaggaagcaagagtccaacagctcgagaaagaagcgccgattcggcaagaatgacattcgggtgaagatgggtcacggaggtactcttgaccctctcgcttcaggcgtactgattctcggtgtcggaaagggaaccaaacagttgcagggtttcctagattgcacaaagacttacgagacggtggtcttgttcggtgccagtactgatacctacgatcgcgttggcaagatcttgaagaagactgcttatgaccatatcacccgacccatggtcgaagaagcactcaatggctttcgaggcacattccaacaagtgccgccactatattcggctctcaagatggagggaaagcctctatacgagtacgctcgagagggcaagccaattccccgcgagattgccactagggaagtcaccgtcacagagctcgaattggtcgagtggtacgaacccggtacgcacaatcaccgatggcccgcggaggaagccacgaatttcgagcgcagcttcgccgagcaggtctggaaggtggagaaggatcaaatgaccaacccaaagctcacgcccgaagaggaggaggccgacagtaaagctcgagacgaacacgagaactttaagaggaaggctgacgagagcgtagatgctcttgtctatgaccgctctagcaagcgcaagaagaataataaccatcgggaaccgcccatgatgtcgggcgcactcggcactatgccccctgtgcctggcaaaggatcaaacctcatcccggatgcgccagatgcggacacacctcctccctggagtgacaaaggcccaccggctgcgaggatacgaatgacagtaacgtcaggtttctatgttcgcagtttctgtcatgacctgggcacaaaggtttcttcctctgcttgcatggcagagctatgtaggagtcggcagcgtgacttcgttctcggctccccgaattgcatggagtattccgatctggcgaaaggtgaagagatatggggacctagggtgaaagagatgatagaccagtggaactctcagagccatgatatcactccacacgctgccaacagggcgaagaagaatgtacgcccgtcgaatggagatccgaagcgtagagtagaggaggagccaaaggaaccagaacagaacgacaacaagatccagcgcagatcgcgatcgcaatcgcctccaagggccaaggactctccgaagcgggcttcgtcaccagtccgcactaaggagacggatgatgaatcctggcacggttttgcagacacacccaaggaggcactgggccaggcttaatttgctacagaaccgtttcattcacatctgcgatggccgcgatttgatacctcttgagctggtccatctaaagggttctagccagccagtactacggtgcacctcacagtccggctcgagatacgaggactacggtacggatggcttgtactcgagcaaaagtactctaagcaggagccgaaattgcatctgttgaggtggtcaacgagagccgcgagtgcacagaaatcgtaaatacgggccccaggaacgatctcaccgacgatgtagccctatacttgccgaccattgtgaatgaatccaactcgatttcgccttatataatgcgaagacggtgcctgatctattagacagacgggtttacagagatgatgacatcgcattctgtaagccgagagcttcgctagaagtattgccatacctggcaagagagaagaatgacttttatattgcatcagcaaggcgttggctggacaagttgatttcatgagcattttcataagatgtatgatgattagtgctctactacctaagttccgtatgcagatatacttgatcttcaagtgattaaatcgtgaggattagagtagagaatcataatgtccaa

SEQ ID NO: 29666 - DNA, 1410 bp, Muscodor strobelii
  misc_feature: SGI cDNA ID NO. 570191
  misc_feature: Reduced expression when VOC is produced
  misc_feature: Encodes the peptide sequence at SEQ ID NO 29667
atgccgccccctcccgcgagtgagacacccgggacgcgctccgttcgttcgacctcatccgcctctcgaaacgccaacagactctcattgacgctgccgattgcgccgcctaatgcctttccttcgcgacccatgccaacaggatcgatgccaccaacgcccatcgacacttcagctttgacttctccggtggactcaaatggcttcatcattgcaatcgcggcacaagaacgccgtgtttttgagctgcgagaggagcttaataaggctgaaactgaactcaaaagattacaacgacaatggaccattgcagaaagttgcaagatgcggccatctaatgtgacggccgaacccttgcggagcgcggcgacgggtgccagtctattgagcgacgatgatgatagtcccacgtcgaggcgcaagactgagctggagaggaggaaggcgattctactagcacagagtcagaatacaccgcgagagagcaggcggaaggtgattcgtggtggtcatgctcgcacactatcgctgctttcgccaacaaaaacagtcgggtctgctggggatgttaccattcatgaagaccaagacatactccattcaccaggatcttactcgagccaatcgcccgtgatgccccctttgagcaaacgtgcaacatgggcgccacggcagacacaacatcaatcgaccccatcgaacaccggggtcaagcagcttgcaaatgactttagacaaggactctggacgtttgtggaagatttgaggcaagcaaccgtgggtgatgaaggtatctcaagcacgacaaataggactagcgatatgaagacaaggccaaacagaatggacgacaatcaagacaccatacgcgcatctacggcaggtcgtggtcgtattcccttcgagaccgatctcgactcgccggatgattctccgtctaaaccatccaaggggagcttcagcgatcgcgctcagcatcaacgaacggattcaaagatggaaagtcgtgctaggaaacacttttcatggacgccgctcacgttcgagaatttcgatgacgacgattggtccaattgggatacgcctaatgtgaaatccacgagatggagtggaagtaccgtgagcggcgatattgtttccgcagttcccgacagaactgacgaacatgaggctacagggacaacattgagacgaaagcgctcgagaacaccattgcgaacaacagatagtccgaaaactcctagtaaactggaggagttgccccaggctatcttgaatcgcctcacgccaagcaacatcaagaccacgacctcaaacttcatcaaagaatgggagaagagcctgagcccacctgcggactcggaaacgtttaattcggagttgcatgatttcacgcatagtacgcagtaa

SEQ ID NO: 29667 - protein, 469 aa, Muscodor strobelii
  misc_feature: SGI Peptide ID NO. 570191
  misc_feature (13)..(451): NCBI GI: 261355596 Blast Desc: conserved [Verticillium albo-atrum VaMs.102]
  misc_feature (26)..(451): NCBI GI: 171692919 Blast Desc: protein product [Podospora anserina] gi|170946408|emb|CAP73209.1| protein product [Podospora anserina]
  misc_feature (12)..(453): NCBI GI: 116199087 Blast Desc: CHGG_07699 [Chaetomium globosum CBS 148.51] gi|88178978|gb|EAQ86446.1| CHGG_07699 [Chaetomium globosum CBS 148.51]
  misc_feature (1)..(451): NCBI GI: 46125273 Blast Desc: FG07014.1 [Gibberella zeae PH-1]
  misc_feature (1)..(451): NCBI GI: 256731409 Blast Desc: NECHADRAFT_23720 [Nectria haematococca mpVI 77-13-4]
  misc_feature (13)..(446): NCBI GI: 18376301 Blast Desc: [Neurospora crassa]
  misc_feature (10)..(453): NCBI GI: 156050247 Blast Desc: SS1G_07710 [Sclerotinia sclerotiorum 1980] gi|154692111|gb|EDN91849.1| SS1G_07710 [Sclerotinia sclerotiorum 1980]
  misc_feature (49)..(452): NCBI GI: 145612089 Blast Desc: MGG_08088 [Magnaporthe grisea 70-15] gi|145019329|gb|EDK03557.1| MGG_08088 [Magnaporthe grisea 70-15]
  misc_feature (21)..(450): NCBI GI: 145233659 Blast Desc: An02g10730 [Aspergillus niger] gi|134057134|emb|CAK44422.1| protein product [Aspergillus niger]
  misc_feature (22)..(450): NCBI GI: 255955503 Blast Desc: Pc21g14910 [Penicillium chrysogenum Wisconsin 54-1255] gi|211590215|emb|CAP96388.1| Pc21g14910 [Penicillium chrysogenum Wisconsin 54-1255]
  misc_feature: Useful for introducing or modulating the production of volatile compounds
MPPPPASETPGTRSVRSTSSASRNANRLSLTLPIAPPNAFPSRPMPTGSMPPTPIDTSALTSPVDSNGFIIAIAAQERRVFELREELNKAETELKRLQRQWTIAESCKMRPSNVTAEPLRSAATGASLLSDDDDSPTSRRKTELERRKAILLAQSQNTPRESRRKVIRGGHARTLSLLSPTKTVGSAGDVTIHEDQDILHSPGSYSSQSPVMPPLSKRATWAPRQTQHQSTPSNTGVKQLANDFRQGLWTFVEDLRQATVGDEGISSTTNRTSDMKTRPNRMDDNQDTIRASTAGRGRIPFETDLDSPDDSPSKPSKGSFSDRAQHQRTDSKMESRARKHFSWTPLTFENFDDDDWSNWDTPNVKSTRWSGSTVSGDIVSAVPDRTDEHEATGTTLRRKRSRTPLRTTDSPKTPSKLEELPQAILNRLTPSNIKTTTSNFIKEWEKSLSPPADSETFNSELHDFTHSTQ

SEQ ID NO: 29668 - DNA, 2922 bp, Muscodor strobelii
  misc_feature: SGI EST ID NO. CUFF.70213.0
  misc_feature: Variant of the nucleotide sequence at SEQ ID NO 29666
ggggaacccagagcggagagcagcaagacgaaacctaggaaacagtcgaatcaatccgatcaaaataaacggtgcgagcaaaacacgaaatgactccctcatcatcgtcatattaataggctcccctccttattaatgtggtgaaccctgacttcttctcatctgacgaaattgatactactccgccctcatatacacaatcaatgctgttcagcccagtccttcctttcgcctgaccgctctttatgacctagctccgagcaagatcaacattgtttatgctgtggcaactctcgctcgaatcgcaacttgttgtattcccacacatattcgtagaaagcaattcttcattttcctcttcatagacaacaaccactcaacagcttttctctttctcgtcacccacaccaaggcgcggatattggatccatcagctcgcttgtagccgttcgccatccttattcgtcgcctgttataccctcagctcccctgtcctggcaacccttccccctatcagaagagctatcggatcgagaatcgacgtagcatcggcctgcaggtaccaaccaagttcaacgcttctcttccaaattgtgcccaaagcaggtcttgtttaccccaaggtcattgtagttttacgccttaatcttcaccatctgcttttatcgctgatggtggattttatggcttggctacaattcattcccactgtccatgaaacctaagcaacttctgcaaatttgttcgattacatcctcctccgcgtctctctccgacgatagaaatatcaacagtatcatcagcgctctccattcaagaagaacaacgactttgggcaggcaccaaaggtaccgccgtgtgccgtccgctccctcagcaaattcatttaaccatcccaatcgacaataccgacgacgagcaattggcgagcctactaattgccgttccatacagagactcttacggccgtctgtctggggcgatatgggcttggaacgccgtctctcacgtgcttctccaaacacaactgtgtctcttgatgcagtcgtgaatgcgtcaagtaccgatctagggcccagcgaaccagatacagccactgcttcatcaacctcgccttacactagccatggtgaaggtgagcagagaaccgaagatggatcaaacctctcagacacagcatcgctagcttccatgccgccccctcccgcgagtgagacacccgggacgcgctccgttcgttcgacctcatccgcctctcgaaacgccaacagactctcattgacgctgccgattgcgccgcctaatgcctttccttcgcgacccatgccaacaggatcgatgccaccaacgcccatcgacacttcagctttgacttctccggtggactcaaatggcttcatcattgcaatcgcggcacaagaacgccgtgtttttgagctgcgagaggagcttaataaggctgaaactgaactcaaaagattacaacgacaatggaccattgcagaaagttgcaagatgcggccatctaatgtgacggccgaacccttgcggagcgcggcgacgggtgccagtctattgagcgacgatgatgatagtcccacgtcgaggcgcaagactgagctggagaggaggaaggcgattctactagcacagagtcagaatacaccgcgagagagcaggcggaaggtgattcgtggtggtcatgctcgcacactatcgctgctttcgccaacaaaaacagtcgggtctgctggggatgttaccattcatgaagaccaagacatactccattcaccaggatcttactcgagccaatcgcccgtgatgccccctttgagcaaacgtgcaacatgggcgccacggcagacacaacatcaatcgaccccatcgaacaccggggtcaagcagcttgcaaatgactttagacaaggactctggacgtttgtggaagatttgaggcaagcaaccgtgggtgatgaaggtatctcaagcacgacaaataggactagcgatatgaagacaaggccaaacagaatggacgacaatcaagacaccatacgcgcatctacggcaggtcgtggtcgtattcccttcgagaccgatctcgactcgccggatgattctccgtctaaaccatccaaggggagcttcagcgatcgcgctcagcatcaacgaacggattcaaagatggaaagtcgtgctaggaaacacttttcatggacgccgctcacgttcgagaatttcgatgacgacgattggtccaattgggatacgcctaatgtgaaatccacgagatggagtggaagtaccgtgagcggcgatattgtttccgcagttcccgacagaactgacgaacatgaggctacagggacaacattgagacgaaagcgctcgagaacaccattgcgaacaacagatagtccgaaaactcctagtaaactggaggagttgccccaggctatcttgaatcgcctcacgccaagcaacatcaagaccacgacctcaaacttcatcaaagaatgggagaagagcctgagcccacctgcggactcggaaacgtttaattcggagttgcatgatttcacgcatagtacgcagtaagtttgatgtaccaggctatgataggcataatgaagcgctttggtcgtttggcatgagcattttggagtttctgcttaggtgtttcgagtatttggatgtggtagctctctaaagagtggggattgtagtagatgtggttgtaagatgagattcgggctttggggatgggatggaggaagaactcgttacatagcattagacgactaatgaccgctcaagacgctaacgacagatttatgtatgtaatggcatgtctgcttaatgaaatacaaagtcgttttcgcgtttccggcaccacacatagactcacttctaagcccc

SEQ ID NO: 29669 - DNA, 3039 bp, Muscodor strobelii
  misc_feature: SGI cDNA ID NO. 570192
  misc_feature: Encodes the peptide sequence at SEQ ID NO 29670
atgccatttctttatacttatatatgcgatctacttcaagacctcgaagatgaactacaaaagccagcaaagaggcgaacggaccccgaaaccattcttgaaacttggtttcgcaaacgcaggtcattgttgaatgtagctggtaatgatgacagcgctattctctctactttgctccccgaccgcagaacagatcgtgtatactacatacaatcgtccagattacagagtatatttggtcggatacatggcatacaacagtctcgactccgagagctaaggcgttacctggatccgggctctggccttgatcttgccgaatgcatcgaggatatcttaagagtgacgcctaattgccatggtggcataggtaaagtcagtgtagaagagatcgacgacgtgcttagccgcatagcagcggcatgtcgattcagttcaccagctgttcaagccctaccaaaaatttcacatcgtgatgctgtagacgacgctcttggtcgtatctacttgcgtctcagtgcacgcgacgcaaaatggtttacgagattggtcttgaaagtctatcagcctgtagtcattaacgctgaagctatatatcggaattatcactacctcctaccgcagatcatgaaaacacggaacgatctctctgctgttacgacacttctacaagaaatcagatcatcaactgatgaaccaagtgttattgcgaatgtacttaagccacaaatcggtaccaagatcgaaaggcagccttggtggaaaggacgaagcatcaagcactgcatgaacatgatacgtgatcgcgaggtcatctgtgaacaaaagatagatagagagtactgccagatccacgtcgacctttccaaatcttcaaagcctattcaaatcttctccaagagtggaaaggacagtaccttggaccggcacaatttgcacagcgccattcgaaattctttgaaactcggtcggaaagactgtcctctgaagaaaggctgcatcctcgaaggagagcttgttgtctatagtacattggaaaagaagattcttccctttcataaaattcgcaagcatgtgaaccgttcgggttctttcttaggcaccaaaaatgattcacagccgcataaccacgaacacctcatgatcatatactacgatgtgctgttgattgatggcacctctttactcgatgtcaagaattctgaacgctttgagagattaaacagcattatcaccccacgacaaggttatgcggaattcatctctcgtacagtcataaagacctccaagccaagggctgcagagcaattacgagagatttttgcacagtgtatcctcgcccgtggggagggtatagttataaagcctgacgagccgtattttgacttctcacgcacaagaatacccttcaggtgtgggaacatcaaattgaaaaaagaatacatggagggttgtggcgatgtgggtgattttgctgttgttggcgcatcgtacgacccagcaacagcgaaaaaatatggcatcagcaatgttcaatggacacacttttatattggctgtcttgaaggcgagagcaaggctcaagatctagccaacactcccaaatttcgtgtcaccaataccgtcgagctctcggggccactgctacgggagttctggatccagcccgcactagtttcagtgccgtatggtgagcacaacggaatcagcctctcttttacatatacacccagtgtaaagaggccggctgtcgtatttcctgagcctttggtctttgatatgcgctgctttgcattcgataaagagccaaatacaaacttctggagcatgcgattcccccaggtctccaagatccattatgatcgatcataccgcgatacaatctcattcaacgagttgcaggcgattgctgaaaaagcaagagagatcccagatgaagaagatagccaggagatgaggcaatgggttgctaaactagagaggctagatcgtcgtggcaacaacgcagaaagagcaagtcaaagcagcacaacagcagtgacttctctctcgtccttatctacaagctcatctgaacctagctctcactcagcttcagatcatctgccaactcccccaatttcatctcttccggaagcatcatactcgtcgatagatgacgaaaacactcccacacctaccgcaagcatgagtgcaaataaacgatccagcactggagtcctagagacgaagaattctatcaagcggccgaaaagacagtctgatacaacgtcgacacagtcatcacaagaaaccccatcaatagcgaacacttctattcgttcggaccatcgagaacctctcagtcaagttgatggaaacgtgccggaacaaaaggactctggccgtccgcttccaccgcttccacctgcgcccttgagatatcaggctgccaagcccatacttaagaacgatgggtcttcttcgcccgctgattatcagactgcgtcagagatgagatcttcgtcaccgatcaggactaatactcccatacctcgaccagctgtcagccgaactcagagcaccttgtccaatgcggaatttccggcgtatgcatgcgcaggtgccggcagcaaatgtctttttgccaactgctcggttctagtctcgccatgtatatcgggctattcgtggatcatggatgacttattcaagcatcatggcattacaaattatcttcttgaccctcgcgtgtggaagcttccggaagaaaaccaagatgatgccactacacaggtggacatcgccacccaatctgccgaggaatctacacagcagaataaacgacgaacacgcaagatctgcctcgtcgaaccccgacgagaagaagccacagaggctttcatccagatggtggaggatgccaacctccaaagaagcggcggcaagcgcgactgggtgacggtctacgactggcgaatccttgagtttatgaaagaacaggaggagaagcccagcgtcaaagatccgtggcgcaagttctatctcaccattgcatag

SEQ ID NO: 29670 - protein, 1012 aa, Muscodor strobelii
  misc_feature: SGI Peptide ID NO. 570192
  misc_feature (264)..(478): Pfam Id: PF01068 Pfam Desc: ATP dependent DNA ligase domain
  misc_feature (331)..(460): Pfam Id: PF01068 Pfam Desc: ATP dependent DNA ligase domain
  misc_feature (1)..(1012): NCBI GI: 116206358 Blast Desc: CHGG_02472 [Chaetomium globosum CBS 148.51] gi|88183069|gb|EAQ90537.1| CHGG_02472 [Chaetomium globosum CBS 148.51]
  misc_feature (1)..(988): NCBI GI: 7635836 Blast Desc: conserved [Neurospora crassa]
  misc_feature (3)..(995): NCBI GI: 39970037 Blast Desc: MGG_10627 [Magnaporthe grisea 70-15] gi|145010073|gb|EDJ94729.1| MGG_10627 [Magnaporthe grisea 70-15]
  misc_feature (1)..(1012): NCBI GI: 256731020 Blast Desc: NECHADRAFT_48724 [Nectria haematococca mpVI 77-13-4]
  misc_feature (25)..(695): NCBI GI: 238502857 Blast Desc: ATP dependent DNA ligase domain protein [Aspergillus flavus NRRL3357] gi|220691472|gb|EED47820.1| ATP dependent DNA ligase domain protein [Aspergillus flavus NRRL3357]
  misc_feature (1)..(665): NCBI GI: 242791496 Blast Desc: ATP dependent DNA ligase domain protein [Talaromyces stipitatus ATCC 10500] gi|218718357|gb|EED17777.1| ATP dependent DNA ligase domain protein [Talaromyces stipitatus ATCC 10500]
  misc_feature (1)..(1009): NCBI GI: 46125271 Blast Desc: FG07013.1 [Gibberella zeae PH-1]
  misc_feature (1)..(828): NCBI GI: 240109439 Blast Desc: ATP dependent DNA ligase domain containing protein [Coccidioides posadasii C735 delta SOWgp]
  misc_feature (1)..(665): NCBI GI: 119182912 Blast Desc: CIMG_06451 [Coccidioides immitis RS]
  misc_feature (58)..(689): NCBI GI: 169776165 Blast Desc: [Aspergillus oryzae RIB40] gi|83771284|dbj|BAE61416.1| protein product [Aspergillus oryzae]
  misc_feature (32)..(646): SWISSPROT Homolog: EC 6.5.1.1 DNA ligase (ATP)
MPFLYTYICDLLQDLEDELQKPAKRRTDPETILETWFRKRRSLLNVAGNDDSAILSTLLPDRRTDRVYYIQSSRLQSIFGRIHGIQQSRLRELRRYLDPGSGLDLAECIEDILRVTPNCHGGIGKVSVEEIDDVLSRIAAACRFSSPAVQALPKISHRDAVDDALGRIYLRLSARDAKWFTRLVLKVYQPVVINAEAIYRNYHYLLPQIMKTRNDLSAVTTLLQEIRSSTDEPSVIANVLKPQIGTKIERQPWWKGRSIKHCMNMIRDREVICEQKIDREYCQIHVDLSKSSKPIQIFSKSGKDSTLDRHNLHSAIRNSLKLGRKDCPLKKGCILEGELVVYSTLEKKILPFHKIRKHVNRSGSFLGTKNDSQPHNHEHLMIIYYDVLLIDGTSLLDVKNSERFERLNSIITPRQGYAEFISRTVIKTSKPRAAEQLREIFAQCILARGEGIVIKPDEPYFDFSRTRIPFRCGNIKLKKEYMEGCGDVGDFAVVGASYDPATAKKYGISNVQWTHFYIGCLEGESKAQDLANTPKFRVTNTVELSGPLLREFWIQPALVSVPYGEHNGISLSFTYTPSVKRPAVVFPEPLVFDMRCFAFDKEPNTNFWSMRFPQVSKIHYDRSYRDTISFNELQAIAEKAREIPDEEDSQEMRQWVAKLERLDRRGNNAERASQSSTTAVTSLSSLSTSSSEPSSHSASDHLPTPPISSLPEASYSSIDDENTPTPTASMSANKRSSTGVLETKNSIKRPKRQSDTTSTQSSQETPSIANTSIRSDHREPLSQVDGNVPEQKDSGRPLPPLPPAPLRYQAAKPILKNDGSSSPADYQTASEMRSSSPIRTNTPIPRPAVSRTQSTLSNAEFPAYACAGAGSKCLFANCSVLVSPCISGYSWIMDDLFKHHGITNYLLDPRVWKLPEENQDDATTQVDIATQSAEESTQQNKRRTRKICLVEPRREEATEAFIQMVEDANLQRSGGKRDWVTVYDWRILEFMKEQEEKPSVKDPWRKFYLTIA

SEQ ID NO: 29671 - DNA, 690 bp, Muscodor strobelii
  misc_feature: SGI cDNA ID NO. 570193
  misc_feature: Encodes the peptide sequence at SEQ ID NO 29672
atggcgcccaaaagcgagtccgtcggcggtctctcccgcatcatgatcataatctccgtcattctcaccatcttcgtacctgtctacctcttgctcgaggagaacctcgagaaattctacattttcaagccctccgaacttcacgacctcgcacagcgcggaattgcccacggtggaaacgatactagcgcaattgtgaaatatatcgtcgacgagcttatcgagaaacaccccaatcacattaacccggctcacgatgttgctgaggagtggttcttcaacaacgctggtggcgctatgggcggcatgtacatcatccatgccagcgtaacggaatacctaattatcttcggaacaaccatcggcaccgagggacacaccggccgccacaccgccgacgactacttccacattctaaccggcgagcaatgggcctacgcacccggcgacttcaagcccgaggtctacgcccccggttccgtccaccacttgcaccgcggcaccgtcaagcagtacaagatgcccgagaactgctttgcgctcgagtacgctcgtggttggatcccgcccatgatgttctttggcttcgccgatggactatcctccacactcgatttgcatacgctgtggcgcacgagctatattactggccgtgagatgatcggaaacttgttgattggcaagttttaa

SEQ ID NO: 29672 - protein, 229 aa, Muscodor strobelii
  misc_feature: SGI Peptide ID NO. 570193
  misc_feature (13)..(229): Pfam Id: PF04622 Pfam Desc: ERG2 and Sigma1 receptor like protein
  misc_feature (19)..(229): NCBI GI: 164426517 Blast Desc: C-8 sterol isomerase [Neurospora crassa OR74A] gi|67476925|sp|Q92254.2|ERG2_NEUCR RecName: Full=C-8 sterol isomerase; AltName: Full=Delta-8--delta-7 sterol isomerase C-8
  misc_feature (19)..(229): NCBI GI: 1575320 Blast Desc: C-8 sterol isomerase [Neurospora crassa]
  misc_feature (18)..(229): NCBI GI: 116197971 Blast Desc: CHGG_07141 [Chaetomium globosum CBS 148.51] gi|88178420|gb|EAQ85888.1| CHGG_07141 [Chaetomium globosum CBS 148.51]
  misc_feature (11)..(229): NCBI GI: 39947737 Blast Desc: C-8 sterol isomerase [Magnaporthe grisea 70-15] gi|462023|sp|P33281.1|ERG2_MAGGR RecName: Full=C-8 sterol isomerase; AltName: Full=Delta-8--delta-7 sterol isomerase C-8
  misc_feature (9)..(229): NCBI GI: 46125875 Blast Desc: FG07315.1 [Gibberella zeae PH-1]
  misc_feature (11)..(228): NCBI GI: 212540206 Blast Desc: C-8 sterol isomerase (Erg-1), [Penicillium marneffei ATCC 18224] gi|210067557|gb|EEA21649.1| C-8 sterol isomerase (Erg-1), [Penicillium marneffei ATCC 18224]
  misc_feature (3)..(229): NCBI GI: 261355602 Blast Desc: C-8 sterol isomerase [Verticillium albo-atrum VaMs.102]
  misc_feature (15)..(224): NCBI GI: 154318271 Blast Desc: C-8 sterol isomerase [Botryotinia fuckeliana B05.10] gi|150842826|gb|EDN18019.1| C-8 sterol isomerase [Botryotinia fuckeliana B05.10]
  misc_feature (15)..(224): NCBI GI: 156053141 Blast Desc: C-8 sterol isomerase [Sclerotinia sclerotiorum 1980] gi|154704516|gb|EDO04255.1| C-8 sterol isomerase [Sclerotinia sclerotiorum 1980]
  misc_feature (13)..(228): NCBI GI: 115390859 Blast Desc: C-8 sterol isomerase [Aspergillus terreus NIH2624] gi|114193858|gb|EAU35558.1| C-8 sterol isomerase [Aspergillus terreus NIH2624]
MAPKSESVGGLSRIMIIISVILTIFVPVYLLLEENLEKFYIFKPSELHDLAQRGIAHGGNDTSAIVKYIVDELIEKHPNHINPAHDVAEEWFFNNAGGAMGGMYIIHASVTEYLIIFGTTIGTEGHTGRHTADDYFHILTGEQWAYAPGDFKPEVYAPGSVHHLHRGTVKQYKMPENCFALEYARGWIPPMMFFGFADGLSSTLDLHTLWRTSYITGREMIGNLLIGKF

SEQ ID NO: 29673 - DNA, 2460 bp, Muscodor strobelii
  misc_feature: SGI EST ID NO. CUFF.70228.0
  misc_feature: Variant of the nucleotide sequence at SEQ ID NO 29671
gcagatttggaataagcagcttatgccgtcgtttactacgtcgtaaatgcgagcgcctatcgcattcgtacgacacaatctttttctgctgaattcctctcaatacctacttctataccattcactcatttggttctattttcccagtctttcctttaagttttgagtaaatcttgtaatacacgatggcgcccaaaagcgagtccgtcggcggtctctcccgcatcatgatcataatctccgtcattctcaccatcttcgtacctgtctacctcttgctcgaggagaacctcgagaaattctacattttcaagccctccgaacttcacgacctcgcacagcgcggaattgcccacggtggaaacgatactagcgcaattgtgaaatatatcgtcgacgagcttatcgagaaacaccccaatcacattaacccggctcacgatgttgctgaggagtggttcttcaacaacgctggtggcgctatgggcggcatgtacatcatccatgccagcgtaacggaatacctaattatcttcggaacaaccatcggcaccgagggacacaccggccgccacaccgccgacgactacttccacattctaaccggcgagcaatgggcctacgcacccggcgacttcaagcccgaggtctacgcccccggttccgtccaccacttgcaccgcggcaccgtcaagcagtacaagatgcccgagaactgctttgcgctcgagtacgctcgtggttggatcccgcccatgatgttctttggcttcgccgatggactatcctccacactcgatttgcatacgctgtggcgcacgagctatattactggccgtgagatgatcggaaacttgttgattggcaagttttaaaggatgggatactagaagatagattgcttccggcccaattttcacataatacgctacctcgtactgggatcatagagaacgggaagaggggccctggcttgtatttggagccacttcactactaattcactgttcatatttggatttgtagaaggtatatagaaaatttttagaaccctacgatgaatgtcatcactaagcagcatgagtaagtgggaaatgaatcgcagtctatttacaacccaggtctatccttcatcaactcctctacgcctagaaagcaaatctaagcgccatgatggatattcctgggtctatgtacctatacaatgcaaatgcaaatgcccattgtaatgcaacgcctcggaaatgcagcatctcgctatgcaatggtgagatagaacttgcgccacggatctttgacgctgggcttctcctcctgttctttcataaactcaaggattcgccagtcgtagaccgtcacccagtcgcgcttgccgccgcttctttggaggttggcatcctccaccatctggatgaaagcctctgtggcttcttctcgtcggggttcgacgaggcagatcttgcgtgttcgtcgtttattctgctgtgtagattcctcggcagattgggtggcgatgtccacctgtgtagtggcatcatcttggttttcttccggaagcttccacacgcgagggtcaagaagataatttgtaatgccatgatgcttgaataagtcatccatgatccacgaatagcccgatatacatggcgagactagaaccgagcagttggcaaaaagacatttgctgccggcacctgcgcatgcatacgccggaaattccgcattggacaaggtgctctgagttcggctgacagctggtcgaggtatgggagtattagtcctgatcggtgacgaagatctcatctctgacgcagtctgataatcagcgggcgaagaagacccatcgttcttaagtatgggcttggcagcctgatatctcaagggcgcaggtggaagcggtggaagcggacggccagagtccttttgttccggcacgtttccatcaacttgactgagaggttctcgatggtccgaacgaatagaagtgttcgctattgatggggtttcttgtgatgactgtgtcgacgttgtatcagactgtcttttcggccgcttgatagaattcttcgtctctaggactccagtgctggatcgtttatttgcactcatgcttgcggtaggtgtgggagtgttttcgtcatctatcgacgagtatgatgcttccggaagagatgaaattgggggagttggcagatgatctgaagctgagtgagagctaggttcagatgagcttgtagataaggacgagagagaagtcactgctgttgtgctgctttgacttgctctttctgcgttgttgccacgacgatctagcctctctagtttagcaacccattgcctcatctcctggctatcttcttcatctgggatctctcttgctttttcagcaatcgcctgcaactcgttgaatgagattgtatcgcggtatgatcgatcataatggatcttggagacctgggg

SEQ ID NO: 29674 - DNA, 939 bp, Muscodor strobelii
  misc_feature: SGI cDNA ID NO. 570194
  misc_feature: Encodes the peptide sequence at SEQ ID NO 29675
atgcccgatcgcaacgccaaaaaagttacatcatctggtcgcagaaaccgacaccacagatcgaaaaagggccgggtccaaggcaacgccaaacaacgagagctcgcgcagaagaagcgcaggttcaaggatcatcgcgataacgtattctcctacaagaatcacttcgacgcccgcgcatacagtctcatgacggccatggcccaggtccaacccaacgaaatcgcggccccaggtcagtttctgggccccgcggccaagtacatcgcggggcctggtacgcatatccacgaagccaatctctactcttcgctcttgggacacatcagcatcacccaacccgagaagtctaccgtcccggcgaagcgtatccatcgcatctctgcactcagctcttcaactccgaatgctctatctactgtgtctgtcacgccggcagcggctggcggagagcaggacaaacgcgaggtccttcccgaagtcggcaacattgtgctctgtcgcgtgacgagaatcacaccacgcgaggctactatgtctattctcattgttggtgatgccgtcctttcggcgcagtggcagggtatcgtgcgggtacaggatgtgcgagcgacggagaaggacagagttaagatctacgagagcttcaggcctggcgatattgtccgggcacaggtgatctctctaggtgatcaggcaaactactaccttacgactgcggccaatgagcttggtgtcgtgatggctacgagcgaagctggcaatacgatgtatcccgtcagctggaaggagtataaagacagcgagaccggtctgagcgaggcgaggaaggttgcgcggccaatgtgcagatacgcattagatcttgaatcatcacgacacgatagtttcaagacgcatagtcttgagacgtgggagggctacgtgcaacagctttag

SEQ ID NO: 29675 - protein, 312 aa, Muscodor strobelii
  misc_feature: SGI Peptide ID NO. 570194
  misc_feature (75)..(281): NCBI GI: 85102296 Blast Desc: NCU04155 [Neurospora crassa OR74A] gi|12718206|emb|CAC28750.1| conserved [Neurospora crassa] gi|28922854|gb|EAA32075.1| NCU04155 [Neurospora crassa OR74A]
  misc_feature (67)..(281): NCBI GI: 39947780 Blast Desc: MGG_08628 [Magnaporthe grisea 70-15] gi|145010251|gb|EDJ94907.1| MGG_08628 [Magnaporthe grisea 70-15]
  misc_feature (75)..(281): NCBI GI: 171693975 Blast Desc: protein product [Podospora anserina] gi|170946936|emb|CAP73740.1| protein product [Podospora anserina]
  misc_feature (75)..(282): NCBI GI: 154310662 Blast Desc: BC1G_06805 [Botryotinia fuckeliana B05.10] gi|150851345|gb|EDN26538.1| BC1G_06805 [Botryotinia fuckeliana B05.10]
  misc_feature (67)..(282): NCBI GI: 156058488 Blast Desc: SS1G_03256 [Sclerotinia sclerotiorum 1980] gi|154701043|gb|EDO00782.1| SS1G_03256 [Sclerotinia sclerotiorum 1980]
  misc_feature (66)..(281): NCBI GI: 256731367 Blast Desc: NECHADRAFT_96196 [Nectria haematococca mpVI 77-13-4]
  misc_feature (74)..(281): NCBI GI: 261355603 Blast Desc: 3'-5' exoribonuclease CSL4 [Verticillium albo-atrum VaMs.102]
  misc_feature (75)..(273): NCBI GI: 46125893 Blast Desc: FG07324.1 [Gibberella zeae PH-1]
  misc_feature (75)..(281): NCBI GI: 116197969 Blast Desc: CHGG_07140 [Chaetomium globosum CBS 148.51] gi|88178419|gb|EAQ85887.1| CHGG_07140 [Chaetomium globosum CBS 148.51]
  misc_feature (75)..(282): NCBI GI: 169614391 Blast Desc: SNOG_10336 [Phaeosphaeria nodorum SN15] gi|111061551|gb|EAT82671.1| SNOG_10336 [Phaeosphaeria nodorum SN15]
MPDRNAKKVTSSGRRNRHHRSKKGRVQGNAKQRELAQKKRRFKDHRDNVFSYKNHFDARAYSLMTAMAQVQPNEIAAPGQFLGPAAKYIAGPGTHIHEANLYSSLLGHISITQPEKSTVPAKRIHRISALSSSTPNALSTVSVTPAAAGGEQDKREVLPEVGNIVLCRVTRITPREATMSILIVGDAVLSAQWQGIVRVQDVRATEKDRVKIYESFRPGDIVRAQVISLGDQANYYLTTAANELGVVMATSEAGNTMYPVSWKEYKDSETGLSEARKVARPMCRYALDLESSRHDSFKTHSLETWEGYVQQL

SEQ ID NO: 29676 - DNA, 3442 bp, Muscodor strobelii
  misc_feature: SGI EST ID NO. CUFF.70246.0
  misc_feature: Variant of the nucleotide sequence at SEQ ID NO 29674
ctggtcgcagaaaccgacaccacagatcgaaaaagggccgggtccaaggcaacgccaaacaacgagagctcgcgcagaagaagcgcaggttcaaggatcatcgcgataacgtattctcctacaagaatcacttcgacgcccgcgcatacagtctcatgacggccatggcccaggtccaacccaacgaaatcgcggccccaggtcagtttctgggccccgcggccaagtacatcgcggggcctggtacgcatatccacgaagccaatctctactcttcgctcttgggacacatcagcatcacccaacccgagaagtctaccgtcccggcgaagcgtatccatcgcatctctgcactcagctcttcaactccgaatgctctatctactgtgtctgtcacgccggcagcggctggcggagagcaggacaaacgcgaggtccttcccgaagtcggcaacattgtgctctgtcgcgtgacgagaatcacaccacgcgaggctactatgtctattctcattgttggtgatgccgtcctttcggcgcagtggcagggtatcgtgcgggtacaggatgtgcgagcgacggagaaggacagagttaagatctacgagagcttcaggcctggcgatattgtccgggcacaggtgatctctctaggtgatcaggcaaactactaccttacgactgcggccaatgagcttggtgtcgtgatggctacgagcgaagctggcaatacgatgtatcccgtcagctggaaggagtataaagacagcgagaccggtctgagcgaggcgaggaaggttgcgcggccaatgtgagtccgcagggccacgatacacgaagagaactcgcaaggcgtttcttcacacatctaccaaatcggcttctgcttcaggtgcagatacgcattagatcttgaatcatcacgacacgatagtttcaagacgcatagtcttgagacgtgggagggctacgtgcaacagctttagagtcacgacgtactattgactagataagtgtatgagattcagtcatgcaccgagagcaccgaaatactgaccaggtgccacttgacttatgacggtagcgacgatgtattatatccagcaacgctcaaggcgaggctgttgacagtccgaccttattgtggcactgtcggatccgatgaagtggacaacggttatggagcaggagctcagcctctgtttcacacaggcatcagagccaccaacgtcccagaattcgatactgaatcagtttagctgagcaaaaacacttataaaactactcacacaactcatcaaaattcactctccccatgtgatacgacagcaatcaatcaatgccccttcatgacaaagagcaagctgagttcacaaattgggacaatgtgatttgacacacaaaggtaagtgacggctggaccgcaaacgaggcgcagtggggatcccagcgcagatcaggtcccccgaccacccaaaataaacccccagaaaatgttgaagaataccaactcgacgtggaatgtgataaagaacagacttcgccatgccgaacacttcaaaattccagcttccacactattacactaattctacctagtcttacagtataaaggctggacgtaactggaacagagatcccagattgaacacagcagacagctgcgacctcgggcatcgatcgtcaaacagtaacgcacgcgacagcgcagcgccacggctgacctgccggatacattcagatcacctgccaccaccgactggccacctatgtcgccatgtccagttgattccagaccgcaacacctctcacacaacacgtttttcttgaaatggcgacaacaatgaccatgctcgcacctccgaacaccataatacccgcaatgactgcatccaccatctccaaagaagcatgttgtcccaactgcggccacaacctccccgcctccacgagcgacccacatgcagctctcctccaagcccagcgccagatcgcagacctacaatcccaagtccaaatcctcacccagaaagcgaatgccgcagtcgaccgctgggcagactacgaagacgagctctcgcggctgcgcgccgcttccatgagcacgaacacgacctctaacacatccaacggacggccgcacacgcccgcacccagcgcacctacgtcttcccctcggagctcgttcctcggtgccggcgcagtatctcgcatttcccaacttctctccccacaacgctcaaactcagcacctgccgcaaacccaccagcgaacacaaggccctcaactcccgcacagcgcagcagtctcgcctccgtcacgccatcatccccaggaaaggagtccgaagcggagctccgcgatgctctgacggctgagcggcagatgagagaggctgcggaagcgaagctcgatgcgacgagtagagaggtcgaggatctgagcgcgacgttgttcgaacaggctaatgagatggtcgctacggaacgacggagggcggcggaactggagcagaagattgaggtgctggggcagagagatgctgagaagacgcagaggatgaagaagttggagggtgctgtgcagaggattgaacgagcgaggagtgtgcttgggttaagggaggaggtggaggatgatgggtttcttaaggagaagcatgcggaggactgatgagaaggaaggtgtagtctatctgcgcctgttccagatggtggtccagacgtcatctgctctgcccatataggaggggaaggagctctctcggtccgcgattactgagtcatgacagccaccgcgatatctctatctccagcatccggtactatatccacgtcacacgaaacgacacaactggctcgagtcgggacgcgaggctattacattcatgccccttcacaccagtgcatcgtctaccatatagatctctcttcgccataagagaaacgctacaagctgatatagtcgctcaaatggcaagctcactatcaccgcgcaaccctcaccctcagcacaatcgacatcaaagaagtatttgtcgaaccagaaccagacactcgatcttggaaaggataaccttttgccaccccattcagcagcgccattctcaccaagtcaagtccgtggtaaatgatgtcacctctagacctcattccatcttgacactactggggctagaaactaggactgtggattcccagagttgcctggatattgccatacgctgagtatctgctcacgagccaagttgtatatagagggacagcttgtatagaagcacgaggagaacaggggaaaaaagagacagcgaagagaaagaaggggaatggaagcatgctttattagcatggcgaacaccaaatgaacaccaaatgaacaccaaatgcacataacagattgtagaaaaatataaagaccttcacaacactcactacataaacc

SEQ ID NO: 29677 - DNA, 792 bp, Muscodor strobelii
  misc_feature: SGI cDNA ID NO. 570195
  misc_feature: Encodes the peptide sequence at SEQ ID NO 29678
atgactgcatccaccatctccaaagaagcatgttgtcccaactgcggccacaacctccccgcctccacgagcgacccacatgcagctctcctccaagcccagcgccagatcgcagacctacaatcccaagtccaaatcctcacccagaaagcgaatgccgcagtcgaccgctgggcagactacgaagacgagctctcgcggctgcgcgccgcttccatgagcacgaacacgacctctaacacatccaacggacggccgcacacgcccgcacccagcgcacctacgtcttcccctcggagctcgttcctcggtgccggcgcagtatctcgcatttcccaacttctctccccacaacgctcaaactcagcacctgccgcaaacccaccagcgaacacaaggccctcaactcccgcacagcgcagcagtctcgcctccgtcacgccatcatccccaggaaaggagtccgaagcggagctccgcgatgctctgacggctgagcggcagatgagagaggctgcggaagcgaagctcgatgcgacgagtagagaggtcgaggatctgagcgcgacgttgttcgaacaggctaatgagatggtcgctacggaacgacggagggcggcggaactggagcagaagattgaggtgctggggcagagagatgctgagaagacgcagaggatgaagaagttggagggtgctgtgcagaggattgaacgagcgaggagtgtgcttgggttaagggaggaggtggaggatgatgggtttcttaaggagaagcatgcggaggactga

SEQ ID NO: 29678 - protein, 263 aa, Muscodor strobelii
  misc_feature: SGI Peptide ID NO. 570195
  misc_feature (1)..(244): NCBI GI: 46125893 Blast Desc: FG07324.1 [Gibberella zeae PH-1]
  misc_feature (11)..(245): NCBI GI: 256731366 Blast Desc: NECHADRAFT_84757 [Nectria haematococca mpVI 77-13-4]
  misc_feature (6)..(245): NCBI GI: 261355604 Blast Desc: conserved [Verticillium albo-atrum VaMs.102]
  misc_feature (9)..(244): NCBI GI: 156058684 Blast Desc: SS1G_03354 [Sclerotinia sclerotiorum 1980] gi|154701141|gb|EDO00880.1| SS1G_03354 [Sclerotinia sclerotiorum 1980]
  misc_feature (11)..(251): NCBI GI: 116197967 Blast Desc: CHGG_07139 [Chaetomium globosum CBS 148.51] gi|88178418|gb|EAQ85886.1| CHGG_07139 [Chaetomium globosum CBS 148.51]
  misc_feature (35)..(244): NCBI GI: 154303100 Blast Desc: BC1G_09570 [Botryotinia fuckeliana B05.10] gi|150855033|gb|EDN30225.1| BC1G_09570 [Botryotinia fuckeliana B05.10]
  misc_feature (12)..(244): NCBI GI: 39947770 Blast Desc: MGG_08627 [Magnaporthe grisea 70-15] gi|145010250|gb|EDJ94906.1| MGG_08627 [Magnaporthe grisea 70-15]
  misc_feature (12)..(245): NCBI GI: 171693973 Blast Desc: protein product [Podospora anserina] gi|170946935|emb|CAP73739.1| protein product [Podospora anserina]
  misc_feature (3)..(245): NCBI GI: 145251383 Blast Desc: An15g06770 [Aspergillus niger] gi|134082737|emb|CAK42629.1| protein product [Aspergillus niger]
  misc_feature (12)..(245): NCBI GI: 121716820 Blast Desc: conserved [Aspergillus clavatus NRRL 1] gi|119404076|gb|EAW14493.1| conserved [Aspergillus clavatus NRRL 1]
MTASTISKEACCPNCGHNLPASTSDPHAALLQAQRQIADLQSQVQILTQKANAAVDRWADYEDELSRLRAASMSTNTTSNTSNGRPHTPAPSAPTSSPRSSFLGAGAVSRISQLLSPQRSNSAPAANPPANTRPSTPAQRSSLASVTPSSPGKESEAELRDALTAERQMREAAEAKLDATSREVEDLSATLFEQANEMVATERRRAAELEQKIEVLGQRDAEKTQRMKKLEGAVQRIERARSVLGLREEVEDDGFLKEKHAED

SEQ ID NO: 29679 - DNA, 3442 bp, Muscodor strobelii; identical to SEQ ID NO: 29676
  misc_feature: SGI EST ID NO. CUFF.70246.0
  misc_feature: Variant of the nucleotide sequence at SEQ ID NO 29677

SEQ ID NO: 29680 - DNA, 2289 bp, Muscodor strobelii
  misc_feature: SGI cDNA ID NO. 570196
  misc_feature: Encodes the peptide sequence at SEQ ID NO 29681
atgctcggcttacacccacggccgtctctgaaagcgcggccatcactggtggatctgattcgtcggggcagccacagcagacccggcacaccatccacaccagaccagagcccagcagccgtcgaggagctgcccgagttgccatttgagcttgcaccgccgcctgcgtcaccgcctggggctttcgttggggacgctggagctgcggtggacattgctgaagcttcgctccaccccctacctccaacccccatatcagagcccatatcgcaagcagctgacgctgtgactggtccaatcagtgtcacaagcggtgcagccattacatcttcaacctcgtctccatcgtccgaaccgacagctgcctcatcgtctgcagcttcacccgtcctacctaatctgcgtccatctacacctcaagctgcacgggacccgcaacagaccaaagagatacccaagatggctccgtcggcgaaagctaccaacggcgacaaagatgggctcagcgtcggtaaaatctactcgatatccgggcccgtcattgtcgccgagggcctcctcggcgctgccatgtacgagcttgccaaagtcggccacgacgaactggtcggtgaagtcattcgcatcaacggtgaccaggccaccatccaggtctacgaggagacagccggtgtaactgtcggcgaccctgtccagagaaccggaaagcccctctccgtcgagctcggccctggtctattgaacaacatctacgacggtatccagcgacccctcgagtctatcgcgaagcaggctaagagcatctacattccccgcggtgtcgccgctccagctctcgatcgccagaagaaatgggagtttacaccggtactcaaggtcggcgaccacgtttccggcggtgatgtctggggaaccgtcttcgagaactccttcatcaaagtccacaagatcctgctacctcctcgtgcaaggggcacaattaccaagatcgcctctaaaggtgagtataccgtcgaggagaagattcttgagatcgagttcaacggcaacaagaccgagcatggcatgatgcagacgtggcctgtccgtgtaccgcgacctacgaccgagaagctgtcagccaacagccccttcgtcgttggccagcgtgtcttggatgctctgttccccagtgtgcagggtggtaccgtcgctatccctggtgccttcggatgtgggaagactgtcatttctcagtctgtctccaagttctccaacagtgatgtcattgtttacgtcggctgcggcgagcgaggaaacgaaatggctgaagtcttgaaggatttccccgagctgtccatcgaggtcgagggccgcaaggagccaatcatgaagcggacgactttaatcgccaatacttccaacatgcctgtcgctgcccgtgaagcctccatctataccggtatcacagtcgccgagtacttccgtgaccagggcatgaacgtcgccatgatggctgactcgtcatctcgttgggctgaggctcttcgtgagctttcaggtcgtctcggtgaaatgcctgctgatcagggtttccccgcttacttgggtaccaagcttgcctccttctacgagcgtgccgggaagacgcagtgtctcggctctccagagcgtgaaggcagtgtcagtattgtcggtgccgtcagtccgcccggtggtgacttctccgatcccgtcaccagttccactctcggtatcgtgcaagtcttctggggtcttgacaagaagcttgcccagcgtaaacatttcccttccatcaacacctctctctcatattctaagtacaccaacacgctggacaagtggtacgagaaagacttccctgacttccctcggctccgagaccgcgtcaagcaactgttgtccgattcggaagaattggatcaggtcgtccaactggtcgggaagtcggcattgtctgacccagacaagatcaccctggatattgccacgctgctgaaggaagatttcttgcagcagaatggttactccgactacgatcagttctgccccctgtggaagacggagtggatgatgaagctcatgatgggcttccatgacgaggcgcagaagacaatcgctcaaggtcagagctgggcgaaggtccgtgaggccacgggtgatctgcaagcgcagttgagaagcttgaagttcgagaaccctaatgatggtgaagagaccattgttaagaagtacgagggcattcagcagacgatgatggacaagtttgcctcggtgatggacgagtag

SEQ ID NO: 29681 - protein, 762 aa, Muscodor strobelii
  misc_feature: SGI Peptide ID NO. 570196
  misc_feature (380)..(606): Pfam Id: PF00006 Pfam Desc: ATP synthase alpha/beta family, nucleotide-binding domain
  misc_feature (624)..(761): Pfam Id: PF00306 Pfam Desc: ATP synthase alpha/beta chain, C terminal domain
  misc_feature (173)..(235): Pfam Id: PF02874 Pfam Desc: ATP synthase alpha/beta family, beta-barrel domain
  misc_feature (154)..(762): NCBI GI: 16444949 Blast Desc: vacuolar membrane ATPase catalytic subunit A [Aspergillus oryzae]
  misc_feature (153)..(756): NCBI GI: 50543516 Blast Desc: YALI0A09900p [Yarrowia lipolytica] gi|49645789|emb|CAG83851.1| YALI0A09900p [Yarrowia lipolytica]
  misc_feature (171)..(761): NCBI GI: 3417405 Blast Desc: TFP1 [Saccharomyces cerevisiae] gi|190405181|gb|EDV08448.1| vacuolar ATP synthase catalytic subunit A [Saccharomyces cerevisiae RM11-1a]
  misc_feature (171)..(761): NCBI GI: 16417186 Blast Desc: VMA1 [Saccharomyces sp. DH1-1A]
  misc_feature (171)..(761): NCBI GI: 255719408 Blast Desc: KLTH0H02398p [Lachancea thermotolerans] gi|238941950|emb|CAR30122.1| KLTH0H02398p [Lachancea thermotolerans]
  misc_feature (164)..(761): NCBI GI: 5678607 Blast Desc: vacuolar ATPase subunit a [Eremothecium gossypii]
  misc_feature (164)..(761): NCBI GI: 45187975 Blast Desc: ADR102Wp [Ashbya gossypii ATCC 10895] gi|50403808|sp|Q9UVJ8.2|VATA_ASHGO RecName: Full=V-type proton ATPase catalytic subunit A; Short=V-ATPase subunit A; AltName: 69
  misc_feature (171)..(748): NCBI GI: 29420851 Blast Desc: vacuolar membrane ATPase subunit a [Saccharomyces cerevisiae]
  misc_feature (157)..(744): NCBI GI: 258571297 Blast Desc: V-type ATPase, A subunit [Uncinocarpus reesii 1704] gi|237904722|gb|EEP79123.1| V-type ATPase, A subunit [Uncinocarpus reesii 1704]
  misc_feature (154)..(738): NCBI GI: 115437496 Blast Desc: vacuolar ATP synthase catalytic subunit A [Aspergillus terreus NIH2624] gi|114188640|gb|EAU30340.1| vacuolar ATP synthase catalytic subunit A [Aspergillus terreus NIH2624]
  misc_feature (154)..(762): SWISSPROT Homolog: EC 3.6.3.14 H(+)-transporting two-sector ATPase
MLGLHPRPSLKARPSLVDLIRRGSHSRPGTPSTPDQSPAAVEELPELPFELAPPPASPPGAFVGDAGAAVDIAEASLHPLPPTPISEPISQAADAVTGPISVTSGAAITSSTSSPSSEPTAASSSAASPVLPNLRPSTPQAARDPQQTKEIPKMAPSAKATNGDKDGLSVGKIYSISGPVIVAEGLLGAAMYELAKVGHDELVGEVIRINGDQATIQVYEETAGVTVGDPVQRTGKPLSVELGPGLLNNIYDGIQRPLESIAKQAKSIYIPRGVAAPALDRQKKWEFTPVLKVGDHVSGGDVWGTVFENSFIKVHKILLPPRARGTITKIASKGEYTVEEKILEIEFNGNKTEHGMMQTWPVRVPRPTTEKLSANSPFVVGQRVLDALFPSVQGGTVAIPGAFGCGKTVISQSVSKFSNSDVIVYVGCGERGNEMAEVLKDFPELSIEVEGRKEPIMKRTTLIANTSNMPVAAREASIYTGITVAEYFRDQGMNVAMMADSSSRWAEALRELSGRLGEMPADQGFPAYLGTKLASFYERAGKTQCLGSPEREGSVSIVGAVSPPGGDFSDPVTSSTLGIVQVFWGLDKKLAQRKHFPSINTSLSYSKYTNTLDKWYEKDFPDFPRLRDRVKQLLSDSEELDQVVQLVGKSALSDPDKITLDIATLLKEDFLQQNGYSDYDQFCPLWKTEWMMKLMMGFHDEAQKTIAQGQSWAKVREATGDLQAQLRSLKFENPNDGEETIVKKYEGIQQTMMDKFASVMDE

SEQ ID NO: 29682 - DNA, 2694 bp, Muscodor strobelii
  misc_feature: SGI EST ID NO. CUFF.70259.0
  misc_feature: Variant of the nucleotide sequence at SEQ ID NO 29680
tgggttaccagtgttaagatagagttgcacgggtacaagcgtatccatccctgaattcccgtcctccaccttactttctaatcaacactcgctcatgcgatcagcttacacatcaacgaaacgagttacgccggccgaggtggcctaattgtgaagtattctgacttatctatctaaaccgacggcatctacaagtttgatctgtcgcatagtcccaagcagcagtttagagttcgcgactggaatcttgaatgctcggcttacacccacggccgtctctgaaagcgcggccatcactggtggatctgattcgtcggggcagccacagcagacccggcacaccatccacaccagaccagagcccagcagccgtcgaggagctgcccgagttgccatttgagcttgcaccgccgcctgcgtcaccgcctggggctttcgttggggacgctggagctgcggtggacattgctgaagcttcgctccaccccctacctccaacccccatatcagagcccatatcgcaagcagctgacgctgtgactggtccaatcagtgtcacaagcggtgcagccattacatcttcaacctcgtctccatcgtccgaaccgacagctgcctcatcgtctgcagcttcacccgtcctacctaatctgcgtccatctacacctcaagctgcacgggacccgcaacagaccaaagagatacccaagatggctccgtcggcgaaagctaccaacggcgacaaagatgggctcagcgtcggtaaaatctactcgatatccgggcccgtcattgtcgccgagggcctcctcggcgctgccatgtacgagcttgccaaagtcggccacgacgaactggtcggtgaagtcattcgcatcaacggtgaccaggccaccatccaggtctacgaggagacagccggtgtaactgtcggcgaccctgtccagagaaccggaaagcccctctccgtcgagctcggccctggtctattgaacaacatctacgacggtatccagcgacccctcgagtctatcgcgaagcaggctaagagcatctacattccccgcggtgtcgccgctccagctctcgatcgccagaagaaatgggagtttacaccggtactcaaggtcggcgaccacgtttccggcggtgatgtctggggaaccgtcttcgagaactccttcatcaaagtccacaagatcctgctacctcctcgtgcaaggggcacaattaccaagatcgcctctaaaggtgagtataccgtcgaggagaagattcttgagatcgagttcaacggcaacaagaccgagcatggcatgatgcagacgtggcctgtccgtgtaccgcgacctacgaccgagaagctgtcagccaacagccccttcgtcgttggccagcgtgtcttggatgctctgttccccagtgtgcagggtggtaccgtcgctatccctggtgccttcggatgtgggaagactgtcatttctcagtctgtctccaagttctccaacagtgatgtcattgtttacgtcggctgcggcgagcgaggaaacgaaatggctgaagtcttgaaggatttccccgagctgtccatcgaggtcgagggccgcaaggagccaatcatgaagcggacgactttaatcgccaatacttccaacatgcctgtcgctgcccgtgaagcctccatctataccggtatcacagtcgccgagtacttccgtgaccagggcatgaacgtcgccatgatggctgactcgtcatctcgttgggctgaggctcttcgtgagctttcaggtcgtctcggtgaaatgcctgctgatcagggtttccccgcttacttgggtaccaagcttgcctccttctacgagcgtgccgggaagacgcagtgtctcggctctccagagcgtgaaggcagtgtcagtattgtcggtgccgtcagtccgcccggtggtgacttctccgatcccgtcaccagttccactctcggtatcgtgcaagtcttctggggtcttgacaagaagcttgcccagcgtaaacatttcccttccatcaacacctctctctcatattctaagtacaccaacacgctggacaagtggtacgagaaagacttccctgacttccctcggctccgagaccgcgtcaagcaactgttgtccgattcggaagaattggatcaggtcgtccaactggtcgggaagtcggcattgtctgacccagacaagatcaccctggatattgccacgctgctgaaggaagatttcttgcagcagaatggttactccgactacgatcagttctgccccctgtggaagacggagtggatgatgaagctcatgatgggcttccatgacgaggcgcagaagacaatcgctcaaggtcagagctgggcgaaggtccgtgaggccacgggtgatctgcaagcgcagttgagaagcttgaagttcgagaaccctaatgatggtgaagagaccattgttaagaagtacgagggcattcagcagacgatgatggacaagtttgcctcggtgatggacgagtagagaagatatgctctgttgaaagtatgattatgcagggactgtatatatgaataaggggcgagcgggccggaagtacaacgcacgagctagcattagcatcatttggccttagagtagtgttaacttgaatcattttatgatgacccatcctcct

SEQ ID NO: 29683 - DNA, 1140 bp, Muscodor strobelii
  misc_feature: SGI cDNA ID NO. 570197
  misc_feature: Encodes the peptide sequence at SEQ ID NO 29684
atgaatgcccaaatatccttcttagaaggaacatacagcctaatccatgtaccattagatttatacgcaacatttttacagcctatattacaagtgcttctccctcaaggcggggacttcggccttgccaatgacgtcgaagccggcatcgaatacaggcataactttctcaatattagtataacacccgtcgaatgctcggtcgtgtgtcacagtaacttcgccaagacaatattcgagcctgtcgtcagtcgtctaccccgcgatgttgccaaacgggtcaccatctcgaaagagtcctatctcgtcctatcggttattagtgctggaatggatgcggggagccgagtgatggaattgacgtgtccattggcattggcgggcattccgatcttgttcatcactacgtactactcggacttcatcctcgtgccccggaaaaagagggacacggttgtacaagctcttctagctcggaatttcgagtgcattgataacgaatctgcgttcgtttcgccgacgcctatgtctcacggtcgagcgaagagcacgaccagtgagccgccctcgaccccgccaccgtccaatgttagagaattacagactcgcacttttgagctgctcaagaagcgaaatgtagttccttacatttgcaattgtctgagcttagtgcagtgctccggacgcgatgtctcggagttagtcgattatagcgcacggcgaccaagtaatggccacaggacaagttggctagatcatatggacacaaagctatacacaagcctcattgcggtgctcgccacacaaccgcgattcctgtctatcactttggcatcagaagatgcaccctcattactccttgacaaaacactcctgaacatattcggagattccctggtcggcgacacggaaggcgatcttgttcctatattccttgatctcgtcgacttgcccttagaggcaacgggcattgtatgcggagtagcggggaaacttgtcgacgatatgaagatgttggaaaccggcgtcagcgccgagctatcctacctttcgactgcgagagctggcgcggtcatcctgtcgaatgagcagtctatgaaagcactcgaggtgcttaagcccttgctcgagaaatcgtaa

SEQ ID NO: 29684 - protein, 379 aa, Muscodor strobelii
  misc_feature: SGI Peptide ID NO. 570197
  misc_feature (1)..(376): NCBI GI: 46125255 Blast Desc: FG07005.1 [Gibberella zeae PH-1]
  misc_feature (1)..(378): NCBI GI: 256731024 Blast Desc: [Nectria haematococca mpVI 77-13-4]
  misc_feature (1)..(377): NCBI GI: 85091148 Blast Desc: NCU09541 [Neurospora crassa OR74A] gi|28920144|gb|EAA29524.1| conserved [Neurospora crassa OR74A] gi|38566863|emb|CAE76169.1| [Neurospora crassa]
  misc_feature (1)..(378): NCBI GI: 154319005 Blast Desc: BC1G_02454 [Botryotinia fuckeliana B05.10] gi|150856885|gb|EDN32077.1| BC1G_02454 [Botryotinia fuckeliana B05.10]
  misc_feature (1)..(376): NCBI GI: 171693477 Blast Desc: protein product [Podospora anserina] gi|170946687|emb|CAP73490.1| protein product [Podospora anserina]
  misc_feature (7)..(378): NCBI GI: 156063000 Blast Desc: SS1G_01616 [Sclerotinia sclerotiorum 1980] gi|154696952|gb|EDN96690.1| SS1G_01616 [Sclerotinia sclerotiorum 1980]
  misc_feature (1)..(376): NCBI GI: 145602638 Blast Desc: MGG_13001 [Magnaporthe grisea 70-15] gi|145011027|gb|EDJ95683.1| MGG_13001 [Magnaporthe grisea 70-15]
  misc_feature (1)..(373): NCBI GI: 189206918 Blast Desc: conserved [Pyrenophora tritici-repentis Pt-1C-BFP] gi|187975886|gb|EDU42512.1| conserved [Pyrenophora tritici-repentis Pt-1C-BFP]
  misc_feature (1)..(294): NCBI GI: 116206300 Blast Desc: CHGG_02443 [Chaetomium globosum CBS 148.51] gi|88183040|gb|EAQ90508.1| CHGG_02443 [Chaetomium globosum CBS 148.51]
  misc_feature (2)..(326): NCBI GI: 261355587 Blast Desc: conserved [Verticillium albo-atrum VaMs.102]
MNAQISFLEGTYSLIHVPLDLYATFLQPILQVLLPQGGDFGLANDVEAGIEYRHNFLNISITPVECSVVCHSNFAKTIFEPVVSRLPRDVAKRVTISKESYLVLSVISAGMDAGSRVMELTCPLALAGIPILFITTYYSDFILVPRKKRDTVVQALLARNFECIDNESAFVSPTPMSHGRAKSTTSEPPSTPPPSNVRELQTRTFELLKKRNVVPYICNCLSLVQCSGRDVSELVDYSARRPSNGHRTSWLDHMDTKLYTSLIAVLATQPRFLSITLASEDAPSLLLDKTLLNIFGDSLVGDTEGDLVPIFLDLVDLPLEATGIVCGVAGKLVDDMKMLETGVSAELSYLSTARAGAVILSNEQSMKALEVLKPLLEKS

SEQ ID NO: 29685 - DNA, 6003 bp, Muscodor strobelii
  misc_feature: SGI EST ID NO. CUFF.70444.0
  misc_feature: Variant of the nucleotide sequence at SEQ ID NO 29683
atttacgctacgtttctctgacatgtgctgggctacaaactattggatagtgctttaatcatctgtttctactttcccttcctatcgcttgggttgtgaatggtattgccctcattgtgagaatatatcctggaaaggcaagatgccgccgagcaagcccctgccttaccccgatgattgggcatctactgaagaatatgttaacaatctcttaaaatttgtcaccgcttcagatacattcagaatcttatgcggaggtgtgcacttgctggatttctacacaagtgaaccaggactcttcactgccgctgtcccagagagttggcagccatggctcaaacactgcgaccctctgaggcttatagatattctcatgagagaagatctccagactctggcggatgatccaccaccacctgaggatcttttggaatacgtcaaaaatatccgaaagttctccttggtccgcgactacacggctgatacgaagaagttacccaagctgacctggtcagcctccgttggcatgaagccgaagaaagttcatgaagtgacgaactttgcaaattacgtggataggttagcaaaggatatcagcagcgactataacaatgatataacgcattttgtcgacttcggaagcggccagaactatcttggtcgggctctggctagtgccccttacaataagcaaattgtcgccgtcgagggcagagaacacaacatcgctggtgcaaaagctttggatatcatagcacgcacggtagaaaggcccgtggtgataagaaacaagaaactttacatgcagcaattagacagcaagaaacccgcaaatgagcttgacgagaaggcggtagagagagcacagaagagagctgcaaagccttcgaagtcatccgaaaattacgtggctgatctcactccaagagatgttcaccagaccgtatataaaccggaagaaggcaagggcttcatacaatatgttgaaggacgcttggaatctggtgatcttacagacgtcgttggccaactgaaaaagacggatgccgatactgcaaaagacaaagatctcaaattgatggctatctcgatacactcatgtggaaatttgtctcatcacggcatacggtcgctagtcctcaacccggatgtacaagccatcgcgatcgtgggttgctgctacaacctaatgaccgagaagctgggtccgcctacgtataaacttccttacatgagacccagcctccaagcaatcaacggtcgcgtggtaaaagaatcggaaagacgagatccgcaaggtttcccaatgagtgaacgtctgagcacctatgacaatgacggtatccgtctgaatatcacggctcggatgatggcatgtcaggctccacggaactggacagaggtcgagagtgacagtttctttacgcgacacttcttccgtgcggtgctgcagaagatctgtctagatcgaggtgtcatctctaaaatataccacgatcaagatcctgcaggtgatacattcaagggtccttctgcaagtccgttcaacacaagcacaaacccggttatcatcggttcactgcgcaagtcctgttatggatctttcactgcatatgtgaggggtgcaattgagaagctgacgacaaactcggattaccatgagtaccgcgaaatcatcaaagagcggctggctgacatcactgatgaagaaatcgcggaatacgaaagcaagtatactcctcgaaagagagagcttagcgcaatctggaccttgatggcctttagtgccgtggtcgtcgagtctctaatagctactgacagatggctgtttctgcgccagcagagtgaggtacaggattgctgggttgaaaccgttttcgactacaaacagagtcctaggaatctcgtggtcgtgggcgtcaaaaagcgagaatctgcttcctgagaaagaacagtgcgtaattactcgcgtcattcacatgctgctgaatacgcattcgattggccctccaggcaatcgcattgcgagtttctacctccgcagtatgcatcggattctgaccggccacttgtgacacccatgttcctcaactgtcgggtgaaggaatgcatgaacctgcagtaggcggcatgtggtaatacactctaactcgaagaatctatctcaaccaaacgatcgggacttggttggtgcaataatagagctatgaaggcgttgtcatcacagatggaattctcaagccgaggaactaattaaaagtcagccctagcagcagcaacatcgtcttagtctaacgcttgcctcgtcgcttggatcagatgattttgttttcatgcgggagttgtctgaatcgagcttagacaacggctgaagtgctgaagcgtcacgaaatgacgacatcagacactaccaaagaattggcttgtgagtgaagcaatcatatcctcacgatgtctgatgcaatatcagggatcacaacgtcaaatgactgtaaatctcaatgattcattggcagctatactacagcctataattccatcctagacttactcttccttcatgctgcattgcctcgtcaacgtcgtggggttcaccgtgctcaccaaccagagtatcgtgagccttcttagcgcgggtggcatggttacactcggactatgccgcggcgcccgataattcgctcgactacccgaatgaaaaggggcgggcccccgacataccgttattaacgggtcgatacaatactggaccatgttgtcggcgtcattatgcttgaagaagggatccttcccgtcccgctgaaagtcgagaatcgaatttcatggtacgatgagaatattattctcatcccgcgctgatgtgcatatgttcacgatcctcttgtgcgaggaaggtggctatgcgtcgacacgacctagggcggggcggcttggaagtttcgagctgtattcgccgagacacttgccgtgtccgatggcgtgcaatcgcgagagagtttagttagatatatcatcataatgctcgaattgaccatgtgtaacatggaccacctagttttatacccgacttattgcgttaatagcccaattgatccatcaggctgaagccattcgttctacgtagctggtaatgcagtcaggacccctcacaggagacatcgtcatgcagcgaatcaatgaagctcggcttaactaacattaccaaacccccacgccctgaacatggactctccaccatcgtcatattggcaagctgcaagatgcgccgaaatggagttagcttccttgtcatcgaaccacggaacaacacaaccacgcaactcgcaccgctggagccgcgcaaagctgacaatgatgcatttctcgatttctctcagatgcgtgttgcgtggtcagggtctcgcaacccctgtgcgtccctgcggaataccctattgagggaagatgcatatggcgtgcatgatcttcctgctgggtgccttgaaaacatgaaaacatctaacggcttcacgatacaaccagtgaaagccacccgatctagacccttttggcggccaacgtaggagtgtatgcaagaacctacataaagttccgtgcccctcgcattcaccagtgcgaatttggccgctcatcgcatcgtggcagcctgtcaccgagacacaccatctttttaccactttaccggctcgtcacgtcgacttctgtgtcgacgtatggacgacattgggccctgaggacatcctgcaggtgcagccatcagtgcagctgcggctcgatagacgagtagccacaatacagcacatctccatcaacggggacagacgtgccagtgccgatccctgtggagccagcctctgtcttcgtcccgggtggtgccatgttgcgttatcttgtagcgcatgaatcgagtagagtttatgtcgaaaagagcattcatttatcttagcatttcctccaagctcacagtagcgtgcttttctaatctcgtcctgttgtcgctagacgggtgttggtggccacagaaacaccgactaagcgccctatctcaccttgacggctatcagttgacacatttatctgtgtatgctgtcccggggccggtttcgttcaaccaccattgagttggacaaggaaaagccctcattgtgtgattcttataaaaaaagtcatcttcaaaaattcgagtcacattgcagatccgaacaaagccgcggaattgtcatgaactgtatgaccggatccgatcgtctctattcgccaatcaagtctggtgactacagtcgatataccgacatcgctaacaaccagggtgacaggacggaccggttgctgtgtccgtgcttcctataaaccgtctcccgaacatcgccgtttccggtggatgactcgtttctagctcgggctgctgagcttcacaattcattcttcgttcaatttgaaattgatacgatgaatgcccaaatatccttcttagaaggaacatacagcctaatccatgtaccattagatttatacgcaacatttttacagcctatattacaagtgcttctccctcaaggcggggacttcggccttgccaatgacgtcgaagccggcatcgaatacaggcataactttctcaatattagtataacacccgtcgaatgctcggtcgtgtgtcacagtaacttcgccaagacaatattcgagcctgtcgtcagtcgtctaccccgcgatgttgccaaacgggtcaccatctcgaaagagtcctatctcgtcctatcggttattagtgctggaatggatgcggggagccgagtgatggaattgacgtgtccattggcattggcgggcattccgatcttgttcatcactacgtactactcggacttcatcctcgtgccccggaaaaagagggacacggttgtacaagctcttctagctcggaatttcgagtgcattgataacgaatctgcgttcgtttcgccgacgcctatgtctcacggtcgagcgaagagcacgaccagtgagccgccctcgaccccgccaccgtccaatgttagagaattacagactcgcacttttgagctgctcaagaagcgaaatgtagttccttacatttgcaattgtctgagcttagtgcagtgctccggacgcgatgtctcggagttagtcgattatagcgcacggcgaccaagtaatggccacaggacaagttggctagatcatatggacacaaagctatacacaagcctcattgcggtgctcgccacacaaccgcgattcctgtctatcactttggcatcagaagatgcaccctcattactccttgacaaaacactcctgaacatattcggagattccctggtcggcgacacggaaggcgatcttgttcctatattccttgatctcgtcgacttgcccttagaggcaacgggcattgtatgcggagtagcggggaaacttgtcgacgatatgaagatgttggaaaccggcgtcagcgccgagctatcctacctttcgactgcgagagctggcgcggtcatcctgtcgaatgagcagtctatgaaagcactcgaggtgcttaagcccttgctcgagaaatcgtaattgagatgtcaagccaatcaaaaaagagagaaagagagaaaagaaaaatagagaaaaataggagtgtactattatcggcagagacgggatgaattacgatcttgcatgacgatactgtatttatgactctctcattcgacgatatcaaaaggtctttgcatcatgtcttgcatttgggttggaaaatgcatacggccaggacttctctctgaaaatttcattgggcatatgattaggcgtctggattgggttgcaaatgcatattatttctgcctgtcaagttaactaaggtaccttacctaatgtggtgcaaaacagcgattgggcctgcctaatagctacttttacgtaaataactacttgagtagtatctgataatgcattcttgtattgtgagcgggcaaaatagcctag

SEQ ID NO: 29686 - DNA, 1803 bp, Muscodor strobelii
  misc_feature: SGI cDNA ID NO. 570198
  misc_feature: Encodes the peptide sequence at SEQ ID NO 29687
atgccgccgagcaagcccctgccttaccccgatgattgggcatctactgaagaatatgttaacaatctcttaaaatttgtcaccgcttcagatacattcagaatcttatgcggaggtgtgcacttgctggatttctacacaagtgaaccaggactcttcactgccgctgtcccagagagttggcagccatggctcaaacactgcgaccctctgaggcttatagatattctcatgagagaagatctccagactctggcggatgatccaccaccacctgaggatcttttggaatacgtcaaaaatatccgaaagttctccttggtccgcgactacacggctgatacgaagaagttacccaagctgacctggtcagcctccgttggcatgaagccgaagaaagttcatgaagtgacgaactttgcaaattacgtggataggttagcaaaggatatcagcagcgactataacaatgatataacgcattttgtcgacttcggaagcggccagaactatcttggtcgggctctggctagtgccccttacaataagcaaattgtcgccgtcgagggcagagaacacaacatcgctggtgcaaaagctttggatatcatagcacgcacggtagaaaggcccgtggtgataagaaacaagaaactttacatgcagcaattagacagcaagaaacccgcaaatgagcttgacgagaaggcggtagagagagcacagaagagagctgcaaagccttcgaagtcatccgaaaattacgtggctgatctcactccaagagatgttcaccagaccgtatataaaccggaagaaggcaagggcttcatacaatatgttgaaggacgcttggaatctggtgatcttacagacgtcgttggccaactgaaaaagacggatgccgatactgcaaaagacaaagatctcaaattgatggctatctcgatacactcatgtggaaatttgtctcatcacggcatacggtcgctagtcctcaacccggatgtacaagccatcgcgatcgtgggttgctgctacaacctaatgaccgagaagctgggtccgcctacgtataaacttccttacatgagacccagcctccaagcaatcaacggtcgcgtggtaaaagaatcggaaagacgagatccgcaaggtttcccaatgagtgaacgtctgagcacctatgacaatgacggtatccgtctgaatatcacggctcggatgatggcatgtcaggctccacggaactggacagaggtcgagagtgacagtttctttacgcgacacttcttccgtgcggtgctgcagaagatctgtctagatcgaggtgtcatctctaaaatataccacgatcaagatcctgcaggtgatacattcaagggtccttctgcaagtccgttcaacacaagcacaaacccggttatcatcggttcactgcgcaagtcctgttatggatctttcactgcatatgtgaggggtgcaattgagaagctgacgacaaactcggattaccatgagtaccgcgaaatcatcaaagagcggctggctgacatcactgatgaagaaatcgcggaatacgaaagcaagtatactcctcgaaagagagagcttagcgcaatctggaccttgatggcctttagtgccgtggtcgtcgagtctctaatagctactgacagatggctgtttctgcgccagcagagtgaggtacaggattgctgggttgaaaccgttttcgactacaaacagagtcctaggaatctcgtggtcgtgggcgtcaaaaagcgagaatctgcttcctga

SEQ ID NO: 29687 - protein, 600 aa, Muscodor strobelii
  misc_feature: SGI Peptide ID NO. 570198
  misc_feature (3)..(595): NCBI GI: 171693475 Blast Desc: protein product [Podospora anserina] gi|170946686|emb|CAP73489.1| protein product [Podospora anserina]
  misc_feature (3)..(595): NCBI GI: 85091146 Blast Desc: NCU09540 [Neurospora crassa OR74A] gi|28920143|gb|EAA29523.1| conserved [Neurospora crassa OR74A] gi|38566864|emb|CAE76170.1| conserved [Neurospora crassa]
  misc_feature (1)..(595): NCBI GI: 256731023 Blast Desc: [Nectria haematococca mpVI 77-13-4]
  misc_feature (1)..(595): NCBI GI: 46125257 Blast Desc: FG07006.1 [Gibberella zeae PH-1]
  misc_feature (78)..(595): NCBI GI: 39961424 Blast Desc: MGG_09528 [Magnaporthe grisea 70-15] gi|145011031|gb|EDJ95687.1| MGG_09528 [Magnaporthe grisea 70-15]
  misc_feature (129)..(595): NCBI GI: 116206298 Blast Desc: CHGG_02442 [Chaetomium globosum CBS 148.51] gi|88183039|gb|EAQ90507.1| CHGG_02442 [Chaetomium globosum CBS 148.51]
  misc_feature (1)..(594): NCBI GI: 154319211 Blast Desc: BC1G_02557 [Botryotinia fuckeliana B05.10] gi|150856988|gb|EDN32180.1| BC1G_02557 [Botryotinia fuckeliana B05.10]
  misc_feature (1)..(594): NCBI GI: 156063414 Blast Desc: SS1G_01825 [Sclerotinia sclerotiorum 1980] gi|154697159|gb|EDN96897.1| SS1G_01825 [Sclerotinia sclerotiorum 1980]
  misc_feature (16)..(595): NCBI GI: 189209906 Blast Desc: conserved [Pyrenophora tritici-repentis Pt-1C-BFP] gi|187977378|gb|EDU44004.1| conserved [Pyrenophora tritici-repentis Pt-1C-BFP]
  misc_feature (5)..(595): NCBI GI: 238839225 Blast Desc: conserved [Microsporum canis CBS 113480]
MPPSKPLPYPDDWASTEEYVNNLLKFVTASDTFRILCGGVHLLDFYTSEPGLFTAAVPESWQPWLKHCDPLRLIDILMREDLQTLADDPPPPEDLLEYVKNIRKFSLVRDYTADTKKLPKLTWSASVGMKPKKVHEVTNFANYVDRLAKDISSDYNNDITHFVDFGSGQNYLGRALASAPYNKQIVAVEGREHNIAGAKALDIIARTVERPVVIRNKKLYMQQLDSKKPANELDEKAVERAQKRAAKPSKSSENYVADLTPRDVHQTVYKPEEGKGFIQYVEGRLESGDLTDVVGQLKKTDADTAKDKDLKLMAISIHSCGNLSHHGIRSLVLNPDVQAIAIVGCCYNLMTEKLGPPTYKLPYMRPSLQAINGRVVKESERRDPQGFPMSERLSTYDNDGIRLNITARMMACQAPRNWTEVESDSFFTRHFFRAVLQKICLDRGVISKIYHDQDPAGDTFKGPSASPFNTSTNPVIIGSLRKSCYGSFTAYVRGAIEKLTTNSDYHEYREIIKERLADITDEEIAEYESKYTPRKRELSAIWTLMAFSAVVVESLIATDRWLFLRQQSEVQDCWVETVFDYKQSPRNLVVVGVKKRESAS

SEQ ID NO: 29688 - DNA, 6003 bp, Muscodor strobelii; identical to SEQ ID NO: 29685
  misc_feature: SGI EST ID NO. CUFF.70444.0
  misc_feature: Variant of the nucleotide sequence at SEQ ID NO 29686

SEQ ID NO: 29689 - DNA, 411 bp, Muscodor strobelii
  misc_feature: SGI cDNA ID NO. 570199
  misc_feature: Reduced expression when VOC is produced
  misc_feature: Encodes the peptide sequence at SEQ ID NO 29690
atgatgtcctcaactaatgaggaggaccctttcctccaagtccaacaagatgttctctcacaaatgcaaaatgcgcgaccactattcacatcctacctgcgcatccggagcctctccaccacaccgggcacatcccccgaagtagcatccgcgcgcaccgacctcgagtccgccctctcaaccctcgcagaagacctatccgacctcatagaatccgtgcgcgccatcgagtcctcgccctcccactacgggatctccgtacacgagctctctcggcgaaagaaactcgtcgacgaaatagggggcgagatagaagacatgcgcaccgagctctcctcccaaaaacgccctcctctcatcccactctcactcccactccacaaacccgtctcgaaacgcagccgcagctag

SEQ ID NO: 29690 - protein, 136 aa, Muscodor strobelii
  misc_feature: SGI Peptide ID NO. 570199
  misc_feature (9)..(108): Pfam Id: PF09177 Pfam Desc: Syntaxin 6, N-terminal
  misc_feature (1)..(114): NCBI GI: 256731413 Blast Desc: NECHADRAFT_71909 [Nectria haematococca mpVI 77-13-4]
  misc_feature (2)..(111): NCBI GI: 116199103 Blast Desc: CHGG_07707 [Chaetomium globosum CBS 148.51] gi|88178986|gb|EAQ86454.1| CHGG_07707 [Chaetomium globosum CBS 148.51]
  misc_feature (2)..(111): NCBI GI: 145612077 Blast Desc: MGG_08082 [Magnaporthe grisea 70-15] gi|145019321|gb|EDK03549.1| MGG_08082 [Magnaporthe grisea 70-15]
  misc_feature (2)..(114): NCBI GI: 85103644 Blast Desc: NCU01199 [Neurospora crassa OR74A] gi|28923112|gb|EAA32329.1| conserved [Neurospora crassa OR74A]
  misc_feature (2)..(114): NCBI GI: 18376310 Blast Desc: related to syntaxin family member TLG1 [Neurospora crassa]
  misc_feature (1)..(112): NCBI GI: 171692899 Blast Desc: protein product [Podospora anserina] gi|170946398|emb|CAP73199.1| protein product [Podospora anserina]
  misc_feature (1)..(111): NCBI GI: 154308751 Blast Desc: BC1G_07798 [Botryotinia fuckeliana B05.10] gi|150852749|gb|EDN27941.1| BC1G_07798 [Botryotinia fuckeliana B05.10]
  misc_feature (2)..(111): NCBI GI: 156050559 Blast Desc: SS1G_07867 [Sclerotinia sclerotiorum 1980] gi|154692267|gb|EDN92005.1| SS1G_07867 [Sclerotinia sclerotiorum 1980]
  misc_feature (2)..(111): NCBI GI: 119498967 Blast Desc: SNARE domain protein [Neosartorya fischeri NRRL 181] gi|119414405|gb|EAW24344.1| SNARE domain protein [Neosartorya fischeri NRRL 181]
  misc_feature (2)..(111): NCBI GI: 239612370 Blast Desc: SNARE domain-containing protein [Ajellomyces dermatitidis ER-3]
  misc_feature: Useful for introducing or modulating the production of volatile compounds
MMSSTNEEDPFLQVQQDVLSQMQNARPLFTSYLRIRSLSTTPGTSPEVASARTDLESALSTLAEDLSDLIESVRAIESSPSHYGISVHELSRRKKLVDEIGGEIEDMRTELSSQKRPPLIPLSLPLHKPVSKRSRS

SEQ ID NO: 29691 - DNA, 3375 bp, Muscodor strobelii
  misc_feature: SGI EST ID NO. CUFF.70378.0
  misc_feature: Variant of the nucleotide sequence at SEQ ID NO 29689
tcacaatagactgtgctttatcactacggcgtttatttctctggaaaatataaaaactaccacaaacaaagatttctgtcgcgcgctcttgtgaccgatacatgaaacgtcccatatcaaattccacaggatgatgtcctcaactaatgaggaggaccctttcctccaagtccaacaagatgttctctcacaaatgcaaaatgcgcgaccactattcacatcctacctgcgcatccggagcctctccaccacaccgggcacatcccccgaagtagcatccgcgcgcaccgacctcgagtccgccctctcaaccctcgcagaagacctatccgacctcatagaatccgtgcgcgccatcgagtcctcgccctcccactacgggatctccgtacacgagctctctcggcgaaagaaactcgtcgacgaaatagggggcgagatagaagacatgcgcaccgagctctcctcccaaaaacgccctcctctcatcccactctcactcccactccacaaacccgtctcgaaacgcagccgcagctagagcagcagcgaattccgacctcccaccaccatcgtccttcctattcgacgaagaatcctctgcgacacatgacaactatgccgaatttgaacagcagcaacaactccagatgatgcgagaccaagatcaagagctagaccggacattcgtcacagtcgggaatctgaggagacaagcagatgacatgggtcgagaattagaagaacagcacgaaatactcgaacacgtcgatcagcatgcagaccgcgttgagacgcgattagaagaagggatgaagaaattgggacatatcatgcgcaagaatgaggataaatacagtagttgctgtatcgctgtgttgatcaccgtgttgattgttttacttgttattctcctgatactatagtatctgcaggacgactgtgtggcatatagtgtttgtttgttaagcaggcatggagtaaaggcgcaaacttgacggggtaatttttgtatgatcacgaattggacatggacggagacactttattgacttgtattttatgtgtcatggcaggtgccagggggtatattgtttttagtccaactacctgctaaagacgccgtagtgtacaaccgtatgcgagcaacctgacctgaaatcaaaacaagaacgccgctcaaatgctttaatggttcttttccatgaaacgccggccagcagatctgctagtatcccgctcgttagttactctagattcgtacagcgctcctgctaatgattttggaacccgacgtgcatcaaaatgggacacagcgtccatcacttcataacacctccaagccaatctccctcttgagaaattcggcgtgattccgcaggccagccacagctggagtctggaccggtgccctattggggaaatcgacgagggcggagcgaagagctgccacacccttatcgccgtagaacttaatgaacgcttcctcatacgtctcgatgagtgaccgaagcactacacactgggtgtcggatatctcgctgggtggggtgttgacaattctggccatagtcgtccaatatttcgacggtggccaggggtttgtctgctgggatctggcaaagtttcgcaaggcaatggcagagtatcctgcggcgaggcctctcattctcgtccaattttcttcttcgccatatataccattgtgctttttccagccaagatgttgacgaccctgcgcagtcttatcggtgcctgagtacccgaacagaactggacaaacaactcgaagtttggccatgagaatatcaatcagagtcttgcctcgccataagaagtcctttttggagaagatatcggcagcgatagtaccgatggggtcggcagccaaaggattcgaaccacactcgctaacgaactggttgatgatggtcttggcgaagatgttgagaagatataggaatagcgatgacaactcagctccattgtgcttcgcaccgtccatcggctgtcgttgcggatccaccacgaactgagaggggtcgatatgtgtactaggcacttgcccacttagcgattcgttcagaatgtcgatgattttctgtttctagactagatgtgagcttgagcagtgtgtagcgcaagatgaatacttacttgtgccctgttcatcaccttgtcctggaccaactgacctaggctcttccgaagctctcgtctcatatcacctaggcgacgtttgagttccggcgatgccttagattgcgccgtcactgaagctcgcaacttcttcagatttctgtgtatctcgacgtatcggtcactggcggggttcacggtggatccggagctagatgatgcaggaatagcagcttgcggggtggtcgcgggcagcacggcgttagagctactggcgggcgcaagaggcgatgatattctcgtagtttgttgcgtcgatgtaggggttgggaatgctgatgctgatgctgttgggttgagcttgaatccgttcgtctgtggtgcgggccctggtgctggagactgtccattaaggagtgttggtttcacagtcggaggcttcgttggctgaccgaaaggactggctgtggccccgatgccattggcttgtgctgtcggagtagatgtgctggtagtcggggcggggacgatgggcgactcgggaggcagttgaggaatagtcttagccttcagctctcgaaggcgcttctgctcgtcgcggagtctctgttcgttatggaggcgctcttcttccctctgctgctcgatcttaattctctgttgttcctgttgcaaccgacgtgcttgttcctggctctcgttgtcttcaaagacgcgaatcgcagcgaggcgaactcgttcgtgctctaggcgggcagcctcgatagcttcctgatggttcagctcgctatttctgttgttagagagaaaatcggtgagacgagatccaagaggactcgtccattgacgagatcgtcttccatctgctggcgatgaagtcatggcgagcgtggcggttggtaagagctactacgagcaggacatagtatcgaagtgcgagtgatagggaagaagggaagaagctgtcgcgtagggagggtaccagcatacagagattgcagaaatgactgtgagattggatgagtgtgtttctgcaaacaaataatgcaaaagagtgattcaacgtgagatgtttccgctcgctcagccttgaatccacgatcgctgagctaatgctgtagttgggatgttgaagacgacaaagaattccgccagatgtcgagcgtcacgcgttcgacgcccacacttccatgtctacatgtaccacttagcttctgtagtttgtgccaccagcag

SEQ ID NO: 29692 - DNA, 1644 bp, Muscodor strobelii
  misc_feature: SGI cDNA ID NO. 570200
  misc_feature: Reduced expression when VOC is produced
  misc_feature: Encodes the peptide sequence at SEQ ID NO 29693
atgacttcatcgccagcagatggaagacgatctcgtcaatggacgagtcctcttggatctcgtctcaccgattttctctctaacaacagaaatagcgagctgaaccatcaggaagctatcgaggctgcccgcctagagcacgaacgagttcgcctcgctgcgattcgcgtctttgaagacaacgagagccaggaacaagcacgtcggttgcaacaggaacaacagagaattaagatcgagcagcagagggaagaagagcgcctccataacgaacagagactccgcgacgagcagaagcgccttcgagagctgaaggctaagactattcctcaactgcctcccgagtcgcccatcgtccccgccccgactaccagcacatctactccgacagcacaagccaatggcatcggggccacagccagtcctttcggtcagccaacgaagcctccgactgtgaaaccaacactccttaatggacagtctccagcaccagggcccgcaccacagacgaacggattcaagctcaacccaacagcatcagcatcagcattcccaacccctacatcgacgcaacaaactacgagaatatcatcgcctcttgcgcccgccagtagctctaacgccgtgctgcccgcgaccaccccgcaagctgctattcctgcatcatctagctccggatccaccgtgaaccccgccagtgaccgatacgtcgagatacacagaaatctgaagaagttgcgagcttcagtgacggcgcaatctaaggcatcgccggaactcaaacgtcgcctaggtgatatgagacgagagcttcggaagagcctaggtcagttggtccaggacaaggtgatgaacagggcacaaaaacagaaaatcatcgacattctgaacgaatcgctaagtgggcaagtgcctagtacacatatcgacccctctcagttcgtggtggatccgcaacgacagccgatggacggtgcgaagcacaatggagctgagttgtcatcgctattcctatatcttctcaacatcttcgccaagaccatcatcaaccagttcgttagcgagtgtggttcgaatcctttggctgccgaccccatcggtactatcgctgccgatatcttctccaaaaaggacttcttatggcgaggcaagactctgattgatattctcatggccaaacttcgagttgtttgtccagttctgttcgggtactcaggcaccgataagactgcgcagggtcgtcaacatcttggctggaaaaagcacaatggtatatatggcgaagaagaaaattggacgagaatgagaggcctcgccgcaggatactctgccattgccttgcgaaactttgccagatcccagcagacaaacccctggccaccgtcgaaatattggacgactatggccagaattgtcaacaccccacccagcgagatatccgacacccagtgtgtagtgcttcggtcactcatcgagacgtatgaggaagcgttcattaagttctacggcgataagggtgtggcagctcttcgctccgccctcgtcgatttccccaatagggcaccggtccagactccagctgtggctggcctgcggaatcacgccgaatttctcaagagggagattggcttggaggtgttatga

SEQ ID NO: 29693 - protein, 547 aa, Muscodor strobelii
  misc_feature: SGI Peptide ID NO. 570200
  misc_feature (255)..(516): Pfam Id: PF07817 Pfam Desc: GLE1-like protein
  misc_feature (1)..(544): NCBI GI: 46125261 Blast Desc: FG07008.1 [Gibberella zeae PH-1]
  misc_feature (1)..(544): NCBI GI: 256731022 Blast Desc: NECHADRAFT_49029 [Nectria haematococca mpVI 77-13-4]
  misc_feature (16)..(544): NCBI GI: 116199105 Blast Desc: CHGG_07708 [Chaetomium globosum CBS 148.51] gi|88178987|gb|EAQ86455.1| CHGG_07708 [Chaetomium globosum CBS 148.51]
  misc_feature (9)..(547): NCBI GI: 39945926 Blast Desc: MGG_08083 [Magnaporthe grisea 70-15] gi|145019322|gb|EDK03550.1| MGG_08083 [Magnaporthe grisea 70-15]
  misc_feature (4)..(544): NCBI GI: 171692897 Blast Desc: protein product [Podospora anserina] gi|170946397|emb|CAP73198.1| protein product [Podospora anserina]
  misc_feature (24)..(544): NCBI GI: 154294737 Blast Desc: BC1G_13495 [Botryotinia fuckeliana B05.10] gi|150844630|gb|EDN19823.1| BC1G_13495 [Botryotinia fuckeliana B05.10]
  misc_feature (13)..(543): NCBI GI: 85103639 Blast Desc: NCU01198 [Neurospora crassa OR74A] gi|18376311|emb|CAD21423.1| related to RNA export mediator GLE1 [Neurospora crassa] gi|28923111|gb|EAA32328.1| [Neurospora crassa
  misc_feature (24)..(546): NCBI GI: 156048800 Blast Desc: SS1G_09132 [Sclerotinia sclerotiorum 1980] gi|154693528|gb|EDN93266.1| SS1G_09132 [Sclerotinia sclerotiorum 1980]
  misc_feature (235)..(541): NCBI GI: 67517973 Blast Desc: AN1157.2 [Aspergillus nidulans FGSC A4] gi|40747119|gb|EAA66275.1| AN1157.2 [Aspergillus nidulans FGSC A4] gi|259488525|tpe|CBF88029.1| TPA: Nuclear pore complex FGSC
  misc_feature (235)..(541): NCBI GI: 145239651 Blast Desc: An08g03550 [Aspergillus niger] gi|134076983|emb|CAK45392.1| protein product [Aspergillus niger]
  misc_feature: Useful for introducing or modulating the production of volatile compounds
MTSSPADGRRSRQWTSPLGSRLTDFLSNNRNSELNHQEAIEAARLEHERVRLAAIRVFEDNESQEQARRLQQEQQRIKIEQQREEERLHNEQRLRDEQKRLRELKAKTIPQLPPESPIVPAPTTSTSTPTAQANGIGATASPFGQPTKPPTVKPTLLNGQSPAPGPAPQTNGFKLNPTASASAFPTPTSTQQTTRISSPLAPASSSNAVLPATTPQAAIPASSSSGSTVNPASDRYVEIHRNLKKLRASVTAQSKASPELKRRLGDMRRELRKSLGQLVQDKVMNRAQKQKIIDILNESLSGQVPSTHIDPSQFVVDPQRQPMDGAKHNGAELSSLFLYLLNIFAKTIINQFVSECGSNPLAADPIGTIAADIFSKKDFLWRGKTLIDILMAKLRVVCPVLFGYSGTDKTAQGRQHLGWKKHNGIYGEEENWTRMRGLAAGYSAIALRNFARSQQTNPWPPSKYWTTMARIVNTPPSEISDTQCVVLRSLIETYEEAFIKFYGDKGVAALRSALVDFPNRAPVQTPAVAGLRNHAEFLKREIGLEVL

SEQ ID NO: 29694 - DNA, 3385 bp, Muscodor strobelii
  misc_feature: SGI EST ID NO. CUFF.70379.1
  misc_feature: Variant of the nucleotide sequence at SEQ ID NO 29692
ctgctggtggcacaaactacagaagctaagtggtacatgtagacatggaagtgtgggcgtcgaacgcgtgacgctcgacatctggcggaattctttgtcgtcttcaacatcccaactacagcattagctcagcgatcgtggattcaaggctgagcgagcggaaacatctcacgttgaatcactcttttgcattatttgtttgcagaaacacactcatccaatctcacagtcatttctgcaatctctgtatgctggtaccctccctacgcgacagcttcttcccttcttccctatcactcgcacttcgatactatgtcctgctcgtagtagctcttaccaaccgccacgctcgccatgacttcatcgccagcagatggaagacgatctcgtcaatggacgagtcctcttggatctcgtctcaccgattttctctctaacaacagaaatagcgagctgaaccatcaggaagctatcgaggctgcccgcctagagcacgaacgagttcgcctcgctgcgattcgcgtctttgaagacaacgagagccaggaacaagcacgtcggttgcaacaggaacaacagagaattaagatcgagcagcagagggaagaagagcgcctccataacgaacagagactccgcgacgagcagaagcgccttcgagagctgaaggctaagactattcctcaactgcctcccgagtcgcccatcgtccccgccccgactaccagcacatctactccgacagcacaagccaatggcatcggggccacagccagtcctttcggtcagccaacgaagcctccgactgtgaaaccaacactccttaatggacagtctccagcaccagggcccgcaccacagacgaacggattcaagctcaacccaacagcatcagcatcagcattcccaacccctacatcgacgcaacaaactacgagaatatcatcgcctcttgcgcccgccagtagctctaacgccgtgctgcccgcgaccaccccgcaagctgctattcctgcatcatctagctccggatccaccgtgaaccccgccagtgaccgatacgtcgagatacacagaaatctgaagaagttgcgagcttcagtgacggcgcaatctaaggcatcgccggaactcaaacgtcgcctaggtgatatgagacgagagcttcggaagagcctaggtcagttggtccaggacaaggtgatgaacagggcacaaaaacagaaaatcatcgacattctgaacgaatcgctaagtgggcaagtgcctagtacacatatcgacccctctcagttcgtggtggatccgcaacgacagccgatggacggtgcgaagcacaatggagctgagttgtcatcgctattcctatatcttctcaacatcttcgccaagaccatcatcaaccagttcgttagcgagtgtggttcgaatcctttggctgccgaccccatcggtactatcgctgccgatatcttctccaaaaaggacttcttatggcgaggcaagactctgattgatattctcatggccaaacttcgagttgtttgtccagttctgttcgggtactcaggcaccgataagactgcgcagggtcgtcaacatcttggctggaaaaagcacaatggtatatatggcgaagaagaaaattggacgagaatgagaggcctcgccgcaggatactctgccattgccttgcgaaactttgccagatcccagcagacaaacccctggccaccgtcgaaatattggacgactatggccagaattgtcaacaccccacccagcgagatatccgacacccagtgtgtagtgcttcggtcactcatcgagacgtatgaggaagcgttcattaagttctacggcgataagggtgtggcagctcttcgctccgccctcgtcgatttccccaatagggcaccggtccagactccagctgtggctggcctgcggaatcacgccgaatttctcaagagggagattggcttggaggtgttatgaagtgatggacgctgtgtcccattttgatgcacgtcgggttccaaaatcattagcaggagcgctgtacgaatctagagtaactaacgagcgggatactagcagatctgctggccggcgtttcatggaaaagaaccattaaagcatttgagcggcgttcttgttttgatttcaggtcaggttgctcgcatacggttgtacactacggcgtctttagcaggtagttggactaaaaacaatataccccctggcacctgccatgacacataaaatacaagtcaataaagtgtctccgtccatgtccaattcgtgatcatacaaaaattaccccgtcaagtttgcgcctttactccatgcctgcttaacaaacaaacactatatgccacacagtcgtcctgcagatactatagtatcaggagaataacaagtaaaacaatcaacacggtgatcaacacagcgatacagcaactactgtatttatcctcattcttgcgcatgatatgtcccaatttcttcatcccttcttctaatcgcgtctcaacgcggtctgcatgctgatcgacgtgttcgagtatttcgtgctgttcttctaattctcgacccatgtcatctgcttgtctcctcagattcccgactgtgacgaatgtccggtctagctcttgatcttggtctcgcatcatctggagttgttgctgctgttcaaattcggcatagttgtcatgtgtcgcagaggattcttcgtcgaataggaaggacgatggtggtgggaggtcggaattcgctgctgctctagctgcggctgcgtttcgagacgggtttgtggagtgggagtgagagtgggatgagaggagggcgtttttgggaggagagctcggtgcgcatgtcttctatctcgccccctatttcgtcgacgagtttctttcgccgagagagctcgtgtacggagatcccgtagtgggagggcgaggactcgatggcgcgcacggattctatgaggtcggataggtcttctgcgagggttgagagggcggactcgaggtcggtgcgcgcggatgctacttcgggggatgtgcccggtgtggtggagaggctccggatgcgcaggtaggatgtgaatagtggtcgcgcattttgcatttgtgagagaacatctctgtgatagtggtgagcatgaggtttggtcactggagtctagaagggcgtcggcgcatactgttggacttggaggaaagggtcctcctcattagttgaggacatcatcctgtggaatttgatatgggacgtttcatgtatcggtcacaagagcgcgcgacagaaatctttgtttgtggtagtttttatattttccagagaaataaacgccgtagtgataaagcacagtctattgtga

SEQ ID NO: 29695 - DNA, 1818 bp, Muscodor strobelii
  misc_feature: SGI cDNA ID NO. 570201
  misc_feature: Encodes the peptide sequence at SEQ ID NO 29696
atggctagctctcagaatggcgccattgactattatcccgttcacctaggcatctggaccaactggtctcgcggtcccgtcttcggccagacggtgactcttacacgacgagaaggtgatctcttgattgcctttaccgcattgtttgtggccttagtttccaatcgtggatggagaattatgtccttcgcccttcatcatttcaacgcaaagcctaccccgcaaggtacagtgtatcatcagtatcaagcaattctacgaaacacggatactcagacctgcattctacagctcgtaaatctggtttgggcaaactgttttagaaatgtcaacctcattcggccattgttgatcttaatggtggccagcatctatactgtggcttttaccgtcgcaggtggcttttcctcacagatctctacggcggtgggcacggaggttttaattgagagcaaaaattgtggatggtatatggatagcttcgcgtcgattgaaaatgcgtttcatgcggttaccgtccaggctggcgccatcaccaacgcaaataattatgcgcagcaatgctattctaatgatagcgcgggtatcctggactgtggccgcttgacgacgcaaaagctctcggcaacggtcaacacacaagcgccttgtccgtttcgagaagatgtgtgtcgaagccgttccaacatactcattgattcgggctatattgccagtcacgatcttggtcttaacacgccaccacgccaaagaatgcatgccagaatggtggtccattgcgcaccgatgcagacacaggggttctccagtcgcataaatggtaccggttcagtcggaaacctcacggtctatcattatggtaacttgacccttcctggtggtatgacagattatatggccaccgcttcgtccattgaaagccaatatgcctacgtattatcaccgcagaccatatcaagcttcaggaattatggacttgagtcatttcttgtccgtgttgaagatggtgacatcatcaatcagacttcaagctttgtagctccaagttcactctttcctcgaaatgcagatctggcaattgctcttctttctggtaacggtgtttttcataccgagccgtcagacgatgagtggtatcgcatatcgaagacggattcgagattctctctaggaaatggcaacggatcgtcgagcggtaatccattctacccacctttagaagatggctctccaatgggttgcgcattgcaatggcaattctgcggccaagacacgacagagtgcggtgacctcggaagcatcgcggacgcgctcaatagtgctacacacatcttcgatatcgacggaaagttcaacgcaaccgaagaatacgacaaccctaaagcagcttactttcgctactttgcaatagctctttacaaagcccaaacaattcctggtgtgctacgaactttaggaccaacaagtctccaatcgcaaaagtctctgtttacaggttcacaaggccctttaccctcgaatcaatggcagctcgatgttatgcactgggcggacattcaaatggcagatgcccaattagcatttctcaggacagcttattacaacccgacagattctactctccttgatcttcgtcaaaacttcactggagcagaaacaacgttatgcaacaaccaggtgagaatacctctattgggtcatattttcatccttaaaccgcttctcgatcagaacggcactcctcagataaatcagaatcaggacctcgctaatccatttaccacagaaaatcagaagcacaacgcacagctcttttag

SEQ ID NO: 29696 - protein, 605 aa, Muscodor strobelii
  misc_feature: SGI Peptide ID NO. 570201
  misc_feature (12)..(559): NCBI GI: 169615058 Blast Desc: SNOG_10683 [Phaeosphaeria nodorum SN15] gi|111060957|gb|EAT82077.1| SNOG_10683 [Phaeosphaeria nodorum SN15]
  misc_feature (8)..(559): NCBI GI: 189194015 Blast Desc: conserved [Pyrenophora tritici-repentis Pt-1C-BFP] gi|187978910|gb|EDU45536.1| conserved [Pyrenophora tritici-repentis Pt-1C-BFP]
  misc_feature (14)..(563): NCBI GI: 70986226 Blast Desc: conserved [Aspergillus fumigatus Af293] gi|66846236|gb|EAL86569.1| conserved [Aspergillus fumigatus Af293]
  misc_feature (14)..(563): NCBI GI: 159128250 Blast Desc: conserved [Aspergillus fumigatus A1163]
  misc_feature (14)..(563): NCBI GI: 115399382 Blast Desc: [Aspergillus terreus NIH2624] gi|114192163|gb|EAU33863.1| [Aspergillus terreus NIH2624]
  misc_feature (14)..(563): NCBI GI: 119474227 Blast Desc: NFIA_004500 [Neosartorya fischeri NRRL 181] gi|119407142|gb|EAW17092.1| conserved [Neosartorya fischeri NRRL 181]
  misc_feature (14)..(525): NCBI GI: 169772941 Blast Desc: [Aspergillus oryzae RIB40] gi|83768800|dbj|BAE58937.1| protein product [Aspergillus oryzae]
  misc_feature (10)..(525): NCBI GI: 121699395 Blast Desc: ACLA_082720 [Aspergillus clavatus NRRL 1] gi|119396149|gb|EAW06581.1| ACLA_082720 [Aspergillus clavatus NRRL 1]
  misc_feature (10)..(446): NCBI GI: 115433432 Blast Desc: [Aspergillus terreus NIH2624] gi|114189705|gb|EAU31405.1| [Aspergillus terreus NIH2624]
  misc_feature (13)..(542): NCBI GI: 256721803 Blast Desc: NECHADRAFT_87321 [Nectria haematococca mpVI 77-13-4]
MASSQNGAIDYYPVHLGIWTNWSRGPVFGQTVTLTRREGDLLIAFTALFVALVSNRGWRIMSFALHHFNAKPTPQGTVYHQYQAILRNTDTQTCILQLVNLVWANCFRNVNLIRPLLILMVASIYTVAFTVAGGFSSQISTAVGTEVLIESKNCGWYMDSFASIENAFHAVTVQAGAITNANNYAQQCYSNDSAGILDCGRLTTQKLSATVNTQAPCPFREDVCRSRSNILIDSGYIASHDLGLNTPPRQRMHARMVVHCAPMQTQGFSSRINGTGSVGNLTVYHYGNLTLPGGMTDYMATASSIESQYAYVLSPQTISSFRNYGLESFLVRVEDGDIINQTSSFVAPSSLFPRNADLAIALLSGNGVFHTEPSDDEWYRISKTDSRFSLGNGNGSSSGNPFYPPLEDGSPMGCALQWQFCGQDTTECGDLGSIADALNSATHIFDIDGKFNATEEYDNPKAAYFRYFAIALYKAQTIPGVLRTLGPTSLQSQKSLFTGSQGPLPSNQWQLDVMHWADIQMADAQLAFLRTAYYNPTDSTLLDLRQNFTGAETTLCNNQVRIPLLGHIFILKPLLDQNGTPQINQNQDLANPFTTENQKHNAQLF

SEQ ID NO: 29697 - DNA, 2397 bp, Muscodor strobelii
  misc_feature: SGI EST ID NO. CUFF.70383.1
  misc_feature: Variant of the nucleotide sequence at SEQ ID NO 29695
tgtggccttagtttccaatcgtggatggagaattatgtccttcgcccttcatcatttcaacgcaaagcctaccccgcaaggtacagtgtatcatcagtatcaagcaattctacgaaacacggatactcagacctgcattctacagctcgtaaatctggtttgggcaaactgttttagaaatgtcaacctcattcggccattgttgatcttaatggtggccagcatctatactgtggcttttaccgtcgcaggtggcttttcctcacagatctctacggcggtgggcacggaggttttaattgagagcaaaaattgtggatggtatatggatagcttcgcgtcgattgaaaatgcgtttcatgcggttaccgtccaggctggcgccatcaccaacgcaaataattatgcgcagcaatgctattctaatgatagcgcgggtatcctggactgtggccgcttgacgacgcaaaagctctcggcaacggtcaacacacaagcgccttgtccgtttcgagaagatgtgtgtcgaagccgttccaacatactcattgattcgggctatattgccagtcacgatcttggtcttaacacgccaccacgccaaagaatgcatgccagaatggtggtccattgcgcaccgatgcagacacaggggttctccagtcgcataaatggtaccggttcagtcggaaacctcacggtctatcattatggtaacttgacccttcctggtggtatgacagattatatggccaccgcttcgtccattgaaagccaatatgcctacgtattatcaccgcagaccatatcaagcttcaggaattatggacttgagtcatttcttgtccgtgttgaagatggtgacatcatcaatcagacttcaagctttgtagctccaagttcactctttcctcgaaatgcagatctggcaattgctcttctttctggtaacggtgtttttcataccgagccgtcagacgatgagtggtatcgcatatcgaagacggattcgagattctctctaggaaatggcaacggatcgtcgagcggtaatccattctacccacctttagaagatggctctccaatgggttgcgcattgcaatggcaattctgcggccaagacacgacagagtgcggtgacctcggaagcatcgcggacgcgctcaatagtgctacacacatcttcgatatcgacggaaagttcaacgcaaccgaagaatacgacaaccctaaagcagcttactttcgctactttgcaatagctctttacaaagcccaaacaattcctggtgtgctacgaactttaggaccaacaagtctccaatcgcaaaagtctctgtttacaggttcacaaggccctttaccctcgaatcaatggcagctcgatgttatgcactgggcggacattcaaatggcagatgcccaattagcatttctcaggacagcttattacaacccgacagattctactctccttgatcttcgtcaaaacttcactggagcagaaacaacgttatgcaacaaccagaaaatcagaagcacaacgcacagctcttttagcctctttggtcttcttttcacgttcatcgtgggcgccgccatcatcttaacgtcgttcttgctggagcctacctcttggtttttgtaccgaaggtatggcttcaacgcattcgcaactctggaatggacaaccaacacgactttacaactccaacggctggcacatgaggcgcgagggtttgggacttggtctagagccacaaacagggtcccagttacgcagaccgacgagactttaggctgtctcgacctaagtaaccctcgtcacccgttgttgggctcatatagagctgtgccgacgaaacgttcaattacagatcgtggagtggaaagagttgagtcggctggggaagctgaaaagagtcgaacagcccactcctagccctcttctaaactcaatcaagtcttggctcgccttggacagtcactctaattactttttactcaactaacattatctctacggtcatacatccaatcacggaattccacactgtgaaaggaaggttgattcataattaaatatatattgagtatcgaggatgtcattcgctttgatgtgtacaactaggaaaatggacgttagacattttagaaatctgaaaggaaatctacaatggaattagggttgatcattagcaaacgcatacctacaaatattcagcgtgacgcaccataacaatgtacatgtagcctatagatacctataccctgtttcctacatgatcgtagataatatagtataacaataaaagcgacaagcacaagccactgcctataataatttagctgttgtgacccagatctgtcaagatgtttgtgtttgctttttgc

SEQ ID NO: 29698 - DNA, 1092 bp, Muscodor strobelii
  misc_feature: SGI cDNA ID NO. 570202
  misc_feature: Encodes the peptide sequence at SEQ ID NO 29699
atgttagagtcagcccccatacctgtcattgacatctcagcaagtgagaaggatcaagttcgtgtagccaatgaacttgttgatgcagcagccaagtatggctttatctatatcaagaatactggccatgacatctcttattcccaagtagaggaagccttctcgatatcacgcgacctctttgattcgcctttagaagataagcaaaggtgtaaaattggtatgaatgaccaaggctggtcagggatgcaggacactaatcagcagcaggttggagatttgaaggaaggcttcaactttggccccttcacaaacggtagatcgagccagcccatcccacatagcgtcgagccacataaagccactattgcggcatttcagaaatcatgccatgatctctgtcgcaagttgcttcttttactcggcgtcggcttagaagttgatccaccggatttcttccatgctgtccactcacctgaggcaccatcgggaacaatcttgaggttcttgcactatccgcctgcgaaactgaccccttcgtcacagcaggccgatgtacgggcgggtgcacactcagattatggttctattaccttgctttttcgactcaggggccaggctgggcttgagattttgacaccagaaaacaaatgggctcctgttcctgtttgcccttctgggacagaaaacgattcatcaccaccaatactagtgaatattggcgacttgctttcttactggactaatgggttactccgtagcacggtacatcgagtgacgtttgctggatctggagatacagctggattagtagagggagaaactacgacagagcctcgatattccattgtatatttctgccatccggcagacaacacgccgttgacagccgtgccgagcgaaagggtacacagtttccgggatcgaagggctgatgccaaggaaggaaatccatatgcggaacgcaaggtgttgacagctaatgaacatcttcaaatgcggctccaagcaagctacccagagatgtataaccaaagcgagaaaaagaagaagaagccgtacttgactaattgttcaaacccacggacctga

SEQ ID NO: 29699 - protein, 363 aa, Muscodor strobelii
  misc_feature: SGI Peptide ID NO. 570202
  misc_feature (163)..(289): Pfam Id: PF03171 Pfam Desc: 2OG-Fe(II) oxygenase superfamily
  misc_feature (5)..(347): NCBI GI: 171693493 Blast Desc: protein product [Podospora anserina] gi|170946695|emb|CAP73498.1| protein product [Podospora anserina]
  misc_feature (4)..(345): NCBI GI: 256731410 Blast Desc: [Nectria haematococca mpVI 77-13-4]
  misc_feature (1)..(350): NCBI GI: 39946400 Blast Desc: MGG_08311 [Magnaporthe grisea 70-15] gi|145020045|gb|EDK04273.1| MGG_08311 [Magnaporthe grisea 70-15]
  misc_feature (4)..(345): NCBI GI: 46125269 Blast Desc: FG07012.1 [Gibberella zeae PH-1]
  misc_feature (1)..(349): NCBI GI: 85099091 Blast Desc: NCU01364 [Neurospora crassa OR74A] gi|16415992|emb|CAB88641.2| conserved [Neurospora crassa] gi|28922234|gb|EAA31480.1| conserved [Neurospora crassa OR74A]
  misc_feature (7)..(339): NCBI GI: 240106864 Blast Desc: oxidoreductase, 2OG-Fe(II) oxygenase family protein [Coccidioides posadasii C735 delta SOWgp]
  misc_feature (7)..(339): NCBI GI: 169779199 Blast Desc: [Aspergillus oryzae RIB40] gi|83772803|dbj|BAE62931.1| protein product [Aspergillus oryzae]
  misc_feature (7)..(339): NCBI GI: 119174518 Blast Desc: CIMG_09241 [Coccidioides immitis RS]
  misc_feature (7)..(339): NCBI GI: 255954057 Blast Desc: Pc21g07400 [Penicillium chrysogenum Wisconsin 54-1255] gi|211589492|emb|CAP95637.1| Pc21g07400 [Penicillium chrysogenum Wisconsin 54-1255]
  misc_feature (7)..(339): NCBI GI: 121713806 Blast Desc: oxidoreductase, 2OG-Fe(II) oxygenase family, [Aspergillus clavatus NRRL 1] gi|119402667|gb|EAW13088.1| oxidoreductase, 2OG-Fe(II) oxygenase family, [Aspergillus NRRL 1]
  misc_feature (4)..(300): SWISSPROT Homolog: EC 1.14.11.13 Gibberellin 2-beta-dioxygenase
MLESAPIPVIDISASEKDQVRVANELVDAAAKYGFIYIKNTGHDISYSQVEEAFSISRDLFDSPLEDKQRCKIGMNDQGWSGMQDTNQQQVGDLKEGFNFGPFTNGRSSQPIPHSVEPHKATIAAFQKSCHDLCRKLLLLLGVGLEVDPPDFFHAVHSPEAPSGTILRFLHYPPAKLTPSSQQADVRAGAHSDYGSITLLFRLRGQAGLEILTPENKWAPVPVCPSGTENDSSPPILVNIGDLLSYWTNGLLRSTVHRVTFAGSGDTAGLVEGETTTEPRYSIVYFCHPADNTPLTAVPSERVHSFRDRRADAKEGNPYAERKVLTANEHLQMRLQASYPEMYNQSEKKKKKPYLTNCSNPRT

SEQ ID NO: 29700 - DNA, 1703 bp, Muscodor strobelii
  misc_feature: SGI EST ID NO. CUFF.70262.0
  misc_feature: Variant of the nucleotide sequence at SEQ ID NO 29698
gcttgccataaccttgatcattgacagcgttacaagagcagactatcgtaaacaagtctctcttacattgacctttattttgtgtttcgatcattagatatctagttacataattgaacccgtccttacgcaacataagaccaagacatgttagagtcagcccccatacctgtcattgacatctcagcaagtgagaaggatcaagttcgtgtagccaatgaacttgttgatgcagcagccaagtatggctttatctatatcaagaatactggccatgacatctcttattcccaagtagaggaagccttctcgatatcacgcgacctctttgattcgcctttagaagataagcaaaggtgtaaaattggtatgaatgaccaaggctggtcagggatgcagggtatagaagcctcttagaatagctattcagcaattgttgttatgccattgattatgccgctgaagctgacctgtgtcgtcacagtctgtggccatccgtttcaacaacaggcttgatcgttgccttattccgcttttgaagtcgatccttgtcatcaatctccggatgttgattggactgacatgttttgaaatttagactgaaaagcttgaccccgaaacacaacaggttggagatttgaaggaaggcttcaactttggccccttcacaaacggtagatcgagccagcccatcccacatagcgtcgagccacataaagccactattgcggcatttcagaaatcatgccatgatctctgtcgcaagttgcttcttttactcggcgtcggcttagaagttgatccaccggatttcttccatgctgtccactcacctgaggcaccatcgggaacaatcttgaggttcttgcactatccgcctgcgaaactgaccccttcgtcacagcaggccgatgtacgggcgggtgcacactcagattatggttctattaccttgctttttcgactcaggggccaggctgggcttgagattttgacaccagaaaacaaatgggctcctgttcctgtttgcccttctgggacagaaaacgattcatcaccaccaatactagtgaatattggcgacttgctttcttactggactaatgggttactccgtagcacggtacatcgagtgacgtttgctggatctggagatacagctggattagtagagggagaaactacgacagagcctcgatattccattgtatatttctgccatccggcagacaacacgccgttgacagccgtgccgagcgaaagggtacacagtttccgggatcgaagggctgatgccaaggaaggaaatccatatgcggaacgcaaggtgttgacagctaatgaacatcttcaaatgcggctccaagcaagctacccagagatgtataaccaaagcgagaaaaagaagaagaagccgtacttgactaattgttcaaacccacggacctgaacaatccagtgtcagtgcagaccgacggagactaatgtgtttgcaagaatgagaagcaaggaatatgaatatcaatgcatgagttgtacacacctgatcctatttcaatgatcacagttgggagactatcatgaaatattgaagtacttgtcaagccttctatagatgcccgccgagtgcaactgaaagcccattgagattaaacagtctcgactatagactattgcgaatttaacgctattctagaatatgc

SEQ ID NO: 29701 - DNA, 753 bp, Muscodor strobelii
  misc_feature: SGI cDNA ID NO. 570204
  misc_feature: Encodes the peptide sequence at SEQ ID NO 29702
atgcctcgctccaaggaggtcaaagtcaagaaggacaagaaagagaagaagcgggtcgtcacgcccagtgattcatcggaggatggaggagctacgttagacgtagatgctaccgaggatatctcgatggtagatagtgaagacgagcctactccaaaaaagagcaaaaaggacaagaagattaagaaggagaagaaggagaagaaacagaaggaactcaagaaggaacttaagaaacaagaatccgactctgagtccgactcgagttccgaatcagatgctgaggaggagcctgtagcaggccaattgttctccgtcgacacgaaccctacgcccgttgatccatcaaccgtccagactcacgacgatgagcgagacccagccacagggcgtcatatgccgaaggcacccagcggaatgaatcgagcggaacgacggcgcatcatgctgatcgaaaagcagagacttgtgtatatgaagaagaggggcattccagagggaagcaaagagatggcagacgaaatccagaaagagcttgacgcttggattgagagactagatggcaagggtcttcttcgtgcggagaagaaaagagttcgcaaggagaaagacgcgctgaagctgaagaacaagcgcggaaagatcttgacgggtagaagactcaaggagaggcgaaagcagctggacaagatgcagaagaaggctgacaagaaggctgctaagcgagctgccgccccggagagtggtgcttga

SEQ ID NO: 29702 - protein, 250 aa, Muscodor strobelii
  misc_feature: SGI Peptide ID NO. 570204
MPRSKEVKVKKDKKEKKRVVTPSDSSEDGGATLDVDATEDISMVDSEDEPTPKKSKKDKKIKKEKKEKKQKELKKELKKQESDSESDSSSESDAEEEPVAGQLFSVDTNPTPVDPSTVQTHDDERDPATGRHMPKAPSGMNRAERRRIMLIEKQRLVYMKKRGIPEGSKEMADEIQKELDAWIERLDGKGLLRAEKKRVRKEKDALKLKNKRGKILTGRRLKERRKQLDKMQKKADKKAAKRAAAPESGA

SEQ ID NO: 29703 - DNA, 2225 bp, Muscodor strobelii
  misc_feature: SGI EST ID NO. CUFF.70268.0
  misc_feature: Variant of the nucleotide sequence at SEQ ID NO 29701
ttgccattaccaataagattccctcgagggcaacaatttctgatacaacttactttgaggagctcacaaatctggctacaaccgatatcgtcgacagacaccttctctaattgagcccgttaatacccgtgcgcctgcagacaaatcccccgcgactcagcgcagcaaacatgcctcgctccaaggaggtcaaagtcaagaaggacaagaaagagaagaagcgggtcgtcacgcccagtgattcatcggaggatggaggagctacgttagacgtagatgctaccgaggatatctcgatggtagatagtgaagacgagcctactccaaaaaagagcaaaaaggacaagaagattaagaaggagaagaaggagaagaaacagaaggaactcaagaaggaacttaagaaacaagaatccgactctgagtccgactcgagttccgaatcagatgctgaggaggagcctgtagcaggccaattgttctccgtcgacacgaaccctacgcccgttgatccatcaaccgtccagactcacgacgatgagcgagacccagccacagggcgtcatatgccgaaggcacccagcggaatgaatcgagcggaacgacggcgcatcatgctgatcgaaaagcagagacttgtgtatatgaagaagaggggcattccagagggaagcaaagagatggcagacgaaatccagaaagagcttgacgcttggattgagagactagatggcaagggtcttcttcgtgcggagaagaaaagagttcgcaaggagaaagacgcgctgaagctgaagaacaagcgcggaaagatcttgacgggtagaagactcaaggagaggcgaaagcagctggacaagatgcagaagaaggctgacaagaaggctgctaagcgagctgccgccccggagagtggtgcttgaggcgctgagccgagaggattgcgttaactgctgggcgtaggctgatttcgcgctacgcgaagatggggcaagtgttatgtatgatatatgcccgctctcaagcagaaggccggacgaataagtggctaggttctactacttgcttcggagacagagaaataaagtctctgacaatagcattctatagttacaaatttcacagtgactcaaagaagatggcggagcgaatgacagagcgaatgaccaaaggcaccgagatacaagcattgatatctaagacaagttatgtaagggtagtaaactctgcaacccaagaggatgtcctccgtaactccaaacccggcatgcacctctaatgctttttgtacatgttatacactcaaatacatctcgaaatatcacacccaaatctcatcttacagcgcaacggagtggttgctcatgccttcttcgaagactcaccctcatctttcttctcactatctttcttatccttcttcccagcccaaacctcagaaatctgctcggtgatcaagcccaaatacccaccaccaccctccttcaaagcctcagcctccctcttatccctctgctccttccaattctcatccgcatcgccctgccacacgcgttccaggacccccatattctcttttcgttcttccttctgtttctccacccaagcattatgcaaagctctcttctgcgcctcggagagcatatctatcgatccgccattacgggataactcttcttgtatgaacctcaactctgctcttttctccttctgctcgcgtaagcgggcttgcgtgatctgggcttgagcggggagctcggtgccgaaggcggagctcatgcgcgtgttgaaccgctgggagaaggatttccccgagtagtcgtgggtgagttggttggtgccccagagcgttacgccgccgagggttactgcccgcagatcgagacgtcgcggtggtaggaagagcccgattagggagagtggtgtgactacgagggcgatggtgtggattaagggattggtgttgttgaattggtccacgggcggtggttgtgatatgggggccgttgatgcgcctggttgtggtgatggggtgggagttggggtcgacatttttgcggttggggcgcgttcgtggcgcaatggttttcgcggttggtaaggtgttttggtgttattagggcaggctatggatattgcgaatgcgcctatatttgatgacgatattgactcttgatgtgatggtgttgtattgagtcccttacgagttatggccattcgcatcg

SEQ ID NO: 29704 - DNA, 690 bp, Muscodor strobelii
  misc_feature: SGI cDNA ID NO. 570205
  misc_feature: Encodes the peptide sequence at SEQ ID NO 29705
atgtcgaccccaactcccaccccatcaccacaaccaggcgcatcaacggcccccatatcacaaccaccgcccgtggaccaattcaacaacaccaatcccttaatccacaccatcgccctcgtagtcacaccactctccctaatcgggctcttcctaccaccgcgacgtctcgatctgcgggcagtaaccctcggcggcgtaacgctctggggcaccaaccaactcacccacgactactcggggaaatccttctcccagcggttcaacacgcgcatgagctccgccttcggcaccgagctccccgctcaagcccagatcacgcaagcccgcttacgcgagcagaaggagaaaagagcagagttgaggttcatacaagaagagttatcccgtaatggcggatcgatagatatgctctccgaggcgcagaagagagctttgcataatgcttgggtggagaaacagaaggaagaacgaaaagagaatatgggggtcctggaacgcgtgtggcagggcgatgcggatgagaattggaaggagcagagggataagagggaggctgaggctttgaaggagggtggtggtgggtatttgggcttgatcaccgagcagatttctgaggtttgggctgggaagaaggataagaaagatagtgagaagaaagatgagggtgagtcttcgaagaaggcatga

SEQ ID NO: 29705 - protein, 229 aa, Muscodor strobelii
  misc_feature: SGI Peptide ID NO. 570205
  misc_feature (14)..(219): NCBI GI: 156041100 Blast Desc: SS1G_11529 [Sclerotinia sclerotiorum 1980] gi|154695912|gb|EDN95650.1| SS1G_11529 [Sclerotinia sclerotiorum 1980]
  misc_feature (14)..(222): NCBI GI: 154305271 Blast Desc: BC1G_08930 [Botryotinia fuckeliana B05.10] gi|150853672|gb|EDN28864.1| BC1G_08930 [Botryotinia fuckeliana B05.10]
  misc_feature (32)..(229): NCBI GI: 256731340 Blast Desc: NECHADRAFT_101591 [Nectria haematococca mpVI 77-13-4]
  misc_feature (11)..(226): NCBI GI: 261351519 Blast Desc: conserved [Verticillium albo-atrum VaMs.102]
  misc_feature (23)..(208): NCBI GI: 85102804 Blast Desc: NCU01307 [Neurospora crassa OR74A] gi|16944592|emb|CAC18294.2| [Neurospora crassa] gi|28922938|gb|EAA32157.1| [Neurospora crassa OR74A]
  misc_feature (36)..(222): NCBI GI: 119482181 Blast Desc: NFIA_091820 [Neosartorya fischeri NRRL 181] gi|119409273|gb|EAW19222.1| conserved [Neosartorya fischeri NRRL 181]
  misc_feature (36)..(213): NCBI GI: 71002622 Blast Desc: conserved [Aspergillus fumigatus Af293] gi|66853630|gb|EAL93954.1| conserved [Aspergillus fumigatus Af293] gi|159130046|gb|EDP55160.1| conserved [Aspergillus A1163]
  misc_feature (27)..(216): NCBI GI: 121716866 Blast Desc: conserved [Aspergillus clavatus NRRL 1] gi|119404092|gb|EAW14509.1| conserved [Aspergillus clavatus NRRL 1]
  misc_feature (48)..(227): NCBI GI: 255956267 Blast Desc: Pc21g18950 [Penicillium chrysogenum Wisconsin 54-1255] gi|211590597|emb|CAP96792.1| Pc21g18950 [Penicillium chrysogenum Wisconsin 54-1255]
  misc_feature (40)..(221): NCBI GI: 169775893 Blast Desc: [Aspergillus oryzae RIB40] gi|83771148|dbj|BAE61280.1| protein product [Aspergillus oryzae]
MSTPTPTPSPQPGASTAPISQPPPVDQFNNTNPLIHTIALVVTPLSLIGLFLPPRRLDLRAVTLGGVTLWGTNQLTHDYSGKSFSQRFNTRMSSAFGTELPAQAQITQARLREQKEKRAELRFIQEELSRNGGSIDMLSEAQKRALHNAWVEKQKEERKENMGVLERVWQGDADENWKEQRDKREAEALKEGGGGYLGLITEQISEVWAGKKDKKDSEKKDEGESSKKA

SEQ ID NO: 29706 - DNA, 2178 bp, Muscodor strobelii
  misc_feature: SGI cDNA ID NO. 570206
  misc_feature: Reduced expression when VOC is produced
  misc_feature: Encodes the peptide sequence at SEQ ID NO 29707
atgcttggcggaacccgtacgttgtgcgcaatgccattgaatgaagaatcgattgggggtggtgaccaacggccgaggagggttcggaccagcaaacccaaagtcaagacgggatgcaacagctgcaaacaacgacgtatcaaatgcgacgaacagcgaccagcatgcagtcagtgcgttcgctccaagaaggaatgcactggctatcccccgccgccccgatccaagatctacgaagagatgaggattgcgccaaaaccgcaaacttcacttcaaccctctggtcttgcgccgcgacctttgggaatagcgccacagtcaaaaggtacagatggaacgaacggacatattaggccgatggcccggccgcagcctcgcctacctgcccgacctcaggtaggcgtcacctccaatatcatgcaacagagaccactcccacaacccagtacacctctatccccaccagaagaggcttcattggtacttcaccgaccatcgactattccgttcgactcgcaagaaggccaatacttccaattgttcagggattataccgcaagtgaactgtctgggttctttgactcatccttttggacccgtcgtgtattgcaggaatgccattcggaagcatcgatcaaacacgcagtggtggccctgggtgcgctctacaaaacattagaaaagatgtccgagtcaccgccaaattctccgtgcactgtcgatcactcggacaatgcgaataggcattgggaggttgctttcaagcattatgcattggctatccgagccattgtcaactcagcatcgcaggatcagaataaacaaaaaatgatcctcatggcgtctgtattattgtcgtgctttgactctttcattggcgatcacaaacaagccattggacaaatccagagtggccttggcttattggagacattgcgagctgatcgccgtcggaagagcctccctcgacctgaggagcctgttgagcaggaccttatgcaaatgtttacccgactggcaatccaggcgaagtcatatgacatggcttttcatttcccaaaaccatacgtcattcgcctttcacctaatgctagagacgaacctccatcgcctgattcggatgctccgccacccgtctcgactcatcagattcagataccagaaagatttacttctttgcatgatgcaagattggcgtgggacaccgtctgcgagaaatcaatgactttccacgaacagatgtttacgcatgtgaccatgagtcccatgggtgtcctccctccagagctcaagcagtatggaatggggttcaacgtacaaatggaagcatggtcccgagcattcgaacccattctcgcatcgcgaatggcgcccgcaaagagcctacaagagaagacggccatcgcggtactcaagatgaaccaggtgatgggtcaaatactgttcaacacgtccttcagcgacagcgagatgatctttgacagattcctaccttggtttcgggaaatttgcggtctcgcgctggaagtaatcggagatgaagaacggcgcgcggcagcaaagcgatgcccaaatcccgatacctgcccacaccaacctagtcatccggatatgttcggtggacaatacaccgccaaacacatcaagccaagtttcagcgcagatctcggcatcgttccacctcttttcgttgtcgctacaaaatgccgcgactcgctgatccgacgacaggcaattcagttattactaacaagctcgcggagagaaggaatgtgggatagcgaactatgtgcccgtatagggaactggatcgcaacgatcgaagaagaggaggatagctatatagacagcgcccggcctaattctagctcaactgataccagcagattctctgcaggtagtcctgggtcaacaagatccaatgcttcgccaattctcggagatgaactgcccctgggccctggaggcaatgcgcgatggggcagccgaagagaaagcactcctgcatcacccgagacaagaacagcgcggacaacaattcccgagaggaaacgagttatggttcgcgctgtggagttcgatcttcaaaaacgaagcgctctgatccaatgcggtacgagagggttgatccctggcacgccagacttgagaactcgggccacacaaatcttttggtga

SEQ ID NO: 29707 - protein, 725 aa, Muscodor strobelii
  misc_feature: SGI Peptide ID NO. 570206
  misc_feature (37)..(76): Pfam Id: PF00172 Pfam Desc: Fungal Zn(2)-Cys(6) binuclear cluster domain
  misc_feature (4)..(725): NCBI GI: 116206476 Blast Desc: CHGG_02531 [Chaetomium globosum CBS 148.51] gi|88183128|gb|EAQ90596.1| CHGG_02531 [Chaetomium globosum CBS 148.51]
  misc_feature (43)..(725): NCBI GI: 171693653 Blast Desc: protein product [Podospora anserina] gi|170946775|emb|CAP73579.1| protein product [Podospora anserina]
  misc_feature (23)..(725): NCBI GI: 16944493 Blast Desc: conserved [Neurospora crassa]
  misc_feature (23)..(725): NCBI GI: 164426848 Blast Desc: NCU03728 [Neurospora crassa OR74A] gi|157071501|gb|EAA32268.2| [Neurospora crassa OR74A]
  misc_feature (26)..(725): NCBI GI: 145612225 Blast Desc: MGG_08168 [Magnaporthe grisea 70-15] gi|145019425|gb|EDK03653.1| MGG_08168 [Magnaporthe grisea 70-15]
  misc_feature (26)..(725): NCBI GI: 256730962 Blast Desc: NECHADRAFT_1518 [Nectria haematococca mpVI 77-13-4]
  misc_feature (24)..(725): NCBI GI: 46125599 Blast Desc: FG07177.1 [Gibberella zeae PH-1]
  misc_feature (23)..(615): NCBI GI: 156041026 Blast Desc: SS1G_11491 [Sclerotinia sclerotiorum 1980] gi|154695875|gb|EDN95613.1| SS1G_11491 [Sclerotinia sclerotiorum 1980]
  misc_feature (21)..(359): NCBI GI: 261355704 Blast Desc: conserved [Verticillium albo-atrum VaMs.102]
  misc_feature (24)..(623): NCBI GI: 156035595 Blast Desc: SS1G_13001 [Sclerotinia sclerotiorum 1980] gi|154698406|gb|EDN98144.1| SS1G_13001 [Sclerotinia sclerotiorum 1980]
  misc_feature: Useful for introducing or modulating the production of volatile compounds
MLGGTRTLCAMPLNEESIGGGDQRPRRVRTSKPKVKTGCNSCKQRRIKCDEQRPACSQCVRSKKECTGYPPPPRSKIYEEMRIAPKPQTSLQPSGLAPRPLGIAPQSKGTDGTNGHIRPMARPQPRLPARPQVGVTSNIMQQRPLPQPSTPLSPPEEASLVLHRPSTIPFDSQEGQYFQLFRDYTASELSGFFDSSFWTRRVLQECHSEASIKHAVVALGALYKTLEKMSESPPNSPCTVDHSDNANRHWEVAFKHYALAIRAIVNSASQDQNKQKMILMASVLLSCFDSFIGDHKQAIGQIQSGLGLLETLRADRRRKSLPRPEEPVEQDLMQMFTRLAIQAKSYDMAFHFPKPYVIRLSPNARDEPPSPDSDAPPPVSTHQIQIPERFTSLHDARLAWDTVCEKSMTFHEQMFTHVTMSPMGVLPPELKQYGMGFNVQMEAWSRAFEPILASRMAPAKSLQEKTAIAVLKMNQVMGQILFNTSFSDSEMIFDRFLPWFREICGLALEVIGDEERRAAAKRCPNPDTCPHQPSHPDMFGGQYTAKHIKPSFSADLGIVPPLFVVATKCRDSLIRRQAIQLLLTSSRREGMWDSELCARIGNWIATIEEEEDSYIDSARPNSSSTDTSRFSAGSPGSTRSNASPILGDELPLGPGGNARWGSRRESTPASPETRTARTTIPERKRVMVRAVEFDLQKRSALIQCGTRGLIPGTPDLRTRATQIFW

SEQ ID NO: 29708 - DNA, 3693 bp, Muscodor strobelii
  misc_feature: SGI EST ID NO. CUFF.70410.1
  misc_feature: Variant of the nucleotide sequence at SEQ ID NO 29706
aaaaattatagacaaactcgagacatacccaagttcagattgtccggtgtgagcacaatccattatcattgtcattcctcatctatctcatacgaaacgtgtacatccacctgagctagagcggcgcatagcatcaggattgatccttgccaggtatatgaattgtactacataccaccagctgctgtgctagttcatctgacttgagctcgatgcgaccctactactacccagatagtcaaatatcgagtgcctcgacagagatataaaagaaggcggatacaccgaagatccaccccctggtggttgtaccaccacacaaattgacggattactgcactatttttccccgatcgcgcgcagacccggatcatcccaatcctgaacgcctcgacaattcataaagtctccggagcaatcctaataagagaaatagatccatagcccaccgttgtacctcggacaaaagcttcagtgattcactcgagctcgtcataccacagcaaccgaatcacattggcatttgccaccttgttagcttcatcgtcttccttgcatccttatagttcagttcgcatactcgactgcattgtcacataccgatccagacatactgccgaggacacaaaaccactgtcgcactccttgcttcgatctgttctccaggatcatattgcgaactctacggaatcatttccccactgagccgatcatttgcctaagctactgccaatagagaaggcgtgggaacggatttcgttcagaattggcgcgatactgcgcaggcacttgttgcgttgaactgctagagtatagtggccttcagtccaattttgtcagagttgcttctgattgaggagcgcttcttgtctgcgcatggcatgaagacgccgccgacacgaagcgctgtgacgagagctcatttgacgcgaccgaatagttatgcttggcggaacccgtacgttgtgcgcaatgccattgaatgaagaatcgattgggggtggtgaccaacggccgaggagggttcggaccagcaaacccaaagtcaagacgggatgcaacagctgcaaacaacgacgtatcaaatgcgacgaacagcgaccagcatgcagtcagtgcgttcgctccaagaaggaatgcactggctatcccccgccgccccgatccaagatctacgaagagatgaggattgcgccaaaaccgcaaacttcacttcaaccctctggtcttgcgccgcgacctttgggaatagcgccacagtcaaaaggtacagatggaacgaacggacatattaggccgatggcccggccgcagcctcgcctacctgcccgacctcaggtaggcgtcacctccaatatcatgcaacagagaccactcccacaacccagtacacctctatccccaccagaagaggcttcattggtacttcaccgaccatcgactattccgttcgactcgcaagaaggccaatacttccaattgttcagggattataccgcaagtgaactgtctgggttctttgactcatccttttggacccgtcgtgtattgcaggaatgccattcggaagcatcgatcaaacacgcagtggtggccctgggtgcgctctacaaaacattagaaaagatgtccgagtcaccgccaaattctccgtgcactgtcgatcactcggacaatgcgaataggcattgggaggttgctttcaagcattatgcattggctatccgagccattgtcaactcagcatcgcaggatcagaataaacaaaaaatgatcctcatggcgtctgtattattgtcgtgctttgactctttcattggcgatcacaaacaagccattggacaaatccagagtggccttggcttattggagacattgcgagctgatcgccgtcggaagagcctccctcgacctgaggagcctgttgagcaggaccttatgcaaatgtttacccgactggcaatccaggcgaagtcatatgacatggcttttcatttcccaaaaccatacgtcattcgcctttcacctaatgctagagacgaacctccatcgcctgattcggatgctccgccacccgtctcgactcatcagattcagataccagaaagatttacttctttgcatgatgcaagattggcgtgggacaccgtctgcgagaaatcaatgactttccacgaacagatgtttacgcatgtgaccatgagtcccatgggtgtcctccctccagagctcaagcagtatggaatggggttcaacgtacaaatggaagcatggtcccgagcattcgaacccattctcgcatcgcgaatggcgcccgcaaagagcctacaagagaagacggccatcgcggtactcaagatgaaccaggtgatgggtcaaatactgttcaacacgtccttcagcgacagcgagatgatctttgacagattcctaccttggtttcgggaaatttgcggtctcgcgctggaagtaatcggagatgaagaacggcgcgcggcagcaaagcgatgcccaaatcccgatacctgcccacaccaacctagtcatccggatatgttcggtggacaatacaccgccaaacacatcaagccaagtttcagcgcagatctcggcatcgttccacctcttttcgttgtcgctacaaaatgccgcgactcgctgatccgacgacaggcaattcagttattactaacaagctcgcggagagaaggaatgtgggatagcgaactatgtgcccgtatagggaactggatcgcaacgatcgaagaagaggaggatagctatatagacagcgcccggcctaattctagctcaactgataccagcagattctctgcaggtagtcctgggtcaacaagatccaatgcttcgccaattctcggagatgaactgcccctgggccctggaggcaatgcgcgatggggcagccgaagagaaagcactcctgcatcacccgagacaagaacagcgcggacaacaattcccgagaggaaacgagttatggttcgcgctgtggagttcgatcttcaaaaacgaagcgctctgatccaatgcggtacgagagggttgatccctggcacgccagacttgagaactcgggccacacaaatcttttggtgatttgatactgccaaggaattcacagtcatctgcagaatgcagccgttttatcatgtgtcatcttgcgcggcaccagacaaatatcggtttcgcttccacttacatatcatacaatttataggccggtccaatattcgcttatactacccgatgacttacgcccattgaaaagactacaagccgaggaacatggcgaaaaaaaacatcttatagtaatgtgttttcttatttcagacgcaagcgcagcgcaagccggcaatagcacagcgagacgatgaccatgagtagacggaaaattatttatgtacaatacgatagcgcttgcattacagaccatataatttgatggccgatgattcatttgagacatgacgattacaggcccaggatactcagtaattgtggaagtccctcgtggactggctacgtgagaatcctcccaacagcctagacaatgtaaaaagttttctagaactgtctagctatatgctaagcaaaggaattataacttggtcgcagatctcatctactaaagagtactatgagatgacccaacaatagaacatgttaaga

SEQ ID NO: 29709 - DNA, 2127 bp, Muscodor strobelii
  misc_feature: SGI cDNA ID NO. 570207
  misc_feature: Encodes the peptide sequence at SEQ ID NO 29710
atggctgcacggctcaagcgcctcgaaggcatggtccgtggaatgatcgagttggacggcactgccgaaggtagcctcggtggaaacaacgtgaccgcccagccacatagaatggctggctccgttgtgcacagtgagaaggggacgaattacgttggtggaacgcatttcatggccatcttagaggatctcgaggatctcaaagcatattttgaagaagactccgggaatcaggaaatcgacgttgacgatagttatgaactggggccaagcgacctattaatatctccccgatctcaaccacgaaacaaaaatgaactccttgctcttctcccggacaaaagtgtcatggatcggctaatgaatcgctatttcaactcgaatagtccctcccagcatattattcatatccctacctttacgaaacagtacaacgtgtttctgaaagatcctcaagccgcagatcttcactggatagccaccctattcataatactgtcactgggtattttcttttcgtcttttctggcacctcacgagctggagctcgattctgcaatgcctgccatggaccggtatagacaatatcgcggtgcatgcggctgggcattgatacgggggaagttttcacagcctggccctttcactcttcaggccatgatgttatacacggaggctgaattcctcgtgaaccgcgtttcacagacaaattgctacttactttgttcgacgctgatacggctcatgttaaagtgtggcttacatcgagacccgagcaagctgcctagcattacgccgtatcagggggagatgcgtcgtcggctttggaatctcggagtccagattgaccttcttgtatcattccatttagggctgccttgtatgatccatggcattgaaagcgataccgccctaccacgtaatctactcgactctgacttcaacgaagatagccccgaattaccgccttcacgccctatgtcagactacacacctcttacttatgcgatcaacaaagcgaggattgcccggggctttggacttgttgcacgacttgctcattccttaactgtaccctcatatgccgaagttatgcgcgttgatagccgcatccaagacgtatggtctagcgtcccgtcatacatgagagtcaagcccatgtcagagtgcatcaccgatgcacccatgcttgtcattcaacgctttggtcttgcgtcactataccaaaaaagcagatgtgtcctccatcgccgatatctcgttgatcttcgacgcctccccgagcacgattattcccgacggacgtgtcttgaggctgcgattatgttgctggggtaccagactactatgtacgaagcatgcaagccgggaggtatgctggcacaaaatggatggttcattgcctcgcttgctatcaatgacttcctactagccgatatgatactcgcgctcgctgctcaacagcggaatgagaatgatgataatcttcctgaatggatggcagcatgtaatccgcctgtcactaaggacttggctgtcgaaatgttgaagcggtcgtatggaatttggctgaagatggccgctggcgtacccgattgtcgcaaagcagcagacgtcgttcgaggattgctccgacgaatccatgcccagcttggtgagagcactgcagaatatgattcattggccgacactatggcaacagtcggcggcaactcacaatcaccgcccttgggtagattgacgctggccggcgtaagtagtgctaatactaataactcagatgcttcatggcatacaattagcaccaggagtggcagcacaactggaccgtcaccacataatctgggggagttgaacatgatggatacaaacctcatatcgatgggtaacagtggtggtgacatgaatgcgatgaatattgatgagtcttggggtatatcgcagatgtcgatcggctataattggaatcaatttgatgctatgactcggggcgctgataacataccggctacacaaataccgcaagctccgcagctttctgaccagacctggctcgaacaaaacaactacaatgacttcacggactttgttgcttcgaattcctggaacacgtttcctcaagtatag

SEQ ID NO: 29710 - protein, 708 aa, Muscodor strobelii
  misc_feature: SGI Peptide ID NO. 570207
  misc_feature (210)..(313): Pfam Id: PF04082 Pfam Desc: Fungal specific transcription factor domain
  misc_feature (234)..(313): Pfam Id: PF04082 Pfam Desc: Fungal specific transcription factor domain
  misc_feature (1)..(574): NCBI GI: 256731355 Blast Desc: NECHADRAFT_49195 [Nectria haematococca mpVI 77-13-4]
  misc_feature (1)..(702): NCBI GI: 46125641 Blast Desc: FG07198.1 [Gibberella zeae PH-1]
  misc_feature (1)..(560): NCBI GI: 261355608 Blast Desc: conserved [Verticillium albo-atrum VaMs.102]
  misc_feature (110)..(547): NCBI GI: 171693981 Blast Desc: protein product [Podospora anserina] gi|170946939|emb|CAP73743.1| protein product [Podospora anserina]
  misc_feature (39)..(485): NCBI GI: 119468070 Blast Desc: fungal specific transcription factor, [Neosartorya fischeri NRRL 181] gi|119405993|gb|EAW15944.1| fungal specific transcription factor, [Neosartorya fischeri NRRL 181]
  misc_feature (51)..(548): NCBI GI: 258575723 Blast Desc: conserved [Uncinocarpus reesii 1704] gi|237902309|gb|EEP76710.1| conserved [Uncinocarpus reesii 1704]
  misc_feature (17)..(557): NCBI GI: 238484975 Blast Desc: C6 transcription factor, [Aspergillus flavus NRRL3357] gi|220701776|gb|EED58114.1| C6 transcription factor, [Aspergillus flavus NRRL3357]
  misc_feature (40)..(592): NCBI GI: 259484596 Blast Desc: TPA: Zn(II)2Cys6 transcription factor (Eurofung) [Aspergillus nidulans FGSC A4]
  misc_feature (40)..(592): NCBI GI: 67537954 Blast Desc: AN5147.2 [Aspergillus nidulans FGSC A4] gi|40743138|gb|EAA62328.1| AN5147.2 [Aspergillus nidulans FGSC A4]
  misc_feature (4)..(666): NCBI GI: 259482307 Blast Desc: TPA: Zn(II)2Cys6 transcription factor (Eurofung) [Aspergillus nidulans FGSC A4]
MAARLKRLEGMVRGMIELDGTAEGSLGGNNVTAQPHRMAGSVVHSEKGTNYVGGTHFMAILEDLEDLKAYFEEDSGNQEIDVDDSYELGPSDLLISPRSQPRNKNELLALLPDKSVMDRLMNRYFNSNSPSQHIIHIPTFTKQYNVFLKDPQAADLHWIATLFIILSLGIFFSSFLAPHELELDSAMPAMDRYRQYRGACGWALIRGKFSQPGPFTLQAMMLYTEAEFLVNRVSQTNCYLLCSTLIRLMLKCGLHRDPSKLPSITPYQGEMRRRLWNLGVQIDLLVSFHLGLPCMIHGIESDTALPRNLLDSDFNEDSPELPPSRPMSDYTPLTYAINKARIARGFGLVARLAHSLTVPSYAEVMRVDSRIQDVWSSVPSYMRVKPMSECITDAPMLVIQRFGLASLYQKSRCVLHRRYLVDLRRLPEHDYSRRTCLEAAIMLLGYQTTMYEACKPGGMLAQNGWFIASLAINDFLLADMILALAAQQRNENDDNLPEWMAACNPPVTKDLAVEMLKRSYGIWLKMAAGVPDCRKAADVVRGLLRRIHAQLGESTAEYDSLADTMATVGGNSQSPPLGRLTLAGVSSANTNNSDASWHTISTRSGSTTGPSPHNLGELNMMDTNLISMGNSGGDMNAMNIDESWGISQMSIGYNWNQFDAMTRGADNIPATQIPQAPQLSDQTWLEQNNYNDFTDFVASNSWNTFPQV

SEQ ID NO: 29711 - DNA, 3237 bp, Muscodor strobelii
  misc_feature: SGI EST ID NO. CUFF.70298.0
  misc_feature: Variant of the nucleotide sequence at SEQ ID NO 29709
tcgggatatgtccatcatccacgacccatcatcatttgtcaataatatcacaccaagatctccgtacgatttatatgacttcccaaggtagttgcgttatctcaacccagatcgttatcgagtctttgaggcccgtgagcaagccaaatgctgcttttgcagtagatccggggataatgcgggtcccgttgcggcttagcatgttcctccaacgtcatttgggctttacatatttgtgaccaaccatatcgtttcataactccataccatttttgaatctctgaaaggacaccaactgactatcccgcaattccaaagattttaggcactattgagaatctacagtcaaatccatggcagattctatgtccgcatcgcctgaagaccccagcagcacgcaccctgtggaagactccggtaatagtcaaaagacaacactagactctttagaagcacaggcgtcggctcccacaaagcgaacacgcgttctgctatcatgtcatccttgtcggatttccaaactgaaatgtgatcgcaccactccatgtggccagtgtcttaagaaaggaaagccagacacttgcgcctatgctccaaggccggagaagtcgaagccgtctaaatcgatggctgcacggctcaagcgcctcgaaggcatggtccgtggaatgatcgagttggacggcactgccgaaggtagcctcggtggaaacaacgtgaccgcccagccacatagaatggctggctccgttgtgcacagtgagaaggggacgaattacgttggtggaacgcatttcatggccatcttagaggatctcgaggatctcaaagcatattttgaagaagactccgggaatcaggaaatcgacgttgacgatagttatgaactggggccaagcgacctattaatatctccccgatctcaaccacgaaacaaaaatgaactccttgctcttctcccggacaaaagtgtcatggatcggctaatgaatcgctatttcaactcgaatagtccctcccagcatattattcatatccctacctttacgaaacagtacaacgtgtttctgaaagatcctcaagccgcagatcttcactggatagccaccctattcataatactgtcactgggtattttcttttcgtcttttctggcacctcacgagctggagctcgattctgcaatgcctgccatggaccggtatagacaatatcgcggtgcatgcggctgggcattgatacgggggaagttttcacagcctggccctttcactcttcaggccatgatgttatacacggaggctgaattcctcgtgaaccgcgtttcacagacaaattgctacttactttgttcgacgctgatacggctcatgttaaagtgtggcttacatcgagacccgagcaagctgcctagcattacgccgtatcagggggagatgcgtcgtcggctttggaatctcggagtccagattgaccttcttgtatcattccatttagggctgccttgtatgatccatggcattgaaagcgataccgccctaccacgtaatctactcgactctgacttcaacgaagatagccccgaattaccgccttcacgccctatgtcagactacacacctcttacttatgcgatcaacaaagcgaggattgcccggggctttggacttgttgcacgacttgctcattccttaactgtaccctcatatgccgaagttatgcgcgttgatagccgcatccaagacgtatggtctagcgtcccgtcatacatgagagtcaagcccatgtcagagtgcatcaccgatgcacccatgcttgtcattcaacgctttggtcttgcgtcactataccaaaaaagcagatgtgtcctccatcgccgatatctcgttgatcttcgacgcctccccgagcacgattattcccgacggacgtgtcttgaggctgcgattatgttgctggggtaccagactactatgtacgaagcatgcaagccgggaggtatgctggcacaaaatggatggttcattgcctcgcttgctatcaatgacttcctactagccgatatgatactcgcgctcgctgctcaacagcggaatgagaatgatgataatcttcctgaatggatggcagcatgtaatccgcctgtcactaaggacttggctgtcgaaatgttgaagcggtcgtatggaatttggctgaagatggccgctggcgtacccgattgtcgcaaagcagcagacgtcgttcgaggattgctccgacgaatccatgcccagcttggtgagagcactgcagaatatgattcattggccgacactatggcaacagtcggcggcaactcacaatcaccgcccttgggtagattgacgctggccggcgtaagtagtgctaatactaataactcagatgcttcatggcatacaattagcaccaggagtggcagcacaactggaccgtcaccacataatctgggggagttgaacatgatggatacaaacctcatatcgatgggtaacagtggtggtgacatgaatgcgatgaatattgatgagtcttggggtatatcgcagatgtcgatcggctataattggaatcaatttgatgctatgactcggggcgctgataacataccggctacacaaataccgcaagctccgcagctttctgaccagacctggctcgaacaaaacaactacaatgacttcacggactttgttgcttcgaattcctggaacacgtttcctcaagtataggtctgctacattctcagcagccagaacagtcacgacttttgaatctcacactttgatatacccccccagcgctatttttaggtatgaagcttgtttagttaataggaggacgtgataaaacggctggaaaaagccacggcacagctcaacttttctacatagctataattcaggagttgctgagaggatgtgctgtactctgacgcaaaattatccggtagtgaatcaagttgatactatgtcaaaaggagtaccaccacctaccacgttattgtcgatactgttacaattcattctattgaccgtggtaattacacgcatttactaaactcatgattctctttgacttcttcgatacatctcaaacagtcaatcagcgtatcactatgatccgcgtggtctaagcgtagcgctctgtatggtcacatggaatcgtggccatggttctacaatctcatttgatgcgcaagattgaggatgtttg

SEQ ID NO: 29712 - DNA, 1395 bp, Muscodor strobelii
  misc_feature: SGI cDNA ID NO. 570208
  misc_feature: Reduced expression when VOC is produced
  misc_feature: Encodes the peptide sequence at SEQ ID NO 29713
atggcttcgtctaatcctattcctatccggaccgatctggctattcgtacagtaccaaacgaccaccataattcttccccaaaaagtgtacagtactcaagacacaagcacacccgatcgtcttactctgagagctcgccattgactgctgtgtcacgaaataattcacttagcttccgcccattgaaacgtgcaaccccgtcgccagacaaaacaattgcagttatcaatgccagtggtcgacaggctgcctcattaatccggatagcgactgctgtgggattcaaagtcagagcccagttgcggaatttggagggtgttatagccacggaagtatctacgaaccccaatgtcacggttttcgtgggagaactatacgtccgaaagaaacctgatgaccagcaagacgtcacggagaatggcgaactgccggggatatctgttaatcacgagttgatagcccagctgttctgtggtgctcaactcgctttcatcaatacaacgttttatggcaatgaagttagcattggacaggctatcgccgatgcggctaagaaggtgggagttcagcattacgtttattcatcaatgccagaccatgctagatataacgccagttggccctcgctacccctttgggccgcgaagcatgacgtggaagactacatacgaaagatggaattgccagcaacttttgtatacactggaatctacaacaataacttcacatcactcctttatcccttgttctgtatggaattgcagaacgatggatcgttcgtctggcaagcacctttccacccagatgccaaacttccctggttggatgccgagcacgatgttggaccagcgataatacagctgttcaaagatgggcccgcaaaatggaacgggaagcgaatcgccctcgcttacgaatatctaagtccgcgagaggcgtgcaaggcattcgaacacggtctcggtaggcctgtccgttacaagcgaggacctatagaaatcaaagtcaagattccgaatgggtacagaaagcaattggaagctctggaaacactcttttccccggataacaaagacttgtcaaatcaaccaccgtattttggcgaccaagagcttgacagaagatgtccagctgatgccttggcattatgggaaggaccgcgggggcttgaagaatacgcgagagagatcttcgccatggaggaagaagctaacgggaagacgtggatgttcagcgatgaagagggggaattttatggcgctacacacatctctccaatacaggaaccccatgaaaacaggaccgaagaagatgaaggcgacgattcctctgttgacgaaggactcataatgcgaggcttgaagagagacgaagaggactggctagcatcatga

SEQ ID NO: 29713 - protein, 464 aa, Muscodor strobelii
  misc_feature: SGI Peptide ID NO. 570208
  misc_feature (73)..(329): Pfam Id: PF05368 Pfam Desc: NmrA-like family
  misc_feature (29)..(463): NCBI GI: 46125639 Blast Desc: FG07197.1 [Gibberella zeae PH-1]
  misc_feature (7)..(463): NCBI GI: 3549877 Blast Desc: nitrogen metabolite repression-(nmr)-responsible protein [Gibberella fujikuroi]
  misc_feature (7)..(463): NCBI GI: 256731354 Blast Desc: [Nectria haematococca mpVI 77-13-4]
  misc_feature (6)..(463): NCBI GI: 67477341 Blast Desc: NMR_NEUCR RecName: Full=Nitrogen metabolic regulation protein; Short=Protein NMR gi|12718468|emb|CAC28734.1| nitrogen metabolic regulation protein nmr [Neurospora crassa]
  misc_feature (7)..(463): NCBI GI: 171693979 Blast Desc: protein product [Podospora anserina] gi|170946938|emb|CAP73742.1| protein product [Podospora anserina]
  misc_feature (67)..(463): NCBI GI: 116197973 Blast Desc: CHGG_07142 [Chaetomium globosum CBS 148.51] gi|88178421|gb|EAQ85889.1| CHGG_07142 [Chaetomium globosum CBS 148.51]
  misc_feature (67)..(463): NCBI GI: 164426515 Blast Desc: NCU04158 [Neurospora crassa OR74A] gi|157071366|gb|EAA32078.2| NCU04158 [Neurospora crassa OR74A]
  misc_feature (68)..(463): NCBI GI: 145612972 Blast Desc: MGG_12473 [Magnaporthe grisea 70-15] gi|145020054|gb|EDK04282.1| MGG_12473 [Magnaporthe grisea 70-15]
  misc_feature (1)..(418): NCBI GI: 154298297 Blast Desc: BC1G_11993 [Botryotinia fuckeliana B05.10] gi|150858179|gb|EDN33371.1| BC1G_11993 [Botryotinia fuckeliana B05.10]
  misc_feature (1)..(413): NCBI GI: 156050475 Blast Desc: SS1G_07824 [Sclerotinia sclerotiorum 1980] gi|154692225|gb|EDN91963.1| SS1G_07824 [Sclerotinia sclerotiorum 1980]
  misc_feature: Useful for introducing or modulating the production of volatile compounds
MASSNPIPIRTDLAIRTVPNDHHNSSPKSVQYSRHKHTRSSYSESSPLTAVSRNNSLSFRPLKRATPSPDKTIAVINASGRQAASLIRIATAVGFKVRAQLRNLEGVIATEVSTNPNVTVFVGELYVRKKPDDQQDVTENGELPGISVNHELIAQLFCGAQLAFINTTFYGNEVSIGQAIADAAKKVGVQHYVYSSMPDHARYNASWPSLPLWAAKHDVEDYIRKMELPATFVYTGIYNNNFTSLLYPLFCMELQNDGSFVWQAPFHPDAKLPWLDAEHDVGPAIIQLFKDGPAKWNGKRIALAYEYLSPREACKAFEHGLGRPVRYKRGPIEIKVKIPNGYRKQLEALETLFSPDNKDLSNQPPYFGDQELDRRCPADALALWEGPRGLEEYAREIFAMEEEANGKTWMFSDEEGEFYGATHISPIQEPHENRTEEDEGDDSSVDEGLIMRGLKRDEEDWLAS

SEQ ID NO: 29714 - DNA, 2988 bp, Muscodor strobelii
  misc_feature: SGI EST ID NO. CUFF.70314.0
  misc_feature: Variant of the nucleotide sequence at SEQ ID NO 29712
ctctcaaagcttcttctacatgactactgcatcgcgatttactacccgaccgttatcatactctcactagcgtgtcgtccgtcacccgcataacctcctcacatatatctttaccttggccctattggatcgtcacggtgcctaccccggaccgaatagacttcgtctcagcctctttgaatatttctgcgagtactgaagcccagaagtatcggtcaaaaaaccacaatccctatatacgccagcccgcgtcccccttttatctgtcaaagaatcttgtttgcccgccctgccctaagataccatcagccgggctctaccccagatttgaagaagtcaagctactctgtctctttctccgcctaatcacaccataccaacttaaaccaacggcatcacatctgcgctgtcggaccgacccaccgacggacggccccatcaccggacatttatcttctcttcccacgggcacaggcctactgtcctcctgatgatccattgctctagccaattaggacataatcgaggacccgtagttttggtgaagtacaggtctattttctcccctggcatactctgacacagtttgtatctgggtagcattgctttagctctcccgccgccaaggttcctggaccaacccgctacaggcccttttggctcagatggaacaaaccatcatattctgttgttattatctctggtgacttgtttgcttggccaaccatttttctttggcgttttcgcaacgtgcttgcgttcaattttctctaggtcgcggaccgtcttaagaccctgtctgttactacaaagtcgttgacaaattgttgagtctatgagattctacatgcaaatctcgtccaccaacttcataattggctacctccacgtgccttcgtctggtattccctgcgctatctttgagtagggggctcaataggttgcgttctgcattctctgagccctcttccagcttcactagttcgaccagggacatcacaagtagattacaccgtctatttgacgttgaagggagtgttgttggtgcagactccgcgtccgcttgtgatcattgcattgttagctgcaaagagtgcacatgacaattcacagtatggcttcgtctaatcctattcctatccggaccgatctggctattcgtacagtaccaaacgaccaccataattcttccccaaaaagtgtacagtactcaagacacaagcacacccgatcgtcttactctgagagctcgccattgactgctgtgtcacgaaataattcacttagcttccgcccattgaaacgtgcaaccccgtcgccagacaaaacaattgcagttatcaatgccagtggtcgacaggctgcctcattaatccggatagcgactgctgtgggattcaaagtcagagcccagttgcggaatttggagggtgttatagccacggaagtatctacgaaccccaatgtcacggttttcgtgggagaactatacgtccgaaagaaacctgatgaccagcaagacgtcacggagaatggcgaactgccggggatatctgttaatcacgagttgatagcccagctgttctgtggtgctcaactcgctttcatcaatacaacgttttatggcaatgaagttagcattggacaggctatcgccgatgcggctaagaaggtgggagttcagcattacgtttattcatcaatgccagaccatgctagatataacgccagttggccctcgctacccctttgggccgcgaagcatgacgtggaagactacatacgaaagatggaattgccagcaacttttgtatacactggaatctacaacaataacttcacatcactcctttatcccttgttctgtatggaattgcagaacgatggatcgttcgtctggcaagcacctttccacccagatgccaaacttccctggttggatgccgagcacgatgttggaccagcgataatacagctgttcaaagatgggcccgcaaaatggaacgggaagcgaatcgccctcgcttacgaatatctaagtccgcgagaggcgtgcaaggcattcgaacacggtctcggtaggcctgtccgttacaagcgaggacctatagaaatcaaagtcaagattccgaatgggtacagaaagcaattggaagctctggaaacactcttttccccggataacaaagacttgtcaaatcaaccaccgtattttggcgaccaagagcttgacagaagatgtccagctgatgccttggcattatgggaaggaccgcgggggcttgaagaatacgcgagagagatcttcgccatggaggaagaagctaacgggaagacgtggatgttcagcgatgaagagggggaattttatggcgctacacacatctctccaatacaggaaccccatgaaaacaggaccgaagaagatgaaggcgacgattcctctgttgacgaaggactcataatgcgaggcttgaagagagacgaagaggactggctagcatcatgaccttgccagtttagattcgaggtaacaattcattgtggagaattagtctcaatggcctcgacggcagcgatagcaaaacatgcaggatatcgccatccggcattcagcggaatcgccgttctagggctctattgatagttgacgcaagttactacggttacccgctgttgtggtctttgcgaattcgtcgggttcgacaattatcacggtcgaatcctcgttgggctagagacacgctcagtcttcaactttgaaatcggaaataatcacactttggcaaaaaatcaatagggtgtttgtggatatcgttgacaacagtatatggaatataaatggacagaaaggtgcatacggcaatgtttctatcttattagcttggcgtctaggctccacacaaaaatagtaatttgtcttcacaataaaagaccatttctttgggatcaaaaactcaaatagcctgtgagtaaatacacatcggg

SEQ ID NO: 29715 - DNA, 2397 bp, Muscodor strobelii
  misc_feature: SGI cDNA ID NO. 570209
  misc_feature: Encodes the peptide sequence at SEQ ID NO 29716
atgccgcctcaacggcccgctaccaaggcttcagcgcggtcggtgatgcggaagtcgaagatgagggtgtcgaacaacgctaatgcgtcagggactatctcgagacaagaaaggaagctaatctcagaagcggcagcacgcaaagctcggcgaaagttcgacaggcttggtgagaggcctactaatccagaggattggtaccacatcatggaggtgacccaaacccgcaaaagatccggaagcggagcttgggatgacaattaccgaccgcccaagaagagcaagacgactacggaaactgaacaagaagatacccttgaccagacccagggaaagaagaagggtcacgatttttcatcggccataagtctcttaactgtgcgcaagaaggcgactcccaaggcgaagggcgggaagactgagcaggagaaggataatgctcccggtcaagatacccaggacaagtcttcgcaagacaagagtaccaaggcaaagaagagcaatgccaaaggaaaaggacgagcatcccttccccccaggaactggctgaatgatccaagtcttgagcaaccacgatccggcagcgatcttcccgtggtacttcatcctgccaactctactaatgaccctatcaagaacttgggcgaactcgcacgcatacccactgagattcgcgatgagattctgcgcaacctacttgtttggccagagaacatcctggtgtttcgcggatggtccattgtctatcctcgagcgcgcatcgatcttgctgtcgcagttctaagaacatgtcgcatgttgatggatcaaggcctgaaaatcatgttcggagagaacacgttcgagtacgatcttcgtgaccctctcaatgcacacactcacacaatgcctgtcatcgacaaggtattcaacaagagccacatcaagattgattggttcggtcatctcatccgaaacgtgaagatcaaagtgcatcgcaaccgcatgggcgaagcggcacaaagacaagatattgagaaggccattttcaagttcctcccaggaggcgggctgacgcagccttctaatcttcacactctcaccctcgaagtccctgccatgacgatggaagacatgaggcttcctggctggcgtaaaaatccagacgatgttccagtcgccctgatgttgaataaaaacgacaagaagatcataaagggactcaaggatctcaacgtccgcttcatcagaattctcgcacgacgtcgtgaggatgatgagaaaaagcctcccccaattcccaactgctacgaggcgatcatagactgtggatatctcgcaaaagacaaacatctgcaggcccaacaggaagcgaatgaatcgggtgccgttgtgcccaaggacgtcgagtggatacagcagcactgggtagccgaagtgaaaaaggccaaacatcgaattatgaacattccatggcgcattgagggtcttgccttgaaccccgacgaagccatcaagatgcgtctctggagacctattcatgtccccggcggacgtcacacctacatcacgttccctgtctcatcattaccctcctccgttgcaagcacgtcggctcgatcaagtgccaccccgactgtgggctctagcaatgcagctggagctttcgcgggcactgctaatagtggcagtgacttcaccgctgctccgtccggcttaccgttcatacgacccgattccagcacctattccagcaccacaatcagcatgatgactgctccccaggcgaccaaggacggcaaattgtacggcgtcttcaagaccaagtccaagtgcccgtccaatctcgccaaaggcagaattcccaccaagcctccaatctttggtcccggccttgatctggagaatacgactggattgcagtctaccgcagcgcgcgactcgcatattgtcaagctcaactatactccaggcagacatgcctctgaagttcgggcacttgccagcactagccagtcatccgctttaccggccagttctatcctcaacgttgcaaacgcggccgatgatgcaaggcttctcaaagcacaacagggtgtggaagaggacaatatctcttctaatcaaggcgggatgcttactgccgacttgcttgaggatgtgactgagcacggctatgacaccactaatacgaagggcaaaggaaaggaggtcctaccggacaacgaagacactccgggctaccgcagtgtgatagaaatttcggacgacgaagactctctgtttgtccagcaagacgaaaatcccaagtcaccgagagaggagaaggcaaaggaaaaaaccgagaatcctaccataaggctaaggatcagagtactagacaaagacggagcttgtattgaggctcgagaccgatga

SEQ ID NO: 29716 - protein, 798 aa, Muscodor strobelii
  misc_feature: SGI Peptide ID NO. 570209
  misc_feature (217)..(388): NCBI GI: 46125571 Blast Desc: FG07163.1 [Gibberella zeae PH-1]
  misc_feature (204)..(411): NCBI GI: 116198133 Blast Desc: CHGG_07222 [Chaetomium globosum CBS 148.51] gi|88178501|gb|EAQ85969.1| CHGG_07222 [Chaetomium globosum CBS 148.51]
  misc_feature (217)..(364): NCBI GI: 256730957 Blast Desc: NECHADRAFT_84701 [Nectria haematococca mpVI 77-13-4]
  misc_feature (212)..(364): NCBI GI: 16944626 Blast Desc: [Neurospora crassa]
  misc_feature (212)..(364): NCBI GI: 164426885 Blast Desc: NCU03762 [Neurospora crassa OR74A] gi|157071515|gb|EAA31873.2| [Neurospora crassa OR74A]
  misc_feature (217)..(287): NCBI GI: 261354826 Blast Desc: [Verticillium albo-atrum VaMs.102]
  misc_feature (217)..(330): NCBI GI: 171692857 Blast Desc: protein product [Podospora anserina] gi|170946377|emb|CAP73178.1| protein product [Podospora anserina]
MPPQRPATKASARSVMRKSKMRVSNNANASGTISRQERKLISEAAARKARRKFDRLGERPTNPEDWYHIMEVTQTRKRSGSGAWDDNYRPPKKSKTTTETEQEDTLDQTQGKKKGHDFSSAISLLTVRKKATPKAKGGKTEQEKDNAPGQDTQDKSSQDKSTKAKKSNAKGKGRASLPPRNWLNDPSLEQPRSGSDLPVVLHPANSTNDPIKNLGELARIPTEIRDEILRNLLVWPENILVFRGWSIVYPRARIDLAVAVLRTCRMLMDQGLKIMFGENTFEYDLRDPLNAHTHTMPVIDKVFNKSHIKIDWFGHLIRNVKIKVHRNRMGEAAQRQDIEKAIFKFLPGGGLTQPSNLHTLTLEVPAMTMEDMRLPGWRKNPDDVPVALMLNKNDKKIIKGLKDLNVRFIRILARRREDDEKKPPPIPNCYEAIIDCGYLAKDKHLQAQQEANESGAVVPKDVEWIQQHWVAEVKKAKHRIMNIPWRIEGLALNPDEAIKMRLWRPIHVPGGRHTYITFPVSSLPSSVASTSARSSATPTVGSSNAAGAFAGTANSGSDFTAAPSGLPFIRPDSSTYSSTTISMMTAPQATKDGKLYGVFKTKSKCPSNLAKGRIPTKPPIFGPGLDLENTTGLQSTAARDSHIVKLNYTPGRHASEVRALASTSQSSALPASSILNVANAADDARLLKAQQGVEEDNISSNQGGMLTADLLEDVTEHGYDTTNTKGKGKEVLPDNEDTPGYRSVIEISDDEDSLFVQQDENPKSPREEKAKEKTENPTIRLRIRVLDKDGACIEARDR

SEQ ID NO: 29717 - DNA, 1461 bp, Muscodor strobelii
  misc_feature: SGI cDNA ID NO. 570210
  misc_feature: Encodes the peptide sequence at SEQ ID NO 29718
atggctgcaccgaccgaaatccgggtgaaatttactaccacagaggtcgaccctgagcttcaagtaccagaggacaagagcgcaactctcgtcgtgcccacagatctcagacgctatggcttatcgaagattctcaactcggaggtgcttcttgacacctctgcaccaatcggcttcaatttcttgatcaatggccagttcttgacaacgtcgttacaagattatatcctggcgaacggtctcaatgccgaagcgacagtgaccctacaatacgtccgccatttgaccccgcctgttcatcaagccagcttccaacacgacgactgggtcagctcagtcgatgttctctctgcgacctctcgtgcaggtgtctggtcaggcgacaagctgcctctgggccaggaccgtattgtttccggctcatatgatggtcttctgcgcatatggaacccatccggtgaagttgttgcgacgtcacagtctggaacatcaggcggccatactccgagtatcaaagatgtcaaattcatgtcttcaacaaagatcgcctcctcgggcctcgatcgcactataaggatatggaaatatggtgaatcagaggacggaatgcagcgcacattcaagcctagtcttgaactctacggtcacagagccagcgttgactctcttgacgtccatacaccctcgggtcgtattcttagcgcatcagcagacggtgccattggtatctggaccacatcccggaattccgcaccaccagccccagcaacccttttgccaggtgcaggagcgtctgagacaaagaagcgtaagctgtccggtgcatcggcagcgccgcaacgtggaccggtctccctcatctcggcccacacctctgctgctactgcggtatgcttcgatccttcagacgcaagcataggatactcagcatcacaagaccacactattcgcaccatcgatctgacaacatcgaaagtcgagaacgtcatctcaacttctcatcccatcctcgccctgacacctctccaacgatccaactccatcctccttgcagccgcaacggctgctcgtcacataacactcgtggaccctcgtgtctctgagcagacgacttccgtaatgacgctacgtggccacaaaaatatggtctcgagtttagctgcttgccccgacaacgactacagtctcgtgtcaggcgcttatgatggcacctgccgcgtctgggatctgcgtagttcacgcacggggacgaagacagaaggcggtggttctgttagcgaatcggtatataccattgaacgcgacagtcagaggggcaccaagcccagggctagtgcggtgtctggagctggggctaaggtctttagtgtagcctgggacaagaccttcggcatcgtcagtgcgggcgaggataagatggtccagataaatcggggcagagatctgttggctgggagttag

SEQ ID NO: 29718 - protein, 486 aa, Muscodor strobelii
  misc_feature: SGI Peptide ID NO. 570210
  misc_feature (370)..(409): Pfam Id: PF00400 Pfam Desc: WD domain, G-beta repeat
  misc_feature (158)..(195): Pfam Id: PF00400 Pfam Desc: WD domain, G-beta repeat
  misc_feature (207)..(245): Pfam Id: PF00400 Pfam Desc: WD domain, G-beta repeat
  misc_feature (97)..(150): Pfam Id: PF00400 Pfam Desc: WD domain, G-beta repeat
  misc_feature (6)..(76): Pfam Id: PF08154 Pfam Desc: NLE (NUC135) domain
  misc_feature (281)..(320): Pfam Id: PF00400 Pfam Desc: WD domain, G-beta repeat
  misc_feature (1)..(484): NCBI GI: 85101228 Blast Desc: NCU03764 [Neurospora crassa OR74A] gi|74698110|sp|Q9C2I5.1|YTM1_NEUCR RecName: Full=Ribosome biogenesis protein ytm-1 gi|12718308|emb|CAC28659.1| related to
  misc_feature (3)..(480): NCBI GI: 156061873 Blast Desc: SS1G_03082 [Sclerotinia sclerotiorum 1980] gi|226731810|sp|A7ECP3.1|YTM1_SCLS1 RecName: Full=Ribosome biogenesis protein ytm1 gi|154700483|gb|EDO00222.1| SS1G_03082
  misc_feature (2)..(484): NCBI GI: 116198137 Blast Desc: CHGG_07224 [Chaetomium globosum CBS 148.51] gi|121781587|sp|Q2GXT0.1|YTM1_CHAGB RecName: Full=Ribosome biogenesis protein YTM1 gi|88178503|gb|EAQ85971.1| CHGG_07224 CBS
  misc_feature (3)..(480): NCBI GI: 154311706 Blast Desc: BC1G_06312 [Botryotinia fuckeliana B05.10] gi|226731803|sp|A6S0T8.1|YTM1_BOTFB RecName: Full=Ribosome biogenesis protein ytm1 gi|150850823|gb|EDN26016.1| BC1G_06312
  misc_feature (1)..(483): NCBI GI: 46124887 Blast Desc: FG06821.1 [Gibberella zeae PH-1]
  misc_feature (1)..(484): NCBI GI: 226731864 Blast Desc: FG06821.1 [Gibberella zeae PH-1]
  misc_feature (6)..(483): NCBI GI: 171692851 Blast Desc: protein product [Podospora anserina] gi|226731808|sp|B2B5V0.1|YTM1_PODAN RecName: Full=Ribosome biogenesis protein YTM1 gi|170946374|emb|CAP73175.1| protein
  misc_feature (1)..(484): NCBI GI: 256730992 Blast Desc: [Nectria haematococca mpVI 77-13-4]
  misc_feature (2)..(485): NCBI GI: 119501004 Blast Desc: microtubule associated protein (Ytm1), [Neosartorya fischeri NRRL 181] gi|226731807|sp|A1CXL0.1|YTM1_NEOFI RecName: Full=Ribosome biogenesis protein ytm1 gi|119415424|gb|EAW25362.1|
  misc_feature (2)..(485): NCBI GI: 70994569 Blast Desc: microtubule associated protein (Ytm1) [Aspergillus fumigatus Af293] gi|74671257|sp|Q4WP10.1|YTM1_ASPFU RecName: Full=Ribosome biogenesis protein ytm1 RecName: Full=Ribosome ytm1
  misc_feature (143)..(432): SWISSPROT Homolog: EC 2.7.11.1 Non-specific serine/threonine protein kinase
MAAPTEIRVKFTTTEVDPELQVPEDKSATLVVPTDLRRYGLSKILNSEVLLDTSAPIGFNFLINGQFLTTSLQDYILANGLNAEATVTLQYVRHLTPPVHQASFQHDDWVSSVDVLSATSRAGVWSGDKLPLGQDRIVSGSYDGLLRIWNPSGEVVATSQSGTSGGHTPSIKDVKFMSSTKIASSGLDRTIRIWKYGESEDGMQRTFKPSLELYGHRASVDSLDVHTPSGRILSASADGAIGIWTTSRNSAPPAPATLLPGAGASETKKRKLSGASAAPQRGPVSLISAHTSAATAVCFDPSDASIGYSASQDHTIRTIDLTTSKVENVISTSHPILALTPLQRSNSILLAAATAARHITLVDPRVSEQTTSVMTLRGHKNMVSSLAACPDNDYSLVSGAYDGTCRVWDLRSSRTGTKTEGGGSVSESVYTIERDSQRGTKPRASAVSGAGAKVFSVAWDKTFGIVSAGEDKMVQINRGRDLLAGS

SEQ ID NO: 29719 - DNA, 1725 bp, Muscodor strobelii
  misc_feature: SGI EST ID NO. CUFF.70329.0
  misc_feature: Variant of the nucleotide sequence at SEQ ID NO 29717
taacaatttacaccatccctaccccttcatctgcaacgcctcattttaattggcgatactaccaccgtgtcagcagtcatggctgcaccgaccgaaatccgggtgaaatttactaccacagaggtcgaccctgagcttcaagtaccagaggacaagagcgcaactctcgtcgtgcccacagatctcagacgctatggcttatcgaagattctcaactcggaggtgcttcttgacacctctgcaccaatcggcttcaatttcttgatcaatggccagttcttgacaacgtcgttacaagattatatcctggcgaacggtctcaatgccgaagcgacagtgaccctacaatacgtccgccatttgaccccgcctgttcatcaagccagcttccaacacgacgactgggtcagctcagtcgatgttctctctgcgacctctcgtgcaggtgtctggtcaggcgacaagctgcctctgggccaggaccgtattgtttccggctcatatgatggtcttctgcgcatatggaacccatccggtgaagttgttgcgacgtcacagtctggaacatcaggcggccatactccgagtatcaaagatgtcaaattcatgtcttcaacaaagatcgcctcctcgggcctcgatcgcactataaggatatggaaatatggtgaatcagaggacggaatgcagcgcacattcaagcctagtcttgaactctacggtcacagagccagcgttgactctcttgacgtccatacaccctcgggtcgtattcttagcgcatcagcagacggtgccattggtatctggaccacatcccggaattccgcaccaccagccccagcaacccttttgccaggtgcaggagcgtctgagacaaagaagcgtaagctgtccggtgcatcggcagcgccgcaacgtggaccggtctccctcatctcggcccacacctctgctgctactgcggtatgcttcgatccttcagacgcaagcataggatactcagcatcacaagaccacactattcgcaccatcgatctgacaacatcgaaagtcgagaacgtcatctcaacttctcatcccatcctcgccctgacacctctccaacgatccaactccatcctccttgcagccgcaacggctgctcgtcacataacactcgtggaccctcgtgtctctgagcagacgacttccgtaatgacgctacgtggccacaaaaatatggtctcgagtttagctgcttgccccgacaacgactacagtctcgtgtcaggcgcttatgatggcacctgccgcgtctgggatctgcgtagttcacgcacggggacgaagacagaaggcggtggttctgttagcgaatcggtatataccattgaacgcgacagtcagaggggcaccaagcccagggctagtgcggtgtctggagctggggctaaggtctttagtgtagcctgggacaagaccttcggcatcgtcagtgcgggcgaggataagatggtccagataaatcggggcagagatctgttggctgggagttagtggtcatagagtagggactaaaaattcggaaaatctaacgaatcaatctaaagattacctttcacgctatcgtgactcagccgtccttccaaagacaattttgcttcgcgatgttatgatgactacgtgccttggcaggtgggccagagacgaaacgtaattgaaggtatctcacttgggtgggtg

SEQ ID NO: 29720 - DNA, 1527 bp, Muscodor strobelii
  misc_feature: SGI cDNA ID NO. 570211
  misc_feature: Encodes the peptide sequence at SEQ ID NO 29721
atggatcagcttgacgatgtagaaggcaacttgctccgcaagcctacgggcggaaaggtggacacacttgagcgagccgactcgagttacaaccctatgcactcgtacaagctcgataaggaacggtcatatcagcaacaatttgctgacatgtatttcttgcgtcttactaagatcaaaccatctgttgagcaaagagcggaagaagcatgggaaggcacagtcattggagatgagcccgtcaagaaggttgagagagtcttggacatccgacagggtgaactatgctgggtcacaggcacggtctacatggacatgtctcttaagcccaacatcctcgaggacgtctctaaggacagatggatctcagcacctatatcgaataacaaatactacgcggatgacggaactgacgcagtaacattagaagacgagtctggtaggatacgcttggtcggtgacgttcttaaagacgtcgttctcgtcacgggatgcatcgtcgccatcatgggcacggaaaatgtaaatggcgaactggaagttattgacatcaagttcccagacctagctccccagccagatcgatggtccatttcgaagccatccgcaacgaatgggtccaagaagacaaaaagagccaaagatgaggatgaggagatgacagacgcgcaacccaaacccagcggaggcaaggttgcgatcgtctctgggcttggattttcaagtcaggacgcgagctatgctctggaacttgaccttttgctcgaatatctactcggcgaactactcgatcccgcgacacagcaggagatctcccagataagtcgtctcatcatagcgggaaactccatctcgaccgaagaaccgaagtccttgggcaaggacggtaagccggttcaaaagaaatatggttatgacagcagcgcctacaacgccctaccatcacaacttctcgacgaatttctctctacccttttaccggcaatgcccgtgaccttgttaccgggggctcaagatcccgcgaacacaagttatccgcaacaacccatccatccagccatgtttccgaaatcgcgagcattttcggtagcgcccggttccaaagaacccggctggttcgataccgtgacgaacccctgggagggcgaattaaacggatggagggtgttgggtacaggtggtcaaaatgtcgatgacatttttaagtatgttgggagtgacgatcgtctcggtatgatggaggctatgtgtagatggcgatgctgcgcgccgacagcccccgacacattatggagctatccattccaggacgatgatccctttgtgatgaagacatctccccatctttacttcgtcggctgccagcccgcatttggtacacgtatgatacacggtgaagatgggcaagccgtacgcctgattgccgtcccgtctttctcggagaccaaggagatcgtaatagtagatacggaaacacttgatgtatcgaaggtcaagattaccaccggagaaatgattgaggcttga

SEQ ID NO: 29721 - protein, 508 aa, Muscodor strobelii
  misc_feature: SGI Peptide ID NO. 570211
  misc_feature (232)..(460): Pfam Id: PF04042 Pfam Desc: DNA polymerase alpha/epsilon subunit B
  misc_feature (1)..(501): NCBI GI: 46125573 Blast Desc: FG07164.1 [Gibberella zeae PH-1]
  misc_feature (1)..(503): NCBI GI: 261354825 Blast Desc: DNA polymerase subunit delta-2 [Verticillium albo-atrum VaMs.102]
  misc_feature (1)..(500): NCBI GI: 85101224 Blast Desc: NCU03763 [Neurospora crassa OR74A] gi|16944625|emb|CAC28660.2| related to DNA POLYMERASE DELTA SMALL SUBUNIT [Neurospora crassa] gi|28922649|gb|EAA31874.1| NCU03763
  misc_feature (1)..(503): NCBI GI: 171692853 Blast Desc: protein product [Podospora anserina] gi|170946375|emb|CAP73176.1| protein product [Podospora anserina]
  misc_feature (51)..(501): NCBI GI: 145606210 Blast Desc: MGG_02459 [Magnaporthe grisea 70-15] gi|145013931|gb|EDJ98572.1| MGG_02459 [Magnaporthe grisea 70-15]
  misc_feature (1)..(501): NCBI GI: 116198135 Blast Desc: CHGG_07223 [Chaetomium globosum CBS 148.51] gi|88178502|gb|EAQ85970.1| CHGG_07223 [Chaetomium globosum CBS 148.51]
  misc_feature (8)..(500): NCBI GI: 156054518 Blast Desc: SS1G_06107 [Sclerotinia sclerotiorum 1980] gi|154703887|gb|EDO03626.1| SS1G_06107 [Sclerotinia sclerotiorum 1980]
  misc_feature (4)..(502): NCBI GI: 115397999 Blast Desc: conserved [Aspergillus terreus NIH2624] gi|114192782|gb|EAU34482.1| conserved [Aspergillus terreus NIH2624]
  misc_feature (8)..(502): NCBI GI: 259481579 Blast Desc: TPA: DNA polymerase III (delta) subunit (Eurofung) [Aspergillus nidulans FGSC A4]
  misc_feature (11)..(502): NCBI GI: 145257042 Blast Desc: An04g02280 [Aspergillus niger] gi|134058506|emb|CAL00715.1| protein product [Aspergillus niger]
  misc_feature (41)..(500): SWISSPROT Homolog: EC 2.7.7.7 DNA-directed DNA polymerase
MDQLDDVEGNLLRKPTGGKVDTLERADSSYNPMHSYKLDKERSYQQQFADMYFLRLTKIKPSVEQRAEEAWEGTVIGDEPVKKVERVLDIRQGELCWVTGTVYMDMSLKPNILEDVSKDRWISAPISNNKYYADDGTDAVTLEDESGRIRLVGDVLKDVVLVTGCIVAIMGTENVNGELEVIDIKFPDLAPQPDRWSISKPSATNGSKKTKRAKDEDEEMTDAQPKPSGGKVAIVSGLGFSSQDASYALELDLLLEYLLGELLDPATQQEISQISRLIIAGNSISTEEPKSLGKDGKPVQKKYGYDSSAYNALPSQLLDEFLSTLLPAMPVTLLPGAQDPANTSYPQQPIHPAMFPKSRAFSVAPGSKEPGWFDTVTNPWEGELNGWRVLGTGGQNVDDIFKYVGSDDRLGMMEAMCRWRCCAPTAPDTLWSYPFQDDDPFVMKTSPHLYFVGCQPAFGTRMIHGEDGQAVRLIAVPSFSETKEIVIVDTETLDVSKVKITTGEMIEA

SEQ ID NO: 29722 - DNA, 2110 bp, Muscodor strobelii
  misc_feature: SGI EST ID NO. CUFF.70332.0
  misc_feature: Variant of the nucleotide sequence at SEQ ID NO 29720
tggcagtaatgtgtgatgtgtcaattatttcctatctatcttatgtaaggtacatacctagcactatcatgccccacctagaattcaatttacgcggaaacgcgtctcaaccaccatgacgcgtttcgcttggtgcatttctattgctgaactctgatcgtcccatgcgaggcccgacaaagaatccttagtgtctacacaatcgagcgtggcacaaccatcatattcaccatggatcagcttgacgatgtagaaggcaacttgctccgcaagcctacgggcggaaaggtggacacacttgagcgagccgactcgagttacaaccctatgcactcgtacaagctcgataaggaacggtcatatcagcaacaatttgctgacatgtatttcttgcgtcttactaagatcaaaccatctgttgagcaaagagcggaagaagcatgggaaggcacagtcattggagatgagcccgtcaagaaggttgagagagtcttggacatccgacagggtgaactatgctgggtcacaggcacggtctacatggacatgtctcttaagcccaacatcctcgaggacgtctctaaggacagatggatctcagcacctatatcgaataacaaatactacgcggatgacggaactgacgcagtaacattagaagacgagtctggtaggatacgcttggtcggtgacgttcttaaagacgtcgttctcgtcacgggatgcatcgtcgccatcatgggcacggaaaatgtaaatggcgaactggaagttattgacatcaagttcccagacctagctccccagccagatcgatggtccatttcgaagccatccgcaacgaatgggtccaagaagacaaaaagagccaaagatgaggatgaggagatgacagacgcgcaacccaaacccagcggaggcaaggttgcgatcgtctctgggcttggattttcaagtcaggacgcgagctatgctctggaacttgaccttttgctcgaatatctactcggcgaactactcgatcccgcgacacagcaggagatctcccagataagtcgtctcatcatagcgggaaactccatctcgaccgaagaaccgaagtccttgggcaaggacggtaagccggttcaaaagaaatatggttatgacagcagcgcctacaacgccctaccatcacaacttctcgacgaatttctctctacccttttaccggcaatgcccgtgaccttgttaccgggggctcaagatcccgcgaacacaagttatccgcaacaacccatccatccagccatgtttccgaaatcgcgagcattttcggtagcgcccggttccaaagaacccggctggttcgataccgtgacgaacccctgggagggcgaattaaacggatggagggtgttgggtacaggtggtcaaaatgtcgatgacatttttaagtatgttgggagtgacgatcgtctcggtatgatggaggctatgtgtagatggcgatgctgcgcgccgacagcccccgacacattatggagctatccattccaggacgatgatccctttgtgatgaagacatctccccatctttacttcgtcggctgccagcccgcatttggtacacgtatgatacacggtgaagatgggcaagccgtacgcctgattgccgtcccgtctttctcggagaccaaggagatcgtaatagtagatacggaaacacttgatgtatcgaaggtcaagattaccaccggagaaatgattgaggcttgagcgaagtgctataagcaggtgttgaccgcagtcaaatctagatatataatatgagataatgggataccccttgctatacaccatttttctacttgaaatggactgccatctgtaattccagaaagatgacaggcggtagatagacagatccgtaagttgcgggactgtctatatttggtgcgtgacacatcgtacaaagtcgatccgagatgttataacgagccaggaatattttcgtggcatgtataccttgcctacattgacagttccgtatctgcgtgcagtggccttccaggttcacagaccaaaattatctctagagatgccaaacttgtggttatcatcactggcg

SEQ ID NO: 29723 - DNA, 1641 bp, Muscodor strobelii
  misc_feature: SGI cDNA ID NO. 570212
  misc_feature: Encodes the peptide sequence at SEQ ID NO 29724
atgaccgcaacgccaccgcgaaatcaccgtctatggcatccatcgcatggcatcgcctttgcgccaccttctgtctcgacggtcgttactacgctgagtccgcgcctagtccctgatttcggcggagtcagccaatatcacgttgctgcatctcaggcgactggacaacacgaatcatggtctcgaaccggagcacaagagaccgcacctgtctcagaaacatggcttgatgcagcaagtgtctatgaacaagagatcggacattacaaggacgcgactgcagacacagagaccgtattagaaaaaagtaggacagacgatccaccacctgccgtactcgactatcagatcgatcccgaactgttttatgcggccaaaaaggcggcttctggatctccagaatcattctggtcctacacacagtatagacggacttcagaagacgggtcgtcagacagagtcaaggtccattactgtcgcagcaaacatacaatggagcgggtgtgcaagcagtatttcatggacgaaaaagtgcttggcttcgacttagagtgggttccagacgcatctaaacgcgacggcttgaagaagaacgtttccttgattcaattagcgagtgccagtcatattgcgctcttccatgttgcgttattcgctaatgctgacgacatggtcggaccatcctttaggtctttgatggaggaccccgatatcaccaaagttggcgttgctatcaagggcgataccactcgactgaagaatttcttagacgtccattcccgcggtcttatggaactaagccacatgtataagcttgtgacttattgtaccagccgtcagtatagcaatattaacaaaaaattggtgaagctggcaagccaggtggaagaatatcttcacttaccccttttcaagggtacggatgtgcgttctagtaactgggccaagcctctgagcatggaccaggttgtttattccgcgagcgatgcttacgcaggtttgcatctccatgcgacatacgagcatcataggaaacaactagacccatgtccaccaatcccacgccatgccgagctaaatattgccattcaactcccggacggtgtcgaaatcgacgtgcctgaggacactatagagcccgatgcggcaccaagaattggaaagatgaaaactgctgcttctgacgaatacttagcatcagccttagagactatccgtatcgaagatcaggatagccaagccataccaacaaagcctgaagtacctcctgctcccaaatacaacaagacgaacgcacagaaagctgccgagattccaatagattctcgaatcgagatcgtcgaggaccgtgcagcggcttatcggtcgtcgcacccaagatgtaaagccacaatcccccaattgcgggcatactatctatggcactgctacgatctgagcccagacaccattgcggagctcgttcgtgacccgccattgaagactccgacggttgtcaactatatcctttgtgctgtacaatccgagagactcgtcgtggacggtgatcgactacgcgagcttaccgacttcgtgcgtccgaatgatttgtggaacaggtttccttatattgctgcgagacttgccaaacttccaatctga

SEQ ID NO: 29724 - protein, 546 aa, Muscodor strobelii
  misc_feature: SGI Peptide ID NO. 570212
  misc_feature (156)..(348): Pfam Id: PF01612 Pfam Desc: 3'-5' exonuclease
  misc_feature (4)..(520): NCBI GI: 46124885 Blast Desc: FG06820.1 [Gibberella zeae PH-1]
  misc_feature (108)..(538): NCBI GI: 256731382 Blast Desc: NECHADRAFT_48479 [Nectria haematococca mpVI 77-13-4]
  misc_feature (108)..(537): NCBI GI: 261351605 Blast Desc: conserved [Verticillium albo-atrum VaMs.102]
  misc_feature (117)..(520): NCBI GI: 39968737 Blast Desc: MGG_02461 [Magnaporthe grisea 70-15] gi|145013929|gb|EDJ98570.1| MGG_02461 [Magnaporthe grisea 70-15]
  misc_feature (10)..(534): NCBI GI: 156053686 Blast Desc: SS1G_05690 [Sclerotinia sclerotiorum 1980] gi|154703471|gb|EDO03210.1| SS1G_05690 [Sclerotinia sclerotiorum 1980]
  misc_feature (7)..(520): NCBI GI: 12718307 Blast Desc: related to WERNER SYNDROME HELICASE [Neurospora crassa]
  misc_feature (7)..(520): NCBI GI: 85101232 Blast Desc: NCU03765 [Neurospora crassa OR74A] gi|28922651|gb|EAA31876.1| NCU03765 [Neurospora crassa OR74A]
  misc_feature (7)..(526): NCBI GI: 171692849 Blast Desc: protein product [Podospora anserina] gi|170946373|emb|CAP73174.1| protein product [Podospora anserina]
  misc_feature (12)..(365): NCBI GI: 154303273 Blast Desc: BC1G_09385 [Botryotinia fuckeliana B05.10] gi|150854948|gb|EDN30140.1| BC1G_09385 [Botryotinia fuckeliana B05.10]
  misc_feature (94)..(360): NCBI GI: 116198139 Blast Desc: CHGG_07225 [Chaetomium globosum CBS 148.51] gi|88178504|gb|EAQ85972.1| CHGG_07225 [Chaetomium globosum CBS 148.51]
MTATPPRNHRLWHPSHGIAFAPPSVSTVVTTLSPRLVPDFGGVSQYHVAASQATGQHESWSRTGAQETAPVSETWLDAASVYEQEIGHYKDATADTETVLEKSRTDDPPPAVLDYQIDPELFYAAKKAASGSPESFWSYTQYRRTSEDGSSDRVKVHYCRSKHTMERVCKQYFMDEKVLGFDLEWVPDASKRDGLKKNVSLIQLASASHIALFHVALFANADDMVGPSFRSLMEDPDITKVGVAIKGDTTRLKNFLDVHSRGLMELSHMYKLVTYCTSRQYSNINKKLVKLASQVEEYLHLPLFKGTDVRSSNWAKPLSMDQVVYSASDAYAGLHLHATYEHHRKQLDPCPPIPRHAELNIAIQLPDGVEIDVPEDTIEPDAAPRIGKMKTAASDEYLASALETIRIEDQDSQAIPTKPEVPPAPKYNKTNAQKAAEIPIDSRIEIVEDRAAAYRSSHPRCKATIPQLRAYYLWHCYDLSPDTIAELVRDPPLKTPTVVNYILCAVQSERLVVDGDRLRELTDFVRPNDLWNRFPYIAARLAKLPI

SEQ ID NO: 29725 - DNA, 2309 bp, Muscodor strobelii
  misc_feature: SGI EST ID NO. CUFF.70467.2
  misc_feature: Variant of the nucleotide sequence at SEQ ID NO 29723
gtgagaatatcaaacgatctgatccgatctggaatgagaactcttgagccaatcaactcgttaccacgcatccaattcaacccattcatcgcttattacccactggattgtctagatcgtcttgattctaggctgcatcgcatctgcctgtctgtctgccagcatccccgcgcgtaactcatagaacgggaccttcgagcggcagcacagtcacgggtccctggaatgtcgccatggagctgggctgtgaagagtccttagtatttggttaccaatgtcctgccgtggatcttcagagtctgccggcaatgctctgaaactttcgtatcgtgcattatgcacgacttcctcattgccgtcaactcgttgcacagcacgtcgtacgcccaggatgaccgcaacgccaccgcgaaatcaccgtctatggcatccatcgcatggcatcgcctttgcgccaccttctgtctcgacggtcgttactacgctgagtccgcgcctagtccctgatttcggcggagtcagccaatatcacgttgctgcatctcaggcgactggacaacacgaatcatggtctcgaaccggagcacaagagaccgcacctgtctcagaaacatggcttgatgcagcaagtgtctatgaacaagagatcggacattacaaggacgcgactgcagacacagagaccgtattagaaaaaagtaggacagacgatccaccacctgccgtactcgactatcagatcgatcccgaactgttttatgcggccaaaaaggcggcttctggatctccagaatcattctggtcctacacacagtatagacggacttcagaagacgggtcgtcagacagagtcaaggtccattactgtcgcagcaaacatacaatggagcgggtgtgcaagcagtatttcatggacgaaaaagtgcttggcttcgacttagagtgggttccagacgcatctaaacgcgacggcttgaagaagaacgtttccttgattcaattagcgagtgccagtcatattgcgctcttccatgttgcgttattcgctaatgctgacgacatggtcggaccatcctttaggtctttgatggaggaccccgatatcaccaaagttggcgttgctatcaagggcgataccactcgactgaagaatttcttagacgtccattcccgcggtcttatggaactaagccacatgtataagcttgtgacttattgtaccagccgtcagtatagcaatattaacaaaaaattggtgaagctggcaagccaggtggaagaatatcttcacttaccccttttcaagggtacggatgtgcgttctagtaactgggccaagcctctgagcatggaccaggttgtttattccgcgagcgatgcttacgcaggtttgcatctccatgcgacatacgagcatcataggaaacaactagacccatgtccaccaatcccacgccatgccgagctaaatattgccattcaactcccggacggtgtcgaaatcgacgtgcctgaggacactatagagcccgatgcggcaccaagaattggaaagatgaaaactgctgcttctgacgaatacttagcatcagccttagagactatccgtatcgaagatcaggatagccaagccataccaacaaagcctgaagtacctcctgctcccaaatacaacaagacgaacgcacagaaagctgccgagattccaatagattctcgaatcgagatcgtcgaggaccgtgcagcggcttatcggtcgtcgcacccaagatgtaaagccacaatcccccaattgcgggcatactatctatggcactgctacgatctgagcccagacaccattgcggagctcgttcgtgacccgccattgaagactccgacggttgtcaactatatcctttgtgctgtacaatccgagagactcgtcgtggacggtgatcgactacgcgagcttaccgacttcgtgcgtccgaatgatttgtggaacaggtttccttatattgctgcgagacttgccaaacttccaatctgagacgggatcagttgcacatctcatcgaattggaatgttcgaaccgcctgcggcagtaggtatagatacctgcgcaacagaaattgtatatatcctaaagtatgaccattctaggtcaacggcgacatggtcacggactcactctccaaccttttcaagagcattcatcaaaggcatctttaaaaacatgcatagaagatacccatatactagatagcgatggaaattccaacgcattccaatattaccctttctctcctatatttgcctattcattg

SEQ ID NO: 29726 - DNA, 228 bp, Muscodor strobelii
  misc_feature: SGI cDNA ID NO. 570213
  misc_feature: Encodes the peptide sequence at SEQ ID NO 29727
atggctacccaggcaaatcaactcctgccactggagctcatcgacaaatgtgtcggttcccgcatatgggtcgtcatgaaaggagacaaggagtttagtggaacgttgacaggtttcgacgactacgtcaacatggtgctggaggatgtaaccgaattcgactactctggcaatcacaccaaactccccaagattcttctcaatggcaacaatatctgcatggtatga

SEQ ID NO: 29727 - protein, 75 aa, Muscodor strobelii
  misc_feature: SGI Peptide ID NO. 570213
  misc_feature (12)..(75): Pfam Id: PF01423 Pfam Desc: LSM domain
  misc_feature (5)..(75): NCBI GI: 261351604 Blast Desc: conserved [Verticillium albo-atrum VaMs.102]
  misc_feature (5)..(75): NCBI GI: 16944624 Blast Desc: U6 SNRNA-ASSOCIATED SM-LIKE PROTEIN LSM5 [Neurospora crassa]
  misc_feature (5)..(75): NCBI GI: 46124883 Blast Desc: FG06819.1 [Gibberella zeae PH-1]
  misc_feature (5)..(75): NCBI GI: 225681342 Blast Desc: [Paracoccidioides brasiliensis Pb03]
  misc_feature (5)..(75): NCBI GI: 145606206 Blast Desc: conserved [Magnaporthe grisea 70-15] gi|145013928|gb|EDJ98569.1| conserved [Magnaporthe grisea 70-15]
  misc_feature (5)..(75): NCBI GI: 70987204 Blast Desc: small nuclear ribonucleoprotein (LSM5) [Aspergillus fumigatus Af293] gi|66846711|gb|EAL87043.1| small nuclear ribonucleoprotein (LSM5), [Aspergillus fumigatus Af293] small
  misc_feature (5)..(75): NCBI GI: 226284564 Blast Desc: PAAG_08979 [Paracoccidioides brasiliensis Pb01]
  misc_feature (5)..(75): NCBI GI: 212532417 Blast Desc: small nuclear ribonucleoprotein (LSM5), [Penicillium marneffei ATCC 18224] gi|210071729|gb|EEA25818.1| small nuclear ribonucleoprotein (LSM5), [Penicillium marneffei ATCC 18224]
  misc_feature (5)..(75): NCBI GI: 261190750 Blast Desc: small nuclear ribonucleoprotein [Ajellomyces dermatitidis SLH14081] gi|239591207|gb|EEQ73788.1| small nuclear ribonucleoprotein [Ajellomyces dermatitidis SLH14081] small ER-3]
  misc_feature (5)..(75): NCBI GI: 255953479 Blast Desc: Pc21g04460 [Penicillium chrysogenum Wisconsin 54-1255] gi|211589203|emb|CAP95343.1| Pc21g04460 [Penicillium chrysogenum Wisconsin 54-1255]
MATQANQLLPLELIDKCVGSRIWVVMKGDKEFSGTLTGFDDYVNMVLEDVTEFDYSGNHTKLPKILLNGNNICMV

SEQ ID NO: 29728 - DNA, 5071 bp, Muscodor strobelii
  misc_feature: SGI EST ID NO. CUFF.70466.0
  misc_feature: Variant of the nucleotide sequence at SEQ ID NO 29726
caatgaataggcaaatataggagagaaagggtaatattggaatgcgttggaatttccatcgctatctagtatatgggtatcttctatgcatgtttttaaagatgcctttgatgaatgctcttgaaaaggttggagagtgagtccgtgaccatgtcgccgttgacctagaatggtcatactttaggatatatacaatttctgttgcgcaggtatctatacctactgccgcaggcggttcgaacattccaattcgatgagatgtgcaactgatcccgtctcagattggaagtttggcaagtctcgcagcaatataaggaaacctgttccacaaatcattcggacgcacgaagtcggtaagctcgcgtagtcgatcaccgtccacgacgagtctctcggattgtacagcacaaaggatatagttgacaaccgtcggagtcttcaatggcgggtcacgaacgagctccgcaatggtgtctgggctcagatcgtagcagtgccatagatagtatgcccgcaattgggggattgtggctttacatcttgggtgcgacgaccgataagccgctgcacggtcctcgacgatctcgattcgagaatctattggaatctcggcagctttctgtgcgttcgtcttgttgtatttgggagcaggaggtacttcaggctttgttggtatggcttggctatcctgatcttcgatacggatagtctctaaggctgatgctaagtattcgtcagaagcagcagttttcatctttccaattcttggtgccgcatcgggctctatagtgtcctcaggcacgtcgatttcgacaccgtccgggagttgaatggcaatatttagctcggcatggcgtgggattggtggacatgggtctagttgtttcctatgatgctcgtatgtcgcatggagatgcaaacctgcgtaagcatcgctcgcggaatctgagttgtgttagacacatctgactacttttcaacgagaacaacgaggccacttacaaacaacctggtccatgctcagaggcttggcccagttactagaacgcacatccgtacccttgaaaaggggtaagtgaagatattcttccacctggcttgccagcttcaccaattttttgttaatattgctatactgacggctggtacaataagtcacaagcttatacatgtggcttagttccataagaccgcgggaatggacgtctaagaaattcttcagtcgagtggtatcgcccttgatagcaacgccaactttggtgatatcggggtcctccatcaaagacctaaaggatggtccgaccatgtcgtcagcattagcgaataacgcaacatggaagagcgcaatatgactggcactcgctaattgaatcaaggaaacgttcttcttcaagccgtcgcgtttagatgcgtctggaacccactctaagtcgaagccaagcactttttcgtccatgaaatactgcttgcacacccgctccattgtatgtttgctgcgacagtaatggaccttgactctgtctgacgacccgtcttctgaagtccgtctatactgtgtgtaggaccagaatgattctggagatccagaagccgcctttttggccgcataaaacagttcgggatcgatctgatagtcgagtacggcaggtggtggatcgtctgtcctacttttttctaatacggtctctgtgtctgcagtcgcgtccttgtaatgtccgatctcttgttcatagacacttgctgcatcaagccatgtttctgagacaggtgcggtctcttgtgctccggttcgagaccatgattcgtgttgtccagtcgcctgagatgcagcaacgtgatattggctgactccgccgaaatcagggactaggcgcggactcagcgtagtaacgaccgtcgagacagaaggtggcgcaaaggcgatgccatgcgatggatgccatagacggtgatttcgcggtggcgttgcggtcatcctgggcgtacgacgtgctgtgcaacgactgtttttaacaattattttaatcagcactcatctacaagcagtacacgacacgaacttggacttgaaaggcacacgggtgcgaattggctgttaagagtctaaatataaagaagtacagagaaatacgaacgttgacggcaatgaggaagtcgtgcataatgcacgatacgaaagtttcagagcattgccggcagactctgaagatccacggcaggacattggtaaccaaatactaaggactcttcacagcccagctccatggcgacattccagggacccgtgactgtgctgccgctcgaaggtcccgttctatgagttacgcgcggggatgctggcagacagacaggcagatgcgatgcagcctagaatcaagacgatctagacaatccagtgggtaataagcgatgaatgggttgaattggatgcgtggtaacgagttgattggctcaagagttctcattccagatcggatcagatcgtttgatattctcaccccggcgacttttactgagcaacccctgaccagttgctgctggttgatacaatgcgactttgctaggagcacttaaacacaatattttggggaatgggtggtgagtccctagataatcaagtcatggatctaaatacaccaagacaatccggatagactcgactattgttcttgtcaaggtcgaaagctgtctttgttgatggtcatgtttgcagttccttactggagacccgccagcggccgacgtccgttgctgtcggctggcggagtgctgcttaggctacctctgtaccacctctggttgcccgctaaagctttctgtctaataagcctgtggcccaaatagtcctgggtaagtctcgccagcgacatatcaaactgaaaaccagtgaggacatcaactccttcagcgcaagattttacggtgaagctgtcacattgcatccaagcctgactgagtctcatattacaaatcaatcaggtgctcttgggaagtgcaaacggctgcaagatggctacccaggcaaatcaactcctgccactggagctcatcgacaaatgtgtcggttcccgcatatgggtcgtcatgaaaggagacaaggagtttagtggaacgttgacaggtttcgacgactacgtcaacatggtgctggaggatgtaaccgaattcgactactctggcaatcacaccaaactccccaagattcttctcaatggcaacaatatctgcatgttgatacctggcggcgagggccctactgcgacgtgacgtgaagtatgaggtgtgtcgccatgcagcgagggatagttcgcacagacccaaggcattaataccttgatagagagtaggcgtggagtaatcttaaccgtatcagacttcccgataacagggaaacagatattcattcacgatcagctaggcaatgcagggcggattttgtggtgaaaatggtgatttcagttcatcatattacttattcagttgtaatatggtcgaaacggcagtagcaactcctgaaatcagctgatgatgacctattctggccaatgcgcaaatatccccaacgccattttccgtaacctgaccgtgtcgctctgtagatccgtagaaacacacaagatgtccaagtgctccgtctcaaactcggccaccatgctccttgtcatcatcagccatgcgacgaagttcgtactcacgagtaaactcgcggccgagctgaccatagctagcaatgagctgcttgcagacgtcgatgaagacctcgcgaggggtcttggtaccatccgtctggacgcggatcaggagctcgggaacattgggatgaggaactgtgatgaggtcagtgttggttcagattgtaaatttatgatgagactcgtacccttgtagccggccatgaggacattggggttgtgcttcaggtgctcgctgatgagattgccgagagtgtgatcctctttcaagagcacgaactctgaggtgttggaggtacctggcacataggcattagcaagacatgtttgtgagactacccataactgttactaaggtaaacgcggatttggaatcagttacctgcaaagggcttctcggtgatcttcttctcgccctcggcttcattcacaaggaagagctcaaatctgccagtggtcagctgtcactctcttaatatgatataagatattcgaacgcatcatcaggctcgttcaagtggcgaggattgcccatgattgctgttgaacaggatgactggagcgtaatgcaaagaggacttggagcggaaacggtttagagtgaatgcactatgcagtgaagacagcaaaagccgacaagccaacagcatgcactgaagagagttgctggtagcaagtccctctaagacggtttgacaactgatgttttgcagaggtgcggaggaaggtgtgagcaggaatggacagtagccagcagacagcctgatagcacctgccaatctctcaagtcgctcctccttccagagaaatcggactcgcgaagacagcctcgcgtatgcctcaattcgcagttccatcatggatgtgtgtatggcgtttagcgaagctcttatgtccttggagattcctctgacgatgcatttatagttgtgcgcaggcatatacgcggctccttgactgagttgcatatttcttgatagagctcgacaaataaaacgaccatcttgagcgacaccctgatttagatatcgaaatgaaatatatgagaaaccaacctgtcaggagcgttcatcttgacgcaaggccagtactctttgacggcttacaaagaggataccggaagcctggcttcctgtcccgttagaccgccgccaccgactgaagccggtagatcgtctgcactcggccgtatggatagtgagcaaatttgataatgtaaagcaatgggagagcaaacggcggcaatacaataaatggcgatagtggcgatgtgagaaatgatgttgctttgatccaaatgctctccaaatttggcgttgatgttttgagaaccattaaaacaatggattcaatggtacctttcccaagtactggtttgc

SEQ ID NO: 29729 - DNA, 258 bp, Muscodor strobelii
  misc_feature: SGI cDNA ID NO. 570214
  misc_feature: Encodes the peptide sequence at SEQ ID NO 29730
atggctacccaggcaaatcaactcctgccactggagctcatcgacaaatgtgtcggttcccgcatatgggtcgtcatgaaaggagacaaggagtttagtggaacgttgacaggtttcgacgactacgtcaacatggtgctggaggatgtaaccgaattcgactactctggcaatcacaccaaactccccaagattcttctcaatggcaacaatatctgcatgttgatacctggcggcgagggccctactgcgacgtga

SEQ ID NO: 29730 - protein, 85 aa, Muscodor strobelii
  misc_feature: SGI Peptide ID NO. 570214
  misc_feature (12)..(77): Pfam Id: PF01423 Pfam Desc: LSM domain
  misc_feature (5)..(85): NCBI GI: 16944624 Blast Desc: U6 SNRNA-ASSOCIATED SM-LIKE PROTEIN LSM5 [Neurospora crassa]
  misc_feature (5)..(83): NCBI GI: 261351604 Blast Desc: conserved [Verticillium albo-atrum VaMs.102]
  misc_feature (5)..(85): NCBI GI: 226284564 Blast Desc: PAAG_08979 [Paracoccidioides brasiliensis Pb01]
  misc_feature (5)..(82): NCBI GI: 145606206 Blast Desc: conserved [Magnaporthe grisea 70-15] gi|145013928|gb|EDJ98569.1| conserved [Magnaporthe grisea 70-15]
  misc_feature (5)..(85): NCBI GI: 46124883 Blast Desc: FG06819.1 [Gibberella zeae PH-1]
  misc_feature (5)..(85): NCBI GI: 70987204 Blast Desc: small nuclear ribonucleoprotein (LSM5) [Aspergillus fumigatus Af293] gi|66846711|gb|EAL87043.1| small nuclear ribonucleoprotein (LSM5), [Aspergillus fumigatus Af293] small
  misc_feature (5)..(85): NCBI GI: 261190750 Blast Desc: small nuclear ribonucleoprotein [Ajellomyces dermatitidis SLH14081] gi|239591207|gb|EEQ73788.1| small nuclear ribonucleoprotein [Ajellomyces dermatitidis SLH14081] small ER-3]
  misc_feature (5)..(85): NCBI GI: 255953479 Blast Desc: Pc21g04460 [Penicillium chrysogenum Wisconsin 54-1255] gi|211589203|emb|CAP95343.1| Pc21g04460 [Penicillium chrysogenum Wisconsin 54-1255]
  misc_feature (5)..(85): NCBI GI: 212532417 Blast Desc: small nuclear ribonucleoprotein (LSM5), [Penicillium marneffei ATCC 18224] gi|210071729|gb|EEA25818.1| small nuclear ribonucleoprotein (LSM5), [Penicillium marneffei ATCC 18224]
  misc_feature (5)..(85): NCBI GI: 259484847 Blast Desc: TPA: small nuclear ribonucleoprotein (LSM5), (AFU_orthologue; AFUA_7G04280) [Aspergillus nidulans FGSC A4]
MATQANQLLPLELIDKCVGSRIWVVMKGDKEFSGTLTGFDDYVNMVLEDVTEFDYSGNHTKLPKILLNGNNICMLIPGGEGPTAT

SEQ ID NO: 29731 - DNA, 5071 bp, Muscodor strobelii; identical to SEQ ID NO: 29728
  misc_feature: SGI EST ID NO. CUFF.70466.0
  misc_feature: Variant of the nucleotide sequence at SEQ ID NO 29729

SEQ ID NO: 29732 - DNA, 384 bp, Muscodor strobelii
  misc_feature: SGI cDNA ID NO. 570215
  misc_feature: Encodes the peptide sequence at SEQ ID NO 29733
atgaacgctcctgacagatttgagctcttccttgtgaatgaagccgagggcgagaagaagatcaccgagaagccctttgcaggtacctccaacacctcagagttcgtgctcttgaaagaggatcacactctcggcaatctcatcagcgagcacctgaagcacaaccccaatgtcctcatggccggctacaaggttcctcatcccaatgttcccgagctcctgatccgcgtccagacggatggtaccaagacccctcgcgaggtcttcatcgacgtctgcaagcagctcattgctagctatggtcagctcggccgcgagtttactcgtgagtacgaacttcgtcgcatggctgatgatgacaaggagcatggtggccgagtttga

SEQ ID NO: 29733 - protein, 127 aa, Muscodor strobelii
  misc_feature: SGI Peptide ID NO. 570215
  misc_feature (31)..(105): Pfam Id: PF01193 Pfam Desc: RNA polymerase Rpb3/Rpb11 dimerisation domain
  misc_feature (1)..(118): NCBI GI: 12718487 Blast Desc: related to DNA-directed RNA polymerase 13.3K chain [Neurospora crassa]
  misc_feature (1)..(118): NCBI GI: 209731212 Blast Desc: DNA-directed RNA polymerase II subunit RPB11 [Salmo salar]
  misc_feature (4)..(118): NCBI GI: 164426902 Blast Desc: NCU03782 [Neurospora crassa OR74A] gi|157071522|gb|EAA31892.2| [Neurospora crassa OR74A]
  misc_feature (2)..(117): NCBI GI: 46124881 Blast Desc: FG06818.1 [Gibberella zeae PH-1]
  misc_feature (7)..(118): NCBI GI: 256731383 Blast Desc: NECHADRAFT_84788 [Nectria haematococca mpVI 77-13-4]
  misc_feature (1)..(124): NCBI GI: 145606204 Blast Desc: MGG_02463 [Magnaporthe grisea 70-15] gi|145013927|gb|EDJ98568.1| MGG_02463 [Magnaporthe grisea 70-15]
  misc_feature (30)..(125): NCBI GI: 116198139 Blast Desc: CHGG_07225 [Chaetomium globosum CBS 148.51] gi|88178504|gb|EAQ85972.1| CHGG_07225 [Chaetomium globosum CBS 148.51]
  misc_feature (1)..(117): NCBI GI: 261200199 Blast Desc: DNA-directed RNA polymerase II polypeptide [Ajellomyces dermatitidis SLH14081] gi|239593572|gb|EEQ76153.1| DNA-directed RNA polymerase II polypeptide [Ajellomyces SLH14081]
  misc_feature (2)..(120): NCBI GI: 156054532 Blast Desc: SS1G_06114 [Sclerotinia sclerotiorum 1980] gi|154703894|gb|EDO03633.1| SS1G_06114 [Sclerotinia sclerotiorum 1980]
  misc_feature (1)..(116): NCBI GI: 225682162 Blast Desc: conserved [Paracoccidioides brasiliensis Pb03] gi|226289350|gb|EEH44862.1| DNA-directed RNA polymerase II [Paracoccidioides brasiliensis Pb18]
  misc_feature (31)..(112): SWISSPROT Homolog: EC 2.7.7.6 DNA-directed RNA polymerase
MNAPDRFELFLVNEAEGEKKITEKPFAGTSNTSEFVLLKEDHTLGNLISEHLKHNPNVLMAGYKVPHPNVPELLIRVQTDGTKTPREVFIDVCKQLIASYGQLGREFTREYELRRMADDDKEHGGRV

SEQ ID NO: 29734 - DNA, 1435 bp, Muscodor strobelii
  misc_feature: SGI EST ID NO. CUFF.70467.3
  misc_feature: Variant of the nucleotide sequence at SEQ ID NO 29732
gcaaaccagtacttgggaaaggtaccattgaatccattgttttaatggttctcaaaacatcaacgccaaatttggagagcatttggatcaaagcaacatcatttctcacatcgccactatcgccatttattgtattgccgccgtttgctctcccattgctttacattatcaaatttgctcactatccatacggccgagtgcagacgatctaccggcttcagtcggtggcggcggtctaacgggacaggaagccaggcttccggtatcctctttgtaagccgtcaaagagtactggccttgcgtcaagatgaacgctcctgacagatttgagctcttccttgtgaatgaagccgagggcgagaagaagatcaccgagaagccctttgcaggtacctccaacacctcagagttcgtgctcttgaaagaggatcacactctcggcaatctcatcagcgagcacctgaagcacaaccccaatgtcctcatggccggctacaaggttcctcatcccaatgttcccgagctcctgatccgcgtccagacggatggtaccaagacccctcgcgaggtcttcatcgacgtctgcaagcagctcattgctagctatggtcagctcggccgcgagtttactcgtgagtacgaacttcgtcgcatggctgatgatgacaaggagcatggtggccgagtttgagacggagcacttggacatcttgtgtgtttctacggatctacagagcgacacggtcaggttacggaaaatggcgttggggatatttgcgcattggccagaataggtcatcatcagctgatttcaggagttgctactgccgtttcgaccatattacaactgaataagtaatatgatgaactgaaatcaccattttcaccacaaaatccgccctgcattgcctagctgatcgtgaatgaatatctgtttccctgttatcgggaagtctgatacggttaagattactccacgcctactctctatcaaggtattaatgccttgggtctgtgcgaactatccctcgctgcatggcgacacacctcatacttcacgtcacgtcgcagtagggccctcgccgccaggtatcaactattttgtgagaagttagcaaaagagacctttcctgcctcgtcagtgggaaagtctgtaattcataccatgcagatattgttgccattgagaagaatcttggggagtttggtgtgattgccagagtagtcgctaagtgaggtcagtgtccaactactacctcgagacaagagtgaggtattctcacaattcggttacatcctccagcaccatgtctaaatatatgccgttagtgaactgacggaggttgaattacggacatgagcaccacatactgacgtagtcgtcgaaacctgtcaacgttccactaaactctatgaatacagcatcagtacttcg

SEQ ID NO: 29735 - DNA, 549 bp, Muscodor strobelii
  misc_feature: SGI cDNA ID NO. 570216
  misc_feature: Encodes the peptide sequence at SEQ ID NO 29736
atggaactgcgaattgaggcatacgcgaggctgtcttcgcgagtccgatttctctggaaggaggagcgacttgagagattggcaggtgctatcaggctgtctgctggctactgtccattcctgctcacaccttcctccgcacctctgcaaaacatcagttgtcaaaccctgaccactggcagatttgagctcttccttgtgaatgaagccgagggcgagaagaagatcaccgagaagccctttgcaggtacctccaacacctcagagttcgtgctcttgaaagaggatcacactctcggcaatctcatcagcgagcacctgaagcacaaccccaatgtcctcatggccggctacaaggttcctcatcccaatgttcccgagctcctgatccgcgtccagacggatggtaccaagacccctcgcgaggtcttcatcgacgtctgcaagcagctcattgctagctatggtcagctcggccgcgagtttactcgtgagtacgaacttcgtcgcatggctgatgatgacaaggagcatggtggccgagtttga

SEQ ID NO: 29736 - protein, 182 aa, Muscodor strobelii
  misc_feature: SGI Peptide ID NO. 570216
  misc_feature (86)..(160): Pfam Id: PF01193 Pfam Desc: RNA polymerase Rpb3/Rpb11 dimerisation domain
  misc_feature (61)..(173): NCBI GI: 12718487 Blast Desc: related to DNA-directed RNA polymerase 13.3K chain [Neurospora crassa]
  misc_feature (55)..(173): NCBI GI: 164426902 Blast Desc: NCU03782 [Neurospora crassa OR74A] gi|157071522|gb|EAA31892.2| [Neurospora crassa OR74A]
  misc_feature (62)..(172): NCBI GI: 46124881 Blast Desc: FG06818.1 [Gibberella zeae PH-1]
  misc_feature (61)..(173): NCBI GI: 209731212 Blast Desc: DNA-directed RNA polymerase II subunit RPB11 [Salmo salar]
  misc_feature (62)..(173): NCBI GI: 256731383 Blast Desc: NECHADRAFT_84788 [Nectria haematococca mpVI 77-13-4]
  misc_feature (61)..(179): NCBI GI: 145606204 Blast Desc: MGG_02463 [Magnaporthe grisea 70-15] gi|145013927|gb|EDJ98568.1| MGG_02463 [Magnaporthe grisea 70-15]
  misc_feature (85)..(180): NCBI GI: 116198139 Blast Desc: CHGG_07225 [Chaetomium globosum CBS 148.51] gi|88178504|gb|EAQ85972.1| CHGG_07225 [Chaetomium globosum CBS 148.51]
  misc_feature (61)..(175): NCBI GI: 156054532 Blast Desc: SS1G_06114 [Sclerotinia sclerotiorum 1980] gi|154703894|gb|EDO03633.1| SS1G_06114 [Sclerotinia sclerotiorum 1980]
  misc_feature (45)..(180): NCBI GI: 226280081 Blast Desc: DNA-directed RNA polymerase II 13.3 kDa polypeptide [Paracoccidioides brasiliensis Pb01]
  misc_feature (60)..(172): NCBI GI: 258564550 Blast Desc: DNA-directed RNA polymerase II 13.3 kDa polypeptide [Uncinocarpus reesii 1704] gi|237908527|gb|EEP82928.1| DNA-directed RNA polymerase II 13.3 kDa polypeptide [Uncinocarpus
MELRIEAYARLSSRVRFLWKEERLERLAGAIRLSAGYCPFLLTPSSAPLQNISCQTLTTGRFELFLVNEAEGEKKITEKPFAGTSNTSEFVLLKEDHTLGNLISEHLKHNPNVLMAGYKVPHPNVPELLIRVQTDGTKTPREVFIDVCKQLIASYGQLGREFTREYELRRMADDDKEHGGRV

SEQ ID NO: 29737 - DNA, 1435 bp, Muscodor strobelii; identical to SEQ ID NO: 29734
  misc_feature: SGI EST ID NO. CUFF.70467.3
  misc_feature: Variant of the nucleotide sequence at SEQ ID NO 29735

SEQ ID NO: 29738 - DNA, 2319 bp, Muscodor strobelii
  misc_feature: SGI cDNA ID NO. 570217
  misc_feature: Encodes the peptide sequence at SEQ ID NO 29739
atgacgaccccaagtcgcgacagcagccggacgcccatgtccggcgccgctcccacctcagctccaatgctgtcctcctcgccgggctcctttcgaagccgcaactttggcacctcggttccacgagccgatgccaccgctcgtctcgcatctcccatcccgtcccaagtcttgggcaccccgccctcgcaccgatcatactcgcccagccgagctgaggtagcgtccaactctgagaccgccgcccttctgcccggcagttctggtggaggcggtacgggcccaggaatctctgctctcgccgccgccctgtccaattccgctggccagtctcctccacgcttcggcactcctcccgctcggcccttatcgcctgcagcttctggttctatcccgcagatgtcagccacgccgaccaactacggctcgtttgatgcaagatctaggtttctccaaggaggtgggaatggagcttacgaggaccccgaaatcgtgaggcgtcatctcgtacaagcctccgacaccccggatcctgctgagtccacggagagcgtgaacacaacgaagggaaaacaggtcgctgaaacaccagaacctgcgcaagaagacgatgaattttccagtctgagacttcagggtggagacgtcacgcgacagatttacaggtggtccgaagaagcagaaggtcgcaagggcccccagcggagcaagagcttcagtcatccgcgggaagagcctgagaatgaagttcttgatatcaattccatcaaggtacctggcgggttcagaagaaactatcttcggagagctgcccagagcccttcggcccacccccggacgttagaggatggccataatacttctcggagaggaaatgaaccccagcttttcactagcagcttcttagaatttcttacaatctatggccactttgcgggtgaagagctcgaggaagacgacgaggtattgggtcccggtgaatacttctcgtccggagaagactcagatttctacgattcagaggacgaaagggagccgatggaagacagcacgctgctgacgccctcaaaacggaggcggaggagaaaagctcgaggtggcagtggcacgaacagtcccatgagcgctgctttgctgctcctaaaatcatttgtcggcacaggcgtcttatttttgccccgagcttacttgaacggtggcatggtgttcagtaacgtcattcttgtgtgcttggcgtcactaagttactactgcttcattctactcatcactacgaggctgaaggtcgaaggctcgttcggtgacattggtgggatcatctatggcaattggatgcgcaggctcattcttggatctatcgtgctcagccagataggatttgttgctgcgtacaccgtcttcacggcagaaaacttacaagctttcgtacttgcggtatcggactgcaatacgcatatccagatcacctacctaattctcatccaaatggtcatattcttgccattctcgctcttccgcgacatcgggaagcttggctttactgctttgattgctgacgcatttatcgtcgttggcttggcttatctgttctactacgatgtcttcacccttagtaccaagggactggcagatatcattctattcaacaaaaacgattggacactcttcattggaactgccatcttcaccttcgaaggcatcggtctcatcatccctatccaagagtctatgaagcatccagcccaattccccaaggtcatgttctattccatgatcatcatgtcggtgatcttcattacgatgggcgccgtctcatacgctgcttacggatccaagaccgagacggttgttctgctcaatctaccacaggataacaaattcgtcaatggagtgcagctactctattccctcgccatcttactatcgactcctctacagatcttcccagccatcaagatcaccgagaacgctctcttcaccaagagcgggaaatacaacccgtacatcaaatggcagaagaacatgttccgcttcatgatggtattcctatgcacgcttatcgcttggggcggttcggacaatctagacaagtttgtcgcactcgttggaaatttcgcctgtatccccttgaccttcatctaccctccgatgctccactacaaggccgtggccacgacgagaactcgcaaaatgtccgacatctttctctgcatcttcggcttcgttgccatgggctacgcaacttctcttacggtgatctcatggatctctggtccgtccaagccaccgccaggttactgcgataccagacatttttga

SEQ ID NO: 29739 - protein, 772 aa, Muscodor strobelii
  misc_feature: SGI Peptide ID NO. 570217
  misc_feature (369)..(753): Pfam Id: PF01490 Pfam Desc: Transmembrane amino acid transporter protein
  misc_feature (9)..(770): NCBI GI: 171692847 Blast Desc: protein product [Podospora anserina] gi|170946372|emb|CAP73173.1| protein product [Podospora anserina]
  misc_feature (1)..(770): NCBI GI: 85101305 Blast Desc: NCU03783 [Neurospora crassa OR74A] gi|16944695|emb|CAC28815.2| conserved [Neurospora crassa] gi|28922668|gb|EAA31893.1| NCU03783 [Neurospora crassa OR74A]
  misc_feature (1)..(770): NCBI GI: 261351602 Blast Desc: vacuolar amino acid transporter 3 [Verticillium albo-atrum VaMs.102]
  misc_feature (17)..(771): NCBI GI: 145606202 Blast Desc: MGG_02464 [Magnaporthe grisea 70-15] gi|145013926|gb|EDJ98567.1| MGG_02464 [Magnaporthe grisea 70-15]
  misc_feature (24)..(770): NCBI GI: 116198141 Blast Desc: CHGG_07226 [Chaetomium globosum CBS 148.51] gi|88178505|gb|EAQ85973.1| CHGG_07226 [Chaetomium globosum CBS 148.51]
  misc_feature (39)..(770): NCBI GI: 46121539 Blast Desc: FG05148.1 [Gibberella zeae PH-1]
  misc_feature (94)..(770): NCBI GI: 256731072 Blast Desc: NECHADRAFT_63723 [Nectria haematococca mpVI 77-13-4]
  misc_feature (30)..(770): NCBI GI: 156054524 Blast Desc: SS1G_06110 [Sclerotinia sclerotiorum 1980] gi|154703890|gb|EDO03629.1| SS1G_06110 [Sclerotinia sclerotiorum 1980]
  misc_feature (31)..(770): NCBI GI: 154321057 Blast Desc: BC1G_01403 [Botryotinia fuckeliana B05.10] gi|150851941|gb|EDN27133.1| BC1G_01403 [Botryotinia fuckeliana B05.10]
  misc_feature (34)..(769): NCBI GI: 212537671 Blast Desc: amino acid transporter, [Penicillium marneffei ATCC 18224] gi|210068733|gb|EEA22824.1| amino acid transporter, [Penicillium marneffei ATCC 18224]
MTTPSRDSSRTPMSGAAPTSAPMLSSSPGSFRSRNFGTSVPRADATARLASPIPSQVLGTPPSHRSYSPSRAEVASNSETAALLPGSSGGGGTGPGISALAAALSNSAGQSPPRFGTPPARPLSPAASGSIPQMSATPTNYGSFDARSRFLQGGGNGAYEDPEIVRRHLVQASDTPDPAESTESVNTTKGKQVAETPEPAQEDDEFSSLRLQGGDVTRQIYRWSEEAEGRKGPQRSKSFSHPREEPENEVLDINSIKVPGGFRRNYLRRAAQSPSAHPRTLEDGHNTSRRGNEPQLFTSSFLEFLTIYGHFAGEELEEDDEVLGPGEYFSSGEDSDFYDSEDEREPMEDSTLLTPSKRRRRRKARGGSGTNSPMSAALLLLKSFVGTGVLFLPRAYLNGGMVFSNVILVCLASLSYYCFILLITTRLKVEGSFGDIGGIIYGNWMRRLILGSIVLSQIGFVAAYTVFTAENLQAFVLAVSDCNTHIQITYLILIQMVIFLPFSLFRDIGKLGFTALIADAFIVVGLAYLFYYDVFTLSTKGLADIILFNKNDWTLFIGTAIFTFEGIGLIIPIQESMKHPAQFPKVMFYSMIIMSVIFITMGAVSYAAYGSKTETVVLLNLPQDNKFVNGVQLLYSLAILLSTPLQIFPAIKITENALFTKSGKYNPYIKWQKNMFRFMMVFLCTLIAWGGSDNLDKFVALVGNFACIPLTFIYPPMLHYKAVATTRTRKMSDIFLCIFGFVAMGYATSLTVISWISGPSKPPPGYCDTRHF

SEQ ID NO: 29740 - DNA, 2924 bp, Muscodor strobelii
  misc_feature: SGI EST ID NO. CUFF.70341.0
  misc_feature: Variant of the nucleotide sequence at SEQ ID NO 29738
gagaaatcacgcctccactgactttgggtcagctgcccgacttgctactgttagcccgtcatattcctaaacatgcatcccaactgacgcgcgagcctcaccaatcccgctccctccgtctcaccttgtgcctcgtattgctgagcctgcattccactgttgtatcgtgacctttgttcttgtccttgtgtcggcccagcacactgactagcccgctttgcgacttgcagtcttcaggcagagcttgggtagctagtcagccagccaccctgactgcctgttggagatatcgagacactgcttctccagcaacagatatcgaacaacttatctgtagtacccgtcaaaccaccctaatcattaatttgttaagtcaaatggctcagtaaatagcatcaatcctgaacccgatactgcaatgacgaccccaagtcgcgacagcagccggacgcccatgtccggcgccgctcccacctcagctccaatgctgtcctcctcgccgggctcctttcgaagccgcaactttggcacctcggttccacgagccgatgccaccgctcgtctcgcatctcccatcccgtcccaagtcttgggcaccccgccctcgcaccgatcatactcgcccagccgagctgaggtagcgtccaactctgagaccgccgcccttctgcccggcagttctggtggaggcggtacgggcccaggaatctctgctctcgccgccgccctgtccaattccgctggccagtctcctccacgcttcggcactcctcccgctcggcccttatcgcctgcagcttctggttctatcccgcagatgtcagccacgccgaccaactacggctcgtttgatgcaagatctaggtttctccaaggaggtgggaatggagcttacgaggaccccgaaatcgtgaggcgtcatctcgtacaagcctccgacaccccggatcctgctgagtccacggagagcgtgaacacaacgaagggaaaacaggtcgctgaaacaccagaacctgcgcaagaagacgatgaattttccagtctgagacttcagggtggagacgtcacgcgacagatttacaggtggtccgaagaagcagaaggtcgcaagggcccccagcggagcaagagcttcagtcatccgcgggaagagcctgagaatgaagttcttgatatcaattccatcaaggtacctggcgggttcagaagaaactatcttcggagagctgcccagagcccttcggcccacccccggacgttagaggatggccataatacttctcggagaggaaatgaaccccagcttttcactagcagcttcttagaatttcttacaatctatggccactttgcgggtgaagagctcgaggaagacgacgaggtattgggtcccggtgaatacttctcgtccggagaagactcagatttctacgattcagaggacgaaagggagccgatggaagacagcacgctgctgacgccctcaaaacggaggcggaggagaaaagctcgaggtggcagtggcacgaacagtcccatgagcgctgctttgctgctcctaaaatcatttgtcggcacaggcgtcttatttttgccccgagcttacttgaacggtggcatggtgttcagtaacgtcattcttgtgtgcttggcgtcactaagttactactgcttcattctactcatcactacgaggctgaaggtcgaaggctcgttcggtgacattggtgggatcatctatggcaattggatgcgcaggctcattcttggatctatcgtgctcagccagataggatttgttgctgcgtacaccgtcttcacggcagaaaacttacaagctttcgtacttgcggtatcggactgcaatacgcatatccagatcacctacctaattctcatccaaatggtcatattcttgccattctcgctcttccgcgacatcgggaagcttggctttactgctttgattgctgacgcatttatcgtcgttggcttggcttatctgttctactacgatgtcttcacccttagtaccaagggactggcagatatcattctattcaacaaaaacgattggacactcttcattggaactgccatcttcaccttcgaaggcatcggtctcatcatccctatccaagagtctatgaagcatccagcccaattccccaaggtcatgttctattccatgatcatcatgtcggtgatcttcattacgatgggcgccgtctcatacgctgcttacggatccaagaccgagacggttgttctgctcaatctaccacaggataacaaattcgtcaatggagtgcagctactctattccctcgccatcttactatcgactcctctacagatcttcccagccatcaagatcaccgagaacgctctcttcaccaagagcgggaaatacaacccgtacatcaaatggcagaagaacatgttccgcttcatgatggtattcctatgcacgcttatcgcttggggcggttcggacaatctagacaagtttgtcgcactcgttggaaatttcgcctgtatccccttgaccttcatctaccctccgatgctccactacaaggccgtggccacgacgagaactcgcaaaatgtccgacatctttctctgcatcttcggcttcgttgccatgggctacgcaacttctcttacggtgatctcatggatctctggtccgtccaagccaccgccaggttactgcgataccagacatttttgagcaccctcaaaacagacattcacattttgttttcaagcattgtacaatcatggcatggtctcacataatgttgcataagtacatacccatagcatgagcatttggtgaagggctgggaatttcctatagactgtagagtgccttttgcatcactgccattctcaaatataagctttctgaaactgaa

SEQ ID NO: 29741 - DNA, 1041 bp, Muscodor strobelii
  misc_feature: SGI cDNA ID NO. 570218
  misc_feature: Encodes the peptide sequence at SEQ ID NO 29742
atggcgcctgttgtcaagtacttggtcgaactcttctggaatggcgagagtttccattgcggcctccgattcaagaccacccctatcttctacgtcaacgaggagggacagacagtccgctcgcatcgcctcctccttcgcttccccgagtcccccagcatcgcccgcaagatcgtcaagggccttggtaccaagaagaagctcgacatagcctatgccctcgccgacttgtactactatgccgccgagaatgtcgagtggtgctccgagttggagcccgtctggttcttcgcggaggccaaatggtcccgctattggcccgacagcatcaccgacgatcagttttgggcgctgacccgtcgtcttctccacgcccgtgccctgtacattgcatcattcaagcacccgagcctagtccccgagccctcaaacgagctgtccgctgcgcttgatgcgttcaagaacgcattcgacgagcactaccacttcaatgtgcccaatcgcggcccgcgcgtgccccaagaagacatcgagcgcgaggaggaccgtctccatgaagcccgagagatgcaccagaagtactttggcctatctcgagccaaccaggacggagacgacgacaactacgtcgtcgagacgatcatcgacggcgacggcaacatggaaatggacaatcccaacccttacctcgccgagctcgatgagaacgagcagatccccctgaagccacgcgacatggagacccccgtcggatggttctttgatctcggaccccgaaacccgcgctacggccacaagggtgaggccgagcagatggaggaagacatggagaagcaagaggaacaagagggagaaggaaagctcatgcaggagttggaggcccagagccgagccgccgagaacgacgccgatgatactatgcaggagtctatggacgtcgacatggacaacgatatggatggtctcactcagcttctcgagagccagaccgtcgacagtggaagacatggagacctaggcgacacggacatgttaggttaa

SEQ ID NO: 29742 - protein, 346 aa, Muscodor strobelii
  misc_feature: SGI Peptide ID NO. 570218
MAPVVKYLVELFWNGESFHCGLRFKTTPIFYVNEEGQTVRSHRLLLRFPESPSIARKIVKGLGTKKKLDIAYALADLYYYAAENVEWCSELEPVWFFAEAKWSRYWPDSITDDQFWALTRRLLHARALYIASFKHPSLVPEPSNELSAALDAFKNAFDEHYHFNVPNRGPRVPQEDIEREEDRLHEAREMHQKYFGLSRANQDGDDDNYVVETIIDGDGNMEMDNPNPYLAELDENEQIPLKPRDMETPVGWFFDLGPRNPRYGHKGEAEQMEEDMEKQEEQEGEGKLMQELEAQSRAAENDADDTMQESMDVDMDNDMDGLTQLLESQTVDSGRHGDLGDTDMLG

SEQ ID NO: 29743 - DNA, 1439 bp, Muscodor strobelii
  misc_feature: SGI EST ID NO. CUFF.70344.0
  misc_feature: Variant of the nucleotide sequence at SEQ ID NO 29741
acccattggtgctccttcctcggacgctttttccttataagctcgtgctttccaattgaatgctccctctcaccaagtgtcctttcctgtagaatactaagtacattcaattttttgagtacacataacaatagttcccacctgtcgtccaaactctctacttcctctacctcgcgcatcatccctaccaacctttttcccgtccaaaaacaccccgttccaccatctgccaacacccttttctacaatccgccaacaagaccctctcgcgacccgtcagtatctcattctggtgaaccatcaatacctctttctgtcgatctgacaagctctcttttggcgattcacttcgtcgcgtgtgtcatccctaccaaacatttcctgtccagagacgcccgtttccactatccaccaacaccctctttctacaatccaccaaacactccttctgacgatccgtcagtaccttctcttggtgatcaacagatccctttttctctcgatccgacaagctctcttttggcaatccaaaaaggtctctctcctctattctccatcatctccgttcgataatcacgatggcgcctgttgtcaagtacttggtcgaactcttctggaatggcgagagtttccattgcggcctccgattcaagaccacccctatcttctacgtcaacgaggagggacagacagtccgctcgcatcgcctcctccttcgcttccccgagtcccccagcatcgcccgcaagatcgtcaagggccttggtaccaagaagaagctcgacatagcctatgccctcgccgacttgtactactatgccgccgagaatgtcgagtggtgctccgagttggagcccgtctggttcttcgcggaggccaaatggtcccgctattggcccgacagcatcaccgacgatcagttttgggcgctgacccgtcgtcttctccacgcccgtgccctgtacattgcatcattcaagcacccgagcctagtccccgagccctcaaacgagctgtccgctgcgcttgatgcgttcaagaacgcattcgacgagcactaccacttcaatgtgcccaatcgcggcccgcgcgtgccccaagaagacatcgagcgcgaggaggaccgtctccatgaagcccgagagatgcaccagaagtactttggcctatctcgagccaaccaggacggagacgacgacaactacgtcgtcgagacgatcatcgacggcgacggcaacatggaaatggacaatcccaacccttacctcgccgagctcgatgagaacgagcagatccccctgaagccacgcgacatggagacccccgtcggatggttctttgatctcggaccccgaaacccgcgctacggccacaagggtgaggccgagcagatggaggaagacatggagaagcaagaggaacaagagggagaaggaaag

SEQ ID NO: 29744 - DNA, 2184 bp, Muscodor strobelii
  misc_feature: SGI cDNA ID NO. 570219
  misc_feature: Encodes the peptide sequence at SEQ ID NO 29745
atgccaggcagtcgacggagcacatcttcgggatcccaaagaagcgcctatacgcgcactagcaaggcaagtcgggacattgccggcggcgaaacaagcctcctcttacgggtacttggaaacttccgcagacagtctgacgaggtcacgaagcccactaacagcaatgagacaccagggcgggcaaacgagtacaatactacgcatcaccctgaccccgcgcacgtcgatctgacaaaggctcgtaatttgaaggcttttgagattgaacggaagctcaaaaggatgccgagaccgcctctccaaattgctcatccccctccggcttcaacgaaagtcaactatagtatgccttctcattcaccgatgagcggcagacatgagtacgagccgagctaccagattcagcccaaaacatattccccagcgggtgaacacggacagcgtaaacagtactcgttggaagactcaaaacggcagacgacgatgagagtgggtatgatcgtgaacccaaatgacatatcaagcagactctcgggtgggcagaacgcaaagacatcgaaggatggggacggggaactctcaaacacatttccagataggcggcattccgatgcatcagtatacacactaggcgatggctattcgtcgagcatcgcttctacccctacgtcctctgaagcgccggataaagagccatctaactctgatggcggaaattgtccaactcccgattgtcgaagaccattacagacccctcgagagaagaaggataacttgtgcaccaagtgctgtatcgacttccaacacatgagccaattcgcatatactttttacgacgatattgtaggatatgagtcggatatcgaagtcaagacggcaacgcgcagtaatctgcagaaggctagagccgtcgaagcgaggatagagaagagcgatacttcgaagtcagaacctcgtacgccaagaaggatacactcaaggaaatctcataaaatcggccgaggtgacgaagatgaggctcagagcgattgtgacgcgcaaaacgcgagatctaagaagctgctcgtgagtcaatatcagcaaagatactctaatagcggtgatggcgcgttgagcgattcagctataacaccgaagtctcgcactcggtccccacgacagaaaagagaaccatcaggccaaatcctgttgcccaaggtctatagcacagagcaaaccaatgtaaaaccatcgactcaacgctctgaatcaaggcccgaatcacgccatagaagaaatacgccagatcacgcagaaggatcacctcgaagacatggagccagtatccaacgagccggcacaccctcctctcacagcaagcaaggatcacctctaccatacaacaaagccaaattcagcagtgcgcgatcgtccccagggccgcaagtaacttatgtcaatcaaagacaccctccaacaccagacagaacaccagagtgtattcaggggaccttctcacgcagcaacacacccgcgttcacacaacacgggcgaggttcacccgtaccaaagaatcatatagcagcacaatgtagtcgccctccaacacccctcagtcctttcgaatcaccccgtcaatcgccgcgccaacccgtcggatttccacgttcgcacgtccaacacagcgctcgaagttcaccattactaccagccagcgtctcaccacgaagcaacacaccaatcttgccatacaacgccctcggtctctctatccccgagccaaagcgcgatagtggcgctagccacgcgtcagcagccagtagtagtccaaccccgcggccgcgtatccctaagaagatcgaaaagaaagtagagctcgaatcgctacagcagagggagaagcaaagagcgatgaaaaacgctaacaatgctcgaaagagaagagaggcagaggaacggcgaaggctctatttggagactagaaggcggctgcgagcggagatggagagactggaccctgacaatacggatgaaacgtatgatatgattctcgaaatctataatctttacagagatttgggtgccggcgaagctattcggacgccatctgacgacgaaaatgtgcagttgccgttttatgacgagtcgtcaatgtcggaagatgaggatgtagtactgcctatacaggtgaaaatggtttag

SEQ ID NO: 29745 - protein, 727 aa, Muscodor strobelii
  misc_feature: SGI Peptide ID NO. 570219
MPGSRRSTSSGSQRSAYTRTSKASRDIAGGETSLLLRVLGNFRRQSDEVTKPTNSNETPGRANEYNTTHHPDPAHVDLTKARNLKAFEIERKLKRMPRPPLQIAHPPPASTKVNYSMPSHSPMSGRHEYEPSYQIQPKTYSPAGEHGQRKQYSLEDSKRQTTMRVGMIVNPNDISSRLSGGQNAKTSKDGDGELSNTFPDRRHSDASVYTLGDGYSSSIASTPTSSEAPDKEPSNSDGGNCPTPDCRRPLQTPREKKDNLCTKCCIDFQHMSQFAYTFYDDIVGYESDIEVKTATRSNLQKARAVEARIEKSDTSKSEPRTPRRIHSRKSHKIGRGDEDEAQSDCDAQNARSKKLLVSQYQQRYSNSGDGALSDSAITPKSRTRSPRQKREPSGQILLPKVYSTEQTNVKPSTQRSESRPESRHRRNTPDHAEGSPRRHGASIQRAGTPSSHSKQGSPLPYNKAKFSSARSSPGPQVTYVNQRHPPTPDRTPECIQGTFSRSNTPAFTQHGRGSPVPKNHIAAQCSRPPTPLSPFESPRQSPRQPVGFPRSHVQHSARSSPLLPASVSPRSNTPILPYNALGLSIPEPKRDSGASHASAASSSPTPRPRIPKKIEKKVELESLQQREKQRAMKNANNARKRREAEERRRLYLETRRRLRAEMERLDPDNTDETYDMILEIYNLYRDLGAGEAIRTPSDDENVQLPFYDESSMSEDEDVVLPIQVKMV

SEQ ID NO: 29746 - DNA, 197 bp, Muscodor strobelii
  misc_feature: SGI EST ID NO. CUFF.70353.0
  misc_feature: Variant of the nucleotide sequence at SEQ ID NO 29744
ggaactctcaaacacatttccagataggcggcattccgatgcatcagtatacacactaggcgatggctattcgtcgagcatcgcttctacccctacgtcctctgaagcgccggataaagagccatctaactctgatggcggaaattgtccaactcccgattgtcgaagaccattacagacccctcgagagaagaagg

SEQ ID NO: 29747 - DNA, 606 bp, Muscodor strobelii
  misc_feature: SGI cDNA ID NO. 570220
  misc_feature: Encodes the peptide sequence at SEQ ID NO 29748
atggatgaggctacacgcaaggctatgcgcactttgcagtgggttacagaccagcagctacgcgaactcgagcagaagatcatcgtctcgaagatggcggacaatttcgttcctcccggccagctccgctacacccgcgcctgcatggtctgcagcatcgtcatgacccaggctcgtttccgcagcgagggatgtcccaactgccccttcctcgagctgcgcggcaactccgatgctcttgacagctgcacctcgaccgtctacgagggcctcatcaccatcgcgaacccgaataagtcctgggtcgccaagtggcagcgtctcgacaagtacgtccctggcgtctacgctaccaaggtcgctggctctatccctgaggacctccgcaacggcttgattgaagatggacacgttctcattccatctccctttgcgtcggctgaagccgctaagatcattaagaagaggaagaggaacgaggagagagccgctcgcaaccgcaagagactgcagcggggccgccgccctgactcccaggcttctcggtccgagaagagcaacgacagtcgctcctccgccacttcccaggagctctgggacaactga

SEQ ID NO: 29748 - protein, 201 aa, Muscodor strobelii
  misc_feature: SGI Peptide ID NO. 570220
  misc_feature (43)..(137): Pfam Id: PF06093 Pfam Desc: Transcription elongation protein Spt4
  misc_feature (43)..(127): Pfam Id: PF06093 Pfam Desc: Transcription elongation protein Spt4
  misc_feature (32)..(149): NCBI GI: 85098333 Blast Desc: NCU03838 [Neurospora crassa OR74A] gi|74616285|sp|Q7S743.1|SPT4_NEUCR RecName: Full=Transcription elongation factor spt-4; AltName: Full=Chromatin elongation spt-4
  misc_feature (32)..(135): NCBI GI: 116198229 Blast Desc: conserved [Chaetomium globosum CBS 148.51] gi|88178549|gb|EAQ86017.1| conserved [Chaetomium globosum CBS 148.51]
  misc_feature (35)..(149): NCBI GI: 256730915 Blast Desc: transcription elongation factor SPT4 [Nectria haematococca mpVI 77-13-4]
  misc_feature (32)..(149): NCBI GI: 171694237 Blast Desc: protein product [Podospora anserina] gi|170947067|emb|CAP73872.1| protein product [Podospora anserina]
  misc_feature (32)..(149): NCBI GI: 154311505 Blast Desc: BC1G_06605 [Botryotinia fuckeliana B05.10] gi|150851002|gb|EDN26195.1| BC1G_06605 [Botryotinia fuckeliana B05.10]
  misc_feature (32)..(149): NCBI GI: 39978117 Blast Desc: conserved [Magnaporthe grisea 70-15] gi|145013483|gb|EDJ98124.1| conserved [Magnaporthe grisea 70-15]
  misc_feature (32)..(141): NCBI GI: 242793589 Blast Desc: transcriptional elongation protein Spt4, [Talaromyces stipitatus ATCC 10500] gi|218718783|gb|EED18203.1| transcriptional elongation protein Spt4, [Talaromyces stipitatus
  misc_feature (32)..(141): NCBI GI: 212535630 Blast Desc: transcriptional elongation protein Spt4, [Penicillium marneffei ATCC 18224] gi|210070370|gb|EEA24460.1| transcriptional elongation protein Spt4, [Penicillium marneffei ATCC 18224]
  misc_feature (36)..(148): NCBI GI: 238494352 Blast Desc: transcriptional elongation protein Spt4, [Aspergillus flavus NRRL3357] gi|220695062|gb|EED51405.1| transcriptional elongation protein Spt4, [Aspergillus flavus NRRL3357]
  misc_feature (36)..(141): NCBI GI: 169597995 Blast Desc: SNOG_01795 [Phaeosphaeria nodorum SN15] gi|111070324|gb|EAT91444.1| SNOG_01795 [Phaeosphaeria nodorum SN15]
MDEATRKAMRTLQWVTDQQLRELEQKIIVSKMADNFVPPGQLRYTRACMVCSIVMTQARFRSEGCPNCPFLELRGNSDALDSCTSTVYEGLITIANPNKSWVAKWQRLDKYVPGVYATKVAGSIPEDLRNGLIEDGHVLIPSPFASAEAAKIIKKRKRNEERAARNRKRLQRGRRPDSQASRSEKSNDSRSSATSQELWDN

SEQ ID NO: 29749 - DNA, 2540 bp, Muscodor strobelii
  misc_feature: SGI EST ID NO. CUFF.70357.0
  misc_feature: Variant of the nucleotide sequence at SEQ ID NO 29747
tgaaactccaaaatattgaattctctcatcaaacatcagcatcggataaaagcattccggtttgttgcatcatggatgaggctacacgcaaggctatgcgcactttgcagtgggttacagaccagcagctacggtacctcctccacaagtctacatctgattgtcatcctacctaactctagagttgcagcgaactcgagcagaagatcatcgtctcgaagatggcggacaatttcgttcctcccggccagctccgctacacccgcgcctgcatggtctgcagcatcgtcatgacccaggctcgtttccgcagcgagggatgtcccaactgccccttcctcgagctgcgcggcaactccgatgctcttgacagctgcacctcgaccgtctacgagggcctcatcaccatcgcgaacccgaataagtcctgggtcgccaagtggcagcgtctcgacaagtacgtccctggcgtctacgctaccaaggtcgctggctctatccctgaggacctccgcaacggcttgattgaagatggacacgttctcattccgcgcgatggaagcggtgttgataccgactaggcgtcggctgaagccgctaagatcattaagaagaggaagaggaacgaggagagagccgctcgcaaccgcaagagactgcagcggggccgccgccctgactcccaggcttctcggtccgagaagagcaacgacagtcgctcctccgccacttcccaggagctctgggacaactgaagtccccagggccgtcgatgaggctccgaagacctcttggcaacgattccgaatcactttacgatgacctcagctagcatgagtaatttggaagagatggatgattgtattgcatggcaaggcgttggtacaggaagactcaggcgtttgatggttcacgttttcttcggttatgataccctcgagatgggcatggtcggtcgatgtttaggactcggtgttctattctctcccgtaccaagttgcgcaccgttttctcgacatccaaaaacccaaaagtgccggtgttggtacggaaaaaaaagcttagagtacggatgctcgttttactcgtcaagtagatgccacaggatgcatgtctcgtaacgagtagcataacactacagagtataggaatgacaaaaagtcacaacaaaatcaggatggtctttcgtgaaattaattggtattaaacgctacttcgggtgttatgactaaaccattttcacctgtataggcagtactacatcctcatcttccgacattgacgactcgtcataaaacggcaactgcacattttcgtcgtcagatggcgtccgaatagcttcgccggcacccaaatctctgtaaagattatagatttcgagaatcatatcatacgtttcatccgtattgtcagggtccagtctctccatctccgctcgcagccgccttctagtctccaaatagagccttcgccgttcctctgcctctcttctctttcgagcattgttagcgtttttcatcgctctttgcttctccctctgctgtagcgattcgagctctactttcttttcgatcttcttagggatacgcggccgcggggttggactactactggctgctgacgcgtggctagcgccactatcgcgctttggctcggggatagagagaccgagggcgttgtatggcaagattggtgtgttgcttcgtggtgagacgctggctggtagtaatggtgaacttcgagcgctgtgttggacgtgcgaacgtggaaatccgacgggttggcgcggcgattgacggggtgattcgaaaggactgaggggtgttggagggcgactacattgtgctgctatatgattctttggtacgggtgaacctcgcccgtgttgtgtgaacgcgggtgtgttgctgcgtgagaaggtcccctgaatacactctggtgttctgtctggtgttggagggtgtctttgattgacataagttacttgcggccctggggacgatcgcgcactgctgaatttggctttgttgtatggtagaggtgatccttgcttgctgtgagaggagggtgtgccggctcgttggatactggctccatgtcttcgaggtgatccttctgcgtgatctggcgtatttcttctatggcgtgattcgggccttgattcagagcgttgagtcgatggttttacattggtttgctctgtgctatagaccttgggcaacaggatttggcctgatggttctcttttctgtcgtggggaccgagtgcgagacttcggtgttatagctgaatcgctcaacgcgccatcaccgctattagagtatctttgctgatattgactcacgagcagcttcttagatctcgcgttttgcgcgtcacaatcgctctgagcctcatcttcgtcacctcggccgattttatgagatttccttgagtgtatccttcttggcgtacgaggttctgacttcgaagtatcgctcttctctatcctcgcttcgacggctctagccttctgcagattactgcgcgttgccgtcttg

SEQ ID NO: 29750 - DNA, 438 bp, Muscodor strobelii
  misc_feature: SGI cDNA ID NO. 570221
  misc_feature: Encodes the peptide sequence at SEQ ID NO 29751
atgtcaacacccaacccccctccctcaacagccccctcatctacatgtacccagaaagtctccaaaaaccacaccctagcacaatcaaccataaaaacaccaccatactcatacgcccacctcaccctctacaacagcacatccacccctcccacacccctcgacgcgctgcaagtccggtcctactgctcatcggcgcttaagcaattcctcggcgccactggtatgggaatcaatctcgacattctcaaggtcaaaggagcaagtacctggatccgcgtcccgcgtgaagatttagctgccttcgcagctgctattaccgcctggacaggtgtttcgcatgatggagttccttcaacatttagagtagtgggatgttcggattggcttggtacgcttgttgggcaggaggatgaggatgtgctttggagtggatga

SEQ ID NO: 29751 - protein, 145 aa, Muscodor strobelii
  misc_feature: SGI Peptide ID NO. 570221
  misc_feature (1)..(144): NCBI GI: 261351537 Blast Desc: conserved [Verticillium albo-atrum VaMs.102]
  misc_feature (3)..(144): NCBI GI: 46126033 Blast Desc: FG07394.1 [Gibberella zeae PH-1]
  misc_feature (19)..(143): NCBI GI: 85077240 Blast Desc: NCU01434 [Neurospora crassa OR74A] gi|28917033|gb|EAA26758.1| [Neurospora crassa OR74A] gi|28950345|emb|CAD70969.1| [Neurospora crassa]
  misc_feature (5)..(143): NCBI GI: 171692781 Blast Desc: protein product [Podospora anserina] gi|170946339|emb|CAP73140.1| protein product [Podospora anserina]
  misc_feature (5)..(144): NCBI GI: 156065113 Blast Desc: SS1G_00567 [Sclerotinia sclerotiorum 1980] gi|154691426|gb|EDN91164.1| SS1G_00567 [Sclerotinia sclerotiorum 1980]
  misc_feature (1)..(144): NCBI GI: 154311503 Blast Desc: BC1G_06604 [Botryotinia fuckeliana B05.10] gi|150851001|gb|EDN26194.1| BC1G_06604 [Botryotinia fuckeliana B05.10]
  misc_feature (54)..(143): NCBI GI: 145605683 Blast Desc: MGG_06942 [Magnaporthe grisea 70-15] gi|145013484|gb|EDJ98125.1| MGG_06942 [Magnaporthe grisea 70-15]
  misc_feature (32)..(143): NCBI GI: 116199259 Blast Desc: CHGG_07785 [Chaetomium globosum CBS 148.51] gi|88179064|gb|EAQ86532.1| CHGG_07785 [Chaetomium globosum CBS 148.51]
  misc_feature (30)..(142): NCBI GI: 255956053 Blast Desc: Pc21g17830 [Penicillium chrysogenum Wisconsin 54-1255] gi|211590490|emb|CAP96680.1| Pc21g17830 [Penicillium chrysogenum Wisconsin 54-1255]
  misc_feature (11)..(142): NCBI GI: 240274016 Blast Desc: conserved [Ajellomyces capsulatus H143]
MSTPNPPPSTAPSSTCTQKVSKNHTLAQSTIKTPPYSYAHLTLYNSTSTPPTPLDALQVRSYCSSALKQFLGATGMGINLDILKVKGASTWIRVPREDLAAFAAAITAWTGVSHDGVPSTFRVVGCSDWLGTLVGQEDEDVLWSG

SEQ ID NO: 29752 - DNA, 1440 bp, Muscodor strobelii
  misc_feature: SGI cDNA ID NO. 570222
  misc_feature: Encodes the peptide sequence at SEQ ID NO 29753
atggcctcagacgccctagagaaggctacggccttcaagaacgacggcaacaaggcattcgctgcgcacgactggaacaaggccgttgaactttacacgaaagccatcgagctcaacgataaggagccaacttatttcacaaacagagcgcaggcacacataaagtcagaggctttcggctatgcgatcgcggattgtacatcagctatcgagctgaatcctggtatggtgaaggcctattttcgtcgagccgtagcctatgccgccatcctcaagcccaaggatgccgtcaaggacttcaaagaatgcacaaggcttgatccgaacaacaaggatgccaaacttaaactcgccgagtgccagaagattgtgcgacagctcaacttctacgctgccattgatgttggtgacgagccatctgccgccgaaggcctcgatatcgagtcgattgcggtcgagccggactatgatggcgttcaacttaagggagacgagatgacgcaggagttcattgatgacatgatcgagcgttttaagaatggcaagaaaatccataagaaattcgtttaccagattgttattgccgccaagagaatcgtatacgaggagcctactatggtagagatgactatacccgacgacgtcaaacttacagtctgcggtgatacacacggacaatatttcgatcttatggaactctttagacttaacggaaagccttctgacaagcactattacctctttaacggcgactttgttgaccgaggatcatggtcaaccgagattgccctcctcttgtatgcctacaagtggctccgccctcacggcatgctgctcaacagaggtaaccacgagaccgatgacatgaacaaggtgtacggctttgaaggagaatgcaaggcgaagtataacgaccgggtgttcaagctattctccgaaagtttctcagccctaccccttgccacgcttatcggttctaagtacttggtgctacacggtggactcttctccgatgacaacatcacccttgacgacattcgcaagctgaacaggcacaatcagagacaacctggtcagtccggtttgatgatggagatgctgtggacagatccacagactgcgcctggtcgtggcccgagtaagagaggtgtgggcatgcagttcggtcctgatgtgacaaagaggttctgtgacaagaacggcctcgacgccatcatccgatcgcatgaagtccgcatggacggttatgaggaggagcacgacgggaagtgcattacagtcttctctgcacccaagtattgtgaccagacggagaacaggggagcctatatcaatattggtccagattacaagctcaacttcaaccaattcgatgctgttcctcatcctccgatacgcccaatggcttacgcgaataattctttcgggtccatgatgtag

SEQ ID NO: 29753 - protein, 479 aa, Muscodor strobelii
  misc_feature: SGI Peptide ID NO. 570222
  misc_feature (77)..(110): Pfam Id: PF00515 Pfam Desc: Tetratricopeptide repeat
  misc_feature (9)..(42): Pfam Id: PF00515 Pfam Desc: Tetratricopeptide repeat
  misc_feature (77)..(110): Pfam Id: PF07719 Pfam Desc: Tetratricopeptide repeat
  misc_feature (215)..(413): Pfam Id: PF00149 Pfam Desc: Calcineurin-like phosphoesterase
  misc_feature (116)..(209): Pfam Id: PF08321 Pfam Desc: PPP5
  misc_feature (43)..(76): Pfam Id: PF00515 Pfam Desc: Tetratricopeptide repeat
  misc_feature (7)..(479): NCBI GI: 85077237 Blast Desc: serine/threonine-protein phosphatase 5 [Neurospora crassa OR74A] gi|2290382|gb|AAB65138.1| serine/threonine protein phosphatase PPT1 [Neurospora crassa] gi|28917032|gb|EAA26757.1| 5
  misc_feature (7)..(479): NCBI GI: 261351536 Blast Desc: serine/threonine-protein phosphatase [Verticillium albo-atrum VaMs.102]
  misc_feature (3)..(479): NCBI GI: 145605685 Blast Desc: MGG_06941 [Magnaporthe grisea 70-15] gi|145013485|gb|EDJ98126.1| MGG_06941 [Magnaporthe grisea 70-15]
  misc_feature (7)..(479): NCBI GI: 171692783 Blast Desc: protein product [Podospora anserina] gi|170946340|emb|CAP73141.1| protein product [Podospora anserina]
  misc_feature (9)..(479): NCBI GI: 46126035 Blast Desc: FG07395.1 [Gibberella zeae PH-1]
  misc_feature (7)..(474): NCBI GI: 156034555 Blast Desc: SS1G_13212 [Sclerotinia sclerotiorum 1980] gi|154698616|gb|EDN98354.1| SS1G_13212 [Sclerotinia sclerotiorum 1980]
  misc_feature (7)..(469): NCBI GI: 154291778 Blast Desc: BC1G_15048 [Botryotinia fuckeliana B05.10] gi|150846627|gb|EDN21820.1| BC1G_15048 [Botryotinia fuckeliana B05.10]
  misc_feature (1)..(479): NCBI GI: 169777227 Blast Desc: [Aspergillus oryzae RIB40] gi|83771816|dbj|BAE61946.1| protein product [Aspergillus oryzae] gi|86156429|gb|ABC86867.1| serine/threonine phosphatase [Aspergillus oryzae]
  misc_feature (1)..(479): NCBI GI: 119181833 Blast Desc: CIMG_05994 [Coccidioides immitis RS]
  misc_feature (1)..(479): NCBI GI: 240109072 Blast Desc: Serine/threonine protein phosphatase 5 , [Coccidioides posadasii C735 delta SOWgp]
  misc_feature (1)..(478): SWISSPROT Homolog: EC 3.1.3.16 Phosphoprotein phosphatase
MASDALEKATAFKNDGNKAFAAHDWNKAVELYTKAIELNDKEPTYFTNRAQAHIKSEAFGYAIADCTSAIELNPGMVKAYFRRAVAYAAILKPKDAVKDFKECTRLDPNNKDAKLKLAECQKIVRQLNFYAAIDVGDEPSAAEGLDIESIAVEPDYDGVQLKGDEMTQEFIDDMIERFKNGKKIHKKFVYQIVIAAKRIVYEEPTMVEMTIPDDVKLTVCGDTHGQYFDLMELFRLNGKPSDKHYYLFNGDFVDRGSWSTEIALLLYAYKWLRPHGMLLNRGNHETDDMNKVYGFEGECKAKYNDRVFKLFSESFSALPLATLIGSKYLVLHGGLFSDDNITLDDIRKLNRHNQRQPGQSGLMMEMLWTDPQTAPGRGPSKRGVGMQFGPDVTKRFCDKNGLDAIIRSHEVRMDGYEEEHDGKCITVFSAPKYCDQTENRGAYINIGPDYKLNFNQFDAVPHPPIRPMAYANNSFGSMM

SEQ ID NO: 29754 - DNA, 2662 bp, Muscodor strobelii
  misc_feature: SGI EST ID NO. CUFF.70364.0
  misc_feature: Variant of the nucleotide sequence at SEQ ID NO 29752
ggacttccatcttttttcactgtctcaggcacatcttagatcgcaaagacaagaactctgtcacaagactattcacagagcattcactcgctcacatcatatagatatctctagtaatcacttttacaacactccatctcatccatagccacactacgtcaggcaccatggcctcagacgccctagagaaggctacggccttcaagaacgacggcaacaaggcattcgctgcgcacgactggaacaaggccgttgaactttacacgaaagccatcgagctcaacgataaggagccaacttatttcacaaacagagcgcaggcacacataaagtcagaggctttcggctatgcgatcgcggattgtacatcagctatcgagctgaatcctggtatggtgaaggcctattttcgtcgagccgtagcctatgccgccatcctcaagcccaaggatgccgtcaaggacttcaaagaatgcacaaggcttgatccgaacaacaaggatgccaaacttaaactcgccgagtgccagaagattgtgcgacagctcaacttctacgctgccattgatgttggtgacgagccatctgccgccgaaggcctcgatatcgagtcgattgcggtcgagccggactatgatggcgttcaacttaagggagacgagatgacgcaggagttcattgatgacatgatcgagcgttttaagaatggcaagaaaatccataagaaattcgtttaccagattgttattgccgccaagagaatcgtatacgaggagcctactatggtagagatgactatacccgacgacgtcaaacttacagtctgcggtgatacacacggacaatatttcgatcttatggaactctttagacttaacggaaagccttctgacaagcactattacctctttaacggcgactttgttgaccgaggatcatggtcaaccgagattgccctcctcttgtatgcctacaagtggctccgccctcacggcatgctgctcaacagaggtaaccacgagaccgatgacatgaacaaggtgtacggctttgaaggagaatgcaaggcgaagtataacgaccgggtgttcaagctattctccgaaagtttctcagccctaccccttgccacgcttatcggttctaagtacttggtgctacacggtggactcttctccgatgacaacatcacccttgacgacattcgcaagctgaacaggcacaatcagagacaacctggtcagtccggtttgatgatggagatgctgtggacagatccacagactgcgcctggtcgtggcccgagtaagagaggtgtgggcatgcagttcggtcctgatgtgacaaagaggttctgtgacaagaacggcctcgacgccatcatccgatcgcatgaagtccgcatggacggttatgaggaggagcacgacgggaagtgcattacagtcttctctgcacccaagtattgtgaccagacggagaacaggggagcctatatcaatattggtccagattacaagctcaacttcaaccaattcgatgctgttcctcatcctccgatacgcccaatggcttacgcgaataattctttcgggtccatgatgtagatgaatacgttatttagacgttggggatttctttcaagaatcaaatcatctggagtggttatggagcatggcattgcattgctctcttgcatatgtgacagggtgggatcattgtcacaaaccagcattggcgttaagggtgatacacacatagttggttgggtgggaaatggagggacagcgggaaatggaacatacctgcaatgccgtcgccggtaaatatataagaaataaacttcatatacacgtgcttatacttcatgccgaatctgtcgtgaaatgcaagaatttggagagaccttcatccacttcatccactccaaagcacatcctcatcctcctgcccaacaagcgtaccaagccaatccgaacatcccactactctaaatgttgaaggaactccatcatgcgaaacacctgtccaggcggtaatagcagctgcgaaggcagctaaatcttcacgcgggacgcggatccaggtacttgctcctttgaccttgagaatgtcgagattgattcccataccagtggcgccgaggaattgcttaagcgccgatgagcagtaggaccggacttgcagcgcgtcgaggggtgtgggaggggtggatgtgctgttgtagagggtgaggtgggcgtatgagtatggtggtgtttttatggttgattgtgctagggtgtggtttttggagactttctgggtacatgtagatgagggggctgttgagggaggggggttgggtgttgacattttgatatgatggcgtgaagcggaatagttgtggttattggtgagacgaagaatgagctgtcgtggtttggatgtgtttttggtgatggatggtgtaagtcgaatttgaggtgatgagaatggatggagtggtttgcccaatttactgatgcgatgtggactcagtccagggtaggacgtgccatcgtggggctcatgtggtctcttatacgaagttgctttgatgtccggcatcactctctgatgattaaactcaatttctgagatagcatctaatttgatatcacataccctactaatatcgata

SEQ ID NO: 29755 - DNA, 1413 bp, Muscodor strobelii
  misc_feature: SGI cDNA ID NO. 570223
  misc_feature: Reduced expression when VOC is produced
  misc_feature: Encodes the peptide sequence at SEQ ID NO 29756
atggcctcagacgccctagagaaggctacggccttcaagaacgacggcaacaaggcattcgctgcgcacgactggaacaaggccgttgaactttacacgaaagccatcgagctcaacgataaggagccaacttatttcacaaacagagcgcaggcacacataaagtcagaggctttcggctatgcgatcgcggattgtacatcagctatcgagctgaatcctggtatggtgaaggcctattttcgtcgagccgtagcctatgccgccatcctcaagcccaaggatgccgtcaaggacttcaaagaatgcacaaggcttgatccgaacaacaaggatgccaaacttaaactcgccgagtgccagaagattgtgcgacagctcaacttctacgctgccattgatgttggtgacgagccatctgccgccgaaggcctcgatatcgagtcgattgcggtcgagccggactatgatggcgttcaacttaagggagacgagatgacgcaggagttcattgatgacatgatcgagcgttttaagaatggcaagaaaatccataagaaattcgtttaccagattgttattgccgccaagagaatcgtatacgaggagcctactatggtagagatgactatacccgacgacgtcaaacttacagtctgcggtgatacacacggacaatatttcgatcttatggaactctttagacttaacggaaagccttctgacaagcactattacctctttaacggcgactttgttgaccgaggatcatggtcaaccgagattgccctcctcttgtatgcctacaagtggctccgccctcacggcatgctgctcaacagaggtaaccacgagaccgatgacatgaacaaggtgtacggctttgaaggagaatgcaaggcgaagtataacgaccgggtgttcaagctattctccgaaagtttctcagccctaccccttgccacgcttatcggttctaagtacttggtgctacacggtggactcttctccgatgacaacatcacccttgacgacattcgcaagctgaacaggcacaatcagagacaacctggtcagtccggtttgatgatggagatgctgtggacagatccacagactgcgcctggtcgtggcccgagtaagagaggtgtgggcatgcagttcggtcctgatgtgacaaagaggttctgtgacaagaacggcctcgacgccatcatccgatcgcatgaagtccgcatggacggttatgaggaggagcacgacgggaagtgcattacagtcttctctgcacccaagtattgtgaccagacggagaacaggggagcctatatcaatattggtccagattacaagctcaacttcaaccaattcgatgctgttcctcatcctccgatacgcccaatgggttcgtaa

SEQ ID NO: 29756 - protein, 470 aa, Muscodor strobelii
  misc_feature: SGI Peptide ID NO. 570223
  misc_feature (77)..(110): Pfam Id: PF00515 Pfam Desc: Tetratricopeptide repeat
  misc_feature (9)..(42): Pfam Id: PF00515 Pfam Desc: Tetratricopeptide repeat
  misc_feature (77)..(110): Pfam Id: PF07719 Pfam Desc: Tetratricopeptide repeat
  misc_feature (215)..(413): Pfam Id: PF00149 Pfam Desc: Calcineurin-like phosphoesterase
  misc_feature (116)..(209): Pfam Id: PF08321 Pfam Desc: PPP5
  misc_feature (43)..(76): Pfam Id: PF00515 Pfam Desc: Tetratricopeptide repeat
  misc_feature (7)..(469): NCBI GI: 85077237 Blast Desc: serine/threonine-protein phosphatase 5 [Neurospora crassa OR74A] gi|2290382|gb|AAB65138.1| serine/threonine protein phosphatase PPT1 [Neurospora crassa] gi|28917032|gb|EAA26757.1| 5
  misc_feature (7)..(469): NCBI GI: 261351536 Blast Desc: serine/threonine-protein phosphatase [Verticillium albo-atrum VaMs.102]
  misc_feature (3)..(469): NCBI GI: 145605685 Blast Desc: MGG_06941 [Magnaporthe grisea 70-15] gi|145013485|gb|EDJ98126.1| MGG_06941 [Magnaporthe grisea 70-15]
  misc_feature (7)..(469): NCBI GI: 171692783 Blast Desc: protein product [Podospora anserina] gi|170946340|emb|CAP73141.1| protein product [Podospora anserina]
  misc_feature (7)..(470): NCBI GI: 156034555 Blast Desc: SS1G_13212 [Sclerotinia sclerotiorum 1980] gi|154698616|gb|EDN98354.1| SS1G_13212 [Sclerotinia sclerotiorum 1980]
  misc_feature (9)..(469): NCBI GI: 46126035 Blast Desc: FG07395.1 [Gibberella zeae PH-1]
  misc_feature (7)..(468): NCBI GI: 154291778 Blast Desc: BC1G_15048 [Botryotinia fuckeliana B05.10] gi|150846627|gb|EDN21820.1| BC1G_15048 [Botryotinia fuckeliana B05.10]
  misc_feature (1)..(469): NCBI GI: 119181833 Blast Desc: CIMG_05994 [Coccidioides immitis RS]
  misc_feature (1)..(469): NCBI GI: 240109072 Blast Desc: Serine/threonine protein phosphatase 5 , [Coccidioides posadasii C735 delta SOWgp]
  misc_feature (1)..(470): NCBI GI: 238494354 Blast Desc: serine/threonine protein phosphatase PPT1 [Aspergillus flavus NRRL3357] gi|220695063|gb|EED51406.1| serine/threonine protein phosphatase PPT1 [Aspergillus flavus NRRL3357]
  misc_feature (1)..(469): SWISSPROT Homolog: EC 3.1.3.16 Phosphoprotein phosphatase
  misc_feature: Useful for introducing or modulating the production of volatile compounds
MASDALEKATAFKNDGNKAFAAHDWNKAVELYTKAIELNDKEPTYFTNRAQAHIKSEAFGYAIADCTSAIELNPGMVKAYFRRAVAYAAILKPKDAVKDFKECTRLDPNNKDAKLKLAECQKIVRQLNFYAAIDVGDEPSAAEGLDIESIAVEPDYDGVQLKGDEMTQEFIDDMIERFKNGKKIHKKFVYQIVIAAKRIVYEEPTMVEMTIPDDVKLTVCGDTHGQYFDLMELFRLNGKPSDKHYYLFNGDFVDRGSWSTEIALLLYAYKWLRPHGMLLNRGNHETDDMNKVYGFEGECKAKYNDRVFKLFSESFSALPLATLIGSKYLVLHGGLFSDDNITLDDIRKLNRHNQRQPGQSGLMMEMLWTDPQTAPGRGPSKRGVGMQFGPDVTKRFCDKNGLDAIIRSHEVRMDGYEEEHDGKCITVFSAPKYCDQTENRGAYINIGPDYKLNFNQFDAVPHPPIRPMGS

SEQ ID NO: 29757 - DNA, 2662 bp, Muscodor strobelii; identical to SEQ ID NO: 29754
  misc_feature: SGI EST ID NO. CUFF.70364.0
  misc_feature: Variant of the nucleotide sequence at SEQ ID NO 29755

SEQ ID NO: 29758 - DNA, 852 bp, Muscodor strobelii
  misc_feature: SGI cDNA ID NO. 570224
  misc_feature: Encodes the peptide sequence at SEQ ID NO 29759
atgtcggacgaatttctggacgaagtggaagccataaactccatatacggagaaggatgtctcacaccttctggtgacacaaatatctacattcttacaccacctggtgaatcagcatcactccggattgaatttcccttggagtatccagctgttcctcccacagtgagaggtactaatagcactggccaaagtgggaggaaaggcgacgctgcaagagaattggaattattttgcagtgctctgggcaacgtgtatcaagcaggcagtgtatgcttgtttgatgcgcttgaggaattgaatagactgctggaagaatatactgctaatgagccgaaggaggaacaaactgaggtcgacgagagcacctcgaatgaagaggagtcgacagtgaacaacgagaaacagaatccgctttccacgagagaacctccatgggtactatccgatccggtcattgaacagcggtccacattcgttgctcgttgcgcagtagtatcatcaacagcagaagccgaggcctttgttcaacatctcctagcatcagacaagaaagtccggactgccacacataacatgacagcctggcgcatcagaggaccaaatggcgtacagtttcaagactgcgatgatgatggagaaacagcggctggaggacgtttattacacctcatgcaactcatggacctctgggatgtcatggtcgtggtgacgcgttggtatggaggagtacatttgggtccgcgtagattcgctctcatcaaccaagctgcaagggactcattcgtgaaggccggcctagtcacagaaacgacctcgaataaccctaagaagaaaggctcggccaagtga

SEQ ID NO: 29759 - protein, 283 aa, Muscodor strobelii
  misc_feature: SGI Peptide ID NO. 570224
  misc_feature (1)..(104): Pfam Id: PF05773 Pfam Desc: RWD domain
  misc_feature (154)..(264): Pfam Id: PF01205 Pfam Desc: Uncharacterized protein family UPF0029
  misc_feature (1)..(270): NCBI GI: 116206302 Blast Desc: CHGG_02444 [Chaetomium globosum CBS 148.51] gi|88183041|gb|EAQ90509.1| CHGG_02444 [Chaetomium globosum CBS 148.51]
  misc_feature (1)..(283): NCBI GI: 39961397 Blast Desc: MGG_09525 [Magnaporthe grisea 70-15] gi|145011028|gb|EDJ95684.1| MGG_09525 [Magnaporthe grisea 70-15]
  misc_feature (1)..(270): NCBI GI: 85091150 Blast Desc: NCU09542 [Neurospora crassa OR74A] gi|28920145|gb|EAA29525.1| conserved [Neurospora crassa OR74A] gi|38566862|emb|CAE76168.1| conserved [Neurospora crassa]
  misc_feature (1)..(280): NCBI GI: 256731414 Blast Desc: NECHADRAFT_48812 [Nectria haematococca mpVI 77-13-4]
  misc_feature (1)..(269): NCBI GI: 154292879 Blast Desc: BC1G_14471 [Botryotinia fuckeliana B05.10] gi|150845748|gb|EDN20941.1| BC1G_14471 [Botryotinia fuckeliana B05.10]
  misc_feature (1)..(269): NCBI GI: 156063788 Blast Desc: SS1G_02012 [Sclerotinia sclerotiorum 1980] gi|154697346|gb|EDN97084.1| SS1G_02012 [Sclerotinia sclerotiorum 1980]
  misc_feature (7)..(266): NCBI GI: 189209704 Blast Desc: impact family protein [Pyrenophora tritici-repentis Pt-1C-BFP] gi|187977277|gb|EDU43903.1| impact family protein [Pyrenophora tritici-repentis Pt-1C-BFP]
  misc_feature (2)..(280): NCBI GI: 169615891 Blast Desc: SNOG_11112 [Phaeosphaeria nodorum SN15] gi|111060491|gb|EAT81611.1| SNOG_11112 [Phaeosphaeria nodorum SN15]
  misc_feature (2)..(267): NCBI GI: 238839410 Blast Desc: impact family protein [Microsporum canis CBS 113480]
  misc_feature (4)..(283): NCBI GI: 119498949 Blast Desc: Impact family protein [Neosartorya fischeri NRRL 181] gi|119414396|gb|EAW24335.1| Impact family protein [Neosartorya fischeri NRRL 181]
MSDEFLDEVEAINSIYGEGCLTPSGDTNIYILTPPGESASLRIEFPLEYPAVPPTVRGTNSTGQSGRKGDAARELELFCSALGNVYQAGSVCLFDALEELNRLLEEYTANEPKEEQTEVDESTSNEEESTVNNEKQNPLSTREPPWVLSDPVIEQRSTFVARCAVVSSTAEAEAFVQHLLASDKKVRTATHNMTAWRIRGPNGVQFQDCDDDGETAAGGRLLHLMQLMDLWDVMVVVTRWYGGVHLGPRRFALINQAARDSFVKAGLVTETTSNNPKKKGSAK

SEQ ID NO: 29760 - DNA, 1215 bp, Muscodor strobelii
  misc_feature: SGI cDNA ID NO. 570225
  misc_feature: Encodes the peptide sequence at SEQ ID NO 29761
atggtcaacgcaccacccctccacggcctaaaagtcctcgaattcgccggcctagcaccagggcccttcgcaggtctgcttctcgcagacgccggagcaaacgtcctacgcatcgaccgggccatcccgggaaaaacacacacagccaatgtctcgcccccagcaacagaagacatgctcacgcggcacaaatcatccatagcagtgaacttgaaatcttcctccggcgtctccctaataaagacattggcaaaaacagcagatatagtaatcgaccccttccgtcccggggtcctggaaaaactcgggctaggtccagatgtactgtcagcgatcaatccgagattgatatacggccgtatgacgggattcaggagagatgggaaatacgcagcgatggcgggacacgatataaactaccttgccgtctccggcgttctttccatgctaggaagagatggggagaaaccccatccaccatggaacatcctggcggatttcgctggtggtggcgcgacgttgttccagggtatactaatggctgtcatagcccgtgaacgaacgggcaaagggcagacagtggaggctaatatggtggatggcgctaattacctcaccacattccctagaatggctctaaagacaccgctcggcgataatggacgcggcaagaatcaactcgatggtggatgtccgttttatgatacgtatgagactaaagacgggaaatacatgtctgtcggtgccctggaaccgcaattctttgccgtcttggtcaaaggactgggtctagggaataaagggtggcagcagacgaggtgggatagaaacgtttggccggatatgaaagcgcactttgagaaaacttttagaagtaagggtcgcctggcttgggagaagatctttgatggcacggatgcgtgttgtttgcctgtgttggaataccacgagttggagacggtggagggaagagagggtgatcagagaccggctgttacgctgagagatacgccttgtcttgcggttcaggagggtgttaaggatgagagtctacagggccaggggaagggggtggacgggaatgggtatttcgggtcgtcgcttggtgcgggagagggtggtgaaaatgcgttgagggattggtttgggttgaaggggagtgagtatggggttgaggatggaggtctagttttgagggctacgagtaagctgtga

SEQ ID NO: 29761 - protein, 404 aa, Muscodor strobelii
  misc_feature: SGI Peptide ID NO. 570225
  misc_feature (67)..(258): Pfam Id: PF02515 Pfam Desc: CoA-transferase family III
  misc_feature (1)..(404): NCBI GI: 256731336 Blast Desc: NECHADRAFT_49211 [Nectria haematococca mpVI 77-13-4]
  misc_feature (1)..(404): NCBI GI: 46125591 Blast Desc: FG07173.1 [Gibberella zeae PH-1]
  misc_feature (1)..(404): NCBI GI: 154290912 Blast Desc: BC1G_15388 [Botryotinia fuckeliana B05.10] gi|150847207|gb|EDN22400.1| BC1G_15388 [Botryotinia fuckeliana B05.10]
  misc_feature (1)..(404): NCBI GI: 156059562 Blast Desc: SS1G_03793 [Sclerotinia sclerotiorum 1980] gi|154701580|gb|EDO01319.1| SS1G_03793 [Sclerotinia sclerotiorum 1980]
  misc_feature (1)..(400): NCBI GI: 261355520 Blast Desc: alpha-methylacyl-CoA racemase [Verticillium albo-atrum VaMs.102]
  misc_feature (5)..(404): NCBI GI: 39961261 Blast Desc: MGG_09516 [Magnaporthe grisea 70-15] gi|145011016|gb|EDJ95672.1| MGG_09516 [Magnaporthe grisea 70-15]
  misc_feature (1)..(397): NCBI GI: 85099873 Blast Desc: alpha-methylacyl-CoA racemase [Neurospora crassa OR74A] gi|28922390|gb|EAA31625.1| alpha-methylacyl-CoA racemase [Neurospora crassa OR74A] gi|28950366|emb|CAD71021.1| racemase
  misc_feature (1)..(404): NCBI GI: 171693913 Blast Desc: protein product [Podospora anserina] gi|170946905|emb|CAP73709.1| protein product [Podospora anserina]
  misc_feature (5)..(404): NCBI GI: 169615729 Blast Desc: SNOG_11028 [Phaeosphaeria nodorum SN15] gi|111060407|gb|EAT81527.1| SNOG_11028 [Phaeosphaeria nodorum SN15]
  misc_feature (5)..(404): NCBI GI: 189209762 Blast Desc: alpha-methylacyl-CoA racemase [Pyrenophora tritici-repentis Pt-1C-BFP] gi|187977306|gb|EDU43932.1| alpha-methylacyl-CoA racemase [Pyrenophora tritici-repentis
  misc_feature (7)..(340): SWISSPROT Homolog: EC 5.1.99.4 Alpha-methylacyl-CoA racemase
MVNAPPLHGLKVLEFAGLAPGPFAGLLLADAGANVLRIDRAIPGKTHTANVSPPATEDMLTRHKSSIAVNLKSSSGVSLIKTLAKTADIVIDPFRPGVLEKLGLGPDVLSAINPRLIYGRMTGFRRDGKYAAMAGHDINYLAVSGVLSMLGRDGEKPHPPWNILADFAGGGATLFQGILMAVIARERTGKGQTVEANMVDGANYLTTFPRMALKTPLGDNGRGKNQLDGGCPFYDTYETKDGKYMSVGALEPQFFAVLVKGLGLGNKGWQQTRWDRNVWPDMKAHFEKTFRSKGRLAWEKIFDGTDACCLPVLEYHELETVEGREGDQRPAVTLRDTPCLAVQEGVKDESLQGQGKGVDGNGYFGSSLGAGEGGENALRDWFGLKGSEYGVEDGGLVLRATSKL

SEQ ID NO: 29762 - DNA, 2100 bp, Muscodor strobelii
  misc_feature: SGI cDNA ID NO. 570226
  misc_feature: Encodes the peptide sequence at SEQ ID NO 29763
atggccgaccaagtaagccctcatggaggcatctcggatcctgctttgatcaagctcgtcaacaagcttcaagatgtcttcgccacagtcggtgtcaataaccccatcgacctaccccagatcgtcgtcgtaggcagtcagtctagcgggaagagttccgtgctcgagaatatcgttggccgagactttctgcctcgaggctccggtatcgtgacgagacggcccctcgtattgcagctgatcaaccgacctgcgaccgcacagacgaacggcgagaaccaggaagtcgccaactcgaccgataaggccgccaacgccgacgaatggggcgagttcctgcacatccccggccagaagttcttcgactttaataagattagagacgagatcagcagagaaaccgaagccaaggtcgggaggaatgccggcatctctcccgcccccatcaacctcagagtctactctcccaacgtcctgaccctgaccctcgtcgatctgcccggtctgaccaaagttcccgtcggcgaccagccccgcgatatcgagcgacagataaaggatatggttctgaagtacatccagaagtccaacgccatcatcctcgccgtcacctctgccaacatcgatctggccaactccgatggtcttaagctcgctcgagaggtcgatcccgaaggtcagagaacgatcggtgttctcaccaaggttgacttgatggacgaggggacagacgtggtggatatcctggctggccgtattattccactgcgcttaggatacgtgccagtcgtcaaccgtggccagcgcgatatcgacaacaaaaagcccatctcacagtcgctcgagggagagagggctttcttcgagaaccacagggcttaccgcaacaagagctcttactgcggtactccttatttggcgaagaagcttaacatgattctcatgatgcacatcaagcagaccctaccagatatcaaggctcgcattgccagctctctacaaaaatacagccaggagctcgaaagtcttggcccttcactgttgggcgacagcgctaatgttgtcctgggaatcatcacagaattcaccaagcaatggcaagccgttcttgaaggtaacagcggcgagctatcgagcctagaattgagcggtggtgcccgtattagtttcgttttccacgagctctactcgaatggtgtaaaggctgtggacccattcgacgagaataaggatatggacatccggattattctttacaacgcgtctggatcttcccctgcgctctttgtaggcaccactgccttcgaggtcatcgtcaagaaggagatcaaacgcttggaggaccctagcttgaagtgtgtgtcgctcgtctacgatgagttagtacgcatcttgactcagctactatccaagccactttatcgccgctaccctggcctcaaggagaagttacacggaactgttatcaacttcttcaaaaaatccatggaacctacaaacaagctcgttaaggatctcgtggccatggaggcttgctacgtcaacactgggcaccccgatttcctaaatggtcacagggctatggccattgtaaacgagcgccactatggcgccaagccagtgcaggtcgatcctaagacagggaagcctctccctgcttctgcgacacccgctcgtgctgccagcccatcgttggatagtaacctagacagtagccctggcttcttcggcagcttctttgccgccaagaataagaagaaggctgcggctatggaggcacctccaccagtgctcaaggcatctggcactctgtctgagcgggagaatatcgaggttgaagttatcaagctattaatttcgtcgtactttaacatcgtgaagagaaccatgatcgatatggtacctaaagccatcatgctaaacctcgtccaatatacaaaggacgaaatgcaaaaggagctgctcgagggtatgtaccggggagacaatcccgatgagttactgaaggagagtgactacaccgttcgccggcgtaaggaatgccagcagatggtagaatcactgtccaaggctagcgagatcgtcagccaagtgcagtaa

SEQ ID NO: 29763 - protein, 699 aa, Muscodor strobelii
  misc_feature: SGI Peptide ID NO. 570226
  misc_feature (245)..(536): Pfam Id: PF01031 Pfam Desc: Dynamin central region
  misc_feature (41)..(236): Pfam Id: PF00350 Pfam Desc: Dynamin family
  misc_feature (607)..(698): Pfam Id: PF02212 Pfam Desc: Dynamin GTPase effector domain
  misc_feature (2)..(699): NCBI GI: 116198053 Blast Desc: conserved [Chaetomium globosum CBS 148.51] gi|88178461|gb|EAQ85929.1| conserved [Chaetomium globosum CBS 148.51]
  misc_feature (2)..(699): NCBI GI: 261355517 Blast Desc: vacuolar protein sorting-associated protein [Verticillium albo-atrum VaMs.102]
  misc_feature (9)..(699): NCBI GI: 171693905 Blast Desc: protein product [Podospora anserina] gi|170946901|emb|CAP73705.1| protein product [Podospora anserina]
  misc_feature (5)..(699): NCBI GI: 85099877 Blast Desc: vacuolar sorting protein 1 [Neurospora crassa OR74A] gi|28922391|gb|EAA31626.1| vacuolar sorting protein 1 [Neurospora crassa OR74A]
  misc_feature (5)..(699): NCBI GI: 156059556 Blast Desc: SS1G_03790 [Sclerotinia sclerotiorum 1980] gi|154701577|gb|EDO01316.1| SS1G_03790 [Sclerotinia sclerotiorum 1980]
  misc_feature (5)..(699): NCBI GI: 28950365 Blast Desc: VpsA protein [Neurospora crassa]
  misc_feature (1)..(699): NCBI GI: 256730961 Blast Desc: [Nectria haematococca mpVI 77-13-4]
  misc_feature (1)..(699): NCBI GI: 46125589 Blast Desc: FG07172.1 [Gibberella zeae PH-1]
  misc_feature (11)..(699): NCBI GI: 225684980 Blast Desc: dynamin-2 [Paracoccidioides brasiliensis Pb03]
  misc_feature (6)..(699): NCBI GI: 261202794 Blast Desc: vacuolar dynamin-like GTPase VpsA [Ajellomyces dermatitidis SLH14081] gi|239590708|gb|EEQ73289.1| vacuolar dynamin-like GTPase VpsA [Ajellomyces dermatitidis SLH14081]
  misc_feature (15)..(524): SWISSPROT Homolog: EC 3.6.5.5 Dynamin GTPase
MADQVSPHGGISDPALIKLVNKLQDVFATVGVNNPIDLPQIVVVGSQSSGKSSVLENIVGRDFLPRGSGIVTRRPLVLQLINRPATAQTNGENQEVANSTDKAANADEWGEFLHIPGQKFFDFNKIRDEISRETEAKVGRNAGISPAPINLRVYSPNVLTLTLVDLPGLTKVPVGDQPRDIERQIKDMVLKYIQKSNAIILAVTSANIDLANSDGLKLAREVDPEGQRTIGVLTKVDLMDEGTDVVDILAGRIIPLRLGYVPVVNRGQRDIDNKKPISQSLEGERAFFENHRAYRNKSSYCGTPYLAKKLNMILMMHIKQTLPDIKARIASSLQKYSQELESLGPSLLGDSANVVLGIITEFTKQWQAVLEGNSGELSSLELSGGARISFVFHELYSNGVKAVDPFDENKDMDIRIILYNASGSSPALFVGTTAFEVIVKKEIKRLEDPSLKCVSLVYDELVRILTQLLSKPLYRRYPGLKEKLHGTVINFFKKSMEPTNKLVKDLVAMEACYVNTGHPDFLNGHRAMAIVNERHYGAKPVQVDPKTGKPLPASATPARAASPSLDSNLDSSPGFFGSFFAAKNKKKAAAMEAPPPVLKASGTLSERENIEVEVIKLLISSYFNIVKRTMIDMVPKAIMLNLVQYTKDEMQKELLEGMYRGDNPDELLKESDYTVRRRKECQQMVESLSKASEIVSQVQ

SEQ ID NO: 29764 - DNA, 5283 bp, Muscodor strobelii
  misc_feature: SGI EST ID NO. CUFF.70796.1
  misc_feature: Variant of the nucleotide sequence at SEQ ID NO 29762
aggcaacaccatttctcctccattctcacgtgtaataatcaaatacaaacctcgactgtcgcaagctgcctcgactgtgctgcgcgctgtgtcagacttcgaagacgacaccatctctctagctgtagctagcatctgcgacatcacatacttctgtcgctccttgacatctaaacctgtctccctccctaccttatctacgcttccgccaaatcttgtcgttcagcgacaggctgccacaacacttcccacctctgtcgctcccatcttcgatcagaaccgtatagaggagcttgtccgcagacatggccgaccaagtaagccctcatggaggcatctcggatcctgctttgatcaagctcgtcaacaagcttcaagatgtcttcgccacagtcggtgtcaataaccccatcgacctaccccagatcgtcgtcgtaggcagtcagtctagcgggaagagttccgtgctcgagaatatcgttggccgagactttctgcctcgaggctccggtatcgtgacgagacggcccctcgtattgcagctgatcaaccgacctgcgaccgcacagacgaacggcgagaaccaggaagtcgccaactcgaccgataaggccgccaacgccgacgaatggggcgagttcctgcacatccccggccagaagttcttcgactttaataagattagagacgagatcagcagagaaaccgaagccaaggtcgggaggaatgccggcatctctcccgcccccatcaacctcagagtctactctcccaacgtcctgaccctgaccctcgtcgatctgcccggtctgaccaaagttcccgtcggcgaccagccccgcgatatcgagcgacagataaaggatatggttctgaagtacatccagaagtccaacgccatcatcctcgccgtcacctctgccaacatcgatctggccaactccgatggtcttaagctcgctcgagaggtcgatcccgaaggtcagagaacgatcggtgttctcaccaaggttgacttgatggacgaggggacagacgtggtggatatcctggctggccgtattattccactgcgcttaggatacgtgccagtcgtcaaccgtggccagcgcgatatcgacaacaaaaagcccatctcacagtcgctcgagggagagagggctttcttcgagaaccacagggcttaccgcaacaagagctcttactgcggtactccttatttggcgaagaagcttaacatgattctcatgatgcacatcaagcagaccctaccagatatcaaggctcgcattgccagctctctacaaaaatacagccaggagctcgaaagtcttggcccttcactgttgggcgacagcgctaatgttgtcctgggaatcatcacagaattcaccaagcaatggcaagccgttcttgaaggtaacagcggcgagctatcgagcctagaattgagcggtggtgcccgtattagtttcgttttccacgagctctactcgaatggtgtaaaggctgtggacccattcgacgagaataaggatatggacatccggattattctttacaacgcgtctggatcttcccctgcgctctttgtaggcaccactgccttcgaggtcatcgtcaagaaggagatcaaacgcttggaggaccctagcttgaagtgtgtgtcgctcgtctacgatgagttagtacgcatcttgactcagctactatccaagccactttatcgccgctaccctggcctcaaggagaagttacacggaactgttatcaacttcttcaaaaaatccatggaacctacaaacaagctcgttaaggatctcgtggccatggaggcttgctacgtcaacactgggcaccccgatttcctaaatggtcacagggctatggccattgtaaacgagcgccactatggcgccaagccagtgcaggtcgatcctaagacagggaagcctctccctgcttctgcgacacccgctcgtgctgccagcccatcgttggatagtaacctagacagtagccctggcttcttcggcagcttctttgccgccaagaataagaagaaggctgcggctatggaggcacctccaccagtgctcaaggcatctggcactctgtctgagcgggagaatatcgaggttgaagttatcaagctattaatttcgtcgtactttaacatcgtgaagagaaccatgatcgatatggtacctaaagccatcatgctaaacctcgtccaatatacaaaggacgaaatgcaaaaggagctgctcgagggtatgtaccggggagacaatcccgatgagttactgaaggagagtgactacaccgttcgccggcgtaaggaatgccagcagatggtagaatcactgtccaaggctagcgagatcgtcagccaagtgcagtaattgtaggagccaatcccacatcatcggcatgtttttcatatcagtcacggagccggcgatacatgttttatatgagctttggcattactcgtcggcaaggcgttggagaaaactcaccgtctgtcggtagactcagtatcccactcggtcctacttggttgggtgtatggcaaatttgattccccatggtttcacgcgctacatttgttgtctcaggtagttttagacgtctgctgggagtagaagaaaagtagatcgatggatgacacgttgttcgcataagtcgagagacatgcagagagtatagttgctaggatggggttggagatagcattacaagagttttaattaatctactctcaagtcatgttcaagtttattgcgatcttgatgatttgcatgtcccctataatgagtcctcataactcgtatcacactacaaaatcaaagactttttgctgcatgattcacgagtattcgctcatttcaactcgatactgttaatcgaacatcacagcttactcgtagccctcaaaactagacctccatcctcaaccccatactcactccccttcaacccaaaccaatccctcaacgcattttcaccaccctctcccgcaccaagcgacgacccgaaatacccattcccgtccacccccttcccctggccctgtagactctcatccttaacaccctcctgaaccgcaagacaaggcgtatctctcagcgtaacagccggtctctgatcaccctctcttccctccaccgtctccaactcgtggtattccaacacaggcaaacaacacgcatccgtgccatcaaagatcttctcccaagccaggcgacccttacttctaaaagttttctcaaagtgcgctttcatatccggccaaacgtttctatcccacctcgtctgctgccaccctttattccctagacccagtcctttgaccaagacggcaaagaattgcggttccagggcaccgacagacatgtatttcccgtctttagtctcatacgtatcataaaacggacatccaccatcgagttgattcttgccgcgtccattatcgccgagcggtgtctttagagccattctagggaatgtggtgaggtaattagcgccatccaccatattagcctccactgtctgccctttgcccgttcgttcacgggctatgacagccattagtataccctggaacaacgtcgcgccaccaccagcgaaatccgccaggatgttccatggtggatggggtttctccccatctcttcctagcatggaaagaacgccggagacggcaaggtagtttatatcgtgtcccgccatcgctgcgtatttcccatctctcctgaatcccgtcatacggccgtatatcaatctcggattgatcgctgacagtacatctggacctagcccgagtttttccaggaccccgggacggaaggggtcgattactatatctgctgtttttgccaatgtctttattagggagacgccggaggaagatttcaagttcactgctatggatgatttgtgccgcgtgagcatgtcttctgttgctgggggcgagacattggctgtgtgtgtttttcccgggatggcccggtcgatgcgtaggacgtttgctccggcgtctgcgagaagcagacctgcgaagggccctggtgctaggccggcgaattcgaggacttttaggccgtggaggggtggtgcgttgaccatcttttgctgagattcgttctccctagatagatcacagggtttgagtaggtattctggttgtgagatgagatgaggtcgtgagaggtagttgtcaaagactggtcacaaacgagctcaatcgcgtcaaggcggttgtattatattcacacaattagaatgtaagcgaggcaagttcggattgcaacgaagggactgcggcgtattcataacgctgcaccggcggaacatcataaccgcagggggttgaaggtgcgggttgttggagagccgaggctctatgcctcctgcacgctgccgggagctagcagatcgccaactctcacttccagggtcctggggcggtacggtggggtagtatgggtgacgaccacgcaccatgctgccaaggcaagtcccttggcacgaattcggccaacgtctactcgaatagatttcgagtttaagcattctgcaccgtacggactgatattgggctcgaggttcttattgtgtctcatcacttggccgagcctttcttcttagggttattcgaggtcgtttctgtgactaggccggccttcacgaatgagtcccttgcagcttggttgatgagagcgaatctacgcggacccaaatgtactcctccataccaacgcgtcaccacgaccatgacatcccagaggtccatgagttgcatgaggtgtaataaacgtcctccagccgctgtttctccatcatcatcgcagtcttgaaactgtacgccatttggtcctctgatgcgccaggctgtcatgttatgtgtggcagtccggactttcttgtctgatgctaggagatgttgaacaaaggcctcggcttctgctgttgatgatactactgcgcaacgagcaacgaatgtggaccgctgttcaatgaccggatcggatagtacccatggaggttctctcgtggaaagcggattctgtttctcgttgttcactgtcgactcctcttcattcgaggtgctctcgtcgacctcagtttgttcctccttcggctcattagcagtatattcttccagcagtctattcaattcctcaagcgcatcaaacaagcatacactgcctgcttgatacacgttgcccagagcactgcaaaataattccaattctcttgcagcgtcgcctttcctcc

SEQ ID NO: 29765 - DNA, 2157 bp, Muscodor strobelii
  misc_feature: SGI cDNA ID NO. 570227
  misc_feature: Encodes the peptide sequence at SEQ ID NO 29766
atggccgaccaagtaagccctcatggaggcatctcggatcctgctttgatcaagctcgtcaacaagcttcaagatgtcttcgccacagtcggtgtcaataaccccatcgacctaccccagatcgtcgtcgtaggcagtcagtctagcgggaagagttccgtgctcgagaatatcgttggccgagactttctgcctcgaggctccggtatcgtgacgagacggcccctcgtattgcagctgatcaaccgacctgcgaccgcacagacgaacggcgagaaccaggaagtcgccaactcgaccgataaggccgccaacgccgacgaatggggcgagttcctgcacatccccggccagaagttcttcgactttaataagattagagacgagatcagcagagaaaccgaagccaaggtcgggaggaatgccggcatctctcccgcccccatcaacctcagagtctactctcccaacgtcctgaccctgaccctcgtcgatctgcccggtctgaccaaagttcccgtcggcgaccagccccgcgatatcgagcgacagataaaggatatggttctgaagtacatccagaagtccaacgccatcatcctcgccgtcacctctgccaacatcgatctggccaactccgatggtcttaagctcgctcgagaggtcgatcccgaaggtcagagaacgatcggtgttctcaccaaggttgacttgatggacgaggggacagacgtggtggatatcctggctggccgtattattccactgcgcttaggatacgtgccagtcgtcaaccgtggccagcgcgatatcgacaacaaaaagcccatctcacagtcgctcgagggagagagggctttcttcgagaaccacagggcttaccgcaacaagagctcttactgcggtactccttatttggcgaagaagcttaacatgattctcatgatgcacatcaagcagaccctaccagatatcaaggctcgcattgccagctctctacaaaaatacagccaggagctcgaaagtcttggcccttcactgttgggcgacagcgctaatgttgtcctgggaatcatcacagaattcaccaagcaatggcaagccgttcttgaaggtaacagcggcgagctatcgagcctagaattgagcggtggtgcccgtattagtttcgttttccacgagctctactcgaatggtgtaaaggctgtggacccattcgacgagaataaggatatggacatccggattattctttacaacgcgtctggatcttcccctgcgctctttgtaggcaccactgccttcgaggtcatcgtcaagaaggagatcaaacgcttggaggaccctagcttgaagtgtgtgtcgctcgtctacgatgagttagtacgcatcttgactcagctactatccaagccactttatcgccgctaccctggcctcaaggagaagttacacggaactgttatcaacttcttcaaaaaatccatggaacctacaaacaagctcgttaaggatctcgtggccatggaggcttgctacgtcaacactgggcaccccgatttcctaaatggtcacagggctatggccattgtaaacgagcgccactatggcgccaagccagtgcaggtcgatcctaagacagggaagcctctccctgcttctgcgacacccgctcgtgctgccagcccatcgttggatagtaacctagacagtagccctggcttcttcggcagcttctttgccgccaagaataagaagaaggctgcggctatggaggcacctccaccagtgctcaaggcatctggcactctgtctgagcgggagaatatcgaggttgaagttatcagtgagcttccttttcccaatcttgcccatggtaccaaattgctaatgtgcattgcagagctattaatttcgtcgtactttaacatcgtgaagagaaccatgatcgatatggtacctaaagccatcatgctaaacctcgtccaatatacaaaggacgaaatgcaaaaggagctgctcgagggtatgtaccggggagacaatcccgatgagttactgaaggagagtgactacaccgttcgccggcgtaaggaatgccagcagatggtagaatcactgtccaaggctagcgagatcgtcagccaagtgcagtaa

SEQ ID NO: 29766 - protein, 718 aa, Muscodor strobelii
  misc_feature: SGI Peptide ID NO. 570227
  misc_feature (245)..(536): Pfam Id: PF01031 Pfam Desc: Dynamin central region
  misc_feature (41)..(236): Pfam Id: PF00350 Pfam Desc: Dynamin family
  misc_feature (626)..(717): Pfam Id: PF02212 Pfam Desc: Dynamin GTPase effector domain
  misc_feature (1)..(718): NCBI GI: 46125589 Blast Desc: FG07172.1 [Gibberella zeae PH-1]
  misc_feature (11)..(718): NCBI GI: 225684980 Blast Desc: dynamin-2 [Paracoccidioides brasiliensis Pb03]
  misc_feature (6)..(718): NCBI GI: 261202794 Blast Desc: vacuolar dynamin-like GTPase VpsA [Ajellomyces dermatitidis SLH14081] gi|239590708|gb|EEQ73289.1| vacuolar dynamin-like GTPase VpsA [Ajellomyces dermatitidis SLH14081]
  misc_feature (6)..(718): NCBI GI: 239612422 Blast Desc: vacuolar dynamin-like GTPase VpsA [Ajellomyces dermatitidis ER-3]
  misc_feature (6)..(718): NCBI GI: 225556970 Blast Desc: vacuolar sorting-associated protein [Ajellomyces capsulatus G186AR]
  misc_feature (1)..(718): NCBI GI: 70985200 Blast Desc: vacuolar dynamin-like GTPase VpsA [Aspergillus fumigatus Af293] gi|66845734|gb|EAL86068.1| vacuolar dynamin-like GTPase VpsA, [Aspergillus fumigatus Af293] vacuolar dynamin-like
  misc_feature (1)..(718): NCBI GI: 119499071 Blast Desc: vacuolar dynamin-like GTPase VpsA, [Neosartorya fischeri NRRL 181] gi|119414457|gb|EAW24396.1| vacuolar dynamin-like GTPase VpsA, [Neosartorya fischeri NRRL 181]
  misc_feature (11)..(714): NCBI GI: 240277515 Blast Desc: vacuolar sorting protein [Ajellomyces capsulatus H143]
  misc_feature (11)..(718): NCBI GI: 121719156 Blast Desc: vacuolar dynamin-like GTPase VpsA, [Aspergillus clavatus NRRL 1] gi|119404503|gb|EAW14879.1| vacuolar dynamin-like GTPase VpsA, [Aspergillus clavatus NRRL 1]
  misc_feature (6)..(718): NCBI GI: 67902072 Blast Desc: AN8023.2 [Aspergillus nidulans FGSC A4] gi|17148576|dbj|BAB78398.1| VpsA [Emericella nidulans] gi|40740455|gb|EAA59645.1| AN8023.2 [Aspergillus nidulans FGSC ;
  misc_feature (15)..(524): SWISSPROT Homolog: EC 3.6.5.5 Dynamin GTPase
MADQVSPHGGISDPALIKLVNKLQDVFATVGVNNPIDLPQIVVVGSQSSGKSSVLENIVGRDFLPRGSGIVTRRPLVLQLINRPATAQTNGENQEVANSTDKAANADEWGEFLHIPGQKFFDFNKIRDEISRETEAKVGRNAGISPAPINLRVYSPNVLTLTLVDLPGLTKVPVGDQPRDIERQIKDMVLKYIQKSNAIILAVTSANIDLANSDGLKLAREVDPEGQRTIGVLTKVDLMDEGTDVVDILAGRIIPLRLGYVPVVNRGQRDIDNKKPISQSLEGERAFFENHRAYRNKSSYCGTPYLAKKLNMILMMHIKQTLPDIKARIASSLQKYSQELESLGPSLLGDSANVVLGIITEFTKQWQAVLEGNSGELSSLELSGGARISFVFHELYSNGVKAVDPFDENKDMDIRIILYNASGSSPALFVGTTAFEVIVKKEIKRLEDPSLKCVSLVYDELVRILTQLLSKPLYRRYPGLKEKLHGTVINFFKKSMEPTNKLVKDLVAMEACYVNTGHPDFLNGHRAMAIVNERHYGAKPVQVDPKTGKPLPASATPARAASPSLDSNLDSSPGFFGSFFAAKNKKKAAAMEAPPPVLKASGTLSERENIEVEVISELPFPNLAHGTKLLMCIAELLISSYFNIVKRTMIDMVPKAIMLNLVQYTKDEMQKELLEGMYRGDNPDELLKESDYTVRRRKECQQMVESLSKASEIVSQVQ

SEQ ID NO: 29767 - DNA, 5283 bp, Muscodor strobelii; identical to SEQ ID NO: 29764
  misc_feature: SGI EST ID NO. CUFF.70796.1
  misc_feature: Variant of the nucleotide sequence at SEQ ID NO 29765

SEQ ID NO: 29768 - DNA, 1386 bp, Muscodor strobelii
  misc_feature: SGI cDNA ID NO. 570228
  misc_feature: Encodes the peptide sequence at SEQ ID NO 29769
atgtcgcctcagcagaacaccagcaagtcgaaggtactagcgagaaaacctcatcgaaaatcacgtaacggttgtgccaactgcaaacgccgcaaagtcaagtgtgacgagcaacatccccaatgtacgcaatgcgtctctttcaggatccgctgcagttttgcgccgtcatcctccgttgagccagcttcttcccctgaagagcggcccactgttaggggccgtgggagaccacggaaggtgtggggccagtctacttctaccgaagccgggagccgtgatccggagacatcctcagtgacggtcgtcaatagcccgaatgaggacaacagtattaatgttgacgatgctgagctactcctccattttgtgcagcacactgccgagtcagtagatgcaagtggcgtcaacgacaagctctaccgcttctggtcttacaatctcccccggatcggattcaagcatccatttgtcctccacatcacttacgccttcgctgcatatcataaggcgtatttaacggcacccagcgatggcacccggaaggataaatacacaagaatagctcgtaagcattcatctttaggtctgccgcacctcgtggccgcgttgggtcaaataaatagtagcaactgcggtgcctcgtacatcgccgcaacactggtatgctactgcgcattcgccgccggaccttctggcgcgggcgacttgcttgcatgcagcattgattcagcacgcgacgtgccattgacacccatgatacacggcgtacggctgctaagagaaatgttcagcgaagatgagctgttcacggacctcttggagccattccacggccgaaattttatacccgctgaagacgagccgccattgccacgatttagacgggactctttcacccggcttgactgggaaaagccattgaaagacctgcgcaatatggtagagctgcgcgtcgggacagatccaggaatggtggacactcgggacgatgctgagttatgtctacaagaacttgaccacctactatccatatacgatgctacttatggctccggacccaattgcacttacgatgggccggcggagtacaaatccgtctttggatggctttaccggcttgagaaagagttcgttgcgtgcctgcagcgaaagaattcacttgcgctcgtcatactatcgtatttttcggtgctgctccgtactatggataaactttggtatacacggggctgggcacgccatcttatgaatggggcgcagcgtcttgtgtcagaagatgacgctgtttggcttgaatggccgattgcggctctagaacactatgacgacgaacagaaatttggcgccaacgacgaatcttttacgatggatgagacggcgtag

SEQ ID NO: 29769 - protein, 461 aa, Muscodor strobelii
  misc_feature: SGI Peptide ID NO. 570228
  misc_feature (23)..(62): Pfam Id: PF00172 Pfam Desc: Fungal Zn(2)-Cys(6) binuclear cluster domain
  misc_feature (1)..(436): NCBI GI: 256732473 Blast Desc: NECHADRAFT_38606 [Nectria haematococca mpVI 77-13-4]
  misc_feature (6)..(441): NCBI GI: 46123893 Blast Desc: FG06324.1 [Gibberella zeae PH-1]
  misc_feature (7)..(437): NCBI GI: 116202077 Blast Desc: CHGG_08923 [Chaetomium globosum CBS 148.51] gi|88177441|gb|EAQ84909.1| CHGG_08923 [Chaetomium globosum CBS 148.51]
  misc_feature (22)..(434): NCBI GI: 261361375 Blast Desc: conserved [Verticillium albo-atrum VaMs.102]
  misc_feature (35)..(435): NCBI GI: 256735664 Blast Desc: NECHADRAFT_75746 [Nectria haematococca mpVI 77-13-4]
  misc_feature (1)..(436): NCBI GI: 85106555 Blast Desc: NCU05208 [Neurospora crassa OR74A] gi|28923806|gb|EAA32971.1| [Neurospora crassa OR74A]
  misc_feature (11)..(440): NCBI GI: 145249976 Blast Desc: An14g07040 [Aspergillus niger] gi|134082012|emb|CAK46697.1| protein product [Aspergillus niger]
  misc_feature (15)..(441): NCBI GI: 256730023 Blast Desc: NECHADRAFT_45313 [Nectria haematococca mpVI 77-13-4]
  misc_feature (35)..(439): NCBI GI: 256729594 Blast Desc: NECHADRAFT_46700 [Nectria haematococca mpVI 77-13-4]
  misc_feature (1)..(440): NCBI GI: 242791860 Blast Desc: C6 finger domain protein, [Talaromyces stipitatus ATCC 10500] gi|218718428|gb|EED17848.1| C6 finger domain protein, [Talaromyces stipitatus ATCC 10500]
MSPQQNTSKSKVLARKPHRKSRNGCANCKRRKVKCDEQHPQCTQCVSFRIRCSFAPSSSVEPASSPEERPTVRGRGRPRKVWGQSTSTEAGSRDPETSSVTVVNSPNEDNSINVDDAELLLHFVQHTAESVDASGVNDKLYRFWSYNLPRIGFKHPFVLHITYAFAAYHKAYLTAPSDGTRKDKYTRIARKHSSLGLPHLVAALGQINSSNCGASYIAATLVCYCAFAAGPSGAGDLLACSIDSARDVPLTPMIHGVRLLREMFSEDELFTDLLEPFHGRNFIPAEDEPPLPRFRRDSFTRLDWEKPLKDLRNMVELRVGTDPGMVDTRDDAELCLQELDHLLSIYDATYGSGPNCTYDGPAEYKSVFGWLYRLEKEFVACLQRKNSLALVILSYFSVLLRTMDKLWYTRGWARHLMNGAQRLVSEDDAVWLEWPIAALEHYDDEQKFGANDESFTMDETA

SEQ ID NO: 29770 - DNA, 1941 bp, Muscodor strobelii
  misc_feature: SGI EST ID NO. CUFF.70369.0
  misc_feature: Variant of the nucleotide sequence at SEQ ID NO 29768
ctggcagtcgcactacagcactgcccatatctgcagtaacacagcattttgaaacagcagggcagtgatattggaagtggagctggctatacctaccttaggtaattctgctgcctgttattgttactgactgcagggcacccacattccgaatacttgtagacatcgcagcgtccatacatgtatccgggattggccgtcgcattcgagagtctctggtgaagcatgctcaccaacagtctagaagaatgagacaatgacctatgtcgcctcagcagaacaccagcaagtcgaaggtactagcgagaaaacctcatcgaaaatcacgtaacggttgtgccaactgcaaacgccgcaaagtcaagtgtgacgagcaacatccccaatgtacgcaatgcgtctctttcaggatccgctgcagttttgcgccgtcatcctccgttgagccagcttcttcccctgaagagcggcccactgttaggggccgtgggagaccacggaaggtgtggggccagtctacttctaccgaagccgggagccgtgatccggagacatcctcagtgacggtcgtcaatagcccgaatgaggacaacagtattaatgttgacgatgctgagctactcctccattttgtgcagcacactgccgagtcagtagatgcaagtggcgtcaacgacaagctctaccgcttctggtcttacaatctcccccggatcggattcaagcatccatttgtcctccacatcacttacgccttcgctgcatatcataaggcgtatttaacggcacccagcgatggcacccggaaggataaatacacaagaatagctcgtaagcattcatctttaggtctgccgcacctcgtggccgcgttgggtcaaataaatagtagcaactgcggtgcctcgtacatcgccgcaacactggtatgctactgcgcattcgccgccggaccttctggcgcgggcgacttgcttgcatgcagcattgattcagcacgcgacgtgccattgacacccatgatacacggcgtacggctgctaagagaaatgttcagcgaagatgagctgttcacggacctcttggagccattccacggccgaaattttatacccgctgaagacgagccgccattgccacgatttagacgggactctttcacccggcttgactgggaaaagccattgaaagacctgcgcaatatggtagagctgcgcgtcgggacagatccaggaatggtggacactcgggacgatgctgagttatgtctacaagaacttgaccacctactatccatatacgatgctacttatggctccggacccaattgcacttacgatgggccggcggagtacaaatccgtctttggatggctttaccggcttgagaaagagttcgttgcgtgcctgcagcgaaagaattcacttgcgctcgtcatactatcgtatttttcggtgctgctccgtactatggataaactttggtatacacggggctgggcacgccatcttatgaatggggcgcagcgtcttgtgtcagaagatgacgctgtttggcttgaatggccgattgcggctctagaacactatgacgacgaacagaaatttggcgccaacgacgaatcttttacgatggatgagacggcgtagagcccagctatcccagtgctggaagttaggtcttagaggggcgaccttgggactcagtcgttttcttgaagcgaatgcgaaagtgcgctggatgatttcttcacactcgcttcatattgtccattcttttatacccaagcagcgaaacacacttgtattatataaaagtggtaggtgcgtacaatagagttgattagatagagcatctacgagtacatgagtgaagccgcgttgatacgattagatagttgtctctggtgttatatcggccaaaacatattaaaatacaaat

SEQ ID NO: 29771 - DNA, 1224 bp, Muscodor strobelii
  misc_feature: SGI cDNA ID NO. 570229
  misc_feature: Encodes the peptide sequence at SEQ ID NO 29772
atgtccttacaaggggccacacaagaacaagtagcgtacatcgatgaagtccgcgaatacttcagttccttccccaaattcaaggttggaaaagttgttgggcttggccgccacggtggggcgctactactgaacgagaacgatgataagggaacccaacttcgaaagattgttgtcaaattctcgctcggccaatatgcgactgataaagaaagtgatgcggatggggatctgaggaatgaggttgtgtggcttaagatgcttaggggtgctgagcatggtattgggcagcttcttcatatatcggagacttcgcttgagggacaaggtctgaagaagagtggtttgaacctggctacgcagatgcaaaatcctaccactgaagcggctaaagatcctgaaaaagagaaaaagagcggagaatcgaataaggaaaaggaaagaaggatacccgttacgtttgccattgagtatctagaaggcggcgatatccgtcaattcggtgagaaccccctttcgatagcaatgtggacaagtgttcaaaaaagggaaagcttgttccagtccggctacaatggagaatgtggctttgtttggttcgacaatgcgttgcgatggcttttccaccgaatcgtgccatggaagacaacacaatcatccgagaacgaattcttcctggaaaatcgatacgctggcatcacgcagaattcgcctcatgtagaaaatataatgttcactatgtcaggcttaccaccagacagagagcatccccagaacatgcccacgctcaagctcatcgactttggacgcggccaggacgataatctagatcctgatgatgatgtgacacctagtccattagaaacgggcagcagagtcaatctttggggagctgctaacttcatgggccaaatcatctgcatcttcgaggatccggatggaccaacaatggatctcgccaagccgccagtggcctacacttatcgggagaatggagtggtgcaccaggtgctgacgaatgcgcctgagccgctacgggaggaaacatggagtgcgtggtttctggaggatacccctcgactctccgatgtcttacgaatggccgaggaacgagtggcaaatcgaagaccagacgaaaatgcatacctcgctgatttgatggatgttgatgagtcggatgaagctatacggcggttcattcaggatatactcttcaatgcttag

SEQ ID NO: 29772 - protein, 407 aa, Muscodor strobelii
  misc_feature: SGI Peptide ID NO. 570229
MSLQGATQEQVAYIDEVREYFSSFPKFKVGKVVGLGRHGGALLLNENDDKGTQLRKIVVKFSLGQYATDKESDADGDLRNEVVWLKMLRGAEHGIGQLLHISETSLEGQGLKKSGLNLATQMQNPTTEAAKDPEKEKKSGESNKEKERRIPVTFAIEYLEGGDIRQFGENPLSIAMWTSVQKRESLFQSGYNGECGFVWFDNALRWLFHRIVPWKTTQSSENEFFLENRYAGITQNSPHVENIMFTMSGLPPDREHPQNMPTLKLIDFGRGQDDNLDPDDDVTPSPLETGSRVNLWGAANFMGQIICIFEDPDGPTMDLAKPPVAYTYRENGVVHQVLTNAPEPLREETWSAWFLEDTPRLSDVLRMAEERVANRRPDENAYLADLMDVDESDEAIRRFIQDILFNA

SEQ ID NO: 29773 - DNA, 2256 bp, Muscodor strobelii
  misc_feature: SGI cDNA ID NO. 570230
  misc_feature: Encodes the peptide sequence at SEQ ID NO 29774
atgacctcaaagccgagtgccagcccgtcatcatcatcacccgcggtcaatcaagcctccgagcgacgctgccaacgctctgcccaaaccttgaacacgagccgagactacagtcgtgacttcaacagcctgtcaccctgcagacaagcaccaggcgggagtcccgagactagcccgctgccaaacgaggtcgaggtggcagaccaaactccccaaccaccggccacatccacctcttccgcccccgacgacctttccattccgcaatccccccggcgtccgaccaacacagtcctgcctaccctcgcatccaccccgaccagcgctgccgaaccaccgccaccatccggcccacaacccgctgccagtgacgatatctctggccagcagccccagccgccctcccacactttgtcgccaccaccgcagattctagggagacgacaacgggactctggcgacgaggcgtcgctcgtcgaaggctctcggccacaccagacctctccggctgcaccgagtaagaaacgcaggatagcagaggacgccatgtcgacagaaaccgacagctcgggctcagggagcaagaatggtagagccaggctccatgctaacggcaagtcccacacctctgcgacctctaatggcacccacaagtccgccttgtccgttaatggctccgcaaggccacggcctccgagcgactatctcgggctcgatcggaaggaatacactcggcttctcatgcaggccctcgaagacttgggacaccacaccgccgcccagagtgtcagccaggagagcgggtaccagctagagatctccacggtggcatcattcagaaccgccgtgcttgatggaaattggaaacaggccgagaggctgctcgatggcgttgcaacaaacgaatacgatgcaaacctcggtggcaacggactggtgctggctaagggggcggaccagaacacaatgaggttctggatacgtcagcagaagttcatcgagctcttagaacaagaacaacaccagcgcgccttaatggtactaagaaatgagctcacgcctttgtgtcagaaccaccgggcactacagttcctgagtggtcttatcatgctcgggacaaaagaagagttgcgggccaaggctaactgggatggcgtagagaagtcaagggctgtattgctctccgagctttcaaaatgcatatcgccgtcggtcatgcttccagagcaccgcttagtcactttattacagaaattgaaagacacccagattaaggactgcttgtggcattccagcgccgttccaccatccctttatgccgaccacgtctgcgacccgcaagacttccctgcccagtgtgtcattgagctcgatgaccacactggtgaagtgtggcaggtggtcttttcccacgatggcaagaaactcgcgagctgtggcagtgcaaaagaagtcatcatatgggaggtcccgtcctttaagaaactgtacacgattgacgagaatccaacttcagttggtaacatcgcatggagctgggatgacaccatgctagtcacgtgttgcagagacggcaccgctcggctattcgatgcacagagcggcgaatgccttcatcagctggaaaagctgagagagccggtgagcagttgcgtgtgggcggttgacaacacgtcatttgttgtcgggtcgctggacaagaatcgaagtatggtgcagtggaatattgccggagagaaagtctatgactggcagagcgcacaccgagttgaggacctcgctgtgtctccagatggacgatggctggttgcgatggatagtgaactgcacgtccacgtctataacttcatgacacgcgagttccagtacaagctgaacctaaaagtacggctgacttccatatctatcagccaaaactcgagacatctactggtcaatcagaacgatggttattcatatctgatcgatctggatcaccggcacccaatacagcaatacacaggcaacaaaggcggtgatttcctcataagaggggtgctggggggtgccgatgaaagtttcgtactgagtggtagcgaggatcgagctgtatacatatggcacaaagccacagcgcagcttctgcaaagattagagagccacaatagcaggaccaattctgtcagctggtgcccgaacaatcctagtatgtttgcatcgtgcagtgacgatggcaagatcaagatatgggcgaacgagaagtggcggatgctctag

SEQ ID NO: 29774 - protein, 751 aa, Muscodor strobelii
  misc_feature: SGI Peptide ID NO. 570230
  misc_feature (705)..(744): Pfam Id: PF00400 Pfam Desc: WD domain, G-beta repeat
  misc_feature (451)..(489): Pfam Id: PF00400 Pfam Desc: WD domain, G-beta repeat
  misc_feature (493)..(531): Pfam Id: PF00400 Pfam Desc: WD domain, G-beta repeat
  misc_feature (141)..(742): NCBI GI: 256731335 Blast Desc: NECHADRAFT_49229 [Nectria haematococca mpVI 77-13-4]
  misc_feature (141)..(742): NCBI GI: 46125587 Blast Desc: FG07171.1 [Gibberella zeae PH-1]
  misc_feature (45)..(746): NCBI GI: 28950364 Blast Desc: conserved [Neurospora crassa]
  misc_feature (61)..(742): NCBI GI: 116198051 Blast Desc: CHGG_07181 [Chaetomium globosum CBS 148.51] gi|88178460|gb|EAQ85928.1| CHGG_07181 [Chaetomium globosum CBS 148.51]
  misc_feature (254)..(742): NCBI GI: 145602624 Blast Desc: MGG_09518 [Magnaporthe grisea 70-15] gi|145011018|gb|EDJ95674.1| MGG_09518 [Magnaporthe grisea 70-15]
  misc_feature (189)..(745): NCBI GI: 240109436 Blast Desc: WD domain, G-beta repeat containing protein [Coccidioides posadasii C735 delta SOWgp]
  misc_feature (173)..(742): NCBI GI: 119182907 Blast Desc: CIMG_06449 [Coccidioides immitis RS]
  misc_feature (228)..(742): NCBI GI: 171694049 Blast Desc: protein product [Podospora anserina] gi|170946973|emb|CAP73777.1| protein product [Podospora anserina]
  misc_feature (154)..(747): NCBI GI: 115437504 Blast Desc: conserved [Aspergillus terreus NIH2624] gi|114188642|gb|EAU30342.1| conserved [Aspergillus terreus NIH2624]
  misc_feature (171)..(747): NCBI GI: 169776159 Blast Desc: [Aspergillus oryzae RIB40] gi|83771281|dbj|BAE61413.1| protein product [Aspergillus oryzae]
MTSKPSASPSSSSPAVNQASERRCQRSAQTLNTSRDYSRDFNSLSPCRQAPGGSPETSPLPNEVEVADQTPQPPATSTSSAPDDLSIPQSPRRPTNTVLPTLASTPTSAAEPPPPSGPQPAASDDISGQQPQPPSHTLSPPPQILGRRQRDSGDEASLVEGSRPHQTSPAAPSKKRRIAEDAMSTETDSSGSGSKNGRARLHANGKSHTSATSNGTHKSALSVNGSARPRPPSDYLGLDRKEYTRLLMQALEDLGHHTAAQSVSQESGYQLEISTVASFRTAVLDGNWKQAERLLDGVATNEYDANLGGNGLVLAKGADQNTMRFWIRQQKFIELLEQEQHQRALMVLRNELTPLCQNHRALQFLSGLIMLGTKEELRAKANWDGVEKSRAVLLSELSKCISPSVMLPEHRLVTLLQKLKDTQIKDCLWHSSAVPPSLYADHVCDPQDFPAQCVIELDDHTGEVWQVVFSHDGKKLASCGSAKEVIIWEVPSFKKLYTIDENPTSVGNIAWSWDDTMLVTCCRDGTARLFDAQSGECLHQLEKLREPVSSCVWAVDNTSFVVGSLDKNRSMVQWNIAGEKVYDWQSAHRVEDLAVSPDGRWLVAMDSELHVHVYNFMTREFQYKLNLKVRLTSISISQNSRHLLVNQNDGYSYLIDLDHRHPIQQYTGNKGGDFLIRGVLGGADESFVLSGSEDRAVYIWHKATAQLLQRLESHNSRTNSVSWCPNNPSMFASCSDDGKIKIWANEKWRML

SEQ ID NO: 29775 - DNA, 3438 bp, Muscodor strobelii
  misc_feature: SGI EST ID NO. CUFF.70486.1
  misc_feature: Variant of the nucleotide sequence at SEQ ID NO 29773
ccacaaagttgtctaccacattcaacaccatcggagcaagtgactgtaaggtagccgtgaccaagtctgaagccacggtatttcaatctggtcgagacatctccgtggtacgagcatggaaccctgagcattctctcgttgcaggtggctcggtggtcatggggcactggaatttggggtgccgaatggggcaacatggcgtaactgcagaagacctatcagcacccgaggtcgagcagatagtcgtgagccagatacttgatcggtaccgtgctcgacagaaatagaagttgccggagttgcagaagttgggcagagggcaagggcgactgcatgtacagcgcgtgtataatcgacgcaatccgcatcatgctctccttcccagagcaatgacctgcattaggcactcgtacctcacattcactgccaaactgccttcacgtgttaagtggtgactcccgtccattacttgtatattgaaagccacccctggcacatccttttcctcgaccacgctcatcttttttcagctgcaagacaaccgtgacgagaaagagaagaaacggcatcaaatacgacttattaaagttgtgctaaagttgtccatctaacttatcctgacggccagcatccagcatcgataccccccttggctagctcgaggtttaatcttagctcgacgacgtaggttcgtgcatggtccactcgacatgacctcaaagccgagtgccagcccgtcatcatcatcacccgcggtcaatcaagcctccgagcgacgctgccaacgctctgcccaaaccttgaacacgagccgagactacagtcgtgacttcaacagcctgtcaccctgcagacgtgcctcgacgacaacgacacatgttcgtaaatagataactgccaccatcaccaccagaagcaccaggcgggagtcccgagactagcccgctgccaaacgaggtcgaggtggcagaccaaactccccaaccaccggccacatccacctcttccgcccccgacgacctttccattccgcaatccccccggcgtccgaccaacacagtcctgcctaccctcgcatccaccccgaccagcgctgccgaaccaccgccaccatccggcccacaacccgctgccagtgacgatatctctggccagcagccccagccgccctcccacactttgtcgccaccaccgcagattctagggagacgacaacgggactctggcgacgaggcgtcgctcgtcgaaggctctcggccacaccagacctctccggctgcaccgagtaagaaacgcaggatagcagaggacgccatgtcgacagaaaccgacagctcgggctcagggagcaagaatggtagagccaggctccatgctaacggcaagtcccacacctctgcgacctctaatggcacccacaagtccgccttgtccgttaatggctccgcaaggccacggcctccgagcgactatctcgggctcgatcggaaggaatacactcggcttctcatgcaggccctcgaagacttgggacaccacaccgccgcccagagtgtcagccaggagagcgggtaccagctagagatctccacggtggcatcattcagaaccgccgtgcttgatggaaattggaaacaggccgagaggctgctcgatggcgttgcaacaaacgaatacgatgcaaacctcggtggcaacggactggtgctggctaagggggcggaccagaacacaatgaggttctggatacgtcagcagaagttcatcgagctcttagaacaagaacaacaccagcgcgccttaatggtactaagaaatgagctcacgcctttgtgtcagaaccaccgggcactacagttcctgagtggtcttatcatgctcgggacaaaagaagagttgcgggccaaggctaactgggatggcgtagagaagtcaagggctgtattgctctccgagctttcaaaatgcatatcgccgtcggtcatgcttccagagcaccgcttagtcactttattacagaaattgaaagacacccagattaaggactgcttgtggcattccagcgccgttccaccatccctttatgccgaccacgtctgcgacccgcaagacttccctgcccagtgtgtcattgagctcgatgaccacactggtgaagtgtggcaggtggtcttttcccacgatggcaagaaactcgcgagctgtggcagtgcaaaagaagtcatcatatgggaggtcccgtcctttaagaaactgtacacgattgacgagaatccaacttcagttggtaacatcgcatggagctgggatgacaccatgctagtcacgtgttgcagagacggcaccgctcggctattcgatgcacagagcggcgaatgccttcatcagctggaaaagctgagagagccggtgagcagttgcgtgtgggcggttgacaacacgtcatttgttgtcgggtcgctggacaagaatcgaagtatggtgcagtggaatattgccggagagaaagtctatgactggcagagcgcacaccgagttgaggacctcgctgtgtctccagatggacgatggctggttgcgatggatagtgaactgcacgtccacgtctataacttcatgacacgcgagttccagtacaagctgaacctaaaagtacggctgacttccatatctatcagccaaaactcgagacatctactggtcaatcagaacgatggttattcatatctgatcgatctggatcaccggcacccaatacagcaatacacaggcaacaaaggcggtgatttcctcataagaggggtgctggggggtgccgatgaaagtttcgtactgagtggtagcgaggatcgagctgtatacatatggcacaaagccacagcgcagcttctgcaaagattagagagccacaatagcaggaccaattctgtcagctggtgcccgaacaatcctagtatgtttgcatcgtgcagtgacgatggcaagatcaagatatgggcgaacgagaagtggcggatgctctagggcaatgtgcgtcgcgctagatatttcgcctaccttgaaacccttgagatgcgagcagatacattcatacgtaatctgccagatatggcacactaaacatcacaacctagagcctctcccgcatgccattggcaaaattcgggctcggccagtttaagcggattgtattataccttgagcagggctttttgcaatatgggatgtgccaaagcatgcgttatagtgagctatgacagcaatagactatcagggagtttgctggactagcaaggcggagtcgcgcactggatgattatctacatagatgcacgcgataggtgtacaatagagaatgtttctcccccagaatgcccgtctttccacttagcgatccgttaatccccccttttagctgtttaggatcatgtccctcta

SEQ ID NO: 29776 - DNA, 2229 bp, Muscodor strobelii
  misc_feature: SGI cDNA ID NO. 570231
  misc_feature: Reduced expression when VOC is produced
  misc_feature: Encodes the peptide sequence at SEQ ID NO 29777
atgacctcaaagccgagtgccagcccgtcatcatcatcacccgcggtcaatcaagcctccgagcgacgctgccaacgctctgcccaaaccttgaacacgagccgagactacagtcgtgacttcaacagcctgtcaccctgcagacaagcaccaggcgggagtcccgagactagcccgctgccaaacgaggtcgaggtggcagaccaaactccccaaccaccggccacatccacctcttccgcccccgacgacctttccattccgcaatccccccggcgtccgaccaacacagtcctgcctaccctcgcatccaccccgaccagcgctgccgaaccaccgccaccatccggcccacaacccgctgccagtgacgatatctctggccagcagccccagccgccctcccacactttgtcgccaccaccgcagattctagggagacgacaacgggactctggcgacgaggcgtcgctcgtcgaaggctctcggccacaccagacctctccggctgcaccgagtaagaaacgcaggatagcagaggacgccatgtcgacagaaaccgacagctcgggctcagggagcaagaatggtagagccaggctccatgctaacggcaagtcccacacctctgcgacctctaatggcacccacaagtccgccttgtccgttaatggctccgcaaggccacggcctccgagcgactatctcgggctcgatcggaaggaatacactcggcttctcatgcaggccctcgaagacttgggacaccacaccgccgcccagagtgtcagccaggagagcgggtaccagctagagatctccacggtggcatcattcagaaccgccgtgcttgatggaaattggaaacaggccgagaggctgctcgatggcgttgcaacaaacgaatacgatgcaaacctcggtggcaacggactggtgctggctaagggggcggaccagaacacaatgaggttctggatacgtcagcagaagttcatcgagctcttagaacaagaacaacaccagcgcgccttaatggtactaagaaatgagctcacgcctttgtgtcagaaccaccgggcactacagttcctgagtggtcttatcatgctcgggacaaaagaagagttgcgggccaaggctaactgggatggcgtagagaagtcaagggctgtattgctctccgagctttcaaaatgcatatcgccgtcggtcatgcttccagagcaccgcttagtcactttattacagaaattgaaagacacccagattaaggactgcttgtggcattccagcgccgttccaccatccctttatgccgaccacgtctgcgacccgcaagacttccctgcccagtgtgtcattgagctcgatgaccacactggtgaagtgtggcaggtggtcttttcccacgatggcaagaaactcgcgagctgtggcagtgcaaaagaagtcatcatatgggaggtcccgtcctttaagaaactgtacacgattgacgagaatccaacttcagttggtaacatcgcatggagctgggatgacaccatgctagtcacgtgttgcagagacggcaccgctcggctattcgatgcacagagcggcgaatgccttcatcagctggaaaagctgagagagccggtgagcagttgcgtgtgggcggttgacaacacgtcatttgttgtcgggtcgctggacaagaatcgaagtatggtgcagtggaatattgccggagagaaagtctatgactggcagagcgcacaccgagttgaggacctcgctgtgtctccagatggacgatggctggttgcgatggatagtgaactgcacgtccacgtctataacttcatgacacgcgagttccagtacaagctgaacctaaaagtacggctgacttccatatctatcagccaaaactcgagacatctactggtcaatcagaacgatggttattcatatctgatcgatctggatcaccggcacccaatacagcaatacacaggcaacaaaggcggtgatttcctcataagaggggtgctggggggtgccgatgaaagtttcgtactgagtggtagcgaggatcgagctgtatacatatggcacaaagccacagcgcagcttctgcaaagattagagagccacaatagcaggaccaattctgtcagctggtgcccgaacaatcctagtatgtttgcatcgtgcagtgacgatggcaagatcaagatgtaa

SEQ ID NO: 29777 - protein, 742 aa, Muscodor strobelii
  misc_feature: SGI Peptide ID NO. 570231
  misc_feature (451)..(489): Pfam Id: PF00400 Pfam Desc: WD domain, G-beta repeat
  misc_feature (493)..(531): Pfam Id: PF00400 Pfam Desc: WD domain, G-beta repeat
  misc_feature (705)..(742): Pfam Id: PF00400 Pfam Desc: WD domain, G-beta repeat
  misc_feature (141)..(742): NCBI GI: 256731335 Blast Desc: NECHADRAFT_49229 [Nectria haematococca mpVI 77-13-4]
  misc_feature (141)..(742): NCBI GI: 46125587 Blast Desc: FG07171.1 [Gibberella zeae PH-1]
  misc_feature (45)..(742): NCBI GI: 28950364 Blast Desc: conserved [Neurospora crassa]
  misc_feature (61)..(742): NCBI GI: 116198051 Blast Desc: CHGG_07181 [Chaetomium globosum CBS 148.51] gi|88178460|gb|EAQ85928.1| CHGG_07181 [Chaetomium globosum CBS 148.51]
  misc_feature (254)..(742): NCBI GI: 145602624 Blast Desc: MGG_09518 [Magnaporthe grisea 70-15] gi|145011018|gb|EDJ95674.1| MGG_09518 [Magnaporthe grisea 70-15]
  misc_feature (173)..(742): NCBI GI: 119182907 Blast Desc: CIMG_06449 [Coccidioides immitis RS]
  misc_feature (228)..(742): NCBI GI: 171694049 Blast Desc: protein product [Podospora anserina] gi|170946973|emb|CAP73777.1| protein product [Podospora anserina]
  misc_feature (189)..(742): NCBI GI: 240109436 Blast Desc: WD domain, G-beta repeat containing protein [Coccidioides posadasii C735 delta SOWgp]
  misc_feature (154)..(742): NCBI GI: 115437504 Blast Desc: conserved [Aspergillus terreus NIH2624] gi|114188642|gb|EAU30342.1| conserved [Aspergillus terreus NIH2624]
  misc_feature (112)..(742): NCBI GI: 225684977 Blast Desc: WD repeat protein [Paracoccidioides brasiliensis Pb03]
  misc_feature: Useful for introducing or modulating the production of volatile compounds
MTSKPSASPSSSSPAVNQASERRCQRSAQTLNTSRDYSRDFNSLSPCRQAPGGSPETSPLPNEVEVADQTPQPPATSTSSAPDDLSIPQSPRRPTNTVLPTLASTPTSAAEPPPPSGPQPAASDDISGQQPQPPSHTLSPPPQILGRRQRDSGDEASLVEGSRPHQTSPAAPSKKRRIAEDAMSTETDSSGSGSKNGRARLHANGKSHTSATSNGTHKSALSVNGSARPRPPSDYLGLDRKEYTRLLMQALEDLGHHTAAQSVSQESGYQLEISTVASFRTAVLDGNWKQAERLLDGVATNEYDANLGGNGLVLAKGADQNTMRFWIRQQKFIELLEQEQHQRALMVLRNELTPLCQNHRALQFLSGLIMLGTKEELRAKANWDGVEKSRAVLLSELSKCISPSVMLPEHRLVTLLQKLKDTQIKDCLWHSSAVPPSLYADHVCDPQDFPAQCVIELDDHTGEVWQVVFSHDGKKLASCGSAKEVIIWEVPSFKKLYTIDENPTSVGNIAWSWDDTMLVTCCRDGTARLFDAQSGECLHQLEKLREPVSSCVWAVDNTSFVVGSLDKNRSMVQWNIAGEKVYDWQSAHRVEDLAVSPDGRWLVAMDSELHVHVYNFMTREFQYKLNLKVRLTSISISQNSRHLLVNQNDGYSYLIDLDHRHPIQQYTGNKGGDFLIRGVLGGADESFVLSGSEDRAVYIWHKATAQLLQRLESHNSRTNSVSWCPNNPSMFASCSDDGKIKM

SEQ ID NO: 29778 - DNA, 3438 bp, Muscodor strobelii; identical to SEQ ID NO: 29775
  misc_feature: SGI EST ID NO. CUFF.70486.1
  misc_feature: Variant of the nucleotide sequence at SEQ ID NO 29776

SEQ ID NO: 29779 - DNA, 513 bp, Muscodor strobelii
  misc_feature: SGI cDNA ID NO. 570232
  misc_feature: Encodes the peptide sequence at SEQ ID NO 29780
atgtcacgatacttcccgcatacagcctatgcagaagaccaacctctcgcgagaacgattctcacgacacacatcgagaccagagcgattacgacaggtaccatcattggtggcacaatctacggtgcaaagaacgcaatgcagcggatccgcaaatctgcgccggcaccaagtctcactgtccctcgctcacatgtcttccttcgccacgcgggtatcagcacactgtggactttggggttcgtctcggttggcctcgtagggcgcttttgggggaaagaggagatcgagtggaaagaccgctcatggaggttacttgagaacaaggggcaactcgctgtggacgattggacatatccagccatggcggccggccttgcggcgacggctttcttgaagagaccggttggatgggttgctacggtgggcgctgctggtactgggagtgtcgtcggcatgttgggttatatgggttggcggtatggagtccgtcctgcaaaatttgaagactaa

SEQ ID NO: 29780 - protein, 170 aa, Muscodor strobelii
  misc_feature: SGI Peptide ID NO. 570232
  misc_feature (1)..(168): NCBI GI: 261355565 Blast Desc: conserved [Verticillium albo-atrum VaMs.102]
  misc_feature (1)..(168): NCBI GI: 256731421 Blast Desc: NECHADRAFT_102829 [Nectria haematococca mpVI 77-13-4]
  misc_feature (1)..(170): NCBI GI: 154318676 Blast Desc: BC1G_02727 [Botryotinia fuckeliana B05.10] gi|150857857|gb|EDN33049.1| BC1G_02727 [Botryotinia fuckeliana B05.10]
  misc_feature (1)..(168): NCBI GI: 46123427 Blast Desc: FG06091.1 [Gibberella zeae PH-1]
  misc_feature (7)..(164): NCBI GI: 119483598 Blast Desc: NFIA_094250 [Neosartorya fischeri NRRL 181] gi|119409858|gb|EAW19805.1| conserved [Neosartorya fischeri NRRL 181]
  misc_feature (1)..(167): NCBI GI: 238497211 Blast Desc: conserved [Aspergillus flavus NRRL3357] gi|220694721|gb|EED51065.1| conserved [Aspergillus flavus NRRL3357]
  misc_feature (7)..(164): NCBI GI: 146324655 Blast Desc: conserved [Aspergillus fumigatus Af293] gi|129555484|gb|EAL85088.2| conserved [Aspergillus fumigatus Af293]
  misc_feature (1)..(167): NCBI GI: 169774279 Blast Desc: [Aspergillus oryzae RIB40] gi|83769470|dbj|BAE59605.1| protein product [Aspergillus oryzae]
  misc_feature (1)..(168): NCBI GI: 238842921 Blast Desc: conserved [Microsporum canis CBS 113480]
  misc_feature (6)..(155): NCBI GI: 212545925 Blast Desc: conserved [Penicillium marneffei ATCC 18224] gi|210064636|gb|EEA18731.1| conserved [Penicillium marneffei ATCC 18224]
MSRYFPHTAYAEDQPLARTILTTHIETRAITTGTIIGGTIYGAKNAMQRIRKSAPAPSLTVPRSHVFLRHAGISTLWTLGFVSVGLVGRFWGKEEIEWKDRSWRLLENKGQLAVDDWTYPAMAAGLAATAFLKRPVGWVATVGAAGTGSVVGMLGYMGWRYGVRPAKFED

SEQ ID NO: 29781 - DNA, 1139 bp, Muscodor strobelii
  misc_feature: SGI EST ID NO. CUFF.70392.0
  misc_feature: Variant of the nucleotide sequence at SEQ ID NO 29779
tgggttactacatgctctctgagtcgggctgatgcttcaatccctccgcgtcctttagaaatcacctactccgcgccgacgatacaatggttttcaaggtaggcgaataaaagtataacgatagtagcagtatggggttcgcgactgtaatgaatgtattctcgctcgttttggggtagagtctttttagttgctgctgaatgagaaatatcaacagaccgttcccaagccatctcgtttatcaaagcgttcacaataatctcatcagcttattcgcgccagttcatattaccctcaagttgtgactcgaattgtgacgccagcatcatacgatagatgatatttgtttcgtgtatttgagaaagccattccgggtcatagcgacttcttttacgattctacccagtggtcgtctataatcatcaaacttccaagtcctcatcagcagactaagaattgaaaagcaaatatgtcacgatacttcccgcatacagcctatgcagaagaccaacctctcgcgagaacgattctcacgacacacatcgagaccagagcgattacgacaggtaccatcattggtggcacaatctacggtgcaaagaacgcaatgcagcggatccgcaaatctgcgccggcaccaagtctcactgtccctcgctcacatgtcttccttcgccacgcgggtatcagcacactgtggactttggggttcgtctcggttggcctcgtagggcgcttttgggggaaagaggagatcgagtggaaagaccgctcatggaggttacttgagaacaaggggcaactcgctgtggacgattggacatatccagccatggcggccggccttgcggcgacggctttcttgaagagaccggttggatgggttgctacggtgggcgctgctggtactgggagtgtcgtcggcatgttgggttatatgggttggcggtatggagtccgtcctgcaaaatttgaagactaaaggaacgcggaaatggcatctcgaaccatctctgcgaaccaaaggagcacgacagtctgatttcgagacgagttgtctggtagcttgggagacggattgtcacactgcgacgagcatataaaactctgtattaagaccacctgtagcatcatcatct

SEQ ID NO: 29782 - DNA, 2094 bp, Muscodor strobelii
  misc_feature: SGI cDNA ID NO. 570233
  misc_feature: Elevated expression when VOC is produced
  misc_feature: Encodes the peptide sequence at SEQ ID NO 29783
atggtcacgccaatccctcgaaagctctgggagcaccccaatccgaaagcgacgcaaggctgggagttcatgcagcttgtcaataagaaatatgacctggatctgaagacttacgacgacctctatcaattctcggtgaacaaacgttccgagttctatgccgaggtcctgaagtttggaaatatcatctacagtggcacatatacgaaggtggtcgatgagagcaagcctgtcgacagtattccacgatggttcgaaggcgtacacttgaattgggccgagaatttgctatggtcccgaagctcgacagatccatctgaccacaagacgaaagtgggcaaagaagatgataagattgcgctcactgaagtaagagaaggcgtctcggaaattagaaatgtgacttgggcattgctaaggaaattggctgcgacttatgcatccgcattacacgccggcggcgtcaggcgaggggaccgggttgttgttgttgccgctaatagtgttgagacgctcgtcattttcatcgctactagttggctaggtgccatgttcagtagcagttcaactgacatgggagttcaaggaatcctgcagcgaacggtccaagtcaacccaaagtacatatttatggacgatgctgctctatataatgggaagaattgggatttgagacagaaaatgacggaagtagtcgctgggatgaagagatgcgataattttagaggaatggtttctatccgtcggttccgcgatgcgttagatatcagtgcaatcccacagacacagactttagacgcttttctcgagaagcgtagcaacaccgtaccgcctatcgagagaacaccgtttcatgagccgttccttgtttgttattcctcgggaacaacaggcataccaaaggcaattgttcattctgtgggcggtgttattctcaatatctcgaaagagggccgactaaatgaagacgctcgctcggatgttgtatctttgcagtatacaacaactggatggattatgtatctggcaaatgctgcacagctcttgtggggtgcgagggttgttctctacgatggctcacccttccagcctgatttgcagacgtttgtgaaactcatcggcgaccagagagtcactcggttagggatcagcccaagatggatgtatgaaatcgcaaaagccggtatctctccacgcaagatgaccgatctctccaatctgcgtactgtcacctccacgggtatggtcttgcctgatcacctatttgagtggttttacgataaagggtttccgccaagcgttcatctatctaacatctccggaggaactgatattgccggctgtttcgcccagggaaatacattgtcaccagtctacgtgggtggcacgcaggggccgtcccttggtatcaaggttgagctctatgattcgttgatgcctccagggcccggaacggctgtaccggatgggacgcccggcgagttagttgctacaacatcttttccgaacgttccggtatacctctggggcgacaagtcgccggccggcgcgccagggacaaagtaccactctgcttacttcgcccggttcgatcacgtctgggctcatggagatttctgtgtctatcatcctgtaactcgtaatctgacgttcctcggtcgctctgacggcgtcttgaatccgagtggtgtacgatttggatcggccgaaatctactctgtgcttgagcgaaactttgccgataaaatcgccgactccatctgtgttggccagcgccgcccaaccgacaacgatgagagtgtgatgttgttcttacttatgagaccaggtcataagttcacgcagcaactcgtgcgtgaggtcaaagcagccatatcgaaagagactacgaaacgacatgtgccgaaatatgttttcgagactccggagattcccacaacagtgaacttgaagaaggtggagctacctgtgaagcagattgtttctggtcacattatcaaaccaagcggcacacttttgaatcctcagagtcttgattattactaccaatttgcaaaggtcgaggaactgattgcgccgaaagagaagctgtag

SEQ ID NO: 29783 - protein, 697 aa, Muscodor strobelii
  misc_feature: SGI Peptide ID NO. 570233
  misc_feature (135)..(588): Pfam Id: PF00501 Pfam Desc: AMP-binding enzyme
  misc_feature (135)..(504): Pfam Id: PF00501 Pfam Desc: AMP-binding enzyme
  misc_feature (7)..(697): NCBI GI: 261355564 Blast Desc: acetoacetyl-coenzyme A synthetase [Verticillium albo-atrum VaMs.102]
  misc_feature (5)..(697): NCBI GI: 85100292 Blast Desc: NCU01378 [Neurospora crassa OR74A] gi|16944584|emb|CAC18280.2| related to acetoacetyl-CoA synthetase [Neurospora crassa] gi|28922468|gb|EAA31699.1| NCU01378 crassa
  misc_feature (4)..(697): NCBI GI: 171693487 Blast Desc: protein product [Podospora anserina] gi|170946692|emb|CAP73495.1| protein product [Podospora anserina]
  misc_feature (5)..(697): NCBI GI: 145602634 Blast Desc: MGG_12999 [Magnaporthe grisea 70-15] gi|145011024|gb|EDJ95680.1| MGG_12999 [Magnaporthe grisea 70-15]
  misc_feature (5)..(696): NCBI GI: 154318678 Blast Desc: BC1G_02728 [Botryotinia fuckeliana B05.10] gi|150857858|gb|EDN33050.1| BC1G_02728 [Botryotinia fuckeliana B05.10]
  misc_feature (5)..(691): NCBI GI: 256731031 Blast Desc: [Nectria haematococca mpVI 77-13-4]
  misc_feature (2)..(697): NCBI GI: 46123425 Blast Desc: FG06090.1 [Gibberella zeae PH-1]
  misc_feature (2)..(690): NCBI GI: 255946748 Blast Desc: Pc22g00960 [Penicillium chrysogenum Wisconsin 54-1255] gi|211591158|emb|CAP97384.1| Pc22g00960 [Penicillium chrysogenum Wisconsin 54-1255]
  misc_feature (5)..(697): NCBI GI: 119484242 Blast Desc: acetoacetyl-CoA synthase [Neosartorya fischeri NRRL 181] gi|119410180|gb|EAW20127.1| acetoacetyl-CoA synthase [Neosartorya fischeri NRRL 181]
  misc_feature (1)..(697): NCBI GI: 70983512 Blast Desc: acetoacetyl-CoA synthase [Aspergillus fumigatus Af293] gi|66844909|gb|EAL85245.1| acetoacetyl-CoA synthase [Aspergillus fumigatus Af293] gi|159123712|gb|EDP48831.1| acetoacetyl-CoA
  misc_feature (9)..(690): SWISSPROT Homolog: EC 6.2.1.16 Acetoacetate--CoA ligase
  misc_feature: Useful for introducing or modulating the production of volatile compounds
MVTPIPRKLWEHPNPKATQGWEFMQLVNKKYDLDLKTYDDLYQFSVNKRSEFYAEVLKFGNIIYSGTYTKVVDESKPVDSIPRWFEGVHLNWAENLLWSRSSTDPSDHKTKVGKEDDKIALTEVREGVSEIRNVTWALLRKLAATYASALHAGGVRRGDRVVVVAANSVETLVIFIATSWLGAMFSSSSTDMGVQGILQRTVQVNPKYIFMDDAALYNGKNWDLRQKMTEVVAGMKRCDNFRGMVSIRRFRDALDISAIPQTQTLDAFLEKRSNTVPPIERTPFHEPFLVCYSSGTTGIPKAIVHSVGGVILNISKEGRLNEDARSDVVSLQYTTTGWIMYLANAAQLLWGARVVLYDGSPFQPDLQTFVKLIGDQRVTRLGISPRWMYEIAKAGISPRKMTDLSNLRTVTSTGMVLPDHLFEWFYDKGFPPSVHLSNISGGTDIAGCFAQGNTLSPVYVGGTQGPSLGIKVELYDSLMPPGPGTAVPDGTPGELVATTSFPNVPVYLWGDKSPAGAPGTKYHSAYFARFDHVWAHGDFCVYHPVTRNLTFLGRSDGVLNPSGVRFGSAEIYSVLERNFADKIADSICVGQRRPTDNDESVMLFLLMRPGHKFTQQLVREVKAAISKETTKRHVPKYVFETPEIPTTVNLKKVELPVKQIVSGHIIKPSGTLLNPQSLDYYYQFAKVEELIAPKEKL

SEQ ID NO: 29784 - DNA, 2399 bp, Muscodor strobelii
  misc_feature: SGI EST ID NO. CUFF.70402.0
  misc_feature: Variant of the nucleotide sequence at SEQ ID NO 29782
caaagattagactctggaattctgatctcaactgtccgaacaagtcttacaatcaccaaagctcaagcaaaagataatcggattataaacatggtcacgccaatccctcgaaagctctgggagcaccccaatccgaaagcgacgcaaggctgggagttcatgcagcttgtcaataagaaatatgacctggatctgaagacttacgacgacctctatcaattctcggtgaacaaacgttccgagttctatgccgaggtcctgaagtttggaaatatcatctacagtggcacatatacgaaggtggtcgatgagagcaagcctgtcgacagtattccacgatggttcgaaggcgtacacttgaattgggccgagaatttgctatggtcccgaagctcgacagatccatctgaccacaagacgaaagtgggcaaagaagatgataagattgcgctcactgaagtaagagaaggcgtctcggaaattagaaatgtgacttgggcattgctaaggaaattggctgcgacttatgcatccgcattacacgccggcggcgtcaggcgaggggaccgggttgttgttgttgccgctaatagtgttgagacgctcgtcattttcatcgctactagttggctaggtgccatgttcagtagcagttcaactgacatgggagttcaaggaatcctgcagcgaacggtccaagtcaacccaaagtacatatttatggacgatgctgctctatataatgggaagaattgggatttgagacagaaaatgacggaagtagtcgctgggatgaagagatgcgataattttagaggaatggtttctatccgtcggttccgcgatgcgttagatatcagtgcaatcccacagacacagactttagacgcttttctcgagaagcgtagcaacaccgtaccgcctatcgagagaacaccgtttcatgagccgttccttgtttgttattcctcgggaacaacaggcataccaaaggcaattgttcattctgtgggcggtgttattctcaatatctcgaaagagggccgactaaatgaagacgctcgctcggatgttgtatctttgcagtatacaacaactggatggattatgtatctggcaaatgctgcacagctcttgtggggtgcgagggttgttctctacgatggctcacccttccagcctgatttgcagacgtttgtgaaactcatcggcgaccagagagtcactcggttagggatcagcccaagatggatgtatgaaatcgcaaaagccggtatctctccacgcaagatgaccgatctctccaatctgcgtactgtcacctccacgggtatggtcttgcctgatcacctatttgagtggttttacgataaagggtttccgccaagcgttcatctatctaacatctccggaggaactgatattgccggctgtttcgcccagggaaatacattgtcaccagtctacgtgggtggcacgcaggggccgtcccttggtatcaaggttgagctctatgattcgttgatgcctccagggcccggaacggctgtaccggatgggacgcccggcgagttagttgctacaacatcttttccgaacgttccggtatacctctggggcgacaagtcgccggccggcgcgccagggacaaagtaccactctgcttacttcgcccggttcgatcacgtctgggctcatggagatttctgtgtctatcatcctgtaactcgtaatctgacgttcctcggtcgctctgacggcgtcttgaatccgagtggtgtacgatttggatcggccgaaatctactctgtgcttgagcgaaactttgccgataaaatcgccgactccatctgtgttggccagcgccgcccaaccgacaacgatgagagtgtgatgttgttcttacttatgagaccaggtcataagttcacgcagcaactcgtgcgtgaggtcaaagcagccatatcgaaagagactacgaaacgacatgtgccgaaatatgttttcgagactccggagattcccacaacagtgaacttgaagaaggtggagctacctgtgaagcagattgtttctggtcacattatcaaaccaagcggcacacttttgaatcctcagagtcttgattattactaccaatttgcaaaggtcgaggaactgattgcgccgaaagagaagctgtagcgtatggctgcgtctggtgagattatatcattgcacttaggatgcgttgaatcaccatcagaagttgggctctgtggatttttctggccaccaatcgtgtttgatgcatagaatcgagagtacctagactagacgcgagttgttgattgcacttaaatctgagaagacgcgatcggcaccgccaaagaagctaaaataattgcttttcattcgac

SEQ ID NO: 29785 - DNA, 1077 bp, Muscodor strobelii
  misc_feature: SGI cDNA ID NO. 570234
  misc_feature: Encodes the peptide sequence at SEQ ID NO 29786
atgtatatggcggagaattacaacagccctggcagcccatattgggcatgtctagcttttatctgccttgcagtacccgccgatcacccgttctggacatctgaagaagaataccatggaggagtcattccaaagatcaaagagctcaagcatccgggtcacataatgaggttagacacgccacctttactcttcaacgacgataactcacattattatagttatctcggtggacactgcatgcttctatcttccggtcaagcctgcagctacccaatgaaaggaacacacgccaaatatggctgctttgcgtacagcagcgcctacgcctattccgtacctccgggtctatacactctagaacaatacgcattagcgtctcaacttggtctttcagatgacggaggtgagtattggaagacgagacggcagtctgaatatgcaggccttgagaaaagagagggcaaaccggttttggtatcgatctggaaacccttctcagatgtcacaattcggactaccctagttccgccgtctgaagagacaccaaattggcatttacgtgtacaccgtatcgagaacgccggatcacggaccctaaagacagctgatggcgcatttgctatttgtaatgaacgagaaccagacggccggtatctcgatgagtatgatcccaagaagtgcgaaggcacacagccgcgaatcattggcaattatgatttagcgacaccagcgggatgggccggcggagccgatggcgcatttgcggtctcgaagggtgctgtaggaattcgggctctcgaacctgttgaaggggatccaaaggcgtatggaacaggcgataaaagacaacgtgcagccatgctcgtcaacgctgacccgaattctaaccttgtcgagagccggactgtgatcccaacgttgcagggcactatccagaagggcgaaacagtgtggtatgtctctgctatctacgcgaaaccttctgcgcctggcgttgcaaaggagtcgtatctgaacggttgggagtccgtacctgaaattcccgcttggttaagagaggagatgaactcgtga

SEQ ID NO: 29786 - protein, 358 aa, Muscodor strobelii
  misc_feature: SGI Peptide ID NO. 570234
  misc_feature (1)..(358): NCBI GI: 46123713 Blast Desc: FG06234.1 [Gibberella zeae PH-1]
  misc_feature (3)..(356): NCBI GI: 256731504 Blast Desc: [Nectria haematococca mpVI 77-13-4]
  misc_feature (1)..(358): NCBI GI: 116199251 Blast Desc: CHGG_07781 [Chaetomium globosum CBS 148.51] gi|88179060|gb|EAQ86528.1| CHGG_07781 [Chaetomium globosum CBS 148.51]
  misc_feature (1)..(356): NCBI GI: 154300833 Blast Desc: BC1G_10716 [Botryotinia fuckeliana B05.10] gi|150856464|gb|EDN31656.1| BC1G_10716 [Botryotinia fuckeliana B05.10]
  misc_feature (1)..(355): NCBI GI: 261351556 Blast Desc: conserved [Verticillium albo-atrum VaMs.102]
  misc_feature (1)..(356): NCBI GI: 156048504 Blast Desc: SS1G_08983 [Sclerotinia sclerotiorum 1980] gi|154693380|gb|EDN93118.1| SS1G_08983 [Sclerotinia sclerotiorum 1980]
  misc_feature (1)..(356): NCBI GI: 145607195 Blast Desc: MGG_12140 [Magnaporthe grisea 70-15] gi|145014789|gb|EDJ99357.1| MGG_12140 [Magnaporthe grisea 70-15]
  misc_feature (1)..(354): NCBI GI: 28950341 Blast Desc: conserved [Neurospora crassa]
  misc_feature (1)..(354): NCBI GI: 85077223 Blast Desc: NCU01430 [Neurospora crassa OR74A] gi|28917029|gb|EAA26754.1| conserved [Neurospora crassa OR74A]
  misc_feature (1)..(356): NCBI GI: 212545368 Blast Desc: conserved [Penicillium marneffei ATCC 18224] gi|210065807|gb|EEA19901.1| conserved [Penicillium marneffei ATCC 18224]
MYMAENYNSPGSPYWACLAFICLAVPADHPFWTSEEEYHGGVIPKIKELKHPGHIMRLDTPPLLFNDDNSHYYSYLGGHCMLLSSGQACSYPMKGTHAKYGCFAYSSAYAYSVPPGLYTLEQYALASQLGLSDDGGEYWKTRRQSEYAGLEKREGKPVLVSIWKPFSDVTIRTTLVPPSEETPNWHLRVHRIENAGSRTLKTADGAFAICNEREPDGRYLDEYDPKKCEGTQPRIIGNYDLATPAGWAGGADGAFAVSKGAVGIRALEPVEGDPKAYGTGDKRQRAAMLVNADPNSNLVESRTVIPTLQGTIQKGETVWYVSAIYAKPSAPGVAKESYLNGWESVPEIPAWLREEMNS

SEQ ID NO: 29787 - DNA, 2635 bp, Muscodor strobelii
  misc_feature: SGI EST ID NO. CUFF.70450.0
  misc_feature: Variant of the nucleotide sequence at SEQ ID NO 29785
cggcaggtaaaattattgatatttattccattgtcacttcgatacccgtttgtcgtgactttatatactctgaatctcaagatcagcccacttgaaaatctagagatgggaggcctcgtacttgggtataatggggttcatcccttttccaaagtcaagattaccgaccgcgcttccgtccaggaactgttacggacgctgttagatcctctcgaacctttcttttcgcctttgaaggctagagttcgggtgccaggggctaccgctgtaagatttgaccaaacagcttctgaagtcgagggaatatgtcgtccactatgggggctggcgtgtctcttggatggaggtggagagtatcacggtacggaatggtggattcagggcattaaatcaggaaccgatcccgagagccctgaattctggggatatccgcgtgataatgatcagaggatggtggagatgtgtcctctaggatacgcattggctgttgcaccacagatatggcagtcattcaatgagaaggagaaagcgaacgtcgaggcctggttgggaaactcaattaacgagaaaaagtagggacacaggccctccagaaaaaacgaagacagcattaatagaatttagcatgccaaacacaaattggttatggttccgagtcttcgcaaatcttggcctgaagaataacgggggcaagttctctcaagaaaggctcgacagtgatatagagcatctgaatactttctatcgtggagatggttggtcaaatgatggaccggaggggatacaccagatggactactactcatcgagttttgcaatacattttctgcaactcttatacgcaaaactagctggcgacatggaaccaacgagggcagaggagtttcgaaagcgtgcacagatcgcagcattggacttagttcattattacgacgaagaagggcgagctttaccgtttggtcgaagtgttggctatagattcgctatggtgtcattctggggcgcattagcatatgcaggagttgagcttcccaagccacttacttggggaatggtaaaaggcattgtgctacgaaacttgcgatggtggcaaacgcagccagacatctggagtccaagtggaacattgactattgggtattcatttcccaatatgtatatggcggagaattacaacagccctggcagcccatattgggcatgtctagcttttatctgccttgcagtacccgccgatcacccgttctggacatctgaagaagaataccatggaggagtcattccaaagatcaaagagctcaagcatccgggtcacataatgagttatctcggtggacactgcatgcttctatcttccggtcaagcctgcagctacccaatgaaaggaacacacgccaaatatggctgctttgcgtacagcagcgcctacgcctattccgtacctccgggtctatacactctagaacaatacgcattagcgtctcaacttggtctttcagatgacggaggtgagtattggaagacgagacggcagtctgaatatgcaggccttgagaaaagagagggcaaaccggttttggtatcgatctggaaacccttctcagatgtcacaattcggactaccctagttccgccgtctgaagagacaccaaattggcatttacgtgtacaccgtatcgagaacgccggatcacggaccctaaagacagctgatggcgcatttgctatttgtaatgaacgagaaccagacggccggtatctcgatgagtatgatcccaagaagtgcgaaggcacacagccgcgaatcattggcaattatgatttagcgacaccagcgggatgggccggcggagccgatggcgcatttgcggtctcgaagggtgctgtaggaattcgggctctcgaacctgttgaaggggatccaaaggcgtatggaacaggcgataaaagacaacgtgcagccatgctcgtcaacgctgacccgaattctaaccttgtcgagagccggactgtgatcccaacgttgcagggcactatccagaagggcgaaacagtgtggtatgtctctgctatctacgcgaaaccttctgcgcctggcgttgcaaaggagtcgtatctgaacggttgggagtccgtacctgaaattcccgcttggttaagagaggagatgaactcgtgaagttacgcatggtgttcaaagatactgaagaacaactatcaattagctataccgacttatgcaggatggttttctctttctgttgaatgcatagatgttgaaagtattttccgttccgtacgcttatgtatgctatgctaggctccctataacgccgttgagccgccatgcaagtaaccccagtcaaaatcttgaacttttatgctgcctgtacaatgatcccacatatcaactttagtgctaacaatttgtgttcgacatataccgcgccacgatgttacttatgccttggcaaattcaacaaggaattgcgctagtttctctgcaccctctaggggtatcgagttgtagttcgaggctcgaatgccaccgacgcttcggtggcccttgagaccagtcaggcccttggcagtaccttgtttcaagaaatctgcttcagtcttgtcggtctcgccg

SEQ ID NO: 29788 - DNA, 903 bp, Muscodor strobelii
  misc_feature: SGI cDNA ID NO. 570235
  misc_feature: Encodes the peptide sequence at SEQ ID NO 29789
atgggaggcctcgtacttgggtataatggggttcatcccttttccaaagtcaagattaccgaccgcgcttccgtccaggaactgttacggacgctgttagatcctctcgaacctttcttttcgcctttgaaggctagagttcgggtgccaggggctaccgctgtaagatttgaccaaacagcttctgaagtcgagggaatatgtcgtccactatgggggctggcgtgtctcttggatggaggtggagagtatcacggtacggaatggtggattcagggcattaaatcaggaaccgatcccgagagccctgaattctggggatatccgcgtgataatgatcagaggatggtggagatgtgtcctctaggatacgcattggctgttgcaccacagatatggcagtcattcaatgagaaggagaaagcgaacgtcgaggcctggttgggaaactcaattaacgagaaaaacatgccaaacacaaattggttatggttccgagtcttcgcaaatcttggcctgaagaataacgggggcaagttctctcaagaaaggctcgacagtgatatagagcatctgaatactttctatcgtggagatggttggtcaaatgatggaccggaggggatacaccagatggactactactcatcgagttttgcaatacattttctgcaactcttatacgcaaaactagctggcgacatggaaccaacgagggcagaggagtttcgaaagcgtgcacagatcgcagcattggacttagttcattattacgacgaagaaggcatgattcctatcaacacttcaagtaacgtaactgaccagattgcacagggcgagctttaccgtttggtcgaagtgttggctatagattcgctatggtgtcattctggggcgcattag

SEQ ID NO: 29789 - protein, 300 aa, Muscodor strobelii
  misc_feature: SGI Peptide ID NO. 570235
  misc_feature (3)..(269): NCBI GI: 261351556 Blast Desc: conserved [Verticillium albo-atrum VaMs.102]
  misc_feature (3)..(269): NCBI GI: 145607195 Blast Desc: MGG_12140 [Magnaporthe grisea 70-15] gi|145014789|gb|EDJ99357.1| MGG_12140 [Magnaporthe grisea 70-15]
  misc_feature (3)..(269): NCBI GI: 256731504 Blast Desc: [Nectria haematococca mpVI 77-13-4]
  misc_feature (4)..(269): NCBI GI: 46123713 Blast Desc: FG06234.1 [Gibberella zeae PH-1]
  misc_feature (4)..(269): NCBI GI: 212545368 Blast Desc: conserved [Penicillium marneffei ATCC 18224] gi|210065807|gb|EEA19901.1| conserved [Penicillium marneffei ATCC 18224]
  misc_feature (4)..(262): NCBI GI: 156048504 Blast Desc: SS1G_08983 [Sclerotinia sclerotiorum 1980] gi|154693380|gb|EDN93118.1| SS1G_08983 [Sclerotinia sclerotiorum 1980]
  misc_feature (3)..(269): NCBI GI: 28950341 Blast Desc: conserved [Neurospora crassa]
  misc_feature (4)..(262): NCBI GI: 154300833 Blast Desc: BC1G_10716 [Botryotinia fuckeliana B05.10] gi|150856464|gb|EDN31656.1| BC1G_10716 [Botryotinia fuckeliana B05.10]
  misc_feature (3)..(269): NCBI GI: 85077223 Blast Desc: NCU01430 [Neurospora crassa OR74A] gi|28917029|gb|EAA26754.1| conserved [Neurospora crassa OR74A]
  misc_feature (11)..(262): NCBI GI: 189201950 Blast Desc: conserved [Pyrenophora tritici-repentis Pt-1C-BFP] gi|187984410|gb|EDU49898.1| conserved [Pyrenophora tritici-repentis Pt-1C-BFP]
MGGLVLGYNGVHPFSKVKITDRASVQELLRTLLDPLEPFFSPLKARVRVPGATAVRFDQTASEVEGICRPLWGLACLLDGGGEYHGTEWWIQGIKSGTDPESPEFWGYPRDNDQRMVEMCPLGYALAVAPQIWQSFNEKEKANVEAWLGNSINEKNMPNTNWLWFRVFANLGLKNNGGKFSQERLDSDIEHLNTFYRGDGWSNDGPEGIHQMDYYSSSFAIHFLQLLYAKLAGDMEPTRAEEFRKRAQIAALDLVHYYDEEGMIPINTSSNVTDQIAQGELYRLVEVLAIDSLWCHSGAH

SEQ ID NO: 29790 - DNA, 2635 bp, Muscodor strobelii; identical to SEQ ID NO: 29787
  misc_feature: SGI EST ID NO. CUFF.70450.0
  misc_feature: Variant of the nucleotide sequence at SEQ ID NO 29788

SEQ ID NO: 29791 - DNA, 2040 bp, Muscodor strobelii
  misc_feature: SGI cDNA ID NO. 570236
  misc_feature: Encodes the peptide sequence at SEQ ID NO 29792
atgggaggcctcgtacttgggtataatggggttcatcccttttccaaagtcaagattaccgaccgcgcttccgtccaggaactgttacggacgctgttagatcctctcgaacctttcttttcgcctttgaaggctagagttcgggtgccaggggctaccgctgtaagatttgaccaaacagcttctgaagtcgagggaatatgtcgtccactatgggggctggcgtgtctcttggatggaggtggagagtatcacggtacggaatggtggattcagggcattaaatcaggaaccgatcccgagagccctgaattctggggatatccgcgtgataatgatcagaggatggtggagatgtgtcctctaggatacgcattggctgttgcaccacagatatggcagtcattcaatgagaaggagaaagcgaacgtcgaggcctggttgggaaactcaattaacgagaaaaacatgccaaacacaaattggttatggttccgagtcttcgcaaatcttggcctgaagaataacgggggcaagttctctcaagaaaggctcgacagtgatatagagcatctgaatactttctatcgtggagatgagatggactactactcatcgagttttgcaatacattttctgcaactcttatacgcaaaactagctggcgacatggaaccaacgagggcagaggagtttcgaaagcgtgcacagatcgcagcattggacttagttcattattacgacgaagaagggcgagctttaccgtttggtcgaagtgttggctatagattcgctatggtgtcattctggggcgcattagcatatgcaggagttgagcttcccaagccacttacttggggaatggtaaaaggcattgtgctacgaaacttgcgatggtggcaaacgcagccagacatctggagtccaagtggaacattgactattgggtattcatttcccaatatgtatatggcggagaattacaacagccctggcagcccatattgggcatgtctagcttttatctgccttgcagtacccgccgatcacccgttctggacatctgaagaagaataccatggaggagtcattccaaagatcaaagagctcaagcatccgggtcacataatgaggttagacacgccacctttactcttcaacgacgataactcacattattatagttatctcggtggacactgcatgcttctatcttccggtcaagcctgcagctacccaatgaaaggaacacacgccaaatatggctgctttgcgtacagcagcgcctacgcctattccgtacctccgggtctatacactctagaacaatacgcattagcgtctcaacttggtctttcagatgacggaggtgagtattggaagacgagacggcagtctgaatatgcaggccttgagaaaagagagggcaaaccggttttggtatcgatctggaaacccttctcagatgtcacaattcggactaccctagttccgccgtctgaagagacaccaaattggcatttacgtgtacaccgtatcgagaacgccggatcacggaccctaaagacagctgatggcgcatttgctatttgtaatgaacgagaaccagacggccggtatctcgatgagtatgatcccaagaagtgcgaaggcacacagccgcgaatcattggcaattatgatttagcgacaccagcgggatgggccggcggagccgatggcgcatttgcggtctcgaagggtgctgtaggaattcgggctctcgaacctgttgaaggggatccaaaggcgtatggaacaggcgataaaagacaacgtgcagccatgctcgtcaacgctgacccgaattctaaccttgtcgagagccggactgtgatcccaacgttgcagggcactatccagaagggcgaaacagtgtggtatgtctctgctatctacgcgaaaccttctgcgcctggcgttgcaaaggagtcgtatctgaacggttgggagtccgtacctgaaattcccgcttggttaagagaggagatgaactcgtga

SEQ ID NO: 29792 - protein, 679 aa, Muscodor strobelii
  misc_feature: SGI Peptide ID NO. 570236
  misc_feature (4)..(679): NCBI GI: 46123713 Blast Desc: FG06234.1 [Gibberella zeae PH-1]
  misc_feature (3)..(677): NCBI GI: 256731504 Blast Desc: [Nectria haematococca mpVI 77-13-4]
  misc_feature (3)..(676): NCBI GI: 261351556 Blast Desc: conserved [Verticillium albo-atrum VaMs.102]
  misc_feature (3)..(677): NCBI GI: 145607195 Blast Desc: MGG_12140 [Magnaporthe grisea 70-15] gi|145014789|gb|EDJ99357.1| MGG_12140 [Magnaporthe grisea 70-15]
  misc_feature (4)..(677): NCBI GI: 156048504 Blast Desc: SS1G_08983 [Sclerotinia sclerotiorum 1980] gi|154693380|gb|EDN93118.1| SS1G_08983 [Sclerotinia sclerotiorum 1980]
  misc_feature (4)..(677): NCBI GI: 154300833 Blast Desc: BC1G_10716 [Botryotinia fuckeliana B05.10] gi|150856464|gb|EDN31656.1| BC1G_10716 [Botryotinia fuckeliana B05.10]
  misc_feature (3)..(675): NCBI GI: 28950341 Blast Desc: conserved [Neurospora crassa]
  misc_feature (4)..(679): NCBI GI: 212545368 Blast Desc: conserved [Penicillium marneffei ATCC 18224] gi|210065807|gb|EEA19901.1| conserved [Penicillium marneffei ATCC 18224]
  misc_feature (3)..(675): NCBI GI: 85077223 Blast Desc: NCU01430 [Neurospora crassa OR74A] gi|28917029|gb|EAA26754.1| conserved [Neurospora crassa OR74A]
  misc_feature (156)..(679): NCBI GI: 116199251 Blast Desc: CHGG_07781 [Chaetomium globosum CBS 148.51] gi|88179060|gb|EAQ86528.1| CHGG_07781 [Chaetomium globosum CBS 148.51]
MGGLVLGYNGVHPFSKVKITDRASVQELLRTLLDPLEPFFSPLKARVRVPGATAVRFDQTASEVEGICRPLWGLACLLDGGGEYHGTEWWIQGIKSGTDPESPEFWGYPRDNDQRMVEMCPLGYALAVAPQIWQSFNEKEKANVEAWLGNSINEKNMPNTNWLWFRVFANLGLKNNGGKFSQERLDSDIEHLNTFYRGDEMDYYSSSFAIHFLQLLYAKLAGDMEPTRAEEFRKRAQIAALDLVHYYDEEGRALPFGRSVGYRFAMVSFWGALAYAGVELPKPLTWGMVKGIVLRNLRWWQTQPDIWSPSGTLTIGYSFPNMYMAENYNSPGSPYWACLAFICLAVPADHPFWTSEEEYHGGVIPKIKELKHPGHIMRLDTPPLLFNDDNSHYYSYLGGHCMLLSSGQACSYPMKGTHAKYGCFAYSSAYAYSVPPGLYTLEQYALASQLGLSDDGGEYWKTRRQSEYAGLEKREGKPVLVSIWKPFSDVTIRTTLVPPSEETPNWHLRVHRIENAGSRTLKTADGAFAICNEREPDGRYLDEYDPKKCEGTQPRIIGNYDLATPAGWAGGADGAFAVSKGAVGIRALEPVEGDPKAYGTGDKRQRAAMLVNADPNSNLVESRTVIPTLQGTIQKGETVWYVSAIYAKPSAPGVAKESYLNGWESVPEIPAWLREEMNS

SEQ ID NO: 29793 - DNA, 2635 bp, Muscodor strobelii; identical to SEQ ID NO: 29787
  misc_feature: SGI EST ID NO. CUFF.70450.0
  misc_feature: Variant of the nucleotide sequence at SEQ ID NO 29791

SEQ ID NO: 29794 - DNA, 1272 bp, Muscodor strobelii
  misc_feature: SGI cDNA ID NO. 570237
  misc_feature: Reduced expression when VOC is produced
  misc_feature: Encodes the peptide sequence at SEQ ID NO 29795
atgcctgagagagccgacatcacgtacttcggcgccggccccgccttgctgccaacggacgtcctcgagggcgccgcgcaggctcttctgaactacaacaacacgggcttaggaattgctgagcattcgcatcgttctcagcatgctgccgatatcatcaacgaggcaaaggccgacttggcttcatatcttgacatccccgacgactacgagatccttttcatgcagggtggtggtagtggcgagttctcggccactatgtataatcttgtcggtgcttgggtgaccaagaaaaaggcagatatactgggcgatacgaaggaagcagatgcgaatcaggatgagcttgtggcaaccctaaagaaggccatcgacaacgaattgaagttggactacctggtgactggcggttggtcactgaaggcatatcaagaagccggccggttgctgggaaccgaatacacaaacatcgctaccgattctcgggcgatgaataacggtaaatttggcgaaattcccgacgagagtagctggaaactttctaaggatgctgccctggtatactactgtgacaatgagaccgtcgacggtgtcgagttccctaagtttccagatgtcctagttcccaaagctgatggcactggccctatcgtggttgcggatatgtcttctaatattttgtcgaggaggattcccgttaagaacttctctgtcgtgttcttcggcgcacagaagaaccttggctctactggtatcacagttgttattatcaagaagagcttgttgccacagccttctccttctttgatgaggaaactcggcctccctattccaccagtcgttctgacttacgagactattgcgaagaacaacagcttgtacaacacactcagcatcttcgatgtgtatattgccggacaggtgttgaagaagcttcttaagacctataacaataaggtcgatggtcaagaatctatctcgaacaagaaggctgctcttatttatggtacactcgaggcgcaccctgatgtctatcagattgttcctagtaaaacggtacggtccaggatgaatgtgtgctttcgtgtaacaaagaacggcgagaccgacaagactgaagcagatttcttgaaacaaggtactgccaagggcctgactggtctcaagggccaccgaagcgtcggtggcattcgagcctcgaactacaactcgatacccctagagggtgcagagaaactagcgcaattccttgttgaatttgccaaggcataa

SEQ ID NO: 29795 - protein, 423 aa, Muscodor strobelii
  misc_feature: SGI Peptide ID NO. 570237
  misc_feature (7)..(413): Pfam Id: PF00266 Pfam Desc: Aminotransferase class-V
  misc_feature (172)..(264): Pfam Id: PF00266 Pfam Desc: Aminotransferase class-V
  misc_feature (7)..(81): Pfam Id: PF00266 Pfam Desc: Aminotransferase class-V
  misc_feature (1)..(423): NCBI GI: 171692791 Blast Desc: protein product [Podospora anserina] gi|170946344|emb|CAP73145.1| protein product [Podospora anserina]
  misc_feature (1)..(421): NCBI GI: 46121685 Blast Desc: FG05221.1 [Gibberella zeae PH-1]
  misc_feature (1)..(423): NCBI GI: 261351558 Blast Desc: phosphoserine aminotransferase [Verticillium albo-atrum VaMs.102]
  misc_feature (1)..(423): NCBI GI: 85077219 Blast Desc: phosphoserine aminotransferase [Neurospora crassa OR74A] gi|28917028|gb|EAA26753.1| phosphoserine aminotransferase [Neurospora crassa OR74A]
  misc_feature (1)..(423): NCBI GI: 28950340 Blast Desc: related to 3-phosphoserine aminotransferase [Neurospora crassa]
  misc_feature (1)..(423): NCBI GI: 39944096 Blast Desc: MGG_04059 [Magnaporthe grisea 70-15] gi|145014785|gb|EDJ99353.1| MGG_04059 [Magnaporthe grisea 70-15]
  misc_feature (1)..(422): NCBI GI: 156048634 Blast Desc: SS1G_09049 [Sclerotinia sclerotiorum 1980] gi|154693445|gb|EDN93183.1| SS1G_09049 [Sclerotinia sclerotiorum 1980]
  misc_feature (3)..(423): NCBI GI: 145231496 Blast Desc: An02g00890 [Aspergillus niger] gi|134056129|emb|CAK96304.1| protein product [Aspergillus niger]
  misc_feature (3)..(423): NCBI GI: 238490334 Blast Desc: phosphoserine aminotransferase [Aspergillus flavus NRRL3357] gi|220696817|gb|EED53158.1| phosphoserine aminotransferase [Aspergillus flavus NRRL3357]
  misc_feature (3)..(423): NCBI GI: 169772429 Blast Desc: [Aspergillus oryzae RIB40] gi|83768544|dbj|BAE58681.1| protein product [Aspergillus oryzae]
  misc_feature (3)..(422): SWISSPROT Homolog: EC 2.6.1.52 Phosphoserine transaminase
  misc_feature: Useful for introducing or modulating the production of volatile compounds
MPERADITYFGAGPALLPTDVLEGAAQALLNYNNTGLGIAEHSHRSQHAADIINEAKADLASYLDIPDDYEILFMQGGGSGEFSATMYNLVGAWVTKKKADILGDTKEADANQDELVATLKKAIDNELKLDYLVTGGWSLKAYQEAGRLLGTEYTNIATDSRAMNNGKFGEIPDESSWKLSKDAALVYYCDNETVDGVEFPKFPDVLVPKADGTGPIVVADMSSNILSRRIPVKNFSVVFFGAQKNLGSTGITVVIIKKSLLPQPSPSLMRKLGLPIPPVVLTYETIAKNNSLYNTLSIFDVYIAGQVLKKLLKTYNNKVDGQESISNKKAALIYGTLEAHPDVYQIVPSKTVRSRMNVCFRVTKNGETDKTEADFLKQGTAKGLTGLKGHRSVGGIRASNYNSIPLEGAEKLAQFLVEFAKA

SEQ ID NO: 29796 - DNA, 3355 bp, Muscodor strobelii
  misc_feature: SGI EST ID NO. CUFF.70451.1
  misc_feature: Variant of the nucleotide sequence at SEQ ID NO 29794
tgaatcaccgcgcaaacttcgagaaatttgcaaaggtcatttcgtagacatagaatcgcgatctccatcgttttcctgtgattgattccatccagctgcaacctcaacccgaatactacgtatcgcaatgcctgagagagccgacatcacgtacttcggcgccggccccgccttgctgccaacggacgtcctcgagggcgccgcgcaggctcttctgaactacaacaacacgggcttaggaattgctgagcattcgcatcgttctcagcatgctgccgatatcatcaacgaggcaaaggccgacttggcttcatatcttgacatccccgacgactacgagatccttttcatgcagggtggtggtagtggcgagttctcggccactatgtataatcttgtcggtgcttgggtgaccaagaaaaaggcagatatactgggcgatacgaaggaagcagatgcgaatcaggatgagcttgtggcaaccctaaagaaggccatcgacaacgaattgaagttggactacctggtgactggcggttggtcactgaaggcatatcaagaagccggccggttgctgggaaccgaatacacaaacatcgctaccgattctcgggcgatgaataacggtaaatttggcgaaattcccgacgagagtagctggaaactttctaaggatgctgccctggtatactactgtgacaatgagaccgtcgacggtgtcgagttccctaagtttccagatgtcctagttcccaaagctgatggcactggccctatcgtggttgcggatatgtcttctaatattttgtcgaggaggattcccgttaagaacttctctgtcgtgttcttcggcgcacagaagaaccttggctctactggtatcacagttgttattatcaagaagagcttgttgccacagccttctccttctttgatgaggaaactcggcctccctattccaccagtcgttctgacttacgagactattgcgaagaacaacagcttgtacaacacactcagcatcttcgatgtgtatattgccggacaggtgttgaagaagcttcttaagacctataacaataaggtcgatggtcaagaatctatctcgaacaagaaggctgctcttatttatggtacactcgaggcgcaccctgatgtctatcagattgttcctagtaaaacggtacggtccaggatgaatgtgtgctttcgtgtaacaaagaacggcgagaccgacaagactgaagcagatttcttgaaacaaggtactgccaagggcctgactggtctcaagggccaccgaagcgtcggtggcattcgagcctcgaactacaactcgatacccctagagggtgcagagaaactagcgcaattccttgttgaatttgccaaggcataagtaacatcgtggcgcggtatatgtcgaacacaaattgttagcactaaagttgatatgtgggatcattgtacaggcagcataaaagttcaagattttgactggggttacttgcatggcggctcaacggcgttatagggagcctagcatagcatacataagcgtacggaacggaaaatactttcaacatctatgcattcaacagaaagagaaaaccatcctgcataagtcggtatagctaattgatagttgttcttcagtatctttgaacaccatgcgtaacttcacgagttcatctcctctcttaaccaagcgggaatttcaggtacggactcccaaccgttcagatacgactcctttgcaacgccaggcgcagaaggtttcgcgtagatagcagagacataccacactgtttcgcccttctggatagtgccctgcaacgttgggatcacagtccggctctcgacaaggttagaattcgggtcagcgttgacgagcatggctgcacgttgtcttttatcgcctgttccatacgcctttggatccccttcaacaggttcgagagcccgaattcctacagcacccttcgagaccgcaaatgcgccatcggctccgccggcccatcccgctggtgtcgctaaatcataattgccaatgattcgcggctgtgtgccttcgcacttcttgggatcatactcatcgagataccggccgtctggttctcgttcattacaaatagcaaatgcgccatcagctgtctttagggtccgtgatccggcgttctcgatacggtgtacacgtaaatgccaatttggtgtctcttcagacggcggaactagggtagtccgaattgtgacatctgagaagggtttccagatcgataccaaaaccggtttgccctctcttttctcaaggcctgcatattcagactgccgtctcgtcttccaatactcacctccgtcatctgaaagaccaagttgagacgctaatgcgtattgttctagagtgtatagacccggaggtacggaataggcgtaggcgctgctgtacgcaaagcagccatatttggcgtgtgttcctttcattgggtagctgcaggcttgaccggaagatagaagcatgcagtgtccaccgagataactataataatgtgagttatcgtcgttgaagagtaaaggtggcgtgtctaacctcattatgtgacccggatgcttgagctctttgatctttggaatgactcctccatggtattcttcttcagatgtccagaacgggtgatcggcgggtactgcaaggcagataaaagctagacatgcccaatacttaagaatcgtcagatatgtaattttgatgttgaagagaagaatctaacgtactgggctgccagggctgttgtaattctccgccatctacaacgccgttaattgctcgatcgtttgcatgaagggggggagtcttgacacttacatacatattgggaaatgaatacccaatagtcaatgttccacttggactccagatgtctggctgcgtttgccaccatcgcaagtttcgtagcacaatgccttttaccattccccaagtaagtggcttgggaagctcaactcctgcatatgctaatgcgccccagaatgacaccatagcgaatctatagccaacacttcgaccaaacggtaaagctcgccctgtgcaatctggtcagttacgttacttgaagtgttgataggaatcatgccttcttcgtcgtaataatgaactaagtccaatgctgcgatctgtgcacgctttcgaaactcctctgccctcgttggttccatgtcgccagctagttttgcgtataagagttgcagaaaatgtattgcaaaactcgatgagtagtagtccatctctgtcggaaagctgttagagtccacgttgcaatagtttggcgtctgagtaggtagatgtacggtgtatccc

SEQ ID NO: 29797 - DNA, 1074 bp, Muscodor strobelii
  misc_feature: SGI cDNA ID NO. 570238
  misc_feature: Encodes the peptide sequence at SEQ ID NO 29798
atgagtcatatagcgacacataattctccgcgaacatggttcttgacctcttcattttcaccgctggcggtgcgtctaattaggcaattgctgagtcatggcgattgtgtggtcgcttgtttgccacctcatgaaatcgagaacgacgatcgaagtgccgagtttcgcgaacttgtgaacgagtgtaagagtaatcgcaaggatagagagggctggaaagatcgcataaggagcatcagatgcgatgggcggatcatgagtcaatgcggcgctgcgctggccgaggcgaaacataccttcggtcgcatcgacatactgctatgctgcacatccgaagccgtcgtaggaactgtcgaagagctttcgactacagccgcaacgcaaaatctggtgcgggatcagttcgagaccattttcttctcacaggtcaacttcatcaaagcgtctctgccgatgctacgcgctgagcacactggtcacatcataattctcactagcatcggcggtcacatcggaacccctggcatgtccatttacacggctgcgacctgggcactcgaaggattttgcgactcgctggcctacgaagtcgcgcccttcaatatcaaagtcacgattgtgcaacccaataaggagattcagaccctgacgaacaagatcgtcttctccccagcgatgccgcaatatgatagcgaaaacaacccagcgccgagcgtgcgagacatgttgaccaacatgctgaacctgaacccggagacggtgattgagcaatcagatacagagatcttgaatcgatacccaaaattgccgccatctgccaatgaccgtctagtcgccgagaccgtgcatgcattgacagcgattggtgggcatgaaaacccgcctgcgcggcatatcgtcgggttcgatggtgcagaggcagtcagggagaagctcaagacggtcacagaagagctggaggactttgttgaagctagcatagcggtcgacatattcgacagcgagctcaagaccgaggccaggcaagggcaaacaaggcctggagacgaggacaccggaatgtcttcccactag

SEQ ID NO: 29798 - protein, 357 aa, Muscodor strobelii
  misc_feature: SGI Peptide ID NO. 570238
  misc_feature (11)..(198): Pfam Id: PF00106 Pfam Desc: short chain dehydrogenase
  misc_feature (6)..(345): NCBI GI: 85100076 Blast Desc: NCU06716 [Neurospora crassa OR74A] gi|28922427|gb|EAA31660.1| conserved [Neurospora crassa OR74A] gi|28950273|emb|CAD71241.1| conserved [Neurospora crassa]
  misc_feature (1)..(345): NCBI GI: 116199249 Blast Desc: CHGG_07780 [Chaetomium globosum CBS 148.51] gi|88179059|gb|EAQ86527.1| CHGG_07780 [Chaetomium globosum CBS 148.51]
  misc_feature (5)..(341): NCBI GI: 171692793 Blast Desc: protein product [Podospora anserina] gi|170946345|emb|CAP73146.1| protein product [Podospora anserina]
  misc_feature (6)..(344): NCBI GI: 261351559 Blast Desc: short chain dehydrogenase/reductase family protein [Verticillium albo-atrum VaMs.102]
  misc_feature (6)..(347): NCBI GI: 39944094 Blast Desc: MGG_04058 [Magnaporthe grisea 70-15] gi|145014784|gb|EDJ99352.1| MGG_04058 [Magnaporthe grisea 70-15]
  misc_feature (6)..(352): NCBI GI: 154297465 Blast Desc: BC1G_12329 [Botryotinia fuckeliana B05.10] gi|150858525|gb|EDN33717.1| BC1G_12329 [Botryotinia fuckeliana B05.10]
  misc_feature (3)..(335): NCBI GI: 240111835 Blast Desc: oxidoreductase,short chain dehydrogenase, [Coccidioides posadasii C735 delta SOWgp]
  misc_feature (7)..(330): NCBI GI: 238494200 Blast Desc: short-chain dehydrogenase, [Aspergillus flavus NRRL3357] gi|220694986|gb|EED51329.1| short-chain dehydrogenase, [Aspergillus flavus NRRL3357]
  misc_feature (7)..(339): NCBI GI: 242781097 Blast Desc: short chain dehydrogenase/reductase family protein [Talaromyces stipitatus ATCC 10500] gi|218719879|gb|EED19298.1| short chain dehydrogenase/reductase family protein [Talaromyces
  misc_feature (2)..(331): NCBI GI: 255945955 Blast Desc: Pc20g12600 [Penicillium chrysogenum Wisconsin 54-1255] gi|211588480|emb|CAP86589.1| Pc20g12600 [Penicillium chrysogenum Wisconsin 54-1255]
MSHIATHNSPRTWFLTSSFSPLAVRLIRQLLSHGDCVVACLPPHEIENDDRSAEFRELVNECKSNRKDREGWKDRIRSIRCDGRIMSQCGAALAEAKHTFGRIDILLCCTSEAVVGTVEELSTTAATQNLVRDQFETIFFSQVNFIKASLPMLRAEHTGHIIILTSIGGHIGTPGMSIYTAATWALEGFCDSLAYEVAPFNIKVTIVQPNKEIQTLTNKIVFSPAMPQYDSENNPAPSVRDMLTNMLNLNPETVIEQSDTEILNRYPKLPPSANDRLVAETVHALTAIGGHENPPARHIVGFDGAEAVREKLKTVTEELEDFVEASIAVDIFDSELKTEARQGQTRPGDEDTGMSSH

SEQ ID NO: 29799 - DNA, 1434 bp, Muscodor strobelii
  misc_feature: SGI EST ID NO. CUFF.70422.0
  misc_feature: Variant of the nucleotide sequence at SEQ ID NO 29797
ctctacgccatttaccaatccccatacccattttctgaaccccaattctctgttagcctctcggaacaacatttcaacacgatatcaaagtggagagcctatatcccgattacctttcttaaatcactatgaacttagctttgtcaaacatcccatattctttatcattaattattcattcgtgataataacgacttaactaatgagtcatatagcgacacataattctccgcgaacatggttcttgacctcttcattttcaccgctggcggtgcgtctaattaggcaattgctgagtcatggcgattgtgtggtcgcttgtttgccacctcatgaaatcgagaacgacgatcgaagtgccgagtttcgcgaacttgtgaacgagtgtaagagtaatcgcaaggatagagagggctggaaagatcgcataaggagcatcagatgcgatgggcggatcatgagtcaatgcggcgctgcgctggccgaggcgaaacataccttcggtcgcatcgacatactgctatgctgcacatccgaagccgtcgtaggaactgtcgaagagctttcgactacagccgcaacgcaaaatctggtgcgggatcagttcgagaccattttcttctcacaggtcaacttcatcaaagcgtctctgccgatgctacgcgctgagcacactggtcacatcataattctcactagcatcggcggtcacatcggaacccctggcatgtccatttacacggctgcgacctgggcactcgaaggattttgcgactcgctggcctacgaagtcgcgcccttcaatatcaaagtcacgattgtgcaacccaataaggagattcagaccctgacgaacaagatcgtcttctccccagcgatgccgcaatatgatagcgaaaacaacccagcgccgagcgtgcgagacatgttgaccaacatgctgaacctgaacccggagacggtgattgagcaatcagatacagagatcttgaatcgatacccaaaattgccgccatctgccaatgaccgtctagtcgccgagaccgtgcatgcattgacagcgattggtgggcatgaaaacccgcctgcgcggcatatcgtcgggttcgatggtgcagaggcagtcagggagaagctcaagacggtcacagaagagctggaggactttgttgaagctagcatagcggtcgacatattcgacagcgagctcaagaccgaggccaggcaagggcaaacaaggcctggagacgaggacaccggaatgtcttcccactagtcggcttctcgcgcatttgtaattcttcattgtttgcaattacatgttcaatgttgtgccataaatctttgagtgagggtgtttagcatttctagatatctgggctgtgtacagatataatcattttctatacctgagtcgttagtggattgaaacag

SEQ ID NO: 29800 - DNA, 4320 bp, Muscodor strobelii
  misc_feature: SGI cDNA ID NO. 570239
  misc_feature: Encodes the peptide sequence at SEQ ID NO 29801
atgagtcaaggttccatcctgcccattgccccggcaagggtacgagctttggtcctgcccgtcggccagataaagcgagaccggttcgaatcctttgtcgacactctgaaccgggagaatgtcgtccagcttcgcgatatcagcgccgacgggcgcccgaaccggaacatgttctcgccgctcgcattccctagcggtgccatgttctacgatttagtcccatacatcccgccgccctcacacctcgccctctctcccttcgaactgtttcgagagccacttgcagtgatagctattgccgacggaagagagctcgagaatgtcgccttcagcaagagacagtcggcaaacggctatgcgcccaccatggccgagaggaacatccgtaccttatatcaggagctggaggagctaagagacgcatatcccaagatgctagcccatcaagtcctgatattcgactacaagctgtcgggagacaatcatgtgccattgcccgagggtatccaggccataccgcctcctgagcagacactacgaacaaccattccgaccgtcatgtgcaacatatcatcacttctactagccgagatgactacgctggcgaagtctttcgaggctatgactaccattgactccccgggccaagctccgagccgccctggcataggctcgtggacttcagatgacgccaaccccgtggcaaggagaaattctcagtttgctatctcgaccgtgaccaggtcagcctccacgagcggagtcgcagacaagaaccagaaccgcatgtctatgcctgttaagttcaacgggctcgggtctagtagcgggacgccaaccgcacgcccatcaacacctaatcgcagcggattgtccaaccccccgaccacttttgacgatataggtgccgccaatggaattcattcgcctctgacgagccctgaacaacagaagaacagctcgcgtccagctacatcggaggaagccctaaagtcaaataagctatctatccaagggtttggtccaggtggggtaaatgagaagttcagaaagacgggcaaagggcgggccgccattgtggtagcttctctttatcttcaagccggtcgctggacggatgccttaaaggaggctaccgaaggagcgaccgtcgcgaagtcgatcaatgatcatctttggcatggtaaagctctcgagatcatcactatcagtctcttcttgctcggctgggtggggattgaattcacggtgccaaccatctgcctgccgccgaatgagaaaaacagtagtaatttgtttaaagcacaagagagcgaagaggcagatccagaccagcccaagtacctccgaaatcttcaaagtattctcccagacctcctagagagaaccataggactatattctaggatatcaggagagcaactaccccctctccctctatccgaaactattctccggttctgcaacatactaactgcccttcacctttgtaatggcaaactaaataagccttcattaaatattatggtatacggcaaatatccttcgaaccccttatccacgtcacctcgtctcaatattactcccacacgaggacagataaatgctttactattcaaggcgtttccatcgtcgacaccagagcttataacaactgtggatcgatcgattgttctgggtggtatcgcctccgtgctcggtactcttggttatcaccgaaagaaagcacttgttatacgggagttagtctcggtattaggcggcggcttggtcgaggctagaacccgcggcgctgccgaagtaggcattcacccagccgctggcttgatggctctgaacgccctcaatggccagggcggtcctgcaggcgcactcgatctcgctgatggcgatattgagcaggatattgacgccttccttggattattatgcaagacatatggtatcgtcggcttaggcgacaccaagaaggagaccgaagccgactcatcggcgatcagtgatgtagatgcgaacgtcatatcaaggatacatcgtcagtcagcaagaaggcagtttggattcaagggaattaaactcaacatcctccgagcctgtatcaacttctccgaagcacttcctgatttcgagggcgtgctaagatactcgagcgacctattacgcacatcgggcagcggtgttgcacctggccctaggagggaagatgcagcgccggcaatcacccgcgatgaacaaatccgcctcgtcaccaacatagcgaaaacatcaagtctctcacgaagtctgggtctgaaacatctggatggagaatactgggatgaatttttaatacgtgggatcactatcgacgctctaccgatcacacgagcgccaacaccacactccaaaaatgttctaccgggtgtgacaaccgcacgcacatcacaagacgtaaacccttttatctacaatccatttctcagaacggacaaggcgaaggctgagcagaccctcgtggcagacgaagcagcttccttcagaatcactattcaaaatccttttgacatcgagctcgaaatcgatagcatagaattacaccctgagggcgtagactttgagcccgcagtgatatcgaccgttattgggccgtatcgcacgcagatactgaagatacatggcacagcgcgatctgccgggtcactcaaaatcaccggggcgatggtgaaagtgcatggttgtcgcgagagaagatttcccattttttcacaatcctggaaccctgaattggagttgaaagtgaagagcattgggttgggcaatctcgagcacgatcctgtcttgtcaccgccaggccctcctttgaaacccgacagccttgggctaagcgtaatcccggcccagcccgttctcattgtaaaatccaccacgcttcctcagtcgtcgattatggtcctcgagggcgaaaggcgtgtcttctctgtcactctgcagaacacctcttcgacaaccgcagcagatctgctgcttttctcctttcaggattcgacgcaagagccccttcaaaccgccctggccagccgagaagcaactgcagccgagcttcacgaatgtgaatgggtcttagcaaagaagcaagcgttacgtcttcggaagattgacgactcaaagcgttacattgcacccgcgtcgactgccaccttcgagttcgaaattctcgggaagccaggtctgactaatggtacgatacaaattgattacgcgcacctcggtatgccacagtctgacatcgaaaatcaatttttcactcggcaggtttgcctagatttaaccattacggtaaatgctggtatagagctcgccagagtagacatcttccctgtccagtcggacctgccaagcaaagcctggagcagagcgaagtctgaaaagaaccagaagcccaggacatcagataattgtttattacttatggatctacgtaatgcttggccaaacgatatgcagatatgcctcaaatccggccgagacattgtagtcgaagaccatatccttccagggaacacaaaccgcgtcgcagtgcccgtgcctcgactctacatcgaagatccgcacgcctctattccagcactaaatccctcgagacagagacaatttgtagtgagcagcagcaaaataaccccagatatggaacgaggaaacagagaggcattctggtacagaatgaagatgcttgagaacctttctggaacatggaaaaccgtctctggtgctcaaaaagagggtattattgagctgaggggtctccgactcaccccgaggatgatcgaggctatcaagatcgacgagattggtattgatatctctgttgaacccctcgaatctccatcagaacctccaagcaaagactacaacacggtctctatagatgaattcatgcagatccgcgtatccatcgaaaatcgcacggccaaccctatatatccaactctgcgcctcatgccatcgttagccaatagaccggtcaatgtagcgcttgatttcacgaggaaattcgcgtggaatggaaccctacagcaaattcttccgctcatagagggaaagagcaagatggaggttgtactgggtgccacagcgctttgcagaggggatttcgaaattgctgcctctgtcgaggagactagactttggcaggaaaaagatttagacggaaaggagaagaggataagtggcagggaaagaagcaatacggagaatatgttggatgctgtgctgggtaagaaggagaggagaatatggcattctagaagacctgttgttgttagggttagggatagaccctga

SEQ ID NO: 29801 - protein, 1439 aa, Muscodor strobelii
  misc_feature: SGI Peptide ID NO. 570239
  misc_feature (1)..(214): Pfam Id: PF08626 Pfam Desc: Transport protein Trs120
  misc_feature (1)..(1438): NCBI GI: 39944090 Blast Desc: MGG_04056 [Magnaporthe grisea 70-15] gi|145014782|gb|EDJ99350.1| MGG_04056 [Magnaporthe grisea 70-15]
  misc_feature (1)..(1438): NCBI GI: 46123723 Blast Desc: FG06239.1 [Gibberella zeae PH-1]
  misc_feature (1)..(1437): NCBI GI: 85100072 Blast Desc: NCU06715 [Neurospora crassa OR74A] gi|28922426|gb|EAA31659.1| conserved [Neurospora crassa OR74A] gi|28950272|emb|CAD71240.1| related to hypercellular protein
  misc_feature (1)..(1438): NCBI GI: 116199247 Blast Desc: CHGG_07779 [Chaetomium globosum CBS 148.51] gi|88179058|gb|EAQ86526.1| CHGG_07779 [Chaetomium globosum CBS 148.51]
  misc_feature (1)..(1439): NCBI GI: 171692795 Blast Desc: protein product [Podospora anserina] gi|170946346|emb|CAP73147.1| protein product [Podospora anserina]
  misc_feature (8)..(1436): NCBI GI: 154306962 Blast Desc: BC1G_08212 [Botryotinia fuckeliana B05.10] gi|150853097|gb|EDN28289.1| BC1G_08212 [Botryotinia fuckeliana B05.10]
  misc_feature (265)..(1435): NCBI GI: 156047992 Blast Desc: SS1G_08727 [Sclerotinia sclerotiorum 1980] gi|154693124|gb|EDN92862.1| SS1G_08727 [Sclerotinia sclerotiorum 1980]
  misc_feature (1)..(1436): NCBI GI: 189195590 Blast Desc: hypercellular protein A [Pyrenophora tritici-repentis Pt-1C-BFP] gi|187980012|gb|EDU46638.1| hypercellular protein A [Pyrenophora tritici-repentis Pt-1C-BFP]
  misc_feature (1)..(1437): NCBI GI: 261191007 Blast Desc: hypercellular protein HypA [Ajellomyces dermatitidis SLH14081] gi|239590956|gb|EEQ73537.1| hypercellular protein HypA [Ajellomyces dermatitidis SLH14081]
  misc_feature (1)..(1437): NCBI GI: 239613140 Blast Desc: hypercellular protein HypA [Ajellomyces dermatitidis ER-3]
MSQGSILPIAPARVRALVLPVGQIKRDRFESFVDTLNRENVVQLRDISADGRPNRNMFSPLAFPSGAMFYDLVPYIPPPSHLALSPFELFREPLAVIAIADGRELENVAFSKRQSANGYAPTMAERNIRTLYQELEELRDAYPKMLAHQVLIFDYKLSGDNHVPLPEGIQAIPPPEQTLRTTIPTVMCNISSLLLAEMTTLAKSFEAMTTIDSPGQAPSRPGIGSWTSDDANPVARRNSQFAISTVTRSASTSGVADKNQNRMSMPVKFNGLGSSSGTPTARPSTPNRSGLSNPPTTFDDIGAANGIHSPLTSPEQQKNSSRPATSEEALKSNKLSIQGFGPGGVNEKFRKTGKGRAAIVVASLYLQAGRWTDALKEATEGATVAKSINDHLWHGKALEIITISLFLLGWVGIEFTVPTICLPPNEKNSSNLFKAQESEEADPDQPKYLRNLQSILPDLLERTIGLYSRISGEQLPPLPLSETILRFCNILTALHLCNGKLNKPSLNIMVYGKYPSNPLSTSPRLNITPTRGQINALLFKAFPSSTPELITTVDRSIVLGGIASVLGTLGYHRKKALVIRELVSVLGGGLVEARTRGAAEVGIHPAAGLMALNALNGQGGPAGALDLADGDIEQDIDAFLGLLCKTYGIVGLGDTKKETEADSSAISDVDANVISRIHRQSARRQFGFKGIKLNILRACINFSEALPDFEGVLRYSSDLLRTSGSGVAPGPRREDAAPAITRDEQIRLVTNIAKTSSLSRSLGLKHLDGEYWDEFLIRGITIDALPITRAPTPHSKNVLPGVTTARTSQDVNPFIYNPFLRTDKAKAEQTLVADEAASFRITIQNPFDIELEIDSIELHPEGVDFEPAVISTVIGPYRTQILKIHGTARSAGSLKITGAMVKVHGCRERRFPIFSQSWNPELELKVKSIGLGNLEHDPVLSPPGPPLKPDSLGLSVIPAQPVLIVKSTTLPQSSIMVLEGERRVFSVTLQNTSSTTAADLLLFSFQDSTQEPLQTALASREATAAELHECEWVLAKKQALRLRKIDDSKRYIAPASTATFEFEILGKPGLTNGTIQIDYAHLGMPQSDIENQFFTRQVCLDLTITVNAGIELARVDIFPVQSDLPSKAWSRAKSEKNQKPRTSDNCLLLMDLRNAWPNDMQICLKSGRDIVVEDHILPGNTNRVAVPVPRLYIEDPHASIPALNPSRQRQFVVSSSKITPDMERGNREAFWYRMKMLENLSGTWKTVSGAQKEGIIELRGLRLTPRMIEAIKIDEIGIDISVEPLESPSEPPSKDYNTVSIDEFMQIRVSIENRTANPIYPTLRLMPSLANRPVNVALDFTRKFAWNGTLQQILPLIEGKSKMEVVLGATALCRGDFEIAASVEETRLWQEKDLDGKEKRISGRERSNTENMLDAVLGKKERRIWHSRRPVVVRVRDRP

SEQ ID NO: 29802 - DNA, 5285 bp, Muscodor strobelii
  misc_feature: SGI EST ID NO. CUFF.70425.0
  misc_feature: Variant of the nucleotide sequence at SEQ ID NO 29800
cttttgtcgacgaagtccaatattgtcacgcgaaattcttgctcacgctcctggagatggcatggcagctttccaaccatatctggcaacacagagtattcaattgtagacgaactatccttgaccaatagtttttgacgtaaaagtaataggaaaataaacagactttgagtaccttgctgacgaacgacttacccaatttacttcttctttcttttttttttttttttttaagtagtctggtatagaagattattcaacatgtctgaaggtaaaggtgcatgtccaacaggatgttgagccgaacctagccactaataagctgtttcagtgtatgattggctatcgctgtctttcatggctggagcctgtcgcaccccaggttcaggggagctgcaggagctatgaacacctgcgcatgcgctgtagatgctagtcgagccagtcgagcagtatccagtagacgtcctagtccaccaaattgtcacaggcccgacagcaacctcgaagcgaccacgtgcgccgcatttcgcaaataccgatcgcgaagccgagtcaaatatctcctgcgaatcctctaggcttctgagctacataccagacacttgcgaccacccggagcccacgtgtccaccactggcgatgcgataacgaagctccgtcgccgccttgccctcgcctcgccctcgcctcaccctcgctcttcgacgcgggcatgagtgcgcccttgcgtgtttcgaataggggaccaatgctagaatgagtcaaggttccatcctgcccattgccccggcaagggtacgagctttggtcctgcccgtcggccagataaagcgagaccggttcgaatcctttgtcgacactctgaaccgggagaatgtcgtccagcttcgcgatatcagcgccgacgggcgcccgaaccggaacatgttctcgccgctcgcattccctagcggtgccatgttctacgatttagtcccatacatcccgccgccctcacacctcgccctctctcccttcgaactgtttcgagagccacttgcagtgatagctattgccgacggaagagagctcgagaatgtcgccttcagcaagagacagtcggcaaacggctatgcgcccaccatggccgagaggaacatccgtaccttatatcaggagctggaggagctaagagacgcatatcccaagatgctagcccatcaagtcctgatattcgactacaagctgtcgggagacaatcatgtgccattgcccgagggtatccaggccataccgcctcctgagcagacactacgaacaaccattccgaccgtcatgtgcaacatatcatcacttctactagccgagatgactacgctggcgaagtctttcgaggctatgactaccattgactccccgggccaagctccgagccgccctggcataggctcgtggacttcagatgacgccaaccccgtggcaaggagaaattctcagtttgctatctcgaccgtgaccaggtcagcctccacgagcggagtcgcagacaagaaccagaaccgcatgtctatgcctgttaagttcaacgggctcgggtctagtagcgggacgccaaccgcacgcccatcaacacctaatcgcagcggattgtccaaccccccgaccacttttgacgatataggtgccgccaatggaattcattcgcctctgacgagccctgaacaacagaagaacagctcgcgtccagctacatcggaggaagccctaaagtcaaataagctatctatccaagggtttggtccaggtggggtaaatgagaagttcagaaagacgggcaaagggcgggccgccattgtggtagcttctctttatcttcaagccggtcgctggacggatgccttaaaggaggctaccgaaggagcgaccgtcgcgaagtcgatcaatgatcatctttggcatggtaaagctctcgagatcatcactatcagtctcttcttgctcggctgggtggggattgaattcacggtgccaaccatctgcctgccgccgaatgagaaaaacagtagtaatttgtttaaagcacaagagagcgaagaggcagatccagaccagcccaagtacctccgaaatcttcaaagtattctcccagacctcctagagagaaccataggactatattctaggatatcaggagagcaactaccccctctccctctatccgaaactattctccggttctgcaacatactaactgcccttcacctttgtaatggcaaactaaataagccttcattaaatattatggtatacggcaaatatccttcgaaccccttatccacgtcacctcgtctcaatattactcccacacgaggacagataaatgctttactattcaaggcgtttccatcgtcgacaccagagcttataacaactgtggatcgatcgattgttctgggtggtatcgcctccgtgctcggtactcttggttatcaccgaaagaaagcacttgttatacgggagttagtctcggtattaggcggcggcttggtcgaggctagaacccgcggcgctgccgaagtaggcattcacccagccgctggcttgatggctctgaacgccctcaatggccagggcggtcctgcaggcgcactcgatctcgctgatggcgatattgagcaggatattgacgccttccttggattattatgcaagacatatggtatcgtcggcttaggcgacaccaagaaggagaccgaagccgactcatcggcgatcagtgatgtagatgcgaacgtcatatcaaggatacatcgtcagtcagcaagaaggcagtttggattcaagggaattaaactcaacatcctccgagcctgtatcaacttctccgaagcacttcctgatttcgagggcgtgctaagatactcgagcgacctattacgcacatcgggcagcggtgttgcacctggccctaggagggaagatgcagcgccggcaatcacccgcgatgaacaaatccgcctcgtcaccaacatagcgaaaacatcaagtctctcacgaagtctgggtctgaaacatctggatggagaatactgggatgaatttttaatacgtgggatcactatcgacgctctaccgatcacacgagcgccaacaccacactccaaaaatgttctaccgggtgtgacaaccgcacgcacatcacaagacgtaaacccttttatctacaatccatttctcagaacggacaaggcgaaggctgagcagaccctcgtggcagacgaagcagcttccttcagaatcactattcaaaatccttttgacatcgagctcgaaatcgatagcatagaattacaccctgagggcgtagactttgagcccgcagtgatatcgaccgttattgggccgtatcgcacgcagatactgaagatacatggcacagcgcgatctgccgggtcactcaaaatcaccggggcgatggtgaaagtgcatggttgtcgcgagagaagatttcccattttttcacaatcctggaaccctgaattggagttgaaagtgaagagcattgggttgggcaatctcgagcacgatcctgtcttgtcaccgccaggccctcctttgaaacccgacagccttgggctaagcgtaatcccggcccagcccgttctcattgtaaaatccaccacgcttcctcagtcgtcgattatggtcctcgagggcgaaaggcgtgtcttctctgtcactctgcagaacacctcttcgacaaccgcagcagatctgctgcttttctcctttcaggattcgacgcaagagccccttcaaaccgccctggccagccgagaagcaactgcagccgagcttcacgaatgtgaatgggtcttagcaaagaagcaagcgttacgtcttcggaagattgacgactcaaagcgttacattgcacccgcgtcgactgccaccttcgagttcgaaattctcgggaagccaggtctgactaatggtacgatacaaattgattacgcgcacctcggtatgccacagtctgacatcgaaaatcaatttttcactcggcaggtttgcctagatttaaccattacggtaaatgctggtatagagctcgccagagtagacatcttccctgtccagtcggacctgccaagcaaagcctggagcagagcgaagtctgaaaagaaccagaagcccaggacatcagataattgtttattacttatggatctacgtaatgcttggccaaacgatatgcagatatgcctcaaatccggccgagacattgtagtcgaagaccatatccttccagggaacacaaaccgcgtcgcagtgcccgtgcctcgactctacatcgaagatccgcacgcctctattccagcactaaatccctcgagacagagacaatttgtagtgagcagcagcaaaataaccccagatatggaacgaggaaacagagaggcattctggtacagaatgaagatgcttgagaacctttctggaacatggaaaaccgtctctggtgctcaaaaagagggtattattgagctgaggggtctccgactcaccccgaggatgatcgaggctatcaagatcgacgagattggtattgatatctctgttgaacccctcgaatctccatcagaacctccaagcaaagactacaacacggtctctatagatgaattcatgcagatccgcgtatccatcgaaaatcgcacggccaaccctatatatccaactctgcgcctcatgccatcgttagccaatagaccggtcaatgtagcgcttgatttcacgaggaaattcgcgtggaatggaaccctacagcaaattcttccgctcatagagggaaagagcaagatggaggttgtactgggtgccacagcgctttgcagaggggatttcgaaattgctgcctctgtcgaggagactagactttggcaggaaaaagatttagacggaaaggagaagaggataagtggcagggaaagaagcaatacggagaatatgttggatgctgtgctgggtaagaaggagaggagaatatggcattctagaagacctgttgttgttagggttagggatagaccctgagaagtgacaaggtggtgtggtgtatgagagtagtgggatgagaggagagaagacagatacacgagtgtaaatggatagagatagagtgctatgagtaatgagagatgttgtgagcgtttgtgttgtctgaaggacgaaattcaaactaagcagcggtgatctactaaatctgtcactaaaggttattgaagtgtattacgttgagc

SEQ ID NO: 29803 - DNA, 567 bp, Muscodor strobelii
  misc_feature: SGI cDNA ID NO. 570240
  misc_feature: Elevated expression when VOC is produced
  misc_feature: Encodes the peptide sequence at SEQ ID NO 29804
atgcagttcaaaaccgccctcctagccctaaccatcgccactctcggcgcaacagaggacatcgacgccaatgatctgccctcggcctgcgtctcaacatgccagcccgccatcgacttaacgggtagatgcgatcgtgacgacaacgacaacgacgccacctatcagtcttgcgtctgtggtgccgacggggccgcacaaaatctgcaggattgtgctagttgcgttacgaacaatggaggtggacagaactctgataacgacgcactcgaactgtataactcttgtaacttcaactctacttccacaagcagcaccgctagctcgacctcgagctcaggttccagctcgagcacaggctcgactactagtaccagtgatagtggttcagtgacgacttctgtgccggttactactacgatttcttccactggagaatctaccactgtcgctgtcagcacagtcaccacgagctctcctactgtctcgcccacgggcggtgcctcaggcgcatctgcgcctggcgtgctcgccggtgtgatcgctggtctcgttgcccttgtctga

SEQ ID NO: 29804 - protein, 188 aa, Muscodor strobelii
  misc_feature: SGI Peptide ID NO. 570240
  misc_feature (1)..(168): NCBI GI: 169615515 Blast Desc: SNOG_10915 [Phaeosphaeria nodorum SN15] gi|111060294|gb|EAT81414.1| SNOG_10915 [Phaeosphaeria nodorum SN15]
  misc_feature (20)..(121): NCBI GI: 189210864 Blast Desc: [Pyrenophora tritici-repentis Pt-1C-BFP] gi|187977856|gb|EDU44482.1| [Pyrenophora tritici-repentis Pt-1C-BFP]
  misc_feature (3)..(107): NCBI GI: 71023065 Blast Desc: UM05615.1 [Ustilago maydis 521] gi|46101248|gb|EAK86481.1| UM05615.1 [Ustilago maydis 521]
  misc_feature (12)..(158): NCBI GI: 46126673 Blast Desc: FG07714.1 [Gibberella zeae PH-1]
  misc_feature (19)..(124): NCBI GI: 256722433 Blast Desc: NECHADRAFT_77188 [Nectria haematococca mpVI 77-13-4]
  misc_feature (1)..(78): NCBI GI: 145251956 Blast Desc: An16g01780 [Aspergillus niger] gi|134083032|emb|CAK42795.1| protein product [Aspergillus niger]
  misc_feature (7)..(124): NCBI GI: 115443256 Blast Desc: [Aspergillus terreus NIH2624] gi|114188304|gb|EAU30004.1| [Aspergillus terreus NIH2624]
  misc_feature (1)..(126): NCBI GI: 70985288 Blast Desc: GPI anchored protein [Aspergillus fumigatus Af293] gi|66845778|gb|EAL86112.1| GPI anchored protein, [Aspergillus fumigatus Af293] gi|159125927|gb|EDP51043.1| GPI anchored A1163]
  misc_feature: Useful for introducing or modulating the production of volatile compounds
MQFKTALLALTIATLGATEDIDANDLPSACVSTCQPAIDLTGRCDRDDNDNDATYQSCVCGADGAAQNLQDCASCVTNNGGGQNSDNDALELYNSCNFNSTSTSSTASSTSSSGSSSSTGSTTSTSDSGSVTTSVPVTTTISSTGESTTVAVSTVTTSSPTVSPTGGASGASAPGVLAGVIAGLVALV

SEQ ID NO: 29805 - DNA, 796 bp, Muscodor strobelii
  misc_feature: SGI EST ID NO. CUFF.70431.0
  misc_feature: Variant of the nucleotide sequence at SEQ ID NO 29803
ctcaccatccaagaacaaacaacaccgttagacatcgacaattcgaattcaatatccaaatccaaaatgcagttcaaaaccgccctcctagccctaaccatcgccactctcggcgcaacagaggacatcgacgccaatgatctgccctcggcctgcgtctcaacatgccagcccgccatcgacttaacgggtagatgcgatcgtgacgacaacgacaacgacgccacctatcagtcttgcgtctgtggtgccgacggggccgcacaaaatctgcaggattgtgctagttgcgttacgaacaatggaggtggacagaactctgataacgacgcactcgaactgtataactcttgtaacttcaactctacttccacaagcagcaccgctagctcgacctcgagctcaggttccagctcgagcacaggctcgactactagtaccagtgatagtggttcagtgacgacttctgtgccggttactactacgatttcttccactggagaatctaccactgtcgctgtcagcacagtcaccacgagctctcctactgtctcgcccacgggcggtgcctcaggcgcatctgcgcctggcgtgctcgccggtgtgatcgctggtctcgttgcccttgtctgaaggatttggcgaagagagtatggcgaaacatagtagctggggaaggagaacatgtgcttgtttggggataagtgtagcttgtttatgattacgattggtgtcgaatagcatcatgattatgcccaaggtagccatgaattaatattgtttatgcaagactggc

SEQ ID NO: 29806 - DNA, 1668 bp, Muscodor strobelii
  misc_feature: SGI cDNA ID NO. 570241
  misc_feature: Encodes the peptide sequence at SEQ ID NO 29807
atgccgcctcgtaggaaatcaactaccaatgctgcctctcagcccacgagaagctcgatgagaacccgccgccagtctgctctgcagaaggaagcagaggcagctgtgtcttcgggtgatgagttggctcaaccagacgtgcccaccacaagtaatccagaacagttatcagaccaaagtacgatcgtggcccatccaatagaccgtactatcatcgccagccacccatcagaggtatcagacgaaaacaccatcgttacccattccacggaccagactatttccatgtcagacgagaacacaatcgtcaccaacacaacagatcgtaacatttccgccggcaaccatgaaatagacgaagcgcttctggcagttgtcaacaaaatggcatcgtcgatacccgacaataataggcggtccaaagagggttcgatcacaaagtctgagaatcttacaaccgacgaaccgcgcagaggcactccaatcaagaagcaggaattcgaagttctaaccactgcgccaggagaagaagacgaactctccgcaccgagccctaagagagccaagcctgtgcctaagacgacgcagtacggctcttttcggaagagtcggtcgaagtgggataatccggatgaaatgctcactaacccgaaggcaccactcgcctttgccaacctcagggatctcctgtgtgaccccatgacttgggaagttttatcagaccaggagaagcagcaggtcctatctcagtttcctgatgatacagagatagaagacgcaggtatggtcacagctcgaccaaatatcatggcgctgcgaaacaataacaatttccgacatgatgctgcgcgatatcaagaaggcttgaaagatggtcagcacgatgtggaatggattcagcaagcccaggctgcgcatagtaggcgtgaagtcggcttttatgatgaattcattgcttctgatttcaaagagaaatgggacattgcgcatccgggccaagagagggctggagtggtagagaacggagatgatgccattgaggttcctaagcaagaatgtgatagagacctcaacttcctggaccaggcagaggccgagtcattcgaaagtggaaacggccgtgtcaagaaaatcgatgctgcacagcatcgagaaggacccacgcaagataacgcagtcagctcggacgctcaggaagaaatcgtcgcagagagaaaagatagagaaatcttctcctcgaagaaaactgattatggaccgccagagaaatctattgtgaaacaaacgatagacgagcggaacaattttgaagtgctgcagaatgcccctgctgatggtattaaggaactctctgccaacaacaacgatggtcaatctcaatctgcgagcctgaatgataaagaaaccgtcatgcgagatgagccagagaagacagtcacacagtctgcccagcaagtcctcatgcaggatgatacgactactgccatggatacaacgtttcctgatcgcgatgtaatgcagggtttcaaagtacagagctcacaggccgagcctacttcggctcaacctcctcctgagacaatggaaggcattcagggccctggcgtagatcgtgcgaccgtgctagacgcacagaaagaccaacggcaagacagttctggtagctag

SEQ ID NO: 29807 - protein, 555 aa, Muscodor strobelii
  misc_feature: SGI Peptide ID NO. 570241
  misc_feature (205)..(331): NCBI GI: 46123711 Blast Desc: FG06233.1 [Gibberella zeae PH-1]
  misc_feature (206)..(333): NCBI GI: 116199231 Blast Desc: CHGG_07771 [Chaetomium globosum CBS 148.51] gi|88179050|gb|EAQ86518.1| CHGG_07771 [Chaetomium globosum CBS 148.51]
  misc_feature (162)..(344): NCBI GI: 256731108 Blast Desc: NECHADRAFT_85019 [Nectria haematococca mpVI 77-13-4]
  misc_feature (206)..(333): NCBI GI: 28949947 Blast Desc: related to proline-rich early nodulin [Neurospora crassa]
  misc_feature (206)..(333): NCBI GI: 164424719 Blast Desc: NCU06707 [Neurospora crassa OR74A] gi|157070632|gb|EAA31651.2| [Neurospora crassa OR74A]
  misc_feature (182)..(331): NCBI GI: 261351562 Blast Desc: conserved [Verticillium albo-atrum VaMs.102]
  misc_feature (183)..(326): NCBI GI: 39944076 Blast Desc: MGG_04049 [Magnaporthe grisea 70-15] gi|145014774|gb|EDJ99342.1| MGG_04049 [Magnaporthe grisea 70-15]
  misc_feature (201)..(326): NCBI GI: 145250327 Blast Desc: An15g01370 [Aspergillus niger] gi|134082196|emb|CAL00951.1| protein product [Aspergillus niger]
  misc_feature (203)..(326): NCBI GI: 255945957 Blast Desc: Pc20g12610 [Penicillium chrysogenum Wisconsin 54-1255] gi|211588481|emb|CAP86590.1| Pc20g12610 [Penicillium chrysogenum Wisconsin 54-1255]
  misc_feature (226)..(322): NCBI GI: 171692811 Blast Desc: protein product [Podospora anserina] gi|170946354|emb|CAP73155.1| protein product [Podospora anserina]
MPPRRKSTTNAASQPTRSSMRTRRQSALQKEAEAAVSSGDELAQPDVPTTSNPEQLSDQSTIVAHPIDRTIIASHPSEVSDENTIVTHSTDQTISMSDENTIVTNTTDRNISAGNHEIDEALLAVVNKMASSIPDNNRRSKEGSITKSENLTTDEPRRGTPIKKQEFEVLTTAPGEEDELSAPSPKRAKPVPKTTQYGSFRKSRSKWDNPDEMLTNPKAPLAFANLRDLLCDPMTWEVLSDQEKQQVLSQFPDDTEIEDAGMVTARPNIMALRNNNNFRHDAARYQEGLKDGQHDVEWIQQAQAAHSRREVGFYDEFIASDFKEKWDIAHPGQERAGVVENGDDAIEVPKQECDRDLNFLDQAEAESFESGNGRVKKIDAAQHREGPTQDNAVSSDAQEEIVAERKDREIFSSKKTDYGPPEKSIVKQTIDERNNFEVLQNAPADGIKELSANNNDGQSQSASLNDKETVMRDEPEKTVTQSAQQVLMQDDTTTAMDTTFPDRDVMQGFKVQSSQAEPTSAQPPPETMEGIQGPGVDRATVLDAQKDQRQDSSGS

SEQ ID NO: 29808 - DNA, 2231 bp, Muscodor strobelii
  misc_feature: SGI EST ID NO. CUFF.70435.0
  misc_feature: Variant of the nucleotide sequence at SEQ ID NO 29806
cgaagttctaaccactgcgccaggagaagaagacgaactctccgcaccgagccctaagagagccaagcctgtgcctaagacgacgcagtacggctcttttcggaagagtcggtcgaagtgggataatccggatgaaatgctcactaacccgaaggcaccactcgcctttgccaacctcagggatctcctgtgtgaccccatgacttgggaagttttatcagaccaggagaagcagcaggtcctatctcagtttcctgatgatacagagatagaagacgcaggtatggtcacagctcgaccaaatatcatggcgctgcgaaacaataacaatttccgacatgatgctgcgcgatatcaagaaggcttgaaagatggtcagcacgatgtggaatggattcagcaagcccaggctgcgcatagtaggcgtgaagtcggcttttatgatgaattcattgcttctgatttcaaagagaaatgggacattgcgcatccgggccaagagagggctggagtggtagagaacggagatgatgccattgaggttcctaagcaagaatgtgatagagacctcaacttcctggaccaggcagaggccgagtcattcgaaagtggaaacggccgtgtcaagaaaatcgatgctgcacagcatcgagaaggacccacgcaagataacgcagtcagctcggacgctcaggaagaaatcgtcgcagagagaaaagatagagaaatcttctcctcgaagaaaactgattatggaccgccagagaaatctattgtgaaacaaacgatagacgagcggaacaattttgaagtgctgcagaatgcccctgctgatggtattaaggaactctctgccaacaacaacgatggtcaatctcaatctgcgagcctgaatgataaagaaaccgtcatgcgagatgagccagagaagacagtcacacagtctgcccagcaagtcctcatgcaggatgatacgactactgccatggatacaacgtttcctgatcgcgatgtaatgcagggtttcaaagtacagagctcacaggccgagcctacttcggctcaacctcctcctgagacaatggaaggcattcagggccctggcgtagatcgtgcgaccgtgctagacgcacagaaagaccaacggcaagacagttctggtagctaggaacttacgccagagaagcgagaattgtttgaccgcattcggaagctgaagggcatgaagtcttacttggtaacggcacgcaatgaaaatctcagttacaaaaaaacagcagaacgtatgagattaaaagatccagcattgttttcggagtttcagaatttattactcggcaagagaagagctattgacgttggagttgccccaaaacatcaggccgactcaagcttctggacagactacgtcctctctgagaagcaaaaggctgactagtggacatttcatgatgcttgcaacgggacacgggagttggatttttctgatcgcgatgataatgatctgccgaagaacaagagcagacatagtcgacttgcagctgagagaaggtggaaaaaaggcgagaaaactgaatggtacatgggagaggacgagctcaacgagaaaagacgcaaaaagtcaattgcaattcacaaagaaaagctggcacaactcgccgaagaggaaaagaggcttccgaggaagattgatgatttcctgtcaaacatcaaccaaagctcaaacgttgatcagccacaggaaacagtcaatctagggggtggtatggcacgaaacaatattactgcagcaggcgcaggcagcacagacgaagtagtgaggaatcgccctattcgacctcgtttcacgcaaggaaatctatatgatggcctaggatctgcggatgacgagggcccgtgaaagactcggccagaattgtcaccaacactgaagtggcaccttgctctggctgctctgcattggtatggtaatggagcatacaggatagatattcttcttctttcctacgattgtttgctttgcgaaatggttgggaattggagaaagaacgtcagtgctcatgacacaatacggataaaaagacgggaaaggcgtagtatgagataccctgggccgactagaccgtctctctcccaacaaaataaatgattgcacacattgtgttccatgttctatgatatgacatacctccctttactacgcgccatgtgtagctgtaggtgcaaaaggc

SEQ ID NO: 29809 - DNA, 651 bp, Muscodor strobelii
  misc_feature: SGI cDNA ID NO. 570242
  misc_feature: Encodes the peptide sequence at SEQ ID NO 29810
atgattcgatcaacacagattgcgcgggtcaccgatggcctaatgctctgcgcatccgtcgacgacgaacaaagcgaagcaagcctctccgaagtcaagtcgcaaatcaagataatcctgcgtcgcttaaaccgcaactcagaacaacaagccagtatcgagagcgggaactacacactccactatttaatagtcaacgaaatagtatacatatgcatatgcgaccgatcctacccgcgaaagctggcattcacctacctctccgacatctccaccgaattcagcaactcctacaacacctcccaactcctatccccctccctacgcccctacgccttcatggagttcgacactttcatcaaccgcacaaagtccacctacgccgatacccgcgcgacgcagaaccttgacaagctgaacgatgagttacgggacgtcaccaaagtcatgacgaagaatatcgaggatctactttatagaggggagggcttggaaagaatgggtgagatgagcggtagactgaaagatgacgccaggaagtatcgaaaggctgctgtgaggattaattgggagttgctggtcaagcagtatgcgcccataggcgtttttggtctggtggtcatactgtttgtgtggtttcgattcttctga

SEQ ID NO: 29810 - protein, 216 aa, Muscodor strobelii
  misc_feature: SGI Peptide ID NO. 570242
  misc_feature (132)..(215): Pfam Id: PF00957 Pfam Desc: Synaptobrevin
  misc_feature (132)..(212): Pfam Id: PF00957 Pfam Desc: Synaptobrevin
  misc_feature (1)..(216): NCBI GI: 156048072 Blast Desc: SS1G_08767 [Sclerotinia sclerotiorum 1980] gi|154693164|gb|EDN92902.1| SS1G_08767 [Sclerotinia sclerotiorum 1980]
  misc_feature (1)..(216): NCBI GI: 116199233 Blast Desc: CHGG_07772 [Chaetomium globosum CBS 148.51] gi|88179051|gb|EAQ86519.1| CHGG_07772 [Chaetomium globosum CBS 148.51]
  misc_feature (1)..(216): NCBI GI: 39944078 Blast Desc: conserved [Magnaporthe grisea 70-15] gi|58257475|gb|AAW69359.1| protein transport protein SEC22-like protein [Magnaporthe grisea] gi|145014775|gb|EDJ99343.1| grisea
  misc_feature (1)..(204): NCBI GI: 154305878 Blast Desc: BC1G_08170 [Botryotinia fuckeliana B05.10] gi|150853055|gb|EDN28247.1| BC1G_08170 [Botryotinia fuckeliana B05.10]
  misc_feature (1)..(216): NCBI GI: 85100044 Blast Desc: protein transport protein sec22 [Neurospora crassa OR74A] gi|28922419|gb|EAA31652.1| protein transport protein sec22 [Neurospora crassa OR74A] gi|28949948|emb|CAD70934.1| SEC22
  misc_feature (1)..(216): NCBI GI: 145250329 Blast Desc: An15g01380 [Aspergillus niger] gi|134082197|emb|CAL00952.1| protein product [Aspergillus niger]
  misc_feature (1)..(216): NCBI GI: 255945959 Blast Desc: Pc20g12620 [Penicillium chrysogenum Wisconsin 54-1255] gi|211588482|emb|CAP86591.1| Pc20g12620 [Penicillium chrysogenum Wisconsin 54-1255]
  misc_feature (1)..(216): NCBI GI: 238494204 Blast Desc: protein transport protein sec22 [Aspergillus flavus NRRL3357] gi|117166101|dbj|BAF36383.1| v-SNARE [Aspergillus oryzae] gi|220694988|gb|EED51331.1| protein transport protein
  misc_feature (1)..(216): NCBI GI: 242781077 Blast Desc: protein transport protein sec22 [Talaromyces stipitatus ATCC 10500] gi|218719875|gb|EED19294.1| protein transport protein sec22 [Talaromyces stipitatus ATCC 10500]
  misc_feature (1)..(216): NCBI GI: 70984292 Blast Desc: protein transport protein sec22 [Aspergillus fumigatus Af293] gi|66845289|gb|EAL85624.1| protein transport protein sec22 [Aspergillus fumigatus Af293] gi|159122449|gb|EDP47570.1| protein
MIRSTQIARVTDGLMLCASVDDEQSEASLSEVKSQIKIILRRLNRNSEQQASIESGNYTLHYLIVNEIVYICICDRSYPRKLAFTYLSDISTEFSNSYNTSQLLSPSLRPYAFMEFDTFINRTKSTYADTRATQNLDKLNDELRDVTKVMTKNIEDLLYRGEGLERMGEMSGRLKDDARKYRKAAVRINWELLVKQYAPIGVFGLVVILFVWFRFF

SEQ ID NO: 29811 - DNA, 4035 bp, Muscodor strobelii
  misc_feature: SGI EST ID NO. CUFF.70683.0
  misc_feature: Variant of the nucleotide sequence at SEQ ID NO 29809
ctaagcctataaaggccaccatcatccagtacctagcattgaaactatgacagcagttgattcgtggctgccactgtgtcccctgacgttggcttgaacatcgcttcaaagcctcaagtccaggtcggccggttttggacagctcttcttcattattcacatcaatactcattcaatgttactgacgctgtgaatctttacaccgatcatttctctaacgtctcggtttccccaaataaaggaagcggtagatatcgcgaatatttcattcaacagctgatcaataacccaatctcagagtctctacgtcactcgcgagcgcctgtggtttgagtccagacacgcagaccaccaagctctttatccttctcagacatcgccagcatctaccgttttattcagcataacacacactatactgggagatactcgcgaatatgattcgatcaacacagattgcgcgggtcaccgatggcctaatgctctgcgcatccgtcgacgacgaacaaagcgaagcaagcctctccgaagtcaagtcgcaaatcaagataatcctgcgtcgcttaaaccgcaactcagaacaacaagccagtatcgagagcgggaactacacactccactatttaatagtcaacgaaatagtatacatatgcatatgcgaccgatcctacccgcgaaagctggcattcacctacctctccgacatctccaccgaattcagcaactcctacaacacctcccaactcctatccccctccctacgcccctacgccttcatggagttcgacactttcatcaaccgcacaaagtccacctacgccgatacccgcgcgacgcagaaccttgacaagctgaacgatgagttacgggacgtcaccaaagtcatgacgaagaatatcgaggatctactttatagaggggagggcttggaaagaatgggtgagatgagcggtagactgaaagatgacgccaggaagtatcgaaaggctgctgtgaggattaattgggagttgctggtcaagcagtatgcgcccataggcgtttttggtctggtggtcatactgtttgtgtggtttcgattcttctgagcgtagcctaatcacagattggtagggagggtaggtaagggtcttgatgggtagatgagtgtactgaggacgtaatgacgagtactgctgccgagaggactatcttagctacgtacatccagtccgactctaatatgggagtgttgtcaactcggtagtcatcgggtagcgatgcagttgttgtagatgaacagatatcagtataatcgcgtgcgattcgatgtatgaaccaaatcaaagcactgtgtccgggtcttgacctgcttacgtcaaaataattcacgattcctattcgcaatatcccaatttgccatattttgatagatcattgcaaagtcgtattcaaccaccacgtagtcatagactggtataacatcgccaaaacgccatgctcgctcctatcgctaggcagccaataattctatgtacacaaatgattagccccagttaccttgacataatgtcatcgtcggttcgtcgtatgccatttgaagttgttcgctagcgcctattcgttgtccccaatgcttgcttagtctggtatgtcctagacgacagtttgccggtagtcgcattacataatagcacaattcgatgttttgggcgcgacatccgtcagattgggtagcaggctggcatggctccattccagatgttgctgtaagtcagccaccgtctcgaagccctgttcgtcctgggtatatctcactcgatctatatccccatcgccctgctcctcgtagaaatagtcgtcacacagcggacatagcaacggggcttgccactctccaggctccggtgggagatggtttgcaatagctatgggcgggaagagaataatcttctcctccccctgcctttccgtgctcggtattgcgtctacgaaacccgcctccccgctcgtccgcaactcgatatcgaggggtccactctggctgtgattattagtccgcgaatatgtctgtgattggtgacgcgaatgtgtttggcgatgaggactaatttgtgggtttgtgaatcctgttgcagcccagttctcgctcatgctaggcgctgaagatgcagcgcgctgccgtgtactcggtatggaacgtaagtcctcccatactaagaatccatcgcaaaaatcgcatacgaaagcaatatcgtgattgctagtgccgaaacgttggaatactcctgttgaattacatgccgctatctcgacgttagaatttggctcgggatgccgtcccattggagtaatatccctctgcggataacgttgagactgtgagcgaggttgaggttgagtttggttctgccgtacttgctgctgctgactacgccagacaagcaatgcacccaaacaccgtggtcgcgagttcgccgtttccaaatcatcacgtatacgccgtgccgcgcggcattgtgcccggtgtagctctcgccgtaaccactttgtctggtgcgccaactcgggatctaatgaaccacctatccgtatccaatccttgaagctctgtgagtgttgcgcaaagcgtgtgcatagttcccgcaactcgtctaagctttcggctgtgactattgttagctcgtcgaatgaaggtttgatgatgtaaatgatatgctcatgcccaattacttcatgagagtatctcattcatgcactcataagtgaggattggggagatcttcacaccacttggtttgcgcatttaggtcttaggttgtttgacctccatcgtcacataagtccatcactaatccatgtagaacactttgacaccggaagaacaaaatgacacatacgtttccgatcattctcataataaaagcgaccattgacaagggcaggcagctcctgaaaatccctcttagcctcgtccagcgtctcctcaagcagacgcagttgctcaaattcgggcggcccccacgcccgtttgtcggcgaacatcaggacgcgcagggcatcttggaccgaattcgcgacgatggccagcagcgagcctaccgtctcgacgacggtgccgccgctgttgctcatatccgtgcatatacgcccctggaataatggctggcgatacgacctatcgttgtgtcctctggatcctatctgtggtcttcctcctcgtgtgagccaggtggttccaagcttggctgctgggtaagtccctttgcgcacgtggccggtagttgatacagcgtctggattaggtcaggtgtattgatctggcttcaaaaattaagttttgctttgatctttgataattactatagaatgaacgtagtgaattatataattgctgtgatcgccaatgaagctctcgaagaactgcacacttgacgtctgcgcgtaccttgcgtagtcgagtgggggctaggccaggcacgggtatggtgctggggccctgtagggcaggtaggactgtcagcaatacgactttcagatcagtgggcggcctcagctgggaccgaacaattgacggccgctgagctatcgtgctgcctactcaattgatgcgatacgaatgagtcgtcatctctgacacgatgtagcggtagatcgacaagtgttgtacgcgtgaaagagctggtgataagaaagttgttggcgttgacagatactacctctagatgaaccttgtgcctggaccacccgccaggtacctggctcagcgggctgttctgattgagtttttgcagctgtcctgtgaagatcaccccgggttaatgcttgaggattgtttgaaacgacagcaaaacagcccaaggaggaagttggtagaacgcaatacaaggtgcaatgacttttggctctatcttttcgaacatttctacctatttcacagaaatcaacaacccacaattgcatctctgacctagagagccacgaaagattacctgactcgcctgacacccccaagttacatgttctggctgatgcaatgctgtaattcgcccctgc

SEQ ID NO: 29812 - DNA, 1218 bp, Muscodor strobelii
  misc_feature: SGI cDNA ID NO. 570243
  misc_feature: Encodes the peptide sequence at SEQ ID NO 29813
atgagcaacagcggcggcaccgtcgtcgagacggtaggctcgctgctggccatcgtcgcgaattcggtccaagatgccctgcgcgtcctgatgttcgccgacaaacgggcgtgggggccgcccgaatttgagcaactgcgtctgcttgaggagacgctggacgaggctaagagggattttcaggagctgcctgcccttgtcaatggtcgcttttattatgagaatgatcggaaacccgaaagcttagacgagttgcgggaactatgcacacgctttgcgcaacactcacagagcttcaaggattggatacggataggtggttcattagatcccgagttggcgcaccagacaaagtggttacggcgagagctacaccgggcacaatgccgcgcggcacggcgtatacgtgatgatttggaaacggcgaactcgcgaccacggtgtttgggtgcattgcttgtctggcgtagtcagcagcagcaagtacggcagaaccaaactcaacctcaacctcgctcacagtctcaacgttatccgcagagggatattactccaatgggacggcatcccgagccaaattctaacgtcgagatagcggcatgtaattcaacaggagtattccaacgtttcggcactagcaatcacgatattgctttcgtatgcgatttttgcgatggattcttagtatgggaggacttacgttccataccgagtacacggcagcgcgctgcatcttcagcgcctagcatgagcgagaactgggctgcaacaggattcacaaacccacaaattagtcctcatcgccaaacacattcgcgtcaccaatcacagacatattcgcggactaataatcacagccagagtggacccctcgatatcgagttgcggacgagcggggaggcgggtttcgtagacgcaataccgagcacggaaaggcagggggaggagaagattattctcttcccgcccatagctattgcaaaccatctcccaccggagcctggagagtggcaagccccgttgctatgtccgctgtgtgacgactatttctacgaggagcagggcgatggggatatagatcgagtgagatatacccaggacgaacagggcttcgagacggtggctgacttacagcaacatctggaatggagccatgccagcctgctacccaatctgacggatgtcgcgcccaaaacatcgaattgtgctattatgtaa

SEQ ID NO: 29813 - protein, 405 aa, Muscodor strobelii
  misc_feature: SGI Peptide ID NO. 570243
  misc_feature (10)..(405): NCBI GI: 164424717 Blast Desc: NCU06709 [Neurospora crassa OR74A] gi|157070631|gb|EAA31653.2| [Neurospora crassa OR74A]
  misc_feature (22)..(405): NCBI GI: 145607183 Blast Desc: MGG_04051 [Magnaporthe grisea 70-15] gi|145014776|gb|EDJ99344.1| MGG_04051 [Magnaporthe grisea 70-15]
  misc_feature (9)..(405): NCBI GI: 256731505 Blast Desc: NECHADRAFT_105377 [Nectria haematococca mpVI 77-13-4]
  misc_feature (9)..(405): NCBI GI: 46121693 Blast Desc: FG05225.1 [Gibberella zeae PH-1]
  misc_feature (4)..(239): NCBI GI: 171692797 Blast Desc: protein product [Podospora anserina] gi|170946347|emb|CAP73148.1| protein product [Podospora anserina]
  misc_feature (9)..(156): NCBI GI: 116199235 Blast Desc: CHGG_07773 [Chaetomium globosum CBS 148.51] gi|88179052|gb|EAQ86520.1| CHGG_07773 [Chaetomium globosum CBS 148.51]
  misc_feature (10)..(159): NCBI GI: 261351560 Blast Desc: conserved [Verticillium albo-atrum VaMs.102]
  misc_feature (198)..(405): NCBI GI: 116199235 Blast Desc: CHGG_07773 [Chaetomium globosum CBS 148.51] gi|88179052|gb|EAQ86520.1| CHGG_07773 [Chaetomium globosum CBS 148.51]
  misc_feature (325)..(405): NCBI GI: 171692797 Blast Desc: protein product [Podospora anserina] gi|170946347|emb|CAP73148.1| protein product [Podospora anserina]
MSNSGGTVVETVGSLLAIVANSVQDALRVLMFADKRAWGPPEFEQLRLLEETLDEAKRDFQELPALVNGRFYYENDRKPESLDELRELCTRFAQHSQSFKDWIRIGGSLDPELAHQTKWLRRELHRAQCRAARRIRDDLETANSRPRCLGALLVWRSQQQQVRQNQTQPQPRSQSQRYPQRDITPMGRHPEPNSNVEIAACNSTGVFQRFGTSNHDIAFVCDFCDGFLVWEDLRSIPSTRQRAASSAPSMSENWAATGFTNPQISPHRQTHSRHQSQTYSRTNNHSQSGPLDIELRTSGEAGFVDAIPSTERQGEEKIILFPPIAIANHLPPEPGEWQAPLLCPLCDDYFYEEQGDGDIDRVRYTQDEQGFETVADLQQHLEWSHASLLPNLTDVAPKTSNCAIM

SEQ ID NO: 29814 - DNA, 3925 bp, Muscodor strobelii
  misc_feature: SGI EST ID NO. CUFF.70684.1
  misc_feature: Variant of the nucleotide sequence at SEQ ID NO 29812
gcaggggcgaattacagcattgcatcagccagaacatgtaacttgggggtgtcaggcgagtcaggtaatctttcgtggctctctaggtcagagatgcaattgtgggttgttgatttctgtgaaataggtagaaatgttcgaaaagatagagccaaaagtcattgcaccttgtattgcgttctaccaacttcctccttgggctgttttgctgtcgtttcaaacaatcctcaagcattaacccggggtgatcttcacaggacagctgcaaaaactcaatcagaacagcccgctgagccaggtacctggcgggtggtccaggcacaaggttcatctagaggtagtatctgtcaacgccaacaactttcttatcaccagctctttcacgcgtacaacacttgtcgatctaccgctacatcgtgtcagagatgacgactcattcgtatcgcatcaattgagtaggcagcacgatagctcagcggccgtcaattgttcggtcccagctgaggccgcccactgatctgaaagtcgtattgctgacagtcctacctgccctacagggccccagcaccatacccgtgcctggcctagcccccactcgactacgcaaggtacgcgcagacgtcaagtgtgcagttcttcgagagcttcattggcgatcacagcaattatataattcactacgttcattctatagtaattatcaaagatcaaagcaaaacttaatttttgaagccagatcaatacacctgacctaatccagacgctgtatcaactaccggccacgtgcgcaaagggacttacccagcagccaagcttggaaccacctggctcacacgaggaggaagaccacagataggatccagaggacacaacgataggtcgtatcgccagccattattccaggggcgtatatgcacggatatgagcaacagcggcggcaccgtcgtcgagacggtaggctcgctgctggccatcgtcgcgaattcggtccaagatgccctgcgcgtcctgatgttcgccgacaaacgggcgtgggggccgcccgaatttgagcaactgcgtctgcttgaggagacgctggacgaggctaagagggattttcaggagctgcctgcccttgtcaatggtcgcttttattatgagaatgatcggaaacccgaaagcttagacgagttgcgggaactatgcacacgctttgcgcaacactcacagagcttcaaggattggatacggataggtggttcattagatcccgagttggcgcaccagacaaagtggttacggcgagagctacaccgggcacaatgccgcgcggcacggcgtatacgtgatgatttggaaacggcgaactcgcgaccacggtgtttgggtgcattgcttgtctggcgtagtcagcagcagcaagtacggcagaaccaaactcaacctcaacctcgctcacagtctcaacgttatccgcagagggatattactccaatgggacggcatcccgagccaaattctaacgtcgagatagcggcatgtaattcaacaggagtattccaacgtttcggcactagcaatcacgatattgctttcgtatgcgatttttgcgatggattcttagtatgggaggacttacgttccataccgagtacacggcagcgcgctgcatcttcagcgcctagcatgagcgagaactgggctgcaacaggattcacaaacccacaaattagtcctcatcgccaaacacattcgcgtcaccaatcacagacatattcgcggactaataatcacagccagagtggacccctcgatatcgagttgcggacgagcggggaggcgggtttcgtagacgcaataccgagcacggaaaggcagggggaggagaagattattctcttcccgcccatagctattgcaaaccatctcccaccggagcctggagagtggcaagccccgttgctatgtccgctgtgtgacgactatttctacgaggagcagggcgatggggatatagatcgagtgagatatacccaggacgaacagggcttcgagacggtggctgacttacagcaacatctggaatggagccatgccagcctgctacccaatctgacggatgtcgcgcccaaaacatcgaattgtgctattatgtaatgcgactaccggcaaactgtcgtctaggacataccagactaagcaagcattggggacaacgaataggcgctagcgaacaacttcaaatggcatacgacgaaccgacgatgacattatgtcaaggtaactggggctaatcatttgtgtacatagaattattggctgcctagcgataggagcgagcatggcgttttggcgatgttataccagtctatgactacgtggtggttgaatacgactttgcaatgatctatcaaaatatggcaaattgggatattgcgaataggaatcgtgaattattttgacgtaagcaggtcaagacccggacacagtgctttgatttggttcatacatcgaatcgcacgcgattatactgatatctgttcatctacaacaactgcatcgctacccgatgactaccgagttgacaacactcccatattagagtcggactggatgtacgtagctaagatagtcctctcggcagcagtactcgtcattacgtcctcagtacactcatctacccatcaagacccttacctaccctccctaccaatctgtgattaggctacgctcagaagaatcgaaaccacacaaacagtatgaccaccagaccaaaaacgcctatgggcgcatactgcttgaccagcaactcccaattaatcctcacagcagcctttcgatacttcctggcgtcatctttcagtctaccgctcatctcacccattctttccaagccctcccctctataaagtagatcctcgatattcttcgtcatgactttggtgacgtcccgtaactcatcgttcagcttgtcaaggttctgcgtcgcgcgggtatcggcgtaggtggactttgtgcggttgatgaaagtgtcgaactccatgaaggcgtaggggcgtagggagggggataggagttgggaggtgttgtaggagttgctgaattcggtggagatgtcggagaggtaggtgaatgccagctttcgcgggtaggatcggtcgcatatgcatatgtatactatttcgttgactattaaatagctgggtggttgttagtggacttgggaggtggactggaagagtggggagaaaggggaatgggaacgaactggagtgtgtagttcccgctctcgatactggcttgttgttctgagttgcggtttaagcgacgcaggattatcttgatttgcgacttgacttcggagaggcttgcttcgctttgttcgtcgtcgacggatgcgcagagcattaggcctggcgcattgaatgttagacttcaactccaagatgatcctggaggggcagcttaccatcggtgacccgcgcaatctgtgttgatcgaatcatattcgcgagtatctcccagtatagtgtgtgttatgctgaataaaacggtagatgctggcgatgtctgagaaggataaagagcttggtggtctgcgtgtctggactcaaaccacaggcgctcgcgagtgacgtagagactctgagattgggttattgatcagctgttgaatgaaatattcgcgatatctaccgcttcctttatttggggaaaccgagacgttagagaaatgatcggtgtaaagattcacagcgtcagtaacattgaatgagtattgatgtgaataatgaagaagagctgtccaaaaccggccgacctggacttgaggctttgaagcgatgttcaagccaacgtcaggggacacagtggcagccacgaatcaactgctgtcatagtttcaatgctaggtactggatgatggtggcctttataggcttag

SEQ ID NO: 29815 - DNA, 1983 bp, Muscodor strobelii
  misc_feature: SGI cDNA ID NO. 570244
  misc_feature: Encodes the peptide sequence at SEQ ID NO 29816
atgcctgagcagaatgcacccgccgtgggcgaggccgccggcgaacagggcggccaatccacgttatacaagatcctccaaggtgtcctgatttggggaggtatgcagctactcatgaagcagttcatgggcgggaacaaagcctccacgccagctacgaccaccgacgctgaaggcaatgttgtgcagatacccgccaacaccggcgatatccctgcatatcagcttcggccgagcgcattggacccaggcgcgacctacaaccgcattccccaaaggctcgcgcccatctggcctctcgatagcaccatcgacatcgtcgtcaccctgtctgagaccttcgtgcccaccaagatcgcaagcttgcccaaggagctggtcgtcctcaaggagaccggcttccagctgggcaactacagcgactcccgttctgccgagaccgtatttgatgtgcccgcttcgatacagaacaatggaacactctggggccacttctatattggactgtccggctccgtgcttgatcctaaagagcccggcttcgatcccgctgtagctagccatttctcgtaccctctgacgcaatatgctccgaagaaaaaagtagcaaaaaccagaaatttactggaagagagagtccaagtcgaggaagaggtcgaagaggagccctccggccctatcattgccaacttctaccatcctaacacgagcttgtccttcattcccgatactggccttttggattatcccaaggctgtgcctgccgtccagcaatttcttgtattagagaaaacaggagctcgcgatggcacgggtcaaaatgggtggtattatccaatcctattcgtcaaccaattctggcagatgaagtcgcaaatgatggtactgaacgacaccgtcaaaactcttcccatgcgtcttgacctcaacaatttgagaaactggcagttcaatctcatggctacaatggatatgaactccaaacaggccgcgcgcaacgctgctttcggtggtcctggtctggccggaggaagcgacggtagtgaaatcgatatgatcaaggaagtcctcttggataccaatccctggctccttggaatcactgctgttgtcactgtggctcatcttatcctcgagacactcgccttcggttccgatattgcccactatcgaaagaagaaagacaatgtgggtatctccgtgcgctccattctggccaacgtcttcatgcaggccgttattttcctctacctagtcgacaactcacagaatacgagctggatgattcttggcacccaaggtatcggcattctcatcgaattctggaagattaccacgatcgtgaatgtgaggctgcggccagcaccaccaggatctataattccctatcagatcgtgttcgaagacaagtacaaattgagtgagaccgaggagaagaccaaggagtatgacgaaatcgccttcaagtacatgtatattgcaggcgtgccgctcttgattgcctacgccatctattccctctactacgattcgcacaaatcgtggtactcatacatcatcaccacgctcgtgggctccgtttatgcatatggtttcctaatgatggtaccatctctctacatcaactaccgactgaagagtgtcgcgcatatgcccggaaaggctatgatgtacaagtttttgaacacattcatcgacgacttattcgcattcaccattaagatgccctttttgcaccgtctcgcaactttccgagatgatatcatattctttgtctacctgtaccaacgatatgcttacaaggtagattacactcgtgtcaatgaatttggccagggcggtgacgatgaggagccggtaccagctgaagctaaggctgagcccaagtcattgcccaaggccggttctgtggtggctgacgccactgccagcactgggaagacgagcggagcaagcacgggtggtgcgaagaagaggaaatga

SEQ ID NO: 29816 - protein, 660 aa, Muscodor strobelii
  misc_feature: SGI Peptide ID NO. 570244
  misc_feature (18)..(618): Pfam Id: PF05602 Pfam Desc: Cleft lip and palate transmembrane protein 1 (CLPTM1)
  misc_feature (149)..(618): Pfam Id: PF05602 Pfam Desc: Cleft lip and palate transmembrane protein 1 (CLPTM1)
  misc_feature (1)..(660): NCBI GI: 116199237 Blast Desc: CHGG_07774 [Chaetomium globosum CBS 148.51] gi|88179053|gb|EAQ86521.1| CHGG_07774 [Chaetomium globosum CBS 148.51]
  misc_feature (1)..(660): NCBI GI: 85100052 Blast Desc: NCU06710 [Neurospora crassa OR74A] gi|28922421|gb|EAA31654.1| NCU06710 [Neurospora crassa OR74A] gi|28949950|emb|CAD70936.1| related to cleft lip and palate 1
  misc_feature (24)..(660): NCBI GI: 256731506 Blast Desc: [Nectria haematococca mpVI 77-13-4]
  misc_feature (20)..(660): NCBI GI: 39944082 Blast Desc: MGG_04052 [Magnaporthe grisea 70-15] gi|145014777|gb|EDJ99345.1| MGG_04052 [Magnaporthe grisea 70-15]
  misc_feature (24)..(660): NCBI GI: 46121691 Blast Desc: FG05224.1 [Gibberella zeae PH-1]
  misc_feature (1)..(612): NCBI GI: 171692807 Blast Desc: protein product [Podospora anserina] gi|170946352|emb|CAP73153.1| protein product [Podospora anserina]
  misc_feature (1)..(660): NCBI GI: 154305896 Blast Desc: BC1G_08179 [Botryotinia fuckeliana B05.10] gi|150853064|gb|EDN28256.1| BC1G_08179 [Botryotinia fuckeliana B05.10]
  misc_feature (25)..(614): NCBI GI: 242781101 Blast Desc: CLPTM1 domain protein [Talaromyces stipitatus ATCC 10500] gi|218719880|gb|EED19299.1| CLPTM1 domain protein [Talaromyces stipitatus ATCC 10500]
  misc_feature (8)..(660): NCBI GI: 169597895 Blast Desc: SNOG_01739 [Phaeosphaeria nodorum SN15] gi|111070268|gb|EAT91388.1| SNOG_01739 [Phaeosphaeria nodorum SN15]
  misc_feature (1)..(660): NCBI GI: 212526506 Blast Desc: CLPTM1 domain protein [Penicillium marneffei ATCC 18224] gi|210072808|gb|EEA26895.1| CLPTM1 domain protein [Penicillium marneffei ATCC 18224]
MPEQNAPAVGEAAGEQGGQSTLYKILQGVLIWGGMQLLMKQFMGGNKASTPATTTDAEGNVVQIPANTGDIPAYQLRPSALDPGATYNRIPQRLAPIWPLDSTIDIVVTLSETFVPTKIASLPKELVVLKETGFQLGNYSDSRSAETVFDVPASIQNNGTLWGHFYIGLSGSVLDPKEPGFDPAVASHFSYPLTQYAPKKKVAKTRNLLEERVQVEEEVEEEPSGPIIANFYHPNTSLSFIPDTGLLDYPKAVPAVQQFLVLEKTGARDGTGQNGWYYPILFVNQFWQMKSQMMVLNDTVKTLPMRLDLNNLRNWQFNLMATMDMNSKQAARNAAFGGPGLAGGSDGSEIDMIKEVLLDTNPWLLGITAVVTVAHLILETLAFGSDIAHYRKKKDNVGISVRSILANVFMQAVIFLYLVDNSQNTSWMILGTQGIGILIEFWKITTIVNVRLRPAPPGSIIPYQIVFEDKYKLSETEEKTKEYDEIAFKYMYIAGVPLLIAYAIYSLYYDSHKSWYSYIITTLVGSVYAYGFLMMVPSLYINYRLKSVAHMPGKAMMYKFLNTFIDDLFAFTIKMPFLHRLATFRDDIIFFVYLYQRYAYKVDYTRVNEFGQGGDDEEPVPAEAKAEPKSLPKAGSVVADATASTGKTSGASTGGAKKRK

SEQ ID NO: 29817 - DNA, 2600 bp, Muscodor strobelii
  misc_feature: SGI EST ID NO. CUFF.70448.0
  misc_feature: Variant of the nucleotide sequence at SEQ ID NO 29815
ggggggacatttgggttacattccaggtcgtccaggcacatgaatggcatttcgaggtgctggtgatgtgacgctacgaattccatataccccatgtgcattatgtaacagtggtgagctgtcgtgatttgccctcttccccaacggtctggaatttcatgtgggactagactgtcgacctccgaaatttcgggcgacttttagcacaattctcagatctctgatttgtagcaagtaggacacatctccggatctctgtccgactagagctgaaggactgttgcacgttacagttcctccaactccgagatcttgtagaacaggttctcctgctcccggtctcgcgcttttctcactcctgcgatccgacgactatcttccgcacgcgcgcagccgagtcaaccgtctgcccgcagtcgagtcaaccgtctgcccgcagtcgaagatatgcctgagcagaatgcacccgccgtgggcgaggccgccggcgaacagggcggccaatccacgttatacaagatcctccaaggtgtcctgatttggggaggtatgcagctactcatgaagcagttcatgggcgggaacaaagcctccacgccagctacgaccaccgacgctgaaggcaatgttgtgcagatacccgccaacaccggcgatatccctgcatatcagcttcggccgagcgcattggacccaggcgcgacctacaaccgcattccccaaaggctcgcgcccatctggcctctcgatagcaccatcgacatcgtcgtcaccctgtctgagaccttcgtgcccaccaagatcgcaagcttgcccaaggagctggtcgtcctcaaggagaccggcttccagctgggcaactacagcgactcccgttctgccgagaccgtatttgatgtgcccgcttcgatacagaacaatggaacactctggggccacttctatattggactgtccggctccgtgcttgatcctaaagagcccggcttcgatcccgctgtagctagccatttctcgtaccctctgacgcaatatgctccgaagaaaaaagtagcaaaaaccagaaatttactggaagagagagtccaagtcgaggaagaggtcgaagaggagccctccggccctatcattgccaacttctaccatcctaacacgagcttgtccttcattcccgatactggccttttggattatcccaaggctgtgcctgccgtccagcaatttcttgtattagagaaaacaggagctcgcgatggcacgggtcaaaatgggtggtattatccaatcctattcgtcaaccaattctggcagatgaagtcgcaaatgatggtactgaacgacaccgtcaaaactcttcccatgcgtcttgacctcaacaatttgagaaactggcagttcaatctcatggctacaatggatatgaactccaaacaggccgcgcgcaacgctgctttcggtggtcctggtctggccggaggaagcgacggtagtgaaatcgatatgatcaaggaagtcctcttggataccaatccctggctccttggaatcactgctgttgtcactgtggctcatcttatcctcgagacactcgccttcggttccgatattgcccactatcgaaagaagaaagacaatgtgggtatctccgtgcgctccattctggccaacgtcttcatgcaggccgttattttcctctacctagtcgacaactcacagaatacgagctggatgattcttggcacccaaggtatcggcattctcatcgaattctggaagattaccacgatcgtgaatgtgaggctgcggccagcaccaccaggatctataattccctatcagatcgtgttcgaagacaagtacaaattgagtgagaccgaggagaagaccaaggagtatgacgaaatcgccttcaagtacatgtatattgcaggcgtgccgctcttgattgcctacgccatctattccctctactacgattcgcacaaatcgtggtactcatacatcatcaccacgctcgtgggctccgtttatgcatatggtttcctaatgatggtaccatctctctacatcaactaccgactgaagagtgtcgcgcatatgcccggaaaggctatgatgtacaagtttttgaacacattcatcgacgacttattcgcattcaccattaagatgccctttttgcaccgtctcgcaactttccgagatgatatcatattctttgtctacctgtaccaacgatatgcttacaaggtagattacactcgtgtcaatgaatttggccagggcggtgacgatgaggagccggtaccagctgaagctaaggctgagcccaagtcattgcccaaggccggttctgtggtggctgacgccactgccagcactgggaagacgagcggagcaagcacgggtggtgcgaagaagaggaaatgaagtatttgtcttcgcgtgactcatgaattttcgctatagatcatattgcatacatccctcatacattttagagactcacctttatgacagcaatctagtgtatatagagtaagcaagacttaagattgaacatggcgtatatccaaatctacttgcgaacccaacttgtc

SEQ ID NO: 29818 - DNA, 747 bp, Muscodor strobelii
  misc_feature: SGI cDNA ID NO. 570245
  misc_feature: Reduced expression when VOC is produced
  misc_feature: Encodes the peptide sequence at SEQ ID NO 29819
atgaattccggcggtgtatccccaatgccttcctcaaacgccactcctcgatcttcgactccgtctacgctaaacccaaatgcggcgacacgacagaccaaaatatgtgtctactgcggttccggcgcaggcaaagaccccaagcacatggaagcagcccgcgctctgggaagagcaatggctgagaagaacatcgcattagtatacggcggtggtacggtcggtcttatgggagaagtagccaaaactattgtatcgatatcaggcccttcctcagttcacggtattattcccgaggcgctggtcaagtgggagcgagatgacacatactcggacaagaaggatgccaatggttatcacgttcctgaagagaacgtctacgggcgtaccacagtagtcaaagacatgcaccagagaaaacgtatgatggcgcaggaggtattagcagctggtcctggctcaggcttcatcgctctgccaggcgggttcggtacaatggaggagcttctcgagaccgctacttggaaccagctcggcatccacaacaagggtgtctgtgttctcaacatcgatggtttctacgatggcctactggactggatccacaaggctgtagagcaggagtttgtgaagcccgcgaatgctggcattcttgttactgcgtcggatgctgaaggcgcaatcaaggctctacgtgactacaaagtttccgaggctcgatatggactcgactgggatcagcaatag

SEQ ID NO: 29819 - protein, 248 aa, Muscodor strobelii
  misc_feature: SGI Peptide ID NO. 570245
  misc_feature (77)..(234): Pfam Id: PF03641 Pfam Desc: lysine decarboxylase
  misc_feature (14)..(248): NCBI GI: 116199239 Blast Desc: CHGG_07775 [Chaetomium globosum CBS 148.51] gi|88179054|gb|EAQ86522.1| CHGG_07775 [Chaetomium globosum CBS 148.51]
  misc_feature (9)..(248): NCBI GI: 256731111 Blast Desc: [Nectria haematococca mpVI 77-13-4]
  misc_feature (7)..(248): NCBI GI: 46121689 Blast Desc: FG05223.1 [Gibberella zeae PH-1]
  misc_feature (31)..(248): NCBI GI: 145607185 Blast Desc: MGG_12137 [Magnaporthe grisea 70-15] gi|145014778|gb|EDJ99346.1| MGG_12137 [Magnaporthe grisea 70-15]
  misc_feature (22)..(248): NCBI GI: 85100056 Blast Desc: NCU06711 [Neurospora crassa OR74A] gi|28922422|gb|EAA31655.1| conserved [Neurospora crassa OR74A] gi|28949951|emb|CAD70937.1| conserved [Neurospora crassa]
  misc_feature (31)..(248): NCBI GI: 171692805 Blast Desc: protein product [Podospora anserina] gi|170946351|emb|CAP73152.1| protein product [Podospora anserina]
  misc_feature (1)..(248): NCBI GI: 156048054 Blast Desc: SS1G_08758 [Sclerotinia sclerotiorum 1980] gi|154693155|gb|EDN92893.1| SS1G_08758 [Sclerotinia sclerotiorum 1980]
  misc_feature (1)..(248): NCBI GI: 154305884 Blast Desc: BC1G_08173 [Botryotinia fuckeliana B05.10] gi|150853058|gb|EDN28250.1| BC1G_08173 [Botryotinia fuckeliana B05.10]
  misc_feature (9)..(247): NCBI GI: 261356067 Blast Desc: decarboxylase family protein [Verticillium albo-atrum VaMs.102]
  misc_feature (9)..(247): NCBI GI: 212535516 Blast Desc: conserved [Penicillium marneffei ATCC 18224] gi|210070313|gb|EEA24403.1| conserved [Penicillium marneffei ATCC 18224]
  misc_feature: Useful for introducing or modulating the production of volatile compounds
MNSGGVSPMPSSNATPRSSTPSTLNPNAATRQTKICVYCGSGAGKDPKHMEAARALGRAMAEKNIALVYGGGTVGLMGEVAKTIVSISGPSSVHGIIPEALVKWERDDTYSDKKDANGYHVPEENVYGRTTVVKDMHQRKRMMAQEVLAAGPGSGFIALPGGFGTMEELLETATWNQLGIHNKGVCVLNIDGFYDGLLDWIHKAVEQEFVKPANAGILVTASDAEGAIKALRDYKVSEARYGLDWDQQ

SEQ ID NO: 29820 - DNA, 1611 bp, Muscodor strobelii
  misc_feature: SGI EST ID NO. CUFF.70522.1
  misc_feature: Variant of the nucleotide sequence at SEQ ID NO 29818
gccaggggcagctccgacggcagccctgaggctctgagcctataatctcgccgtctgccgccacgacagctctccccatcttctctagttgcccaacggagatagctggcgccagcattgacaatccaattactatgactatttcgcaccggtaatacccaacccggacacagacatctgtctgcccaatgtctcaggcacgcgacgtcatccatggaagtcatgtggaaacggtcaggtaagcaacagcaagcctaagcctgccacagcgctatggcggaaccggtgggcggaaaccgaaggcaagaaagggaggtctgttactgaaggtgactcaaacaaagttgggtcgacgtcttacatctcgaaaccattaatacacggatgtttccatctctacctcgtccccaactattcaattctcgcctctgtgaccccccatcgttttgtctcatctctcgtcactcctcatcaaacataattagaaatatcttgtttctcatgcgtgttacctgtgcccacgcgagtcctatctgatctgatctacccgtcactaagagtcgcctatcaatgtcgtccgaagtctaagacatctagcttcaataacactccagaagctaaccacagctaaccaattcaccactctgtgcctgaccattgtttgcttctcctcgctttactataaatacgcggcattcccccccttcgaaacaggaagagaagcagccagagcttggacgcaacatgaattccggcggtgtatccccaatgccttcctcaaacgccactcctcgatcttcgactccgtctacgctaaacccaaatgcggcgacacgacagaccaaaatatgtgtctactgcggttccggcgcaggcaaagaccccaagcacatggaagcagcccgcgctctgggaagagcaatggctgagaagaacatcgcattagtatacggcggtggtacggtcggtcttatgggagaagtagccaaaactattgtatcgatatcaggcccttcctcagttcacggtattattcccgaggcgctggtcaagtgggagcgagatgacacatactcggacaagaaggatgccaatggttatcacgttcctgaagagaacgtctacgggcgtaccacagtagtcaaagacatgcaccagagaaaacgtatgatggcgcaggaggtattagcagctggtcctggctcaggcttcatcgctctgccaggcgggttcggtacaatggaggagcttctcgagaccgctacttggaaccagctcggcatccacaacaagggtgtctgtgttctcaacatcgatggtttctacgatggcctactggactggatccacaaggctgtagagcaggagtttgtgaagcccgcgaatgctggcattcttgttactgcgtcggatgctgaaggcgcaatcaaggctctacgtgactacaaagtttccgaggctcgatatggactcgactgggatcagcaataggcgacgatcccttttgtataatagagtacaagtaaacaaaattaaataacaatctcaagcatactactatgacttcctagtgaacatgtatacccattgtggtgacatgtgctattaaca

SEQ ID NO: 29821 - DNA, 345 bp, Muscodor strobelii
  misc_feature: SGI cDNA ID NO. 570246
  misc_feature: Encodes the peptide sequence at SEQ ID NO 29822
cccactgccgccggcgccacgcctgccttcgaatacaagaccttcaacaccgtcgaagaggtctggagagagtacaagtacggcatcgccggccagcccgccgtcgaggctctcgaccgcgagttcggctccaggtggcgtccggagcctcgcggtcggacctggtattccagacgcaaggtcatctgggacaagatcaaggagcacatgaaggagggcttgaccgcggaacaggcggtcagggaagtcgagaatctccgcgacgggggcaccatcaacaagctcatcaggatgttacaggagaagcgcaaggacgacgaccccgaagatgaggtcttgacctag

SEQ ID NO: 29822 - protein, 114 aa, Muscodor strobelii
  misc_feature: SGI Peptide ID NO. 570246
  misc_feature (17)..(104): NCBI GI: 116207886 Blast Desc: CHGG_03236 [Chaetomium globosum CBS 148.51] gi|88183833|gb|EAQ91301.1| CHGG_03236 [Chaetomium globosum CBS 148.51]
  misc_feature (1)..(104): NCBI GI: 119186373 Blast Desc: CIMG_03234 [Coccidioides immitis RS] gi|119188269|ref|XP_001244741.1| CIMG_04182 [Coccidioides immitis RS]
  misc_feature (1)..(104): NCBI GI: 119174562 Blast Desc: CIMG_09263 [Coccidioides immitis RS]
  misc_feature (3)..(105): NCBI GI: 238504678 Blast Desc: AFLA_054450 [Aspergillus flavus NRRL3357] gi|220691041|gb|EED47390.1| AFLA_054450 [Aspergillus flavus NRRL3357]
  misc_feature (8)..(103): NCBI GI: 212541765 Blast Desc: PMAA_039040 [Penicillium marneffei ATCC 18224] gi|210065944|gb|EEA20037.1| PMAA_039040 [Penicillium marneffei ATCC 18224]
  misc_feature (7)..(86): NCBI GI: 261361050 Blast Desc: [Verticillium albo-atrum VaMs.102]
  misc_feature (1)..(87): NCBI GI: 242802247 Blast Desc: short-chain dehydrogenase, [Talaromyces stipitatus ATCC 10500] gi|218717280|gb|EED16701.1| short-chain dehydrogenase, [Talaromyces stipitatus ATCC 10500]
  misc_feature (13)..(101): NCBI GI: 50307169 Blast Desc: protein product [Kluyveromyces lactis] gi|74606388|sp|Q6CR76.1|HOT1_KLULA RecName: Full=High-osmolarity-induced transcription protein 1 KLLA0D11264p
  misc_feature (8)..(86): NCBI GI: 242772986 Blast Desc: TSTA_084150 [Talaromyces stipitatus ATCC 10500] gi|218721766|gb|EED21184.1| TSTA_084150 [Talaromyces stipitatus ATCC 10500]
  misc_feature (17)..(87): NCBI GI: 242763904 Blast Desc: TSTA_067210 [Talaromyces stipitatus ATCC 10500] gi|218723863|gb|EED23280.1| TSTA_067210 [Talaromyces stipitatus ATCC 10500]
PTAAGATPAFEYKTFNTVEEVWREYKYGIAGQPAVEALDREFGSRWRPEPRGRTWYSRRKVIWDKIKEHMKEGLTAEQAVREVENLRDGGTINKLIRMLQEKRKDDDPEDEVLT

SEQ ID NO: 29823 - DNA, 1225 bp, Muscodor strobelii
  misc_feature: SGI EST ID NO. CUFF.70525.0
  misc_feature: Variant of the nucleotide sequence at SEQ ID NO 29821
cccactgccgccggcgccacgcctgccttcgaatacaagaccttcaacaccgtcgaagaggtctggagagagtacaagtacggcatcgccggccagcccgccgtcgaggctctcgaccgcgagttcggctccaggtggcgtccggagcctcgcggtcggacctggtattccagacgcaaggtcatctgggacaagatcaaggagcacatgaaggagggcttgaccgcggaacaggcggtcagggaagtcgagaatctccgcgacgggggcaccatcaacaagctcatcaggatgttacaggagaagcgcaaggacgacgaccccgaagatgaggtcttgacctagcctgaaagacgatccaaggatgcagacgtacgcgcgtctgaagccgaagatgaagatgaagagatggaagctactgacgtagatgatctggcggggaggatgcatccggcgaagtgcaattggaatccccttgagcagagaagagcgagtcgggagtcagcctgtcgggtcgcaagcgagccagaacagattactgaatagcacacgccacgggacttgatcgttccaatagatggcataccccagaacaggagagatgagaagagtcgaacgaaatggtttataggtctggaattggcgttttctgttggttgggaacagcattgataccacgcattgccaggtttgcatttctttgccacgagggagacgactgagcctttgagctctgctagcttttttacgaacagacgaataaaacatggagtgttgcccgacttcctcgtgtccttcaatgctatcccgcgacaccaacaagtgacaggcatacatttaatcctacaatctcgaatgccatgagaactcatgaatgccaattattcccaatgtttcaattggcatggacatatcaaacacatatcgacgtgtactctaacgagcacatcgtgagattcgactgtgccatcttggagctctcaactggtagtatagtgaggtcctcatagctcatcgtctccgagtccatctatccgtcgcccagcactgtacagtccaatgctagtgtgtgcgatacctggaataattaccattggaattcgttctcgcataattctccggtcgaagagccgcatgatactcgaggtagagggtttctatctgtcatgattgcaacctgcatgcatacctgcagacgctcgctttcacttaccgtacgtcactt

SEQ ID NO: 29824 - DNA, 1035 bp, Muscodor strobelii
  misc_feature: SGI cDNA ID NO. 570247
  misc_feature: Encodes the peptide sequence at SEQ ID NO 29825
atgtgcatatcactgtacatccaccgcacaacgcgaaagcatgacaaccgccatcgatgcgtgatcaaccccaagacaggtcaattcttaacattcatggctaatttcttcaaggctggcgtcgagtgtgtgttagctgatagtcgaatcagagatttgaaagcccaaatctctggtctgaagaaaagcccaggctctgatctgtctttgtctccgatcagagaagcggcgctatggtccagattgtatcattacaagtatgtgcaacttgtggctgaggcggtgcttggacagtttgccctgtactgggataaacaattttcgatgggtttgtttccccctcggccgggacgagagctaatgccgctactcaatcgaaagagtgattcctctacacccttccggatggttacctgccttggtgatgatgtcggccccgttccgtggccgatatacttgaagccgtggacgaacttgcaagaacttgttctctcatctgaggaccctgccatcattccatggatgaataacaagagttccaacacctttcaacctagagggggtaacctatgggttgcaaatgaggctatgggactgccggctggaattaaccaatttcctatgcctgctcaacctgttgtacagaactctgcttataggtatcacccaggtgccggtttctatactaatatgcccagagatctctctacgtttctgccagactcttctttggcgccccagcaccggttacctcagtctcagctaccagtaatggagaatcacagttatcaacccgatcagtatccatcatctcatatcaacttacagaaagatgatgcaccttcgaaaaagagagtccgatgggatgacgatgatagtgagctagtagattctggacaactccccaagaggatgaaaccggcaaaagttgttgaaacggaacaggaacccggtgacgaagatcctggttactcagactttgttgaaggtttagatttgtctctgttcgacactgggctattcgactctccataa

SEQ ID NO: 29825 - protein, 344 aa, Muscodor strobelii
  misc_feature: SGI Peptide ID NO. 570247
MCISLYIHRTTRKHDNRHRCVINPKTGQFLTFMANFFKAGVECVLADSRIRDLKAQISGLKKSPGSDLSLSPIREAALWSRLYHYKYVQLVAEAVLGQFALYWDKQFSMGLFPPRPGRELMPLLNRKSDSSTPFRMVTCLGDDVGPVPWPIYLKPWTNLQELVLSSEDPAIIPWMNNKSSNTFQPRGGNLWVANEAMGLPAGINQFPMPAQPVVQNSAYRYHPGAGFYTNMPRDLSTFLPDSSLAPQHRLPQSQLPVMENHSYQPDQYPSSHINLQKDDAPSKKRVRWDDDDSELVDSGQLPKRMKPAKVVETEQEPGDEDPGYSDFVEGLDLSLFDTGLFDSP

SEQ ID NO: 29826 - DNA, 1883 bp, Muscodor strobelii
  misc_feature: SGI EST ID NO. CUFF.70470.0
  misc_feature: Variant of the nucleotide sequence at SEQ ID NO 29824
gacgggagtattctgttcggaggggggatcccgcgccgcgatgccggagcttcgaggtcgattgacagggatgagctccgaacgggatgtcaatgttgcgtttgtggcgttggttaggcgccgagtggttgggactttggtatatctgggtttgattactggaattggcaatccgagtgacgtgacaggtcgaaatcgatatgggcctcatgaccgatgacggcatgcctggatgagagttgatccggcagcctcctcgatttgaagggtgagtgtgatgtcaagtagatgagaggcgagacaaagattagagttcgttgttgacaaagggcccctcgcgagaatagattcatcgacgaaacaatgcctttcataatgattttgactcaaaggcatatagggagcgtacataaaccgcagcgacgagaatcaagcactctttatcatagagcaataccagctcagatctaatgatatcgaagtcgtactaaagctatatttcatttgtgtgctcatttgtctactatactatatcatacttcgactctcatttcctcgatctctcttacatatcccgatactcagcgaagatgtgcatatcactgtacatccaccgcacaacgcgaaagcatgacaaccgccatcgatgcgtgatcaaccccaagacagggctggcgtcgagtgtgtgttagctgatagtcgaatcagagatttgaaagcccaaatctctggtctgaagaaaagcccaggctctgatctgtctttgtctccgatcagagaagcggcgctatggtccagattgtatcattacaagtatgtgcaacttgtggctgaggcggtgcttggacagtttgccctgtactgggataaacaattttcgatgggtttgtttccccctcggccgggacgagagctaatgccgctactcaatcgaaagagtgattcctctacacccttccggatggttacctgccttggtgatgatgtcggccccgttccgtggccgatatacttgaagccgtggacgaacttgcaagaacttgttctctcatctgaggaccctgccatcattccatggatgaataacaagagttccaacacctttcaacctagagggggtaacctatgggttgcaaatgaggctatgggactgccggctggaattaaccaatttcctatgcctgctcaacctgttgtacagaactctgcttataggtatcacccaggtgccggtttctatactaatatgcccagagatctctctacgtttctgccagactcttctttggcgccccagcaccggttacctcagtctcagctaccagtaatggagaatcacagttatcaacccgatcagtatccatcatctcatatcaacttacagaaagatgatgcaccttcgaaaaagagagtccgatgggatgacgatgatagtgagctagtagattctggacaactccccaagaggatgaaagtaggtgatgacacaagccaagtcgcgactatgccgccaagcgtgacaaattaacagccggcaaaagttgttgaaacggaacaggaacccggtgacgaagatcctggttactcagactttgttgaaggtttagatttgtctctgttcgacactgggctattcgactctccataatgctacgattactttggacataaaattgacaggtaggtaggtatttcgttctattatggtatttgtgcgaggccggttgagttgcttttttcgtattttcacttgagtgtaactataggaatacataggagacgaggatggtaggctttaggtatgatcatcgtccttgcgaagtacatcttcagaattaaatcgactagaatgaatcgaactcgaatatcacatcctatcctgg

SEQ ID NO: 29827 - DNA, 660 bp, Muscodor strobelii
  misc_feature: SGI cDNA ID NO. 570248
  misc_feature: Encodes the peptide sequence at SEQ ID NO 29828
atggctgtcacggttgaacgtgaagagcgggaccagctgtttgctgctgctcaaagcggtaacacagtcgacatggacaacttggtccttgcaatcagtactcgagagaatacctccatggagcacatccttgctatgactaaggacgaagatggcactacgattatgcacaaggcagctgaatctggccaagatgctattatcggttattacatgacactcttcgtcaaccgccccgctctccgacaaggcctcttcagcgagaagaacacgatgagagacagcccgatgcacatggcggcccgaaccggccaagcagagttcattcggcagctcgttcaacatggctgcaatatcaataatccaggcgctttcgggtttacagctctgcattacgcagccactggccaaaacacggccctcgttcgcgacttgatccagatccagggaatcaaccttgacgcccagtctatgtctggagagacagcactgcatatcacagcccacaaggatgacctccagacagcacaattgctattaaatagtggagcctctccttacattcgcaacgcctctgatgctactcccggcgcagttgctcgcggaattcgcaactcacgtgtctaccaggagttcgttgccgatggactcccccattga

SEQ ID NO: 29828 - protein, 219 aa, Muscodor strobelii
  misc_feature: SGI Peptide ID NO. 570248
  misc_feature (125)..(158): Pfam Id: PF00023 Pfam Desc: Ankyrin repeat
  misc_feature (159)..(191): Pfam Id: PF00023 Pfam Desc: Ankyrin repeat
  misc_feature (92)..(124): Pfam Id: PF00023 Pfam Desc: Ankyrin repeat
  misc_feature (45)..(200): NCBI GI: 163915035 Blast Desc: LOC100127696 [Xenopus (Silurana) tropicalis] gi|159155189|gb|AAI54710.1| LOC100127696 protein [Xenopus (Silurana) tropicalis]
  misc_feature (45)..(200): NCBI GI: 47124782 Blast Desc: LOC431863 protein [Xenopus laevis]
  misc_feature (46)..(200): NCBI GI: 61098420 Blast Desc: ankyrin repeat domain 52 [Gallus gallus] gi|82197851|sp|Q5ZLC8.1|ANR52_CHICK RecName: Full=Serine/threonine-protein phosphatase 6 regulatory ankyrin C;
  misc_feature (47)..(216): NCBI GI: 123501072 Blast Desc: ankyrin repeat protein [Trichomonas vaginalis G3] gi|121910936|gb|EAY15776.1| ankyrin repeat protein, [Trichomonas vaginalis G3]
  misc_feature (47)..(200): NCBI GI: 194040779 Blast Desc: : similar to Ankyrin repeat domain-containing protein 28 (Phosphatase interactor targeting protein hnRNP K) (PITK) [Sus scrofa]
  misc_feature (47)..(200): NCBI GI: 194663837 Blast Desc: : similar to Ankyrin repeat domain-containing protein 28 (Phosphatase interactor targeting protein hnRNP K) (PITK) [Bos taurus]
  misc_feature (48)..(183): NCBI GI: 123508612 Blast Desc: [Trichomonas vaginalis G3] gi|121912722|gb|EAY17540.1| conserved [Trichomonas vaginalis G3]
  misc_feature (47)..(200): NCBI GI: 224045341 Blast Desc: : similar to KIAA0379 protein [Taeniopygia guttata]
  misc_feature (47)..(200): NCBI GI: 118086012 Blast Desc: : similar to KIAA0379 protein [Gallus gallus]
  misc_feature (47)..(200): NCBI GI: 109503738 Blast Desc: : similar to Ankyrin repeat domain-containing protein 28 isoform 2 [Rattus norvegicus]
  misc_feature (48)..(200): SWISSPROT Homolog: EC 2.7.11.1 Non-specific serine/threonine protein kinase
MAVTVEREERDQLFAAAQSGNTVDMDNLVLAISTRENTSMEHILAMTKDEDGTTIMHKAAESGQDAIIGYYMTLFVNRPALRQGLFSEKNTMRDSPMHMAARTGQAEFIRQLVQHGCNINNPGAFGFTALHYAATGQNTALVRDLIQIQGINLDAQSMSGETALHITAHKDDLQTAQLLLNSGASPYIRNASDATPGAVARGIRNSRVYQEFVADGLPH

SEQ ID NO: 29829 - DNA, 636 bp, Muscodor strobelii
  misc_feature: SGI cDNA ID NO. 570249
  misc_feature: Encodes the peptide sequence at SEQ ID NO 29830
atggcaacagaaccagtcacccgtttcggcctagtgttatttccgggcttccaggcattggatgtattcggccccatggatgcgctcaacgtcctctccggaacgaaaccgcttacattatcagtcatcgctgcgacattagatccggtaccgacaaagctcgaagacagtcacactcgaatcggccagaccgtcgtgccgacgcatacttttgataactgccctcaggacatcgaagttctccttgtccctggtggacagggtactcgggtggagccaattgcggcacctgtccgtgaatttgtcaagaagatttatcctaagttgaaatatctcttgacggtctgcacgggcagtatcgttgtagcgcagaccggactcctagacggaaggcgcgcaacttcgaataagcgacgaatggaactggcaatcagcgagggtcccaatgtccaatgggttcgtaaggcgcgatgggttgtcgatggcaacatctggacgagctcgggtatctctgcagggactgatatgatgtatgcctttattgcagatcagtatggtgaagacacagcaaaggaactcgctcacaattctgaatacattcgcaacatcgatgcagatgatgaccagttcgcttag

SEQ ID NO: 29830 - protein, 211 aa, Muscodor strobelii
  misc_feature: SGI Peptide ID NO. 570249
  misc_feature (39)..(185): Pfam Id: PF01965 Pfam Desc: DJ-1/PfpI family
  misc_feature (64)..(136): Pfam Id: PF01965 Pfam Desc: DJ-1/PfpI family
  misc_feature (4)..(211): NCBI GI: 256724293 Blast Desc: NECHADRAFT_72943 [Nectria haematococca mpVI 77-13-4]
  misc_feature (5)..(211): NCBI GI: 46115784 Blast Desc: FG03734.1 [Gibberella zeae PH-1]
  misc_feature (4)..(211): NCBI GI: 212541072 Blast Desc: ThiJ/PfpI family protein [Penicillium marneffei ATCC 18224] gi|210067990|gb|EEA22082.1| ThiJ/PfpI family protein [Penicillium marneffei ATCC 18224]
  misc_feature (4)..(210): NCBI GI: 242799744 Blast Desc: ThiJ/PfpI family protein [Talaromyces stipitatus ATCC 10500] gi|218716788|gb|EED16209.1| ThiJ/PfpI family protein [Talaromyces stipitatus ATCC 10500]
  misc_feature (2)..(211): NCBI GI: 238597573 Blast Desc: MPER_05757 [Moniliophthora perniciosa FA553] gi|215463283|gb|EEB95292.1| MPER_05757 [Moniliophthora perniciosa FA553]
  misc_feature (8)..(211): NCBI GI: 169867102 Blast Desc: CC1G_02595 [Coprinopsis cinerea okayama7#130] gi|116498684|gb|EAU81579.1| CC1G_02595 [Coprinopsis cinerea okayama7#130]
  misc_feature (8)..(211): NCBI GI: 225563211 Blast Desc: DJ-1/PfpI family protein [Ajellomyces capsulatus G186AR]
  misc_feature (8)..(211): NCBI GI: 240275793 Blast Desc: DJ-1/PfpI protein [Ajellomyces capsulatus H143]
  misc_feature (2)..(211): NCBI GI: 261195222 Blast Desc: DJ-1/PfpI family protein [Ajellomyces dermatitidis SLH14081] gi|239587887|gb|EEQ70530.1| DJ-1/PfpI family protein [Ajellomyces dermatitidis SLH14081]
  misc_feature (8)..(211): NCBI GI: 225681090 Blast Desc: ThiJ/PfpI family protein [Paracoccidioides brasiliensis Pb03]
MATEPVTRFGLVLFPGFQALDVFGPMDALNVLSGTKPLTLSVIAATLDPVPTKLEDSHTRIGQTVVPTHTFDNCPQDIEVLLVPGGQGTRVEPIAAPVREFVKKIYPKLKYLLTVCTGSIVVAQTGLLDGRRATSNKRRMELAISEGPNVQWVRKARWVVDGNIWTSSGISAGTDMMYAFIADQYGEDTAKELAHNSEYIRNIDADDDQFA

SEQ ID NO: 29831 - DNA, 1085 bp, Muscodor strobelii
  misc_feature: SGI EST ID NO. CUFF.70585.1
  misc_feature: Variant of the nucleotide sequence at SEQ ID NO 29829
gaatttttgacgtttaacataagatcgttctgttgtcttcccattcgtaacttcgcactcatctgagaactcatcttttcttcttggataattgagatctcttcaacgatatcatactaagatggcaacagaaccagtcacccgtttcggcctagtgttatttccgggcttccaggcattggatgtattcggccccatggatgcgctcaacgtcctctccggaacgaaaccgcttacattatcagtcatcgctgcgacattagatccggtaccgacaaagctcgaagacagtcacactcgaatcggccagaccgtcgtgccgacgcatacttttgataactgccctcaggacatcgaagttctccttgtccctggtggacagggtactcgggtggagccaattgcggcacctgtccgtgaatttgtcaagaagatttatcctaagttgaaatatctcttgacggtctgcacgggcagtatcgttgtagcgcagaccggactcctagacggaaggcgcgcaacttcgaataagcgacgaatggaactggcaatcagcgagggtcccaatgtccaatgggttcgtaaggcgcgatgggttgtcgatggcaacatctggacgagctcgggtatctctgcagggactgatatgatgtatgcctttattgcagatcagtatggtgaagacacagcaaaggaactcgctcacaattctgaatacattcgcaacatcgatgcagatgatgaccagttcgcttagctcatcctgacgaaaggtacgaaaagggaatttgccttcctgtgacacagggttcaacataaaaagataacttccataacggagccatgttcattgtacaaatttgttttcatcttgcccgtcgtgattatttaagacctcacaatatcaaattgaggatcgaaacaaagaagtgtttatggactatcggcaatgctgtcacactatagtgcacctttctgtacgacaacacaatggtacttgatattaaattcgaagaacttacgattgtcaattctaatcgcaggctacattgggggcatatcttaggagcctaggatcgaatttc

SEQ ID NO: 29832 - DNA, 1077 bp, Muscodor strobelii
  misc_feature: SGI cDNA ID NO. 570250
  misc_feature: Reduced expression when VOC is produced
  misc_feature: Encodes the peptide sequence at SEQ ID NO 29833
agtattgcaacattatatgttggtatcaactacattctttactacgatggtcttctgccactcctcatcaccgccgggatagacttgacacttctagttgcatccattgtcgtcactgtcactattggaaagcccctttccatgctgaactgtgccgcgttgcctgaggccagccaggggcaatcacgagccgcaacatatgtcacgaccattgcgggccgcattgctggccgcagttacgaaactgcagccgacaaatatgcgagctatctggcccttattacgactgatcaacctcattgttatgaaatcaaggctgtctggggcctttccatcgctctgtccgttctttttgccttttcagcgctggtgtctgtcggtctttggcaccgcattaagcgtgccaatggcgatgctgctcctaaagatattgagggtacacgaatcctgagcccaggattcggctcacgtttccctcctccattatcattgcctcaagcctctctccgccgccctgtccccataattgacgaggaggctcatcgcacaccaacgccccctctcacacttaatgctgatgcacctgtcaatgtcggccgttctctcacaggcctacaccctaatcaaccaggctcgcttcatccaccacctactagtcctcatgggtcctccgtctcggcaacggaagacttcattcctattctgcatcagccagtacctaaactcggagatactcctgccaagacgcctatgctagtcatcgtcccgccaccgacacccagcgatgacggatttacacccgtcacccctcctagtgccacgtcccagaaactgaaaggtttccgccttgctcgagcgtctcggatcccgcgagacgcgcttggtatttccaccggaggtttgaagaggaagaaaagccagcgagctattgatgaatatgaagatattatgccactcagcccacagacgccggtcacgcccaaggcgaaacccgctaggaggacgcttttcggtttgatcgaaggatggtgggatctcggtttgttggaaagggggaagagtttaagacgaaaatga

SEQ ID NO: 29833 - protein, 358 aa, Muscodor strobelii
  misc_feature: SGI Peptide ID NO. 570250
  misc_feature (3)..(146): NCBI GI: 171678913 Blast Desc: protein product [Podospora anserina] gi|170937527|emb|CAP62185.1| protein product [Podospora anserina]
  misc_feature (1)..(146): NCBI GI: 256735496 Blast Desc: NECHADRAFT_75402 [Nectria haematococca mpVI 77-13-4]
  misc_feature (2)..(146): NCBI GI: 46107784 Blast Desc: FG00775.1 [Gibberella zeae PH-1]
  misc_feature (1)..(145): NCBI GI: 261361431 Blast Desc: conserved [Verticillium albo-atrum VaMs.102]
  misc_feature (10)..(149): NCBI GI: 85082543 Blast Desc: NCU04527 [Neurospora crassa OR74A] gi|28918019|gb|EAA27702.1| [Neurospora crassa OR74A]
  misc_feature (1)..(146): NCBI GI: 240111480 Blast Desc: CPC735_073150 [Coccidioides posadasii C735 delta SOWgp]
  misc_feature (1)..(146): NCBI GI: 119188783 Blast Desc: CIMG_04439 [Coccidioides immitis RS]
  misc_feature (2)..(145): NCBI GI: 238839904 Blast Desc: conserved [Microsporum canis CBS 113480]
  misc_feature (2)..(134): NCBI GI: 156054644 Blast Desc: SS1G_06170 [Sclerotinia sclerotiorum 1980] gi|154703950|gb|EDO03689.1| SS1G_06170 [Sclerotinia sclerotiorum 1980]
  misc_feature (1)..(145): NCBI GI: 261196880 Blast Desc: conserved [Ajellomyces dermatitidis SLH14081] gi|239596088|gb|EEQ78669.1| conserved [Ajellomyces dermatitidis SLH14081] gi|239609675|gb|EEQ86662.1| conserved [Ajellomyces
  misc_feature: Useful for introducing or modulating the production of volatile compounds
SIATLYVGINYILYYDGLLPLLITAGIDLTLLVASIVVTVTIGKPLSMLNCAALPEASQGQSRAATYVTTIAGRIAGRSYETAADKYASYLALITTDQPHCYEIKAVWGLSIALSVLFAFSALVSVGLWHRIKRANGDAAPKDIEGTRILSPGFGSRFPPPLSLPQASLRRPVPIIDEEAHRTPTPPLTLNADAPVNVGRSLTGLHPNQPGSLHPPPTSPHGSSVSATEDFIPILHQPVPKLGDTPAKTPMLVIVPPPTPSDDGFTPVTPPSATSQKLKGFRLARASRIPRDALGISTGGLKRKKSQRAIDEYEDIMPLSPQTPVTPKAKPARRTLFGLIEGWWDLGLLERGKSLRRK

SEQ ID NO: 29834 - DNA, 2355 bp, Muscodor strobelii
  misc_feature: SGI cDNA ID NO. 570251
  misc_feature: Reduced expression when VOC is produced
  misc_feature: Encodes the peptide sequence at SEQ ID NO 29835
atgaggcgactgtaccgaatccacactctgagcggggccacaagaagactggctagctctggacctgggcgctcattgcaagattgctcacctctgtctggtgcagcatttgctatcagacggcttcatcaagatttagcacagacggcatctaatctcaatacggatggcaaaccatccgcgaacgaccccgtagaatcccaggcgtggaggttgttcaaagatgccgttcgcttcccacaagctacatggcctgaagattccacaaaccaggcggaagagcaattgaatcaatggaatgatggcgctgaggtaacagtacacgggtttgttggcaagcgacgtgacaaaagtcagaagttgagcttctgtgacattgatctaagtcgtgcgcctcaggctgctcttcaatcccttcaaatcgtgtctagctggacagaggaaggctcggattcacattcggtgcacggggccttaaagtcaattccgtctcatagccctgtatcagtgacaggagttttgcagaagtcggatttgtcgaatcatacccaacaggtcgataccgcgtccgaggacaagtcgagtgcaggcgacgccgaagtaaaatggggctcccggaaaccttcagaccctcagcgattcgacttgaagctcaagagcatcaagccccttaatactttccctcagaatatcatcgtctcaaaggacgcagtgtggcctcagaagtctcgccatctccagatgaggttcgacgaccatttatacgagagattagttttccgccacgcggccgccaaagagatgcggaagatcctcgataacgacaaatttctggaagtcgaaacgccgctgttgttcaaatcgacccctgaaggcgctcgagagtttttagtcccaactcgacaaagtgggcttgcctacgcactacctcagagccctcagcagtacaagcagatgcttatggccagtggcgtacataggtattatcagttcgctagatgctttcgtgatgaggaccatcgcgctgataggcaacctgaattcacacagcttgatcttgaaatggcgttcgcctcttctaatgatgtaatgcagcagattaacgagttgatcttggctctggtcaacatgagacacagagattttgttcccgtggacgtcaatggtgcaatgcatccgcaaagaaaagttttcgccacttcaggcgcttcagaataccctcaaattcatctacgagaccgacgattcaatagaatgagctaccatctggcaatggacagatatggatcagataagcctgatctgcgaataaagtcaccatatgcatcacatatcattagaatcgaagacttccttcccaagcactttataagcatgatcaccaagcttgaagatccagtggtagaagtctgcaaattccggttcacaggatcccctcaggactctgcgaagtttctacgccagttcttcgacgaccttccgaagagcactaatagactgagcggaagtagcactcctggtgttctcttcttcgactcgtcaaagccccttcaaggattgtccgcagtgggacatgaaggtgcaaatgccttgattgatctgaatttcgctactgaggatccacccagaatgcatcagtcacctgagagctggaacgattgtgaagatggtgatgtgttcatcatccatgcacgagaacgatggggtatcaacggcactcagattggactgcctgacaagaagagatggcacaagggtggttctacggaactgggcaggctccgaaagcttatttatgattctgctgttgagcaaggcctccttccccaagacgataatctggaatttgtttggatagatgctttccccttgttcacccttgatggtgatgagcccgggcaagggggattatctggattctgcgcaacgcatcatccttttacctcaccagcaggagagacagacattgacttgctcaagctgaatcctcttcttgccaccggcgaccattacgatctcgtggtcaacggtatcgaaattgggggcggaagtcgacgtatccatattgcggatgtccaggaatatgtgatgagggacgttttgaagatgccagatatgggcgtaaagcggttctctcatctcctcgaatcgttgagggcaggctgtccgccacatgctgggtttgctattggattcgaccgattaatatccgttctctgtggcgttccgtcagtcagagacgtcatcgcattcccgaagaacaacaaaggcgaagatcgactcgttggcagcccttctaaagtgactcggggacagcggaggacctaccacctttcacccgaacctggcatctaa

SEQ ID NO: 29835 - protein, 784 aa, Muscodor strobelii
  misc_feature: SGI Peptide ID NO. 570251
  misc_feature (240)..(756): Pfam Id: PF00152 Pfam Desc: tRNA synthetases class II (D, K and N)
  misc_feature (84)..(779): NCBI GI: 38567122 Blast Desc: related to aspartate--tRNA ligase, mitochondrial (fragment) [Neurospora crassa]
  misc_feature (99)..(779): NCBI GI: 164427859 Blast Desc: NCU02585 [Neurospora crassa OR74A] gi|157071912|gb|EAA36480.2| NCU02585 [Neurospora crassa OR74A]
  misc_feature (102)..(778): NCBI GI: 145616054 Blast Desc: MGG_13512 [Magnaporthe grisea 70-15] gi|145009821|gb|EDJ94477.1| MGG_13512 [Magnaporthe grisea 70-15]
  misc_feature (47)..(778): NCBI GI: 154323340 Blast Desc: BC1G_00069 [Botryotinia fuckeliana B05.10] gi|150842298|gb|EDN17491.1| BC1G_00069 [Botryotinia fuckeliana B05.10]
  misc_feature (73)..(778): NCBI GI: 119180393 Blast Desc: CIMG_08835 [Coccidioides immitis RS]
  misc_feature (73)..(778): NCBI GI: 240110324 Blast Desc: aspartyl-tRNA synthetase, [Coccidioides posadasii C735 delta SOWgp]
  misc_feature (73)..(778): NCBI GI: 212543427 Blast Desc: aspartyl-tRNA synthetase, [Penicillium marneffei ATCC 18224] gi|210066775|gb|EEA20868.1| aspartyl-tRNA synthetase, [Penicillium marneffei ATCC 18224]
  misc_feature (73)..(778): NCBI GI: 242786653 Blast Desc: aspartyl-tRNA synthetase, [Talaromyces stipitatus ATCC 10500] gi|218720995|gb|EED20414.1| aspartyl-tRNA synthetase, [Talaromyces stipitatus ATCC 10500]
  misc_feature (102)..(779): NCBI GI: 226286058 Blast Desc: aspartyl-tRNA synthetase, mitochondrial [Paracoccidioides brasiliensis Pb01]
  misc_feature (73)..(778): NCBI GI: 258578065 Blast Desc: UREG_02730 [Uncinocarpus reesii 1704] gi|237903480|gb|EEP77881.1| UREG_02730 [Uncinocarpus reesii 1704]
  misc_feature (102)..(779): SWISSPROT Homolog: EC 6.1.1.12 Aspartate--tRNA ligase
  misc_feature: Useful for introducing or modulating the production of volatile compounds
MRRLYRIHTLSGATRRLASSGPGRSLQDCSPLSGAAFAIRRLHQDLAQTASNLNTDGKPSANDPVESQAWRLFKDAVRFPQATWPEDSTNQAEEQLNQWNDGAEVTVHGFVGKRRDKSQKLSFCDIDLSRAPQAALQSLQIVSSWTEEGSDSHSVHGALKSIPSHSPVSVTGVLQKSDLSNHTQQVDTASEDKSSAGDAEVKWGSRKPSDPQRFDLKLKSIKPLNTFPQNIIVSKDAVWPQKSRHLQMRFDDHLYERLVFRHAAAKEMRKILDNDKFLEVETPLLFKSTPEGAREFLVPTRQSGLAYALPQSPQQYKQMLMASGVHRYYQFARCFRDEDHRADRQPEFTQLDLEMAFASSNDVMQQINELILALVNMRHRDFVPVDVNGAMHPQRKVFATSGASEYPQIHLRDRRFNRMSYHLAMDRYGSDKPDLRIKSPYASHIIRIEDFLPKHFISMITKLEDPVVEVCKFRFTGSPQDSAKFLRQFFDDLPKSTNRLSGSSTPGVLFFDSSKPLQGLSAVGHEGANALIDLNFATEDPPRMHQSPESWNDCEDGDVFIIHARERWGINGTQIGLPDKKRWHKGGSTELGRLRKLIYDSAVEQGLLPQDDNLEFVWIDAFPLFTLDGDEPGQGGLSGFCATHHPFTSPAGETDIDLLKLNPLLATGDHYDLVVNGIEIGGGSRRIHIADVQEYVMRDVLKMPDMGVKRFSHLLESLRAGCPPHAGFAIGFDRLISVLCGVPSVRDVIAFPKNNKGEDRLVGSPSKVTRGQRRTYHLSPEPGI

SEQ ID NO: 29836 - DNA, 2724 bp, Muscodor strobelii
  misc_feature: SGI EST ID NO. CUFF.70507.0
  misc_feature: Variant of the nucleotide sequence at SEQ ID NO 29834
caacaatcgataaggtcgataacgcgttcgaggatcagactacccaacttttaagtggagcacattgtagcatatctagaatgaatgtaccttgaacaggcgagtaagatatatgttgcaacgcattgacgcgttgaagaacgacctcatcttcaattcgaaatcacatcctagctaccatgtattgcgactgaggatcaattatgaggcgactgtaccgaatccacactctgagcggggccacaagaagactggctagctctggacctgggcgctcattgcaagattgctcacctctgtctggtgcagcatttgctatcagacggcttcatcaagatttagcacagacggcatctaatctcaatacggatggcaaaccatccgcgaacgaccccgtagaatcccaggcgtggaggttgttcaaagatgccgttcgcttcccacaagctacatggcctgaagattccacaaaccaggcggaagagcaattgaatcaatggaatgatggcgctgaggtaacagtacacgggtttgttggcaagcgacgtgacaaaagtcagaagttgagcttctgtgacattgatctaagtcgtgcgcctcaggctgctcttcaatcccttcaaatcgtgtctagctggacagaggaaggctcggattcacattcggtgcacggggccttaaagtcaattccgtctcatagccctgtatcagtgacaggagttttgcagaagtcggatttgtcgaatcatacccaacaggtcgataccgcgtccgaggacaagtcgagtgcaggcgacgccgaagtaaaatggggctcccggaaaccttcagaccctcagcgattcgacttgaagctcaagagcatcaagccccttaatactttccctcagaatatcatcgtctcaaaggacgcagtgtggcctcagaagtctcgccatctccagatgaggttcgacgaccatttatacgagagattagttttccgccacgcggccgccaaagagatgcggaagatcctcgataacgacaaatttctggaagtcgaaacgccgctgttgttcaaatcgacccctgaaggcgctcgagagtttttagtcccaactcgacaaagtgggcttgcctacgcactacctcagagccctcagcagtacaagcagatgcttatggccagtggcgtacataggtattatcagttcgctagatgctttcgtgatgaggaccatcgcgctgataggcaacctgaattcacacagcttgatcttgaaatggcgttcgcctcttctaatgatgtaatgcagcagattaacgagttgatcttggctctggtcaacatgagacacagagattttgttcccgtggacgtcaatggtgcaatgcatccgcaaagaaaagttttcgccacttcaggcgcttcagaataccctcaaattcatctacgagaccgacgattcaatagaatgagctaccatctggcaatggacagatatggatcagataagcctgatctgcgaataaagtcaccatatgcatcacatatcattagaatcgaagacttccttcccaagcactttataagcatgatcaccaagcttgaagatccagtggtagaagtctgcaaattccggttcacaggatcccctcaggactctgcgaagtttctacgccagttcttcgacgaccttccgaagagcactaatagactgagcggaagtagcactcctggtgttctcttcttcgactcgtcaaagccccttcaaggattgtccgcagtgggacatgaaggtgcaaatgccttgattgatctgaatttcgctactgaggatccacccagaatgcatcagtcacctgagagctggaacgattgtgaagatggtgatgtgttcatcatccatgcacgagaacgatggggtatcaacggcactcagattggactgcctgacaagaagagatggcacaagggtggttctacggaactgggcaggctccgaaagcttatttatgattctgctgttgagcaaggcctccttccccaagacgataatctggaatttgtttggatagatgctttccccttgttcacccttgatggtgatgagcccgggcaagggggattatctggattctgcgcaacgcatcatccttttacctcaccagcaggagagacagacattgacttgctcaagctgaatcctcttcttgccaccggcgaccattacgatctcgtggtcaacggtatcgaaattgggggcggaagtcgacgtatccatattgcggatgtccaggaatatgtgatgagggacgttttgaagatgccagatatgggcgtaaagcggttctctcatctcctcgaatcgttgagggcaggctgtccgccacatgctgggtttgctattggattcgaccgattaatatccgttctctgtggcgttccgtcagtcagagacgtcatcgcattcccgaagaacaacaaaggcgaagatcgactcgttggcagcccttctaaagtgactcggggacagcggaggacctaccacctttcacccgaacctggcatctaactcattatgtaatcattattgtataaccaaatacccgggcctgatgagagctggccatttttgtaatatgcaaatgtattattatgtacaaatcacatgtcgtatatatctatagaatacagagcttatgcagtattatggcttctgtaccaagcttaatacgaac

SEQ ID NO: 29837 - DNA, 1149 bp, Muscodor strobelii
  misc_feature: SGI cDNA ID NO. 570252
  misc_feature: Encodes the peptide sequence at SEQ ID NO 29838
atgtcgacatcgcagacgccaaagccacagagctgcttcatgtatttgccgccggagctccgcctaatgatctacgaatttgctcttatagatgagccacttctctacagacgtcatcaagcttgctgctactcatcgcagaagataccaggccgtctggaagaaccgcctttcgtcaatgctccatcaagtccgtttcgcagaaccccggcccaaatcgcgacttgctcgtgccacaagcggcaaagtttggcactgatgtccacttgtaaagagatttatgacgaagcggcacctatcttctggaggaacaacccctttacctggagctcaactgatgctttcgttcaagacatctcggatagtacgctgatgtgtcgagactacatccgagatgtgtgcatctatcatgaaaaactcaagcctcttattcaagacaggacacgttccttcacgagtttgcccgattcgtatgcgaagctgtgggagacaatgaaactgtgtcggtccctttcatttttgaatctcccgttcgacgtcatcagccgaagcgaagagtatctccattctttcgagttggcgcagccaaaggttaagaccattattgccatcaccgtcagacgcaagcccctctcaggtggccaaaagactacatccaagagcaattattgccccaaccagccgggatacgtctgggtagtcggcagagctctttttcatctcaagcacttccacgctcccttgctatccgctcagacgatgcgtgagctcacgaaagcatataacaagggctacttggtatgttgggaacggaacatcaactcattcctcgctagtggtcatgattccgatgataaggattgtttcgagagattatccgaccaaaataacgcggtggttctgaaattggcacataaaagttactatccggctgagattctaggccttccgaattcggcagaaacgctggaacggaatatgattgagcgtcttgccgtttgtaacatgctttgcgagggctggaggaatcccttcgtcaacgccatagtgcgggacagcaaaaccaaagggggccaaggaaggcatatgaccgggagaaaactaataggcccattcccggcatggcgcttaaaaccaaaggccaactag

SEQ ID NO: 29838 - protein, 382 aa, Muscodor strobelii
  misc_feature: SGI Peptide ID NO. 570252
MSTSQTPKPQSCFMYLPPELRLMIYEFALIDEPLLYRRHQACCYSSQKIPGRLEEPPFVNAPSSPFRRTPAQIATCSCHKRQSLALMSTCKEIYDEAAPIFWRNNPFTWSSTDAFVQDISDSTLMCRDYIRDVCIYHEKLKPLIQDRTRSFTSLPDSYAKLWETMKLCRSLSFLNLPFDVISRSEEYLHSFELAQPKVKTIIAITVRRKPLSGGQKTTSKSNYCPNQPGYVWVVGRALFHLKHFHAPLLSAQTMRELTKAYNKGYLVCWERNINSFLASGHDSDDKDCFERLSDQNNAVVLKLAHKSYYPAEILGLPNSAETLERNMIERLAVCNMLCEGWRNPFVNAIVRDSKTKGGQGRHMTGRKLIGPFPAWRLKPKAN

SEQ ID NO: 29839 - DNA, 818 bp, Muscodor strobelii
  misc_feature: SGI EST ID NO. CUFF.70512.0
  misc_feature: Variant of the nucleotide sequence at SEQ ID NO 29837
cgacattgcgatgtaacgaaatatttcgtcgatttccgacctcgacgtatttttaactcgcgaaatcaagtaaacgagtcaatcatcgatctccgctaagagaattgggccattgggctatttcacctgcaaccgaatcaaaatgtcgacatcgcagacgccaaagccacagagctgcttcatgtatttgccgccggagctccgcctaatgatctacgaatttgctcttatagatgagccacttctctacagacgtcatcaagcttgctgctactcatcgcagaagataccaggccgtctggaagaaccgcctttcgtcaatgctccatcaagtccgtttcgcagaaccccggcccaaatcgcgacttgctcgtgccacaagcggcaaagtttggcactgatgtccacttgtaaagagatttatgacgaagcggcacctatcttctggaggaacaacccctttacctggagctcaactgatgctttcgttcaagacatctcggatagtacgctgatgtgtcgagactacatccgagatgtgtgcatctatcatgaaaaactcaagcctcttattcaagacaggacacgttccttcacgagtttgcccgattcgtatgcgaagctgtgggagacaatgaaactgtgtcggtccctttcatttttgaatctcccgttcgacgtcatcagccgaagcgaagagtatctccattctttcgagttggcgcagccaaaggttaagaccattattgccatcaccgtcagacgcaagcccctctcaggtggccaaaagactacatccaagagcaattattgcccca

SEQ ID NO: 29840 - DNA, 1923 bp, Muscodor strobelii
  misc_feature: SGI cDNA ID NO. 570253
  misc_feature: Encodes the peptide sequence at SEQ ID NO 29841
atgtcgagctccttcgagaagtcggtaaagggcgcaaccaagatcaaggctgcgcccccgaagaccaaatacatagagcacatcttggtagccacacatgccggcgaggctggcgttggagaggtcttccgcgctctgcagaacaggctgcgggactccacctggaccgtcgtcctcaagagcctgatcaccgtccacatgatgatccgcgagggctcgcccgacgccactctgtcctacctctcccgcaaccgcaaccagctcgccatcagctccttcaccgatgctcagatacaggggcgaaacatacgccactatgctgcctatctggccgaacgggtccgcgcgtacaaggacaccaagatagactgggttcgtgccaaagagacgagactcgagactctgtctgtcgataagggcttgctgcgagagaccgagtctgtccagcgccagctacacgctcttctcaaatgtgacgtcctcgacgagccagaaaatgaaattactattatggtcttcagattgcttgtattagatctactggccctattccaagtgctcaaccaagccatgatcaacatcctcggacacttcttcgagatgtcgaagccggacgcagaccgcgctatgaacatatataggtctttcaccaagaacaccgactccgtcgtacagtacttgacagtcgctcggcagtgggagccccatactcgcgtcgaagtgcccaagctaaaacacgccccggtgaatctcgggcgccagctcgaagattacctcggtgatcccgacttcgaagttaataggaggcagtacatagcagagcagcagatcaagaagaagggcggtctgtcctctaagggcgacaagagcacagcagactcgcggaccgacccttccagagcgtttccatcatcaaacggctcctcaagcgtcgctccgaggccgcctcaagccactaagggacctgatccagacttaatcgacttcttcgattccatagagcagaatcagaccgcgctcggggcgcaaccccaaccagttccacaggcacagactctaccaatgaatactggtaatccctggccgactggaatgcagcagccgagtcaatttccgcccaccggacagctgcaaggaaatggtttcatatcacagcccacgggctttgtgaacaatagtccatttcaacaggttaatgccagtggctaccaacaacagcagccacaacaacaaccacagatgcctacgcaaatacaacctagctttacgggtgccgggtttggtggttatacaccccagcaaagctttacacccaacacgctggggtccataccgcaagactctgttgcgtctttccaaaccggcactttatccccaccaatgcagacggggcaacaaactacgaacccgttcagagcgtcgatgatggccaatacaacgggaacgcccaactcatttcctacgccgacgagtcctgcagcgcagatccagccacaggcacaaatgcagcagggcggtcttactcgacaatcaacaaatccttttgcaaggtcatcgccgcagtcgaccacaccctacgccagtccgccttcaaattctccctttcaatcacagccgcccacccagccaccagcaccgttgcaaccagctcaaacgggcaccaacccgttcgcgaggaactttgcgccgtctccgccagcaggccagcaggcacagccgccgcggccgcaaacgagcggaggaatcatgccacaggctacgggcgccacaaatccgttccggcagggcgcttttgttaaccaccagaccggtatgggctggcagcataatcagatgccgatgggcggagggctagacacgctgcaaactcagcaggtgttcccaaggccggcgcaacagacgccgtggcaacagcaacagtag

SEQ ID NO: 29841 - protein, 640 aa, Muscodor strobelii
  misc_feature: SGI Peptide ID NO. 570253
  misc_feature (2)..(262): Pfam Id: PF07651 Pfam Desc: ANTH domain
  misc_feature (2)..(120): Pfam Id: PF01417 Pfam Desc: ENTH domain
  misc_feature (1)..(638): NCBI GI: 256720849 Blast Desc: NECHADRAFT_72215 [Nectria haematococca mpVI 77-13-4]
  misc_feature (1)..(638): NCBI GI: 116180534 Blast Desc: CHGG_00895 [Chaetomium globosum CBS 148.51] gi|88185192|gb|EAQ92660.1| CHGG_00895 [Chaetomium globosum CBS 148.51]
  misc_feature (1)..(637): NCBI GI: 145616058 Blast Desc: MGG_13514 [Magnaporthe grisea 70-15] gi|145009823|gb|EDJ94479.1| MGG_13514 [Magnaporthe grisea 70-15]
  misc_feature (1)..(638): NCBI GI: 85119791 Blast Desc: NCU02586 [Neurospora crassa OR74A] gi|28927529|gb|EAA36481.1| conserved [Neurospora crassa OR74A]
  misc_feature (1)..(639): NCBI GI: 171687689 Blast Desc: protein product [Podospora anserina] gi|170943806|emb|CAP69458.1| protein product [Podospora anserina]
  misc_feature (1)..(638): NCBI GI: 46134055 Blast Desc: FG09167.1 [Gibberella zeae PH-1]
  misc_feature (1)..(638): NCBI GI: 261358665 Blast Desc: ENTH domain-containing protein [Verticillium albo-atrum VaMs.102]
  misc_feature (1)..(638): NCBI GI: 154323344 Blast Desc: BC1G_00071 [Botryotinia fuckeliana B05.10] gi|150842300|gb|EDN17493.1| BC1G_00071 [Botryotinia fuckeliana B05.10]
  misc_feature (1)..(633): NCBI GI: 189202252 Blast Desc: ENTH domain containing protein [Pyrenophora tritici-repentis Pt-1C-BFP] gi|187984561|gb|EDU50049.1| ENTH domain containing protein [Pyrenophora tritici-repentis
  misc_feature (1)..(631): NCBI GI: 212540856 Blast Desc: ENTH domain protein [Penicillium marneffei ATCC 18224] gi|210067882|gb|EEA21974.1| ENTH domain protein [Penicillium marneffei ATCC 18224]
MSSSFEKSVKGATKIKAAPPKTKYIEHILVATHAGEAGVGEVFRALQNRLRDSTWTVVLKSLITVHMMIREGSPDATLSYLSRNRNQLAISSFTDAQIQGRNIRHYAAYLAERVRAYKDTKIDWVRAKETRLETLSVDKGLLRETESVQRQLHALLKCDVLDEPENEITIMVFRLLVLDLLALFQVLNQAMINILGHFFEMSKPDADRAMNIYRSFTKNTDSVVQYLTVARQWEPHTRVEVPKLKHAPVNLGRQLEDYLGDPDFEVNRRQYIAEQQIKKKGGLSSKGDKSTADSRTDPSRAFPSSNGSSSVAPRPPQATKGPDPDLIDFFDSIEQNQTALGAQPQPVPQAQTLPMNTGNPWPTGMQQPSQFPPTGQLQGNGFISQPTGFVNNSPFQQVNASGYQQQQPQQQPQMPTQIQPSFTGAGFGGYTPQQSFTPNTLGSIPQDSVASFQTGTLSPPMQTGQQTTNPFRASMMANTTGTPNSFPTPTSPAAQIQPQAQMQQGGLTRQSTNPFARSSPQSTTPYASPPSNSPFQSQPPTQPPAPLQPAQTGTNPFARNFAPSPPAGQQAQPPRPQTSGGIMPQATGATNPFRQGAFVNHQTGMGWQHNQMPMGGGLDTLQTQQVFPRPAQQTPWQQQQ

SEQ ID NO: 29842 - DNA, 5164 bp, Muscodor strobelii
  misc_feature: SGI EST ID NO. CUFF.71099.1
  misc_feature: Variant of the nucleotide sequence at SEQ ID NO 29840
tttgttttacgctgggttcggattgggggcttgtacggtcattgatgagatgctagcaagaagcaccaatggcggaatcagctgccacgaagtgatagcatgcgtaatgagatgatgcagaagtcgattggcatagtacagcgcagctaaacaatggatgtacccacggctatggtcgtgcatacgtcaatggggtggattaaccgggatgccgtcactgaataaggtccagagcccagactccagcccgcaatcaacctatgatgaccccctgtcagcgactcagcagcggccatgtctgcccgacccgctgacgatcgcaggacacgatcccaggttccgctgcccaggacgtgcaggtaatttccctcgaccctcctgctcccaacgcccgccaacgacgacaacaacgacagacaccgaccatcttgcgcaggtgtcgacagcgcaggcctcgcctctctcgtcgacttgctgcttgatgccgccgttgatcgcccatataccgtacatacattcttcttgtgtatatcgttaatgcagccgactggatcgtagactccgactccgactcgctaccgtcctcgcgccgtcccgcgctcaccatggaacgccgctgaccgtgcagccgattccgtgcccgtctcgaccgacgacgactgctctgcctcgggccgccggattgcctcgtctgacggggttgacgttacgggcacactgacggcccctcgtcctactgcctttgcctttgcctagctgtcctcgccctgcccgtgcccaacgtccctagcacaaccacagcttatctgggtcggagtgtgtcactgacctgaagacacgcgtggtacgacaacacgctggggctcgtccctgtcgctagcacccctttgacggctctcctcgtctaagacagccctcactagttgctatattccggggcccagcatgtcgagctccttcgagaagtcggtaaagggcgcaaccaagatcaaggctgcgcccccgaagaccaaatacatagagcacatcttggtagccacacatgccggcgaggctggcgttggagaggtcttccgcgctctgcagaacaggctgcgggactccacctggaccgtcgtcctcaagagcctgatcaccgtccacatgatgatccgcgagggctcgcccgacgccactctgtcctacctctcccgcaaccgcaaccagctcgccatcagctccttcaccgatgctcagatacaggggcgaaacatacgccactatgctgcctatctggccgaacgggtccgcgcgtacaaggacaccaagatagactgggttcgtgccaaagagacgagactcgagactctgtctgtcgataagggcttgctgcgagagaccgagtctgtccagcgccagctacacgctcttctcaaatgtgacgtcctcgacgagccagaaaatgaaattactattatggtcttcagattgcttgtattagatctactggccctattccaagtgctcaaccaagccatgatcaacatcctcggtaggtgttgccctccgtcccacgcttcgcgcgcatgctgatggtgtctaggacacttcttcgagatgtcgaagccggacgcagaccgcgctatgaacatatataggtctttcaccaagaacaccgactccgtcgtacagtacttgacagtcgctcggcagtgggagccccatactcgcgtcgaagtgcccaagctaaaacacgccccggtgaatctcgggcgccagctcgaagattacctcggtgatcccgacttcgaagttaataggaggcagtacatagcagagcagcagatcaagaagaagggcggtctgtcctctaagggcgacaagagcacagcagactcgcggaccgacccttccagagcgtttccatcatcaaacggctcctcaagcgtcgctccgaggccgcctcaagccactaagggacctgatccagacttaatcgacttcttcgattccatagagcagaatcagaccgcgctcggggcgcaaccccaaccagttccacaggcacagactctaccaatgaatactggtaatccctggccgactggaatgcagcagccgagtcaatttccgcccaccggacagctgcaaggaaatggtttcatatcacagcccacgggctttgtgaacaatagtccatttcaacaggttaatgccagtggctaccaacaacagcagccacaacaacaaccacagatgcctacgcaaatacaacctagctttacgggtgccgggtttggtggttatacaccccagcaaagctttacacccaacacgctggggtccataccgcaagactctgttgcgtctttccaaaccggcactttatccccaccaatgcagacggggcaacaaactacgaacccgttcagagcgtcgatgatggccaatacaacgggaacgcccaactcatttcctacgccgacgagtcctgcagcgcagatccagccacaggcacaaatgcagcagggcggtcttactcgacaatcaacaaatccttttgcaaggtcatcgccgcagtcgaccacaccctacgccagtccgccttcaaattctccctttcaatcacagccgcccacccagccaccagcaccgttgcaaccagctcaaacgggcaccaacccgttcgcgaggaactttgcgccgtctccgccagcaggccagcaggcacagccgccgcggccgcaaacgagcggaggaatcatgccacaggctacgggcgccacaaatccgttccggcagggcgcttttgttaaccaccagaccggtatgggctggcagcataatcagatgccgatgggcggagggctagacacgctgcaaactcagcaggtgttcccaaggccggcgcaacagacgccgtggcaacagcaacagtagatgatgtttcgctacaggtcagaaactgcgggttcggtctggatgcgcaagaccaagcatgcatgcatgaaggcggtgttcggtttctttcgagatatcgaggtcttttatattccattgatagagccaagatggatgcggtggacaagttcatgacatctaagttggattactgcgtcgatgggtggaaactacctaaaggatcggggttgtagcgagcgatggccgactagttggcagtcccaaccctaatgtgttgtcgttcattgacttctgcgcgctcagagttagtcaagtcgaggtctggttggcgaggtagataaatagatacctggcgctttatacttatttcagctgcattttacactttacgtggttagacggcgcgaatggaaccacgaatttctcatgaattcgactttttggaaacgaacatatgcatgatgtgatggaaagagcattgttgatattcgacttgggtataagttgagccatactcctgatctattactcatgacgagttcactttcaatttcaggggtaattcgaagtcggcatgggtaaggtgtagtgaaaagcactggtagcacattatgagtaggatagattcatgtcgtttttgaaccttgtttgcttatttgtttggtcgatgagatgcatctttcatgtctttatatatagttggaaagacatctaagaagcaaaatatgtctctcattgcttcccccctgtccttctctccaacccaaattgtgtagctatgcgcgggagaagcgcgaacccagaccactagactcatgacttcaatacccagtcttgaaaaaaacgccatcgctatgcaatcgacaaatcgaacatgaataacaagcccctgctaaaagacatcatcgacatccatcctcgacgacagtttactactactccccgtcagacgctcctcgtcggctttttcgtccgcgatgtttatccctaagcccgagaaggcctcgaacagcgacctcgatatgtactcggtggtatcgtaaccaccagctctgtggttatcgtctgtgcgaaaagtctcgtatttagacctctcggatacgggacgcagttcgaagcgtgttggctgtagggcggagaagaggccagcgaagggatcgtagggtttggactcgtcgtcttcgaaggctggtctttcgctcttgatttttagaccccggatcgtcagtttgccctcggtatggggcgcggatgatttcgtcggtttttgttgttgagctgagtggatggaggacatggatttgagggatgagaagccggcttctttctgtcggacgatcttggcttggattcgagctgccgtgccgtcggaaccatccgctagggcctgcatgagcgatgcgttgagggagttgcgctctgctatggcgcgctcgtcttcctctcgttcttgggcgcggcggagctcggcggcacgggcttcggctgcgaggcgggaggcgcggtttgcttcttctttcttgccgcgctgcttgttggcttcgatttgggctttgaactcggattcgcggtggagcagcttctgctctgctgctgcgcgctcgacgtccccgcctgagactaggtccatgcagagctcctcgacgtcttggaggtagttgttgtagtctagcagggtctcgaagtcgtcctcgacgttgttgtaggcggcggctacgcggcgacggatgtcgacctcgcgctcgatggtcagatcgccgaagaaggcgcggcggaaaccccgctggcgaagggtcttggtgcaggatgcgtaggggcactgggcggggccggacttgaagatgttggagacgcagttgctgcacatggcgtggtagcactccgggttgatgaggaactccatgtcggcgttgagatagcgcacgcgcttgcacacggggcagatgtccgagggcagctcgctgatgccgcctgcggacggcttgacgaccgtcgagcccacgggtttgcgagacatggctgcggctgcaagagaggacccgcctcgacgctcagattggcgacggtgaggcaaggtgatgatgtgatgatgcgcgagactatctccaactagagcagggagcgagggaagtcgatcgccgtctttgtagttttcacatttggaaagcggcccgtcaacctatgtttgtgacagtggagagctggtcgacgagggaggaaagttgacaaaaggtcaggtagtgaaattgggggcaaggctgta

SEQ ID NO: 29843 - DNA, 543 bp, Muscodor strobelii
  misc_feature: SGI cDNA ID NO. 570254
  misc_feature: Encodes the peptide sequence at SEQ ID NO 29844
atgcagacggggcaacaaactacgaacccgttcagagcgtcgatgatggccaatacaacgggaacgcccaactcatttcctacgccgacgagtcctgcagcgcagatccagccacaggcacaaatgcagcagggcggtcttactcgacaatcaacaaatccttttgcaaggtcatcgccgcagtcgaccacaccctacgccagtccgccttcaaattctccctttcaatcacagccgcccacccagccaccagcaccgttgcaaccagctcaaacgggcaccaacccgttcgcgaggaactttgcgccgtctccgccagcaggccagcaggcacagccgccgcggccgcaaacgagcggaggaatcatgccacaggctacgggcgccacaaatccgttccggcagggcgcttttgttaaccaccagaccggtatgggctggcagcataatcagatgccgatgggcggagggctagacacgctgcaaactcagcaggtgttcccaaggccggcgcaacagacgccgtggcaacagcaacagtag

SEQ ID NO: 29844 - protein, 180 aa, Muscodor strobelii
  misc_feature: SGI Peptide ID NO. 570254
  misc_feature (1)..(178): NCBI GI: 116180534 Blast Desc: CHGG_00895 [Chaetomium globosum CBS 148.51] gi|88185192|gb|EAQ92660.1| CHGG_00895 [Chaetomium globosum CBS 148.51]
  misc_feature (1)..(179): NCBI GI: 171687689 Blast Desc: protein product [Podospora anserina] gi|170943806|emb|CAP69458.1| protein product [Podospora anserina]
  misc_feature (5)..(178): NCBI GI: 85119791 Blast Desc: NCU02586 [Neurospora crassa OR74A] gi|28927529|gb|EAA36481.1| conserved [Neurospora crassa OR74A]
  misc_feature (6)..(178): NCBI GI: 261358665 Blast Desc: ENTH domain-containing protein [Verticillium albo-atrum VaMs.102]
  misc_feature (1)..(178): NCBI GI: 256720849 Blast Desc: NECHADRAFT_72215 [Nectria haematococca mpVI 77-13-4]
  misc_feature (1)..(177): NCBI GI: 145616058 Blast Desc: MGG_13514 [Magnaporthe grisea 70-15] gi|145009823|gb|EDJ94479.1| MGG_13514 [Magnaporthe grisea 70-15]
  misc_feature (1)..(178): NCBI GI: 46134055 Blast Desc: FG09167.1 [Gibberella zeae PH-1]
  misc_feature (1)..(178): NCBI GI: 154323344 Blast Desc: BC1G_00071 [Botryotinia fuckeliana B05.10] gi|150842300|gb|EDN17493.1| BC1G_00071 [Botryotinia fuckeliana B05.10]
  misc_feature (6)..(178): NCBI GI: 156057969 Blast Desc: SS1G_04716 [Sclerotinia sclerotiorum 1980] gi|154702501|gb|EDO02240.1| SS1G_04716 [Sclerotinia sclerotiorum 1980]
  misc_feature (5)..(173): NCBI GI: 189202252 Blast Desc: ENTH domain containing protein [Pyrenophora tritici-repentis Pt-1C-BFP] gi|187984561|gb|EDU50049.1| ENTH domain containing protein [Pyrenophora tritici-repentis
MQTGQQTTNPFRASMMANTTGTPNSFPTPTSPAAQIQPQAQMQQGGLTRQSTNPFARSSPQSTTPYASPPSNSPFQSQPPTQPPAPLQPAQTGTNPFARNFAPSPPAGQQAQPPRPQTSGGIMPQATGATNPFRQGAFVNHQTGMGWQHNQMPMGGGLDTLQTQQVFPRPAQQTPWQQQQ

SEQ ID NO: 29845 - DNA, 5164 bp, Muscodor strobelii; identical to SEQ ID NO: 29842
  misc_feature: SGI EST ID NO. CUFF.71099.1
  misc_feature: Variant of the nucleotide sequence at SEQ ID NO 29843

SEQ ID NO: 29846 - DNA, 1125 bp, Muscodor strobelii
  misc_feature: SGI cDNA ID NO. 570255
  misc_feature: Encodes the peptide sequence at SEQ ID NO 29847
atgtctcgcaaacccgtgggctcgacggtcgtcaagccgtccgcaggcggcatcagcgagctgccctcggacatctgccccgtgtgcaagcgcgtgcgctatctcaacgccgacatggagttcctcatcaacccggagtgctaccacgccatgtgcagcaactgcgtctccaacatcttcaagtccggccccgcccagtgcccctacgcatcctgcaccaagacccttcgccagcggggtttccgccgcgccttcttcggcgatctgaccatcgagcgcgaggtcgacatccgtcgccgcgtagccgccgcctacaacaacgtcgaggacgacttcgagaccctgctagactacaacaactacctccaagacgtcgaggagctctgcatggacctagtctcaggcggggacgtcgagcgcgcagcagcagagcagaagctgctccaccgcgaatccgagttcaaagcccaaatcgaagccaacaagcagcgcggcaagaaagaagaagcaaaccgcgcctcccgcctcgcagccgaagcccgtgccgccgagctccgccgcgcccaagaacgagaggaagacgagcgcgccatagcagagcgcaactccctcaacgcatcgctcatgcaggccctagcggatggttccgacggcacggcagctcgaatccaagccaagatcgtccgacagaaagaagccggcttctcatccctcaaatccatgtcctccatccactcagctcaacaacaaaaaccgacgaaatcatccgcgccccataccgagggcaaactgacgatccggggtctaaaaatcaagagcgaaagaccagccttcgaagacgacgagtccaaaccctacgatcccttcgctggcctcttctccgccctacagccaacacgcttcgaactgcgtcccgtatccgagaggtctaaatacgagacttttcgcacagacgataaccacagagctggtggttacgataccaccgagtacatatcgaggtcgctgttcgaggccttctcgggcttagggataaacatcgcggacgaaaaagccgacgaggagcgtctgacggggagtagtagtaaactgtcgtcgaggatggatgtcgatgatgtcttttag

SEQ ID NO: 29847 - protein, 374 aa, Muscodor strobelii
  misc_feature: SGI Peptide ID NO. 570255
  misc_feature (76)..(263): Pfam Id: PF06391 Pfam Desc: CDK-activating kinase assembly factor MAT1
  misc_feature (76)..(195): Pfam Id: PF06391 Pfam Desc: CDK-activating kinase assembly factor MAT1
  misc_feature (1)..(371): NCBI GI: 116180532 Blast Desc: CHGG_00894 [Chaetomium globosum CBS 148.51] gi|88185191|gb|EAQ92659.1| CHGG_00894 [Chaetomium globosum CBS 148.51]
  misc_feature (23)..(371): NCBI GI: 261358666 Blast Desc: RNA polymerase II transcription factor B subunit 3 [Verticillium albo-atrum VaMs.102]
  misc_feature (24)..(374): NCBI GI: 256720655 Blast Desc: [Nectria haematococca mpVI 77-13-4]
  misc_feature (24)..(351): NCBI GI: 85119794 Blast Desc: NCU02587 [Neurospora crassa OR74A] gi|28927530|gb|EAA36482.1| [Neurospora crassa OR74A]
  misc_feature (13)..(351): NCBI GI: 171687691 Blast Desc: protein product [Podospora anserina] gi|170943807|emb|CAP69459.1| protein product [Podospora anserina]
  misc_feature (24)..(374): NCBI GI: 46134053 Blast Desc: FG09166.1 [Gibberella zeae PH-1]
  misc_feature (13)..(374): NCBI GI: 154323346 Blast Desc: BC1G_00072 [Botryotinia fuckeliana B05.10] gi|150842301|gb|EDN17494.1| BC1G_00072 [Botryotinia fuckeliana B05.10]
  misc_feature (19)..(362): NCBI GI: 156057971 Blast Desc: SS1G_04717 [Sclerotinia sclerotiorum 1980] gi|154702502|gb|EDO02241.1| SS1G_04717 [Sclerotinia sclerotiorum 1980]
  misc_feature (23)..(362): NCBI GI: 39943050 Blast Desc: MGG_03605 [Magnaporthe grisea 70-15] gi|145009824|gb|EDJ94480.1| MGG_03605 [Magnaporthe grisea 70-15]
  misc_feature (11)..(350): NCBI GI: 121707273 Blast Desc: CDK-activating kinase assembly factor MAT1 [Aspergillus clavatus NRRL 1] gi|119399932|gb|EAW10358.1| CDK-activating kinase assembly factor MAT1 [Aspergillus clavatus
MSRKPVGSTVVKPSAGGISELPSDICPVCKRVRYLNADMEFLINPECYHAMCSNCVSNIFKSGPAQCPYASCTKTLRQRGFRRAFFGDLTIEREVDIRRRVAAAYNNVEDDFETLLDYNNYLQDVEELCMDLVSGGDVERAAAEQKLLHRESEFKAQIEANKQRGKKEEANRASRLAAEARAAELRRAQEREEDERAIAERNSLNASLMQALADGSDGTAARIQAKIVRQKEAGFSSLKSMSSIHSAQQQKPTKSSAPHTEGKLTIRGLKIKSERPAFEDDESKPYDPFAGLFSALQPTRFELRPVSERSKYETFRTDDNHRAGGYDTTEYISRSLFEAFSGLGINIADEKADEERLTGSSSKLSSRMDVDDVF

SEQ ID NO: 29848 - DNA, 573 bp, Muscodor strobelii
  misc_feature: SGI cDNA ID NO. 570256
  misc_feature: Encodes the peptide sequence at SEQ ID NO 29849
atggggccatcaccagatcccactcccgaagaggtcgccgctgctcgtgccaaggaacgcgctgagcaagatactctgccttacaaatggacacagaccattgccgaggtcgacatcaccattacttctattcccgggaacctcaagggtcgggacctcatcgtcgagctgaagagacagaagctcaaggccgccatcaaaggccaagagcccttcatcgatggcgacatgccccacccgatatcgaccgaggactcaacctggaccctcaccacggcgccagacggcacaaagaccatcaacatccagctcgacaaagtgaacaagatggagtggtgggcccacgtcgtcacctccgcgcccaagatagacgtcaccaagatcgagcccgagccctccaagctcggcgatttggagggcgagacgaggggcatggtcgagaagatgatgtacgaccagcgccagaaggagatgggcttgccttcttccgatgaccagaagaaggccgatatcctcaagaagttccaggagcagcatcctgagatggactttagccaggccaagattggttga

SEQ ID NO: 29849 - protein, 190 aa, Muscodor strobelii
  misc_feature: SGI Peptide ID NO. 570256
  misc_feature (26)..(106): Pfam Id: PF04969 Pfam Desc: CS domain
  misc_feature (6)..(190): NCBI GI: 116180530 Blast Desc: conserved [Chaetomium globosum CBS 148.51] gi|88185190|gb|EAQ92658.1| conserved [Chaetomium globosum CBS 148.51]
  misc_feature (6)..(190): NCBI GI: 256720848 Blast Desc: [Nectria haematococca mpVI 77-13-4]
  misc_feature (8)..(189): NCBI GI: 85116110 Blast Desc: nuclear movement protein nudC [Neurospora crassa OR74A] gi|28926791|gb|EAA35755.1| nuclear movement protein nudC [Neurospora crassa OR74A]
  misc_feature (26)..(189): NCBI GI: 46134051 Blast Desc: FG09165.1 [Gibberella zeae PH-1]
  misc_feature (6)..(190): NCBI GI: 255943233 Blast Desc: Pc18g05580 [Penicillium chrysogenum Wisconsin 54-1255] gi|211587118|emb|CAP94782.1| Pc18g05580 [Penicillium chrysogenum Wisconsin 54-1255]
  misc_feature (13)..(189): NCBI GI: 171687693 Blast Desc: protein product [Podospora anserina] gi|170943808|emb|CAP69460.1| protein product [Podospora anserina]
  misc_feature (6)..(190): NCBI GI: 70991513 Blast Desc: nuclear movement protein NudC [Aspergillus fumigatus Af293] gi|66848238|gb|EAL88567.1| nuclear movement protein NudC [Aspergillus fumigatus Af293] gi|159124161|gb|EDP49279.1| nuclear
  misc_feature (6)..(190): NCBI GI: 119468044 Blast Desc: nuclear movement protein [Neosartorya fischeri NRRL 181] gi|119405980|gb|EAW15931.1| nuclear movement protein [Neosartorya fischeri NRRL 181]
  misc_feature (2)..(190): NCBI GI: 121710022 Blast Desc: nuclear movement protein [Aspergillus clavatus NRRL 1] gi|119400777|gb|EAW11201.1| nuclear movement protein [Aspergillus clavatus NRRL 1]
  misc_feature (16)..(190): NCBI GI: 240110325 Blast Desc: nuclear movement protein nudC, [Coccidioides posadasii C735 delta SOWgp]
MGPSPDPTPEEVAAARAKERAEQDTLPYKWTQTIAEVDITITSIPGNLKGRDLIVELKRQKLKAAIKGQEPFIDGDMPHPISTEDSTWTLTTAPDGTKTINIQLDKVNKMEWWAHVVTSAPKIDVTKIEPEPSKLGDLEGETRGMVEKMMYDQRQKEMGLPSSDDQKKADILKKFQEQHPEMDFSQAKIG

SEQ ID NO: 29850 - DNA, 3085 bp, Muscodor strobelii
  misc_feature: SGI EST ID NO. CUFF.70582.0
  misc_feature: Variant of the nucleotide sequence at SEQ ID NO 29848
gcgtgcttctgtcagccttctggacttttccattccaacattccgagagaacaacaaatcacggtccaatccttgacttcgaccatggctgacaaagatcccactcccgaagaggtcgccgctgctcgtgccaaggaacgcgctgagcaagatactctgccttacaaatggacacagaccattgccgaggtcgacatcaccattacttctattcccgggaacctcaagggtcgggacctcatcgtcgagctgaagagacagaagctcaaggccgccatcaaaggccaagagcccttcatcgatggcgacatgccccacccgatatcgaccgaggactcaacctggaccctcaccacggcgccagacggcacaaagaccatcaacatccagctcgacaaagtgaacaagatggagtggtgggcccacgtcgtcacctccgcgcccaagatagacgtcaccaagatcgagcccgagccctccaagctcggcgatttggagggcgagacgaggggcatggtcgagaagatgatgtacgaccagcgccagaaggagatgggcttgccttcttccgatgaccagaagaaggccgatatcctcaagaagttccaggagcagcatcctgagatggactttagccaggccaagattggttgagaaatggtcggggccccaatggagagaaacgttacatattgcatgataccaggagtagttgggaaaatgtgacacttgagttgtatacttagagcggttctttagctatgaccatgcggacgaagttaccgccgtgctctagctagggtcgggatgtgatttaaaaataggtaaatatgttcagggtgaaacgaagaaccctctcccacggagaaaaggggcagaggcatcagagagccctgtcaagctttgctcttggaatcaccagtaatgacatagcagatagaggctgctacgcatcaattgtcagattgataagcgttccgttgagtttggtcctccccacgcatcaaaatcgtgggataaatgtgaagagtgtgaatgcgaaggacggaattatgagatgtacctacaacgttcgtccgggcctacctgtgatctcatagagcagaacgttcagaatgtgttctattgccatgactgctaccatgccagccagaattgagatgtggcagatggggttcttgccaatgcctcacatacacaagcttcctcgtcacataaatcaggataactggttcacaatggcatcattgagctaccgctacactcaacctacggtttagccagccttgctgccttaaaccgactgaccctcttgggtccgccctcctcctcttccagcggctggatcgggctctcgtcctccttgaggaacccgccctggcgattgatcatcttgttgcgcatcttgtagtactcttccgtcacctgctggtgcaggagattggcgtcgaactcgtctggctctttgatctcgttggtcggctcgtgctctaggatatccgatgccacagtacggccctcgggtcccgagggtgcatatctgatcgtgttagtgggcttctcgggtgcaattgcggggaatggcgtggttggtccctcgttggctcggtctcgtttgaatcgagacgctctcttcttggatgcgggcgcgggtttcgcggctccggtcgagctgcgctccactacgtcagacaaggggtctgtttctggtgtctttggttgtttcggttcttgctgagtgggcggggctgaggcttccgcgatatccaaatttgttgcgaatctaacactcttcttcccgtcttgctccggctgggcggagggagaggcgttattgtcactctgtgaggtctgtgtcggttccgcggtctcttgtctaatgcttatgcggccgataccttctgacagcccgtcgtcgtcacccgcaccgccctgtttgccgaggctacgttgggttattcgttctctgagctcatccatctgacgcctgtaatcatcgtccataacccccgatgtggatcggccccagccatcttcatcatcttcctcgtcttcctcctcgtcatcatcatacccccaatcatcttcatcaaaatctgatccctcttcaagattcaattcggcgacgatgggccccatttcgtactccagagtctgtttattgtagcgtatcatgtcctgacgtaaggcagcatcctcagcagactcgtcgacgggcatgacaggatctacgatgataccctcctggtccttggcctggcgatagagctcttccagtctcttgaccggatctggatcagcaagtctcatttcggacgtaggtttcgtatcctcagcaaaggcgacgcttttcttcttgggagctttctcgggcttgaaggccggttcaggtttcgagactctgggccctgtcttttcgctttcggcaactgcggctgacgcaggtaccgagacatctggaatgggtttcggggacgatagagacgataaatctccaacaccggctttctcaagggctttcaggagctgttgctggccatcgcctggccgtcgtaggttgtaggagatgacgttgtcatcgtcatccaactcttccatgatctcggtgatgggcagaccatcctcatcggtggcttctggattgctgacgacacgcgtcgcagcaagcttgttctcggcggcttcgagctgtttagctaacgtgtcgatatttttagaaacatagtccagccgattagatatggtgctaaggatctgatggggttttttggcaccgttgagcccgaagatgtcggtcagctctttgtcgttgaccagctctccgcggaaggctttgcgcgtctgcgataaggcctcgcgcgtggcggtcgaaggtagagcctggacgtcggtgtgcagggcttcatattccgtcttccattgcttccattcgtcgagagcgatgacgagcttgtctacctgctcctcgagctgctgaagatgtttctcaaggtcgagaaagggatctctaacctgtgccatggtacgaagtagagtgctggtggcagactcgcgaagacagggagattggaattttaggacggac

SEQ ID NO: 29851 - DNA, 570 bp, Muscodor strobelii
  misc_feature: SGI cDNA ID NO. 570257
  misc_feature: Encodes the peptide sequence at SEQ ID NO 29852
atggctgacaaagatcccactcccgaagaggtcgccgctgctcgtgccaaggaacgcgctgagcaagatactctgccttacaaatggacacagaccattgccgaggtcgacatcaccattacttctattcccgggaacctcaagggtcgggacctcatcgtcgagctgaagagacagaagctcaaggccgccatcaaaggccaagagcccttcatcgatggcgacatgccccacccgatatcgaccgaggactcaacctggaccctcaccacggcgccagacggcacaaagaccatcaacatccagctcgacaaagtgaacaagatggagtggtgggcccacgtcgtcacctccgcgcccaagatagacgtcaccaagatcgagcccgagccctccaagctcggcgatttggagggcgagacgaggggcatggtcgagaagatgatgtacgaccagcgccagaaggagatgggcttgccttcttccgatgaccagaagaaggccgatatcctcaagaagttccaggagcagcatcctgagatggactttagccaggccaagattggttga

SEQ ID NO: 29852 - protein, 189 aa, Muscodor strobelii
  misc_feature: SGI Peptide ID NO. 570257
  misc_feature (25)..(105): Pfam Id: PF04969 Pfam Desc: CS domain
  misc_feature (1)..(189): NCBI GI: 116180530 Blast Desc: conserved [Chaetomium globosum CBS 148.51] gi|88185190|gb|EAQ92658.1| conserved [Chaetomium globosum CBS 148.51]
  misc_feature (1)..(189): NCBI GI: 256720848 Blast Desc: [Nectria haematococca mpVI 77-13-4]
  misc_feature (1)..(188): NCBI GI: 85116110 Blast Desc: nuclear movement protein nudC [Neurospora crassa OR74A] gi|28926791|gb|EAA35755.1| nuclear movement protein nudC [Neurospora crassa OR74A]
  misc_feature (25)..(188): NCBI GI: 46134051 Blast Desc: FG09165.1 [Gibberella zeae PH-1]
  misc_feature (1)..(188): NCBI GI: 171687693 Blast Desc: protein product [Podospora anserina] gi|170943808|emb|CAP69460.1| protein product [Podospora anserina]
  misc_feature (3)..(189): NCBI GI: 255943233 Blast Desc: Pc18g05580 [Penicillium chrysogenum Wisconsin 54-1255] gi|211587118|emb|CAP94782.1| Pc18g05580 [Penicillium chrysogenum Wisconsin 54-1255]
  misc_feature (1)..(189): NCBI GI: 145616060 Blast Desc: MGG_03604 [Magnaporthe grisea 70-15] gi|145009825|gb|EDJ94481.1| MGG_03604 [Magnaporthe grisea 70-15]
  misc_feature (3)..(189): NCBI GI: 70991513 Blast Desc: nuclear movement protein NudC [Aspergillus fumigatus Af293] gi|66848238|gb|EAL88567.1| nuclear movement protein NudC [Aspergillus fumigatus Af293] gi|159124161|gb|EDP49279.1| nuclear
  misc_feature (3)..(189): NCBI GI: 119468044 Blast Desc: nuclear movement protein [Neosartorya fischeri NRRL 181] gi|119405980|gb|EAW15931.1| nuclear movement protein [Neosartorya fischeri NRRL 181]
  misc_feature (1)..(189): NCBI GI: 240110325 Blast Desc: nuclear movement protein nudC, [Coccidioides posadasii C735 delta SOWgp]
MADKDPTPEEVAAARAKERAEQDTLPYKWTQTIAEVDITITSIPGNLKGRDLIVELKRQKLKAAIKGQEPFIDGDMPHPISTEDSTWTLTTAPDGTKTINIQLDKVNKMEWWAHVVTSAPKIDVTKIEPEPSKLGDLEGETRGMVEKMMYDQRQKEMGLPSSDDQKKADILKKFQEQHPEMDFSQAKIG

SEQ ID NO: 29853 - DNA, 3085 bp, Muscodor strobelii; identical to SEQ ID NO: 29850
  misc_feature: SGI EST ID NO. CUFF.70582.0
  misc_feature: Variant of the nucleotide sequence at SEQ ID NO 29851

SEQ ID NO: 29854 - DNA, 1752 bp, Muscodor strobelii
  misc_feature: SGI cDNA ID NO. 570258
  misc_feature: Encodes the peptide sequence at SEQ ID NO 29855
atggcacaggttagagatccctttctcgaccttgagaaacatcttcagcagctcgaggagcaggtagacaagctcgtcatcgctctcgacgaatggaagcaatggaagacggaatatgaagccctgcacaccgacgtccaggctctaccttcgaccgccacgcgcgaggccttatcgcagacgcgcaaagccttccgcggagagctggtcaacgacaaagagctgaccgacatcttcgggctcaacggtgccaaaaaaccccatcagatccttagcaccatatctaatcggctggactatgtttctaaaaatatcgacacgttagctaaacagctcgaagccgccgagaacaagcttgctgcgacgcgtgtcgtcagcaatccagaagccaccgatgaggatggtctgcccatcaccgagatcatggaagagttggatgacgatgacaacgtcatctcctacaacctacgacggccaggcgatggccagcaacagctcctgaaagcccttgagaaagccggtgttggagatttatcgtctctatcgtccccgaaacccattccagatgtctcggtacctgcgtcagccgcagttgccgaaagcgaaaagacagggcccagagtctcgaaacctgaaccggccttcaagcccgagaaagctcccaagaagaaaagcgtcgcctttgctgaggatacgaaacctacgtccgaaatgagacttgctgatccagatccggtcaagagactggaagagctctatcgccaggccaaggaccaggagggtatcatcgtagatcctgtcatgcccgtcgacgagtctgctgaggatgctgccttacgtcaggacatgatacgctacaataaacagactctggagtacgaaatggggcccatcgtcgccgaattgaatcttgaagagggatcagattttgatgaagatgattgggggtatgatgatgacgaggaggaagacgaggaagatgatgaagatggctggggccgatccacatcgggggttatggacgatgattacaggcgtcagatggatgagctcagagaacgaataacccaacgtagcctcggcaaacagggcggtgcgggtgacgacgacgggctgtcagaaggtatcggccgcataagcattagacaagagaccgcggaaccgacacagacctcacagagtgacaataacgcctctccctccgcccagccggagcaagacgggaagaagagtgttagattcgcaacaaatttggatatcgcggaagcctcagccccgcccactcagcaagaaccgaaacaaccaaagacaccagaaacagaccccttgtctgacgtagtggagcgcagctcgaccggagccgcgaaacccgcgcccgcatccaagaagagagcgtctcgattcaaacgagaccgagccaacgagggaccaaccacgccattccccgcaattgcacccgagaagcccactaacacgatcagatatgcaccctcgggacccgagggccgtactgtggcatcggatatcctagagcacgagccgaccaacgagatcaaagagccagacgagttcgacgccaatctcctgcaccagcaggtgacggaagagtactacaagatgcgcaacaagatgatcaatcgccagggcgggttcctcaaggaggacgagagcccgatccagccgctggaagaggaggagggcggacccaagagggtcagtcggtttaaggcagcaaggctggctaaaccgtag

SEQ ID NO: 29855 - protein, 583 aa, Muscodor strobelii
  misc_feature: SGI Peptide ID NO. 570258
  misc_feature (1)..(582): NCBI GI: 156057661 Blast Desc: SS1G_04562 [Sclerotinia sclerotiorum 1980] gi|154702347|gb|EDO02086.1| SS1G_04562 [Sclerotinia sclerotiorum 1980]
  misc_feature (4)..(582): NCBI GI: 261358668 Blast Desc: conserved [Verticillium albo-atrum VaMs.102]
  misc_feature (1)..(582): NCBI GI: 256735457 Blast Desc: NECHADRAFT_75320 [Nectria haematococca mpVI 77-13-4]
  misc_feature (1)..(582): NCBI GI: 154308398 Blast Desc: BC1G_08259 [Botryotinia fuckeliana B05.10] gi|150852800|gb|EDN27992.1| BC1G_08259 [Botryotinia fuckeliana B05.10]
  misc_feature (10)..(582): NCBI GI: 46107598 Blast Desc: FG00682.1 [Gibberella zeae PH-1]
  misc_feature (10)..(582): NCBI GI: 39943046 Blast Desc: MGG_03603 [Magnaporthe grisea 70-15] gi|145009826|gb|EDJ94482.1| MGG_03603 [Magnaporthe grisea 70-15]
  misc_feature (1)..(582): NCBI GI: 116180528 Blast Desc: CHGG_00892 [Chaetomium globosum CBS 148.51] gi|88185189|gb|EAQ92657.1| CHGG_00892 [Chaetomium globosum CBS 148.51]
  misc_feature (1)..(583): NCBI GI: 85116114 Blast Desc: NCU02589 [Neurospora crassa OR74A] gi|28926792|gb|EAA35756.1| [Neurospora crassa OR74A]
  misc_feature (5)..(582): NCBI GI: 171687695 Blast Desc: protein product [Podospora anserina] gi|170943809|emb|CAP69461.1| protein product [Podospora anserina]
  misc_feature (10)..(580): NCBI GI: 189201485 Blast Desc: conserved [Pyrenophora tritici-repentis Pt-1C-BFP] gi|187984178|gb|EDU49666.1| conserved [Pyrenophora tritici-repentis Pt-1C-BFP]
MAQVRDPFLDLEKHLQQLEEQVDKLVIALDEWKQWKTEYEALHTDVQALPSTATREALSQTRKAFRGELVNDKELTDIFGLNGAKKPHQILSTISNRLDYVSKNIDTLAKQLEAAENKLAATRVVSNPEATDEDGLPITEIMEELDDDDNVISYNLRRPGDGQQQLLKALEKAGVGDLSSLSSPKPIPDVSVPASAAVAESEKTGPRVSKPEPAFKPEKAPKKKSVAFAEDTKPTSEMRLADPDPVKRLEELYRQAKDQEGIIVDPVMPVDESAEDAALRQDMIRYNKQTLEYEMGPIVAELNLEEGSDFDEDDWGYDDDEEEDEEDDEDGWGRSTSGVMDDDYRRQMDELRERITQRSLGKQGGAGDDDGLSEGIGRISIRQETAEPTQTSQSDNNASPSAQPEQDGKKSVRFATNLDIAEASAPPTQQEPKQPKTPETDPLSDVVERSSTGAAKPAPASKKRASRFKRDRANEGPTTPFPAIAPEKPTNTIRYAPSGPEGRTVASDILEHEPTNEIKEPDEFDANLLHQQVTEEYYKMRNKMINRQGGFLKEDESPIQPLEEEEGGPKRVSRFKAARLAKP

SEQ ID NO: 29856 - DNA, 408 bp, Muscodor strobelii
  misc_feature: SGI cDNA ID NO. 570259
  misc_feature: Elevated expression when VOC is produced
  misc_feature: Encodes the peptide sequence at SEQ ID NO 29857
atgctcgcgaaactccttgctattcccgctctcctagccggagttgcactcgcccaggctcccaactttaccaatgacatcccagttgacgccttttacacgattggtgatgacttcgtcttgacctggtccgagacaaagatctccggcactttcgatctcagcatcagtgcttggaactccactccgtacggctacgctcccgggcccttcggcagctctattccccagttcgataccagagagactaagctcgacgctgtcaagtactccgacggtagttacacttggaccgtcgagcccgccaatggcgacgaggtctggcaaggagagcaattctactacagcttctcagcctcttatccttacggtggtgaatctccgcgtgcattccacatcaaagcttaa

SEQ ID NO: 29857 - protein, 135 aa, Muscodor strobelii
  misc_feature: SGI Peptide ID NO. 570259
  misc_feature: Useful for introducing or modulating the production of volatile compounds
MLAKLLAIPALLAGVALAQAPNFTNDIPVDAFYTIGDDFVLTWSETKISGTFDLSISAWNSTPYGYAPGPFGSSIPQFDTRETKLDAVKYSDGSYTWTVEPANGDEVWQGEQFYYSFSASYPYGGESPRAFHIKA

SEQ ID NO: 29858 - DNA, 1174 bp, Muscodor strobelii
  misc_feature: SGI EST ID NO. CUFF.70529.0
  misc_feature: Variant of the nucleotide sequence at SEQ ID NO 29856
cggatttccacacacagtactgacgttcgtttgcttgtagctagatcgtaccagaaagccctcgcactattacgtttccattgtcgcactacacccgatggatgaatccattgggccaatgtcaaggaagatacgaggcggcagtcctgcagccggcttggacaagataggtcagagtcggtacttgatcagatcatcactaggactctgtgagtgtaaagcggtgactgaaagatataaatatcgaatgtcttctctcagctttcgcgacttgatagtggccagcatcctgcgcctttagactgccgtacgtgttcgatatagacgaatatctagccaaaatgctcgcgaaactccttgctattcccgctctcctagccggagttgcactcgcccaggctcccaactttaccaatgacatcccagttgacgccttttacacgattggtgatgacttcgtcttgacctggtccgagacaaagatctccggcactttcgatctcagcatcagtgcttggaactccactccgtacggctacgctcccgggcccttcggcagctctattccccagttcgataccagagagactaagctcgacgctgtcaagtactccgacggtagttacacttggaccgtcgagcccgccaatggcgacgaggtctggcaaggagagcaattctactacagcttctcagcctcttatccttacggtggtgaatctccgcgtgcattccacatcaaagcttaagagattgaaattggaatacactgcacagcgttaaggaaagtcaacattatagcgtcaaaccaccttacctgcaagagatggcgttcctatgtcggacgtaggacttaataccggactgtgaggagatgattggtgctcatgttcctaaaattacgaggccccatttgctttataccttagacatcagtctagtagatactgcagcatctcgacagggtatcagcgaaggcatattgtgttatcgtcaactcaatgtaccgacaggagtgcctactttgtccaagatcgtcttgatttcaccatcccaaagtcgaacgggcgtaaaaactttcagtcgtctaggtagtgaccgtcagatactcaataaatgataagagtaaatgggcaatgagattcacgcgtgtgtggccaaaatgggaataata

SEQ ID NO: 29859 - DNA, 1029 bp, Muscodor strobelii
  misc_feature: SGI cDNA ID NO. 570260
  misc_feature: Encodes the peptide sequence at SEQ ID NO 29860
atggcgtccgaaggcgacgatgtgcttgacctcgtggacatagcagttctactaaactacgagaaatgcaaggcttcaccacattttagcaacacaaaactcatggaagtttgccggccaggacagaatcccgagactgtccaactgacgcgcaagatctgggacgatgactcgcgcccacgaacaactatggttcttgcccgtggcgatggcgagtccgataaagagattgacagaattttggccagcgaaggaaagcttacgcaagacctgccccagctgatgcgaccgattgcgggtatagcgccccaaatagacagtattgggacgaaggagtttgagacattgtattatcagattcaggcccacgacggttgtttcatgtcgattgcactattgcaacacttcttcgacctctaccccagtgacacccgcattcgcatccgtcacggcgcacagcaaggcaatacgccgtcaagctacgttgtcaccatcgaccaacgtcgtattctcgagatgacactagagaacccacgacacaccaacgtcatcattatattgccagacaatatcacacacgtcaacggcgagacttcttggatggtacatgctgccatgggattctatcgcgagaaagcagacggcaagtactcagcggtgcttgatctatcatctcttcagttcggtgagcttggtcgcggacctggcgccaatggcaaggctctttttgcgctcgatacggagagtgagtttcttgacaggatgtcgcaggtggcggaggaccaagccaaggactcgctacacgtagatttgcgaatcggcgagggccccgatgatgagtggctgaaggaggtagcaaagaaggtcaaggagagatgggagcgtagagccgttgagaaatggtgtggacattgtggtcgcgcactgccagtccccaaagcttgtgccaaatgccacaaggcgtggtactgttgtgtggctcatcagaagatgtcatggccgttccataaacatcattgttctgagtga

SEQ ID NO: 29860 - protein, 342 aa, Muscodor strobelii
  misc_feature: SGI Peptide ID NO. 570260
  misc_feature (302)..(340): Pfam Id: PF01753 Pfam Desc: MYND finger
MASEGDDVLDLVDIAVLLNYEKCKASPHFSNTKLMEVCRPGQNPETVQLTRKIWDDDSRPRTTMVLARGDGESDKEIDRILASEGKLTQDLPQLMRPIAGIAPQIDSIGTKEFETLYYQIQAHDGCFMSIALLQHFFDLYPSDTRIRIRHGAQQGNTPSSYVVTIDQRRILEMTLENPRHTNVIIILPDNITHVNGETSWMVHAAMGFYREKADGKYSAVLDLSSLQFGELGRGPGANGKALFALDTESEFLDRMSQVAEDQAKDSLHVDLRIGEGPDDEWLKEVAKKVKERWERRAVEKWCGHCGRALPVPKACAKCHKAWYCCVAHQKMSWPFHKHHCSE

SEQ ID NO: 29861 - DNA, 219 bp, Muscodor strobelii
  misc_feature: SGI cDNA ID NO. 570261
  misc_feature: Encodes the peptide sequence at SEQ ID NO 29862
atgcacttctcgatcgcaatcacttccgccattgctattgcactcgctggccaagccatggctggtgccgttcctcttcgtgctcgcaacgtggaaactgccactgaccctgtatctgcatgtggtcctcccaacaatgagggacaccaagaaggcgatagctgtgcctacaaggctggtccttccaccggcgggtccactgtgaatggcggtcagtga

SEQ ID NO: 29862 - protein, 72 aa, Muscodor strobelii
  misc_feature: SGI Peptide ID NO. 570261
  misc_feature (1)..(70): NCBI GI: 119485016 Blast Desc: NFIA_098870 [Neosartorya fischeri NRRL 181] gi|119410306|gb|EAW20253.1| NFIA_098870 [Neosartorya fischeri NRRL 181]
  misc_feature (6)..(70): NCBI GI: 238581178 Blast Desc: MPER_11337 [Moniliophthora perniciosa FA553] gi|215451887|gb|EEB90454.1| MPER_11337 [Moniliophthora perniciosa FA553]
MHFSIAITSAIAIALAGQAMAGAVPLRARNVETATDPVSACGPPNNEGHQEGDSCAYKAGPSTGGSTVNGGQ

SEQ ID NO: 29863 - DNA, 7992 bp, Muscodor strobelii
  misc_feature: SGI cDNA ID NO. 570262
  misc_feature: Encodes the peptide sequence at SEQ ID NO 29864
atgaactgcggtccaagcgaggcctattcgttcttaactgacgagagcaactctactcccagtatccgcaaagaccacgcggcagcaactgagaccatgaatattgaacccagtaatatgacagaggagcctgcgctggatggccacgaatctgatcccattgtcgtttgcggcttctcaatgaaatttccccaagaagccacaaccgttgacgggttctggcagatgatgatggaaaagcgctgtgccatgagtgactttccgtccgatcgaatcaatcacaaagggttttaccgaaagcaaaaatcattgcaaacgttacctctacgcggtgcacacttcatcaaagaggatctgtcatgttttgacgctgatttcttctcaatatctccgaatgaggctacgtctatggatccaatgcagagatggctcctcgaaacagcatatagggcattcgaaaatgctgggatgccgatggagtccttgaccggctcttccaccgcggtatatacaggttcgttcagcttagactatatgctgcaactggcgagagatgccgaatatagcccagcctacgctgccgtgggttttggtcttagtcttttggcaaatcgtctcagctggttcttcgacttgcgtggacctagcgttggattggactccgcatgttctagttctgcgatggctgtcgatattgcttgcaatgcactgcggagtggatcatgtgatatggcaatcgtcgccggttctaatttggctacatcaccggagccttacatctggatgtctaatatcagctttctgtcgccggatagccggtcctatgcctttgattctagggcaaatggttacgccagaggagaaggcattgccgttgttgtgctcaagaggctctcagatgctctgcgagatggcaacacgattcgtgcagtgataagatctacaggttcaaatgaggatggccgcacgcccggtatcacgcaacccagtcgtaaggcccaggaaaagctaatcctagatacctatcggaaggcaggcttgtcgttgagtcataccagattctttgaagcgcatggaactggaactcaagcaggggatccacgagaggcgctcgctatcggcgccgttttcaggaaacatagatctcatgatgaccctctttatgtgtacgttcgcgttccccccaacgtcattttgtcattgacgctttctcatagcggggccgtcaaatcgaatattggtcatctggaaggcgccagcgctttggcaggattgatcaagactattctggtgctggaacgcggcgtcatcccgccgaatacgaacttccagagcttaaataggaagatcgatcagcgcttcttgaatctagaagtacgtctctttcctacaactcgctgtccttcatattttcctacggaaccaacagtgtggccgaattgtggactacgaagagcgtcaattaactcattcggttatggcggggcaaattcccaccttgtcgtggacgacgcatccaatttcctccgcctactctacataagagcagatcagcgcacacgatcattgctcttgtctagctcttcgatcatacaaccccggtcagaggatcttggtgcccgagaggcgcgatcaaacattgcaaggttaatgatatggtccagtgcagaccaaaacggtctcgacaggattgctcatggcttcgaaaactacagccacaatttgctcggcaccgagtgttcatcagttcattttttggatcggttggctagaaccctagcgtgtaatagaagtcgtcttcaatggaggtccttcgcgcttattagcaatctcacggatttgactgatctcaaatctcgaatgtcactcccagctagagcttcgcctgtgcctctccggataggcttcgttttcactgggcaaggggcgcaatggcatgccatgggtagagaactagacgcgtacccatcttttcggacggagatccagagggctgcgaattatcttcggtctttagggtgtacatgggacgtccaagatgaaatgatgaaagctgagaaggattcgagggtcgacgagaccgagatcagtcaatcgctttgcacggttttgcaagttgccatcgtgaacttgctacgtatgtttggagtccagccagctggtgtagttggccactcctcgggtgagatagcggctgcttatgccagcgggtacatagatctcgagactgcttggaagctggcttatttcaggggacactgcgctcaagaggcgagtgagaaccctcacctgcagaggcaaggcgctatgctatctgttaacttatcggaaactgaagcgatacatctattgcagagtgtgaactacgaggggataccaggtgttggtctatggatcgcctgcgtcaatagtcctcgaaatgtcacgataacgggcgaaggctcggcgataaatctgctgaaaactcggcttgacgaatccagaatacctaacagaaagctccgtgtgcagatggcatatcactcgccatacatggaacccatcgctgccagatacgtagaactaattagaccattacgctgtaacgaggagattggccacaaagccccgatggtttccaccgtgaccggagtgcagatcggagaacaagaattactcgacccatcttactgggcgcgaaacttggtgtcacatgtaaagttccatcaagctatactggagctgtgcagacgatctgcagcagaattgacgaagaagatcgatggaagtcatctccacgcatgtgtcgtggaccatctgctcgagataggaccccattcgacattgcgaggaccaattcgagacaccttgcgagatagtcagcgcctaccccaaataaagtatacatcagtcttggcacgggctcggtctgccacgaagaccatgttgggcgcactgggtgagctgttctgtgcggggtgtgctatgcggattgacgaaataaaccaatgcccgacagacgggagtgtgcctattcctatgttggttgacttaccagaatacccattcgatcattctcagcggtattggcatgagagccgcctgagtcgaaactatcgcttgcgtaatcacgcaccgtcagacattctcggtgttcgttgccgtgactggaaccctgctgacgctcgctggaggcacatcatccgatcatcagagctttcgtggaccgagcagcatgttatcaatggtaccgtgctatatccagggcctggaatgttcgccatggcaattgaagcagcaaagcagttgactttggatcatgacaacacccgcgatatcagagggttctgtctacgtgatgtacgccttgaacgagcgatcaatctgggccagaacggaggtgtcatcgaagcccaaatcactctaaagtcgcctttaaaagtcaatccaagtctgccggtgtttgaatttacagttcagacttatgtatctgaccattgggtgttaaactgcaatggaagtattgcggttgagttcaagcagctacccgactcgtggagcgccaagcaaaacagcacggaggagaagaaacaatccgagagaattgcggcccgtatggacgcatgccgacatacagttgattcgaaatacatttattcgttcttgcaacaatcaggactccaatatggacccttgtttcaagccgcgaaggaccatcgttgcaatgggcatgcaagacaagcgacggccatggtaagcattctcccgacctctgatgactcccaaattatccatccggtttctctcgacacgataatgcatctctgcttcactgcatttacatctggtgggaaaaaaccaatgtctacttctgtaccttctttcatgaagtatctatgggtgtcagattccggactgaatggaagagatggtgaaatagtgtcaacatttgccgccattgcgagcaatacgcctcgtgggttcacaggcaatggagctgccttaagtaggggtccctccagcagccttttgctttggtacgacggactcgagttcacaaatgttagctcgctttcgagtacgtcaaatatgtctcggaagacccaatattgcatgaatacggagttttctgtggcactagacaaaatgacgaacgtcgagctagcttctttccttgcgaagcaacatccggaagaggaggacatgaccggattctacagagatatcgagcaactgatccttatctctctcatgaagctcaggagctcacttgacgtttcctctatccaaccagacgagccctgcaagactcattattggaagtgggcgcaacatcaccttactcgcgaaaatgcgagtctccagcaacagagcctgccaacctatatcgagggttgggacaagaacgatggagactatggtaaagccctagaggagaagaaccatattggcaagctctatgtgacggtggcggagaaccttgaacgcttctacaatggccattggacgtttgccgaagccttgatgcagacagacctgctcagaaactactacgaaagcctcgctcaatcaagaagcatgctacaagcagctacttatttgggacttcttgcacaccaacggcctggcctaagtattctagaggtgggtggcggaacagcgtcggcaacacgcaaattcattgagacactctctcgaggccctggcggtactaccacggcatcccttcgctgcgcaagataccacttcactgatgtttccagtgcctctgtacaaagggcaagcaagagttttgagatatttcgctcgcagatgactttccaggtgctggatatggaacaggaattcggccagcaggggtttgaagacggtgcttacgatgttctgatagcttgcggagtgttgcatcttgcttccagtattgaaacggttcttcagaatgcgaggcgggctctgaagcctggcgggaaactaatcatgcatgagctggtcaatactgatggatggccagcggggttcatctttggattgcatcccgactggtggacggaaagacaagaagatagcgacctatcaccttgtctctccttgatacaatgggatttggctctgcgacaaaatggcttttcaggcatagacctcacgtgcaacgatcacgatagcgacgtagctcaacatcttgtctgcattatctcaacggctaccgcaccagtccagcagtctcaacgccaggtctctacgaaaacgttcgtggcggtcatcgtcatagatcacgattcggcgctgcagatctcattcgcgaatgctttggttgtgtttctgcaaaacactgcatctcggatactaaatatcactatggtatccgaactcgattgcaagctaggccagtgcgacttggttatctgcctagttgactatggaagttcgttcctcgggaatctgaatggaacatcttggcctctcttcaaaaccctgatactggcaacacgccacctgctgtgggtgtcgggaacggaaggtggaggcaagagtccccatccaaactatggaatcattgatggactggcaagaaccttgcgaacagaatattacgatttgcatctagtaactgcgctgctcgatacggcggaggacacgcaaacacagctgaagcacttgtcgcaaattgtcagtgaaatgcggaccgctacaccgaatgagaattacgagccagattatcgtgaaattgacagctacctcaacatatcgcgcctagtggaggctgaatatctcagagcagatatggaatgtttgagcgagccttccacggaggtcggggcagccattgacggactcgaattcgaagcagccagagactcttccaacaggcttgatcgcattccgcattacacgagggcagctccaatagaagagccaacagaagacgatgtcgtcatccaggtccattctgtcgcaattcatcataatggtggtgagtcaggactggggccatccctcggaagctactgtgtcggtgtcatctctgacgtaggtccaaacgctacctttcaacctggtgacgttgtctttgccaatgacagtgattgccttcgctctcatgttcgcgtggcatcgtcgaaagtggtcatcgtctctgaaggcgtgtccggtcctggattgtgtgcaatagccccgactgccattgccgcctatcgtgcattcgtgagtatcgcgcaaatcaaactatatgacaaagttctagtccaccgcggcggaagcatcgctggacagattgcaatagagacactgcaagggctgggactcggggagatatggactaccgtgtcggatgagagtgaatttgactgggtcacacaacgcctgaatctaccggctgatcgagtcttgtcgacgcagtggtttggagcaaatccattgctctattctcaatataatcgggcgttccatgtagtcctttctggatactcagctctcgacattcatcttgccgagtgtgttcagtataacggtcactatttcgttctacaaccatcgtccttggcgcctgtctctttaatgggggctgaaaagctaccagcagggatcaactactccaacgtgtggcccgagtctctgaatgcaactcgtaaggagttgctacacgtagctagaatatccaaggctcaaaggccattcatcgacgatacctggccgcagcaattccttgcgtccgatgtggaaaaggcttacactcaccgacagtcagtcgatggcccgaatactgtcgtaatcaattttgatacctcagacataatcaaggtacatccaccaattccccgcgagacgcgttgtcatctacgaaatgatgcaacctaccttatcactggcggctttgggggcgctggaagggttatggcacgatggctgattgaccacggagctcgttacttgattctactgtctcgctcgggtccatgcactccacaagcacacgagctattaagagattgcgaggccagaagcgtccgtgtcgaagcaccactctgcgatgtttcagacactgctgcaatccggcctctcatagcaaactggtcaaagacactgccacctatcagaggatgtattcagtcagctatggtcatcactgaacgaattttcgagcggatggaatttgatgattggagagctacactgaatccgaaggtacaggggtcttggaacctgcactccttgttgccgcaagaccttgacttctttatcttgatgacatccatgatgggtgtgatagggcgcggttcactctctgcttatgccgcagcaaacacgtacgaggatgccttggttcgataccgcgtgggacgaggccagcgagcgacttcgctcctactcggtcctatccccgacgccggatattttgtcgattacagcaaccccacgtcttccattctccgttcacccaagtatacccctgtctactcaaaagatattggagtgctactcgatatcttttgtgacccaaccaacccgttaacaacaagcaccttcgcatgtcagcccattatagggatcagacctccatctcattggaagcatctggaagaagtacccatgacaatgcagctcccgttgtggggtcacatgcatcatgttccgcgtgcgacagatgatcatgggagtgacgccgatgtaatcgatgtagcgcggcgcaactgccgtctagactccctggagagggttaaagttgcaggttcattaatcgaaggatctgaagtggcgagtgaagtacttgcacagtatatctcgggacttcttggcatagaggaaggacgtgctgatatgcacaagcccttgaactcctacggtctcgactcactcacggcgctagacatccggaattggattggcaggaccttcgacctggatatacctgttttcgatatcctaggcactgcaacatttgcctccgttggaatgacgatcgcgaaggcgcatgtgttaggaaatagtgatgaaaagcccaagccatcaggatag

SEQ ID NO: 29864 - protein, 2663 aa, Muscodor strobelii
  misc_feature: SGI Peptide ID NO. 570262
  misc_feature (635)..(989): Pfam Id: PF00698 Pfam Desc: Acyl transferase domain
  misc_feature (2276)..(2442): Pfam Id: PF00106 Pfam Desc: short chain dehydrogenase
  misc_feature (52)..(301): Pfam Id: PF00109 Pfam Desc: Beta-ketoacyl synthase, N-terminal domain
  misc_feature (309)..(444): Pfam Id: PF02801 Pfam Desc: Beta-ketoacyl synthase, C-terminal domain
  misc_feature (2276)..(2455): Pfam Id: PF08659 Pfam Desc: KR domain
  misc_feature (1540)..(1653): Pfam Id: PF08241 Pfam Desc: Methyltransferase domain
  misc_feature (1540)..(1651): Pfam Id: PF08242 Pfam Desc: Methyltransferase domain
  misc_feature (636)..(908): Pfam Id: PF00698 Pfam Desc: Acyl transferase domain
  misc_feature (309)..(389): Pfam Id: PF02801 Pfam Desc: Beta-ketoacyl synthase, C-terminal domain
  misc_feature (407)..(444): Pfam Id: PF02801 Pfam Desc: Beta-ketoacyl synthase, C-terminal domain
  misc_feature (2580)..(2630): Pfam Id: PF00550 Pfam Desc: Phosphopantetheine attachment site
  misc_feature (35)..(2648): NCBI GI: 242821073 Blast Desc: polyketide synthase, [Talaromyces stipitatus ATCC 10500] gi|218712528|gb|EED11953.1| polyketide synthase, [Talaromyces stipitatus ATCC 10500]
  misc_feature (41)..(2646): NCBI GI: 145250477 Blast Desc: An15g02130 [Aspergillus niger] gi|134082272|emb|CAK42316.1| protein product [Aspergillus niger]
  misc_feature (53)..(2649): NCBI GI: 119497865 Blast Desc: polyketide synthase, [Neosartorya fischeri NRRL 181] gi|119413854|gb|EAW23793.1| polyketide synthase, [Neosartorya fischeri NRRL 181]
  misc_feature (53)..(2649): NCBI GI: 146322741 Blast Desc: polyketide synthase [Aspergillus fumigatus Af293] gi|129556779|gb|EAL87227.2| polyketide synthase, [Aspergillus fumigatus Af293]
  misc_feature (53)..(2649): NCBI GI: 159128679 Blast Desc: polyketide synthase, [Aspergillus fumigatus A1163]
  misc_feature (40)..(2650): NCBI GI: 121711140 Blast Desc: polyketide synthase, [Aspergillus clavatus NRRL 1] gi|119401336|gb|EAW11760.1| polyketide synthase, [Aspergillus clavatus NRRL 1]
  misc_feature (36)..(2647): NCBI GI: 212532263 Blast Desc: polyketide synthase, [Penicillium marneffei ATCC 18224] gi|210071652|gb|EEA25741.1| polyketide synthase, [Penicillium marneffei ATCC 18224]
  misc_feature (53)..(2647): NCBI GI: 238501530 Blast Desc: polyketide synthase, [Aspergillus flavus NRRL3357] gi|220692236|gb|EED48583.1| polyketide synthase, [Aspergillus flavus NRRL3357]
  misc_feature (52)..(2650): NCBI GI: 156063352 Blast Desc: SS1G_01792 [Sclerotinia sclerotiorum 1980] gi|154697128|gb|EDN96866.1| SS1G_01792 [Sclerotinia sclerotiorum 1980]
  misc_feature (53)..(2647): NCBI GI: 169769096 Blast Desc: [Aspergillus oryzae RIB40] gi|83766876|dbj|BAE57016.1| protein product [Aspergillus oryzae]
  misc_feature: Useful for fungicidal and/or biocontrol applications
MNCGPSEAYSFLTDESNSTPSIRKDHAAATETMNIEPSNMTEEPALDGHESDPIVVCGFSMKFPQEATTVDGFWQMMMEKRCAMSDFPSDRINHKGFYRKQKSLQTLPLRGAHFIKEDLSCFDADFFSISPNEATSMDPMQRWLLETAYRAFENAGMPMESLTGSSTAVYTGSFSLDYMLQLARDAEYSPAYAAVGFGLSLLANRLSWFFDLRGPSVGLDSACSSSAMAVDIACNALRSGSCDMAIVAGSNLATSPEPYIWMSNISFLSPDSRSYAFDSRANGYARGEGIAVVVLKRLSDALRDGNTIRAVIRSTGSNEDGRTPGITQPSRKAQEKLILDTYRKAGLSLSHTRFFEAHGTGTQAGDPREALAIGAVFRKHRSHDDPLYVYVRVPPNVILSLTLSHSGAVKSNIGHLEGASALAGLIKTILVLERGVIPPNTNFQSLNRKIDQRFLNLEVRLFPTTRCPSYFPTEPTVWPNCGLRRASINSFGYGGANSHLVVDDASNFLRLLYIRADQRTRSLLLSSSSIIQPRSEDLGAREARSNIARLMIWSSADQNGLDRIAHGFENYSHNLLGTECSSVHFLDRLARTLACNRSRLQWRSFALISNLTDLTDLKSRMSLPARASPVPLRIGFVFTGQGAQWHAMGRELDAYPSFRTEIQRAANYLRSLGCTWDVQDEMMKAEKDSRVDETEISQSLCTVLQVAIVNLLRMFGVQPAGVVGHSSGEIAAAYASGYIDLETAWKLAYFRGHCAQEASENPHLQRQGAMLSVNLSETEAIHLLQSVNYEGIPGVGLWIACVNSPRNVTITGEGSAINLLKTRLDESRIPNRKLRVQMAYHSPYMEPIAARYVELIRPLRCNEEIGHKAPMVSTVTGVQIGEQELLDPSYWARNLVSHVKFHQAILELCRRSAAELTKKIDGSHLHACVVDHLLEIGPHSTLRGPIRDTLRDSQRLPQIKYTSVLARARSATKTMLGALGELFCAGCAMRIDEINQCPTDGSVPIPMLVDLPEYPFDHSQRYWHESRLSRNYRLRNHAPSDILGVRCRDWNPADARWRHIIRSSELSWTEQHVINGTVLYPGPGMFAMAIEAAKQLTLDHDNTRDIRGFCLRDVRLERAINLGQNGGVIEAQITLKSPLKVNPSLPVFEFTVQTYVSDHWVLNCNGSIAVEFKQLPDSWSAKQNSTEEKKQSERIAARMDACRHTVDSKYIYSFLQQSGLQYGPLFQAAKDHRCNGHARQATAMVSILPTSDDSQIIHPVSLDTIMHLCFTAFTSGGKKPMSTSVPSFMKYLWVSDSGLNGRDGEIVSTFAAIASNTPRGFTGNGAALSRGPSSSLLLWYDGLEFTNVSSLSSTSNMSRKTQYCMNTEFSVALDKMTNVELASFLAKQHPEEEDMTGFYRDIEQLILISLMKLRSSLDVSSIQPDEPCKTHYWKWAQHHLTRENASLQQQSLPTYIEGWDKNDGDYGKALEEKNHIGKLYVTVAENLERFYNGHWTFAEALMQTDLLRNYYESLAQSRSMLQAATYLGLLAHQRPGLSILEVGGGTASATRKFIETLSRGPGGTTTASLRCARYHFTDVSSASVQRASKSFEIFRSQMTFQVLDMEQEFGQQGFEDGAYDVLIACGVLHLASSIETVLQNARRALKPGGKLIMHELVNTDGWPAGFIFGLHPDWWTERQEDSDLSPCLSLIQWDLALRQNGFSGIDLTCNDHDSDVAQHLVCIISTATAPVQQSQRQVSTKTFVAVIVIDHDSALQISFANALVVFLQNTASRILNITMVSELDCKLGQCDLVICLVDYGSSFLGNLNGTSWPLFKTLILATRHLLWVSGTEGGGKSPHPNYGIIDGLARTLRTEYYDLHLVTALLDTAEDTQTQLKHLSQIVSEMRTATPNENYEPDYREIDSYLNISRLVEAEYLRADMECLSEPSTEVGAAIDGLEFEAARDSSNRLDRIPHYTRAAPIEEPTEDDVVIQVHSVAIHHNGGESGLGPSLGSYCVGVISDVGPNATFQPGDVVFANDSDCLRSHVRVASSKVVIVSEGVSGPGLCAIAPTAIAAYRAFVSIAQIKLYDKVLVHRGGSIAGQIAIETLQGLGLGEIWTTVSDESEFDWVTQRLNLPADRVLSTQWFGANPLLYSQYNRAFHVVLSGYSALDIHLAECVQYNGHYFVLQPSSLAPVSLMGAEKLPAGINYSNVWPESLNATRKELLHVARISKAQRPFIDDTWPQQFLASDVEKAYTHRQSVDGPNTVVINFDTSDIIKVHPPIPRETRCHLRNDATYLITGGFGGAGRVMARWLIDHGARYLILLSRSGPCTPQAHELLRDCEARSVRVEAPLCDVSDTAAIRPLIANWSKTLPPIRGCIQSAMVITERIFERMEFDDWRATLNPKVQGSWNLHSLLPQDLDFFILMTSMMGVIGRGSLSAYAAANTYEDALVRYRVGRGQRATSLLLGPIPDAGYFVDYSNPTSSILRSPKYTPVYSKDIGVLLDIFCDPTNPLTTSTFACQPIIGIRPPSHWKHLEEVPMTMQLPLWGHMHHVPRATDDHGSDADVIDVARRNCRLDSLERVKVAGSLIEGSEVASEVLAQYISGLLGIEEGRADMHKPLNSYGLDSLTALDIRNWIGRTFDLDIPVFDILGTATFASVGMTIAKAHVLGNSDEKPKPSG

SEQ ID NO: 29865 - DNA, 1018 bp, Muscodor strobelii
  misc_feature: SGI EST ID NO. CUFF.70550.0
  misc_feature: Variant of the nucleotide sequence at SEQ ID NO 29863
tatggtcatcactgaacgaattttcgagcggatggaatttgatgattggagagctacactgaatccgaaggtacaggggtcttggaacctgcactccttgttgccgcaagaccttgacttctttatcttgatgacatccatgatgggtgtgatagggcgcggttcactctctgcttatgccgcagcaaacacgtacgaggatgccttggttcgataccgcgtgggacgaggccagcgagcgacttcgctcctactcggtcctatccccgacgccggatattttgtcgattacagcaaccccacgtcttccattctccgttcacccaagtatacccctgtctactcaaaagatattggagtgctactcgatatcttttgtgacccaaccaacccgttaacaacaagcaccttcgcatgtcagcccattatagggatcagacctccatctcattggaagcatctggaagaagtacccatgacaatgcagctcccgttgtggggtcacatgcatcatgttccgcgtgcgacagatgatcatgggagtgacgccgatgtaatcgatgtagcgcggcgcaactgccgtctagactccctggagagggttaaagttgcaggttcattaatcgaaggatctgaagtggcgagtgaagtacttgcacagtatatctcgggacttcttggcatagaggaaggacgtgctgatatgcacaagcccttgaactcctacggtctcgactcactcacggcgctagacatccggaattggattggcaggaccttcgacctggatatacctgttttcgatatcctaggcactgcaacatttgcctccgttggaatgacgatcgcgaaggcgcatgtgttaggaaatagtgatgaaaagcccaagccatcaggatagattgatttgagtaactacacaagctcaattgctcgacttcgcaatatcacacgttcatttttagttaagtaggtagtgtaacggcatattttatatgattcgaattttcaacccttg

SEQ ID NO: 29866 - DNA, 678 bp, Muscodor strobelii
  misc_feature: SGI cDNA ID NO. 570263
  misc_feature: Elevated expression when VOC is produced
  misc_feature: Encodes the peptide sequence at SEQ ID NO 29867
atgggacgaacagcaacgtgggtctttctttacggcataagtaaacctctcgactcgagcacgagaagaacactaaatgtcctacagcttatgaaggtgcagactgcttcgctgcgtcatgagctactagaagacgagtatgaatttgagttcgtagaggcttctgtgccgtgtgccatggctccaggaattgagagactaatcacacctggggagaaattcttcggcttctatgatccacatgacctatctaggacccttatgccttgtttggtacatctgaacaattacatcaaaatagaggggccttttgatgggctaataggattctctgctggtgccgtattgctcgctatgtacgtcatcgagcggcagaggcagaatatcacggtgccattcagatgtgctattttcctgtcggctgcgtctagtggactagagttcgacttcataaaattcgataggctgcatgatctgatcaaaatcccgacgttgcatatttggggttcggaggaccaagttgccccacagggagggatggatttgtatctaaagtgcgatcatggaaccaggagcaagctcgcgcataacggaggacacgaagttccaaagaacgagtatctgatcgatgccgtgaaagctattcgcaaggtagtcgacttggcagatcaggtgtag

SEQ ID NO: 29867 - protein, 225 aa, Muscodor strobelii
  misc_feature: SGI Peptide ID NO. 570263
  misc_feature (24)..(224): Pfam Id: PF03959 Pfam Desc: Serine hydrolase (FSH1)
  misc_feature (95)..(119): Pfam Id: PF03959 Pfam Desc: Serine hydrolase (FSH1)
  misc_feature (30)..(224): NCBI GI: 242821117 Blast Desc: conserved [Talaromyces stipitatus ATCC 10500] gi|218712537|gb|EED11962.1| conserved [Talaromyces stipitatus ATCC 10500]
  misc_feature (30)..(219): NCBI GI: 145250479 Blast Desc: An15g02140 [Aspergillus niger] gi|134082273|emb|CAK42317.1| protein product [Aspergillus niger]
  misc_feature (50)..(222): NCBI GI: 242810819 Blast Desc: DUF341 domain protein [Talaromyces stipitatus ATCC 10500] gi|218716286|gb|EED15708.1| DUF341 domain protein [Talaromyces stipitatus ATCC 10500]
  misc_feature (29)..(224): NCBI GI: 145235491 Blast Desc: An03g05130 [Aspergillus niger] gi|134058079|emb|CAK49165.1| protein product [Aspergillus niger]
  misc_feature (29)..(222): NCBI GI: 238501528 Blast Desc: conserved [Aspergillus flavus NRRL3357] gi|220692235|gb|EED48582.1| conserved [Aspergillus flavus NRRL3357]
  misc_feature (29)..(203): NCBI GI: 145243752 Blast Desc: An11g03930 [Aspergillus niger] gi|134079069|emb|CAK48378.1| protein product [Aspergillus niger]
  misc_feature (29)..(222): NCBI GI: 145259393 Blast Desc: An04g10020 [Aspergillus niger] gi|134074981|emb|CAK39061.1| protein product [Aspergillus niger]
  misc_feature (29)..(203): NCBI GI: 261353179 Blast Desc: DUF341 domain-containing protein [Verticillium albo-atrum VaMs.102]
  misc_feature (30)..(219): NCBI GI: 212532261 Blast Desc: conserved [Penicillium marneffei ATCC 18224] gi|210071651|gb|EEA25740.1| conserved [Penicillium marneffei ATCC 18224]
  misc_feature (68)..(220): NCBI GI: 121700452 Blast Desc: conserved [Aspergillus clavatus NRRL 1] gi|119396633|gb|EAW07065.1| conserved [Aspergillus clavatus NRRL 1]
  misc_feature (75)..(204): SWISSPROT Homolog: EC 1.5.1.3 Dihydrofolate reductase
  misc_feature: Useful for introducing or modulating the production of volatile compounds
MGRTATWVFLYGISKPLDSSTRRTLNVLQLMKVQTASLRHELLEDEYEFEFVEASVPCAMAPGIERLITPGEKFFGFYDPHDLSRTLMPCLVHLNNYIKIEGPFDGLIGFSAGAVLLAMYVIERQRQNITVPFRCAIFLSAASSGLEFDFIKFDRLHDLIKIPTLHIWGSEDQVAPQGGMDLYLKCDHGTRSKLAHNGGHEVPKNEYLIDAVKAIRKVVDLADQV

SEQ ID NO: 29868 - DNA, 1122 bp, Muscodor strobelii
  misc_feature: SGI EST ID NO. CUFF.70617.1
  misc_feature: Variant of the nucleotide sequence at SEQ ID NO 29866
gtaccttaccatgactattagactacaccttctgatttgatcgaatgattctagctcttgaacagcgctgcacggacaagtttttgttttccccatctgaactataaatcttgcggcattatacggatgaaatcttgcgtgtaaatgagcatcggctatgcaaagagtttcctgcctaccggactcgttcatggtattttcaatcgagaaaatgagatttctgtgcctccacggaaatgggacgaacagcaacgtgggtctttctttacggcataacttatgaaggtgcagactggttggttgatgatgttcagtctccatccactgacgttaacaagaggccgatagcttcgctgcgtcatgagctactagaagacgagtatgaatttgagttcgtagaggcttctgtgccgtgtgccatggctccaggaattgagagactaatcacacctggggagaaattcttcggcttctatgatccacatgacctatctaggacccttatgccttgtttggtacatctgaacaattacatcaaaatagaggggccttttgatgggctaataggattctctgctggtgccgtattgctcgctatgtacgtcatcgagcggcagaggcagaatatcacggtgccattcagatgtgctattttcctgtcggctgcgtctagtggactagagttcgacttcataaaattcgataggctgcatgatctgatcaaaatcccgacgttgcatatttggggttcggaggaccaagttgccccacagggagggatggatttgtatctaaagtgcgatcatggaaccaggagcaagctcgcgcataacggaggacacgaagttccaaagaacgagtatctgatcgatgccgtgaaagctattcgcaaggtagtcgacttggcagatcaggtgtaggccttcaggataatcattctcctgcttgtgtagtccttggatacggtagtcagcgtgtctctctggtggctgcattggtaccttgcttaatttgtgttcccgtgatcaatcaatctgtagctattatgtataggaaacgagatacaacacatcacagtagtttctataccggatgagtcgtcgccggaggtgttcatcgtcc

SEQ ID NO: 29869 - DNA, 570 bp, Muscodor strobelii
  misc_feature: SGI cDNA ID NO. 570264
  misc_feature: Encodes the peptide sequence at SEQ ID NO 29870
atggcgtaccggtttcccctctgcgatgcgccggacccatcggctcgcatgttggtggaagaatcgctcaaagagatgattgggggcacaccgccattcccatggatcgagagcgacgagcagtcactgatggggtgttacgcgccaatgtgctactccccgcagattactcggcaaatctttgagatgggcaagacggcgttcacgatggagttcatatctccaatgaaacgagaactagcgatactcggcttgctatccgtactgaaagttccatacatgatgcattgccatggtattgtctcggttcactccggcttgaccgaaaagcaatgcgacgacgcattggccgggaagacacctcagggattatctcaggggcaggagtgtgtgtaccggctttcgcgaaccctgacaagccttaaaggaccgttagataaagcttcgtgggacgagttctcctctttgatgagcaagaccgaattcgtcacagtgacgcatctcgtaggtgcttatcgttggcttgcattactgacgcaagtgaacggcgaggatgaacggcgattgtag

SEQ ID NO: 29870 - protein, 189 aa, Muscodor strobelii
  misc_feature: SGI Peptide ID NO. 570264
  misc_feature (1)..(187): NCBI GI: 242821083 Blast Desc: TSTA_000330 [Talaromyces stipitatus ATCC 10500] gi|218712530|gb|EED11955.1| TSTA_000330 [Talaromyces stipitatus ATCC 10500]
  misc_feature (1)..(187): NCBI GI: 145250483 Blast Desc: An15g02160 [Aspergillus niger] gi|134082275|emb|CAK42319.1| protein product [Aspergillus niger]
  misc_feature (15)..(181): NCBI GI: 242816332 Blast Desc: TSTA_107240 [Talaromyces stipitatus ATCC 10500] gi|218715094|gb|EED14517.1| TSTA_107240 [Talaromyces stipitatus ATCC 10500]
  misc_feature (47)..(178): NCBI GI: 156053507 Blast Desc: [Sclerotinia sclerotiorum 1980] gi|154704699|gb|EDO04438.1| [Sclerotinia sclerotiorum 1980]
  misc_feature (37)..(178): NCBI GI: 154290593 Blast Desc: [Botryotinia fuckeliana B05.10] gi|150847491|gb|EDN22684.1| [Botryotinia fuckeliana B05.10]
  misc_feature (39)..(172): NCBI GI: 27375344 Blast Desc: bll0233 [Bradyrhizobium japonicum USDA 110] gi|27348480|dbj|BAC45498.1| bll0233 [Bradyrhizobium japonicum USDA 110]
  misc_feature (77)..(142): NCBI GI: 238508631 Blast Desc: AFLA_114500 [Aspergillus flavus NRRL3357] gi|220688395|gb|EED44748.1| AFLA_114500 [Aspergillus flavus NRRL3357]
  misc_feature (39)..(172): NCBI GI: 148252468 Blast Desc: BBta_0886 [Bradyrhizobium sp. BTAi1] gi|146404641|gb|ABQ33147.1| BBta_0886 [Bradyrhizobium sp. BTAi1]
  misc_feature (34)..(172): NCBI GI: 188583040 Blast Desc: Carboxymuconolactone decarboxylase [Methylobacterium populi BJ001] gi|179346538|gb|ACB81950.1| Carboxymuconolactone decarboxylase [Methylobacterium populi BJ001]
  misc_feature (43)..(178): NCBI GI: 170739902 Blast Desc: M446_1625 [Methylobacterium sp. 4-46] gi|168194176|gb|ACA16123.1| conserved [Methylobacterium sp. 4-46]
MAYRFPLCDAPDPSARMLVEESLKEMIGGTPPFPWIESDEQSLMGCYAPMCYSPQITRQIFEMGKTAFTMEFISPMKRELAILGLLSVLKVPYMMHCHGIVSVHSGLTEKQCDDALAGKTPQGLSQGQECVYRLSRTLTSLKGPLDKASWDEFSSLMSKTEFVTVTHLVGAYRWLALLTQVNGEDERRL

SEQ ID NO: 29871 - DNA, 716 bp, Muscodor strobelii
  misc_feature: SGI EST ID NO. CUFF.70613.1
  misc_feature: Variant of the nucleotide sequence at SEQ ID NO 29869
gttgctagactcgcaaatcaatcgatgacatcatggcgtaccggtttcccctctgcgatgcgccggacccatcggctcgcatgttggtggaagaatcgctcaaagagatgattgggggcacaccgccattcccatggatcgagagcgacgagcagtcactgatggggtgttacgcgccaatgtgctactccccgcagattactcggcaaatctttgagatgggcaagacggcgttcacgatggagttcatatctccaatgaaacgagaactagcgatactcggcttgctatccgtactgaaagttccatacatgatgcattgccatggtattgtctcggttcactccggcttgaccgaaaagcaatgcgacgacgcattggccgggaagacacctcagggattatctcaggggcaggagtgtgtgtaccggctttcgcgaaccctgacaagccttaaaggaccgttagataaagcttcgtgggacgagttctcctctttgatgagcaagaccgaattcgtcacagtgacgcatctcgtaggtgcttatcgttggcttgcattactgacgcaagtgaacggcgaggatgaacggcgattgtagggcgtgttagtttatgttgcattgctagttgaccccaagatcaataaaatttcttgcacgaaagtacacatattgcgatgtttcctgggtgtggtaggctgcgaagaaacacca

SEQ ID NO: 29872 - DNA, 1026 bp, Muscodor strobelii
  misc_feature: SGI cDNA ID NO. 570265
  misc_feature: Encodes the peptide sequence at SEQ ID NO 29873
atggacatcgtcattataggaggttctttggcggggctgatgtgcggtattactttgagagactcgggtcacaggatcactattttagagaaaggggaagatgagcgggtcagtcatatggcaggtgtttgcctaggcttagatgccagacgtttcttatcgcgacacgaccgccatcactcaatcttttctcataagacgactcgcatccagctctcaagtaacacgggcattcaacagttcttcgacgtgcggcgtgacataacaaactgggagacattttaccaccgtctacggtcgagctttgatggatatgtaagctctcattatcctttacctccggaaaacgtcgacggcatcaaattttgctcctatgaatctcaaagagaagtcattgatatagctcccgtcgaagggaaagatggacctcttgccttgaccgtcctgagccggaatgataacatgacccaaacggtacgagctgatcttgttattgctgctgacgggccctcgtcattcatccgagccaagtatagccctgatacccagcgccagtacgttggatatgttgcctggaggggaacagtgcctgaggtcgagctatctgagagcacacgtgagctctgtagcagtaatgtgaccgtcttccgcatgcaccgaagccattgtatcatgtacatgattccagggcaaaacggctctctcaaattaggtgaacgctacatgaatttcttgtggtataccaacgagaccacagactcactacaaaggatcatgcaagatgagattacaggccatgttcatcataatatcgtgcccgccggtcacgttcgatccgatgtctgggctgagcgtgttcagatagcgaaaacagttccgttttccacacctttcctcgaagtcctactcaagatccaaaacccattcattcaggttataacagaattctgttcatcgaatgccgcttttgaaggcggacggattcttttggtgggagactcagtgtcacttattcgtccccagtaa

SEQ ID NO: 29873 - protein, 341 aa, Muscodor strobelii
  misc_feature: SGI Peptide ID NO. 570265
  misc_feature (2)..(33): Pfam Id: PF00890 Pfam Desc: FAD binding domain
  misc_feature (2)..(30): Pfam Id: PF00070 Pfam Desc: Pyridine nucleotide-disulphide oxidoreductase
  misc_feature (2)..(42): Pfam Id: PF07992 Pfam Desc: Pyridine nucleotide-disulphide oxidoreductase
  misc_feature (1)..(341): NCBI GI: 242821078 Blast Desc: conserved [Talaromyces stipitatus ATCC 10500] gi|218712529|gb|EED11954.1| conserved [Talaromyces stipitatus ATCC 10500]
  misc_feature (1)..(340): NCBI GI: 145250487 Blast Desc: An15g02180 [Aspergillus niger] gi|134082277|emb|CAK42321.1| protein product [Aspergillus niger]
  misc_feature (2)..(340): NCBI GI: 242816336 Blast Desc: conserved [Talaromyces stipitatus ATCC 10500] gi|218715095|gb|EED14518.1| conserved [Talaromyces stipitatus ATCC 10500]
  misc_feature (1)..(341): NCBI GI: 145238220 Blast Desc: An07g06800 [Aspergillus niger] gi|134076239|emb|CAK39525.1| protein product [Aspergillus niger]
  misc_feature (1)..(340): NCBI GI: 169598980 Blast Desc: SNOG_02301 [Phaeosphaeria nodorum SN15] gi|160704511|gb|EAT90513.2| SNOG_02301 [Phaeosphaeria nodorum SN15]
  misc_feature (1)..(340): NCBI GI: 154311293 Blast Desc: BC1G_06499 [Botryotinia fuckeliana B05.10] gi|150850896|gb|EDN26089.1| BC1G_06499 [Botryotinia fuckeliana B05.10]
  misc_feature (2)..(340): NCBI GI: 189208386 Blast Desc: monoxygenase [Pyrenophora tritici-repentis Pt-1C-BFP] gi|187976619|gb|EDU43245.1| monoxygenase [Pyrenophora tritici-repentis Pt-1C-BFP]
  misc_feature (1)..(340): NCBI GI: 156065277 Blast Desc: SS1G_00649 [Sclerotinia sclerotiorum 1980] gi|154691508|gb|EDN91246.1| SS1G_00649 [Sclerotinia sclerotiorum 1980]
  misc_feature (1)..(341): NCBI GI: 156032778 Blast Desc: SS1G_13794 [Sclerotinia sclerotiorum 1980] gi|154699197|gb|EDN98935.1| SS1G_13794 [Sclerotinia sclerotiorum 1980]
  misc_feature (6)..(341): NCBI GI: 171676475 Blast Desc: protein product [Podospora anserina] gi|170936304|emb|CAP60962.1| protein product [Podospora anserina]
MDIVIIGGSLAGLMCGITLRDSGHRITILEKGEDERVSHMAGVCLGLDARRFLSRHDRHHSIFSHKTTRIQLSSNTGIQQFFDVRRDITNWETFYHRLRSSFDGYVSSHYPLPPENVDGIKFCSYESQREVIDIAPVEGKDGPLALTVLSRNDNMTQTVRADLVIAADGPSSFIRAKYSPDTQRQYVGYVAWRGTVPEVELSESTRELCSSNVTVFRMHRSHCIMYMIPGQNGSLKLGERYMNFLWYTNETTDSLQRIMQDEITGHVHHNIVPAGHVRSDVWAERVQIAKTVPFSTPFLEVLLKIQNPFIQVITEFCSSNAAFEGGRILLVGDSVSLIRPQ

SEQ ID NO: 29874 - DNA, 2192 bp, Muscodor strobelii
  misc_feature: SGI EST ID NO. CUFF.70853.0
  misc_feature: Variant of the nucleotide sequence at SEQ ID NO 29872
ggtcattatgacagctcaaggacgagaccatacccttatggcgcgtttgttagctataagacaaaatcaattgcctcttagcctctttgttcacacctatactggatgtcttagcaaagacacgactagaagaggcaacgatcaagccaatggacatcgtcattataggaggttctttggcggggctgatgtgcggtattactttgagagactcgggtcacaggatcactattttagagaaaggggaagatgagcgggtcagtcatatggcaggtgtttgcctaggcttagatgccagacgtttcttatcgcgacacgaccgccatcactcaatcttttctcataagacgactcgcatccagctctcaagtaacacgggcattcaacagttcttcgacgtgcggcgtgacataacaaactgggagacattttaccaccgtctacggtcgagctttgatggatatgtaagctctcattatcctttacctccggaaaacgtcgacggcatcaaattttgctcctatgaatctcaaagagaagtcattgatatagctcccgtcgaagggaaagatggacctcttgccttgaccgtcctgagccggaatgataacatgacccaaacggtacgagctgatcttgttattgctgctgacgggccctcgtcattcatccgagccaagtatagccctgatacccagcgccagtacgttggatatgttgcctggaggggaacagtgcctgaggtcgagctatctgagagcacacgtgagctctgtagcagtaatgtgaccgtcttccgcatgcaccgaagccattgtatcatgtacatgattccagggcaaaacggctctctcaaattaggtgaacgctacatgaatttcttgtggtataccaacgagaccacagactcactacaaaggatcatgcaagatgagattacaggccatgttcatcataatatcgtgcccgccggtcacgttcgatccgatgtctgggctgagcgtgttcagatagcgaaaacagttccgttttccacacctttcctcgaagtcctactcaagatccaaaacccattcattcaggttataacagaattctgttcatcgaatgccgcttttgaaggcggacggattcttttggtgggagactcagtgtcacttattcgtccccatactgccttcagtgcaactcatgctgcatatcacgctcttatggtagatgagttcacacgtggaaacatatcattggcgacgtgggaaagaaaggtcctcatgtattcatacctacattggcgccagggtatatggtggggcgaattctaccagaaccatctcattgttgctttgttctgtggagttttgttctggatcccttcgctggtgcaattactgttctctcggttgtttggtaccgagtggcttctcagaagtcatgttggacaacatgacgacaggtggctgaagtatgacgcagaaaaaaaaccaggagacagttgaaaggcttatagcaatcttcatgaagtcagcccaagcacaaaaatgggcgattggttgctaccattcaccatacgatttttcatgttaagatatgagacgagctacacatattatcgcgattataaatcgatctctctaactaatacgtgaattcttgaccaatgagctcctcgctcaacttccataaacgttctgcttcaatagagttggtcgcccacggcatcaaagtgtgcttccatggagaagcaacctcatagtgatcgaggtaagcaccgttgtgatctaagagatatcgtcctttagaaactgaataggtagggcgatcaatttagcttactcttgagatcaggatcgaatgctgcatacgcaaatggaccggccacaacctcggtcgagtggagaggagcgtgttctgcccagcccgccttgttccccagtatgcgatctagatattctagagcatgaccagttagacgttttgcttcaatgcatacgaagattgcttacgagcggtgggataatcgccggcccatgtcatgtgagtcagaaggcccgtctcctgacatactcccggatgcacgctgaaggatagcaagtggtgcttcgtgcccaacttctccgccagcgatagtgccattaaagcgtttgctgtcttggtttgaccataggcagagaagggttggtattgcattccgt

SEQ ID NO: 29875 - DNA, 987 bp, Muscodor strobelii
  misc_feature: SGI cDNA ID NO. 570266
  misc_feature: Elevated expression when VOC is produced
  misc_feature: Encodes the peptide sequence at SEQ ID NO 29876
atgagcgacgagaatgaatacccaccggttgctgaggttgcgaagcgatatgcggcacaaattaaggacaaagtagtcctagtgatcggtgcttcggccaaatcactgggagctgccttcattaatggcatagctccgcatggcccacgtcatgtcatcatcgcaggtcgcactgcaagcaaggtccaacaggtcaaggatgatttggcagcagcacatcccaatcttccagtacgcacgatggtgttcgatctgtcctcgttcgaggcaactcgctccgctgctaaggaagtcaacggctgggacgacataccgcagatagatgttttcgtcaacagcgctggagtgatgggtctgccctgggccacatccacggatggctatgagatgcagcttgccgtgaatcatttgggaccatttctattcatcaatttgatcatggaaaagattctggcctccccaaatcctcgcctcgtccaagtcagcagcgacgcccatcgattttgtccaatccgcttcggcgatatcaactttcgtaacggaatgcaataccaacccttctctgcctatggtcaaaccaagacagcaaacgctttaatggcactatcgctggcggagaagttgggcacgaagcaccacttgctatccttcagcgtgcatccgggagtatgtcaggagacgggccttctgactcacatgacatgggccggcgattatcccaccgctcaatatctagatcgcatactggggaacaaggcgggctgggcagaacacgctcctctccactcgaccgaggttgtggccggtccatttgcgtatgcagcattcgatcctgatctcaagaatcacaacggtgcttacctcgatcactatgaggttgcttctccatggaagcacactttgatgccgtgggcgaccaactctattgaagcagaacgtttatggaagttgagcgaggagctcattggtcaagaattcacgtattag

SEQ ID NO: 29876 - protein, 328 aa, Muscodor strobelii
  misc_feature: SGI Peptide ID NO. 570266
  misc_feature (11)..(328): NCBI GI: 171685268 Blast Desc: protein product [Podospora anserina] gi|170942595|emb|CAP68247.1| protein product [Podospora anserina]
  misc_feature (12)..(328): NCBI GI: 258565531 Blast Desc: conserved [Uncinocarpus reesii 1704] gi|237907211|gb|EEP81612.1| conserved [Uncinocarpus reesii 1704]
  misc_feature (12)..(328): NCBI GI: 121700999 Blast Desc: short-chain dehydrogenase, [Aspergillus clavatus NRRL 1] gi|119396907|gb|EAW07338.1| short-chain dehydrogenase, [Aspergillus clavatus NRRL 1]
  misc_feature (13)..(328): NCBI GI: 189211632 Blast Desc: retinol dehydrogenase 13 [Pyrenophora tritici-repentis Pt-1C-BFP] gi|187979344|gb|EDU45970.1| retinol dehydrogenase 13 [Pyrenophora tritici-repentis Pt-1C-BFP]
  misc_feature (5)..(328): NCBI GI: 238839103 Blast Desc: WW domain-containing oxidoreductase [Microsporum canis CBS 113480]
  misc_feature (12)..(328): NCBI GI: 119483516 Blast Desc: short-chain dehydrogenase, [Neosartorya fischeri NRRL 181] gi|119409817|gb|EAW19764.1| short-chain dehydrogenase, [Neosartorya fischeri NRRL 181]
  misc_feature (5)..(328): NCBI GI: 115387141 Blast Desc: conserved [Aspergillus terreus NIH2624] gi|114195160|gb|EAU36860.1| conserved [Aspergillus terreus NIH2624]
  misc_feature (1)..(328): NCBI GI: 46109408 Blast Desc: FG01586.1 [Gibberella zeae PH-1]
  misc_feature (12)..(328): NCBI GI: 70983297 Blast Desc: short-chain dehydrogenase [Aspergillus fumigatus Af293] gi|66844801|gb|EAL85138.1| short-chain dehydrogenase, [Aspergillus fumigatus Af293]
  misc_feature (12)..(328): NCBI GI: 255953383 Blast Desc: Pc21g03960 [Penicillium chrysogenum Wisconsin 54-1255] gi|211589155|emb|CAP95293.1| Pc21g03960 [Penicillium chrysogenum Wisconsin 54-1255]
  misc_feature (28)..(323): SWISSPROT Homolog: EC 1.3.1.33 Protochlorophyllide reductase
  misc_feature: Useful for introducing or modulating the production of volatile compounds
MSDENEYPPVAEVAKRYAAQIKDKVVLVIGASAKSLGAAFINGIAPHGPRHVIIAGRTASKVQQVKDDLAAAHPNLPVRTMVFDLSSFEATRSAAKEVNGWDDIPQIDVFVNSAGVMGLPWATSTDGYEMQLAVNHLGPFLFINLIMEKILASPNPRLVQVSSDAHRFCPIRFGDINFRNGMQYQPFSAYGQTKTANALMALSLAEKLGTKHHLLSFSVHPGVCQETGLLTHMTWAGDYPTAQYLDRILGNKAGWAEHAPLHSTEVVAGPFAYAAFDPDLKNHNGAYLDHYEVASPWKHTLMPWATNSIEAERLWKLSEELIGQEFTY

SEQ ID NO: 29877 - DNA, 3012 bp, Muscodor strobelii
  misc_feature: SGI EST ID NO. CUFF.70854.1
  misc_feature: Variant of the nucleotide sequence at SEQ ID NO 29875
ttcagctaatagcatcaagaagggcgatatggtcgcacttcggagttttcagatatgaatgtatttgttcagatcgtggatagcgcgatcaatgtgacttatcgagaggtatggtttgaatgcgtagggtaggacgaaatgtgatatttgtatacccaatgacaaactttttgcagaattatatcctccgacttgtcaagttacgttagaaagctacttgcttttatatatcaatccaactttatgggtcggtggcggatgaccgtgccaggccctcatctcactgtgggcgattgctcccttagcgaaaggcaggtatcatgtcttggcccctttgaatgataagtagtcgcgcaatggcattcgcttccccgaaataacttcaccccgcatgaggcacgagaggcatatagactgctcttataagagcggagctttcttacttgtccttttccaagcactattgcaagtctctacattacctggtcgtcgccatgagcgacgagaatgaatacccaccggttgctgaggttgcgaagcgatatgcggcacaaattaaggacaaagtagtcctagtgatcggtgcttcggccaaatcactgggagctgccttcattaatggcatagctccgcatggcccacgtcatgtcatcatcgcaggtcgcactgcaagcaaggtccaacaggtcaaggatgatttggcagcagcacatcccaatcttccagtacgcacgatggtgttcgatctgtcctcgttcgaggcaactcgctccgctgctaaggaagtcaacggctgggacgacataccgcagatagatgttttcgtcaacagcgctggagtgatgggtctgccctgggccacatccacggatggctatgagatgcagcttgccgtgaatcatttgggaccatttctattcatcaatttgatcatggaaaagattctggcctccccaaatcctcgcctcgtccaagtcagcagcgacgcccatcgattttgtccaatccgcttcggcgatatcaactttcgtaacggaatgcaataccaacccttctctgcctatggtcaaaccaagacagcaaacgctttaatggcactatcgctggcggagaagttgggcacgaagcaccacttgctatccttcagcgtgcatccgggagtatgtcaggagacgggccttctgactcacatgacatgggccggcgattatcccaccgctcaatatctagatcgcatactggggaacaaggcgggctgggcagaacacgctcctctccactcgaccgaggttgtggccggtccatttgcgtatgcagcattcgatcctgatctcaagaatcacaacggtgcttacctcgatcactatgaggttgcttctccatggaagcacactttgatgccgtgggcgaccaactctattgaagcagaacgtttatggaagttgagcgaggagctcattggtcaagaattcacgtattagttagagagatcgatttataatcgcgataatatgtgtagctcgtctcatatcttaacatgaaaaatcgtatggtgaatggtagcaaccaatcgcccatttttgtgcttgggctgacttcatgaagattgctataagcctttcaactgtctcctggttttttttctgcgtcatacttcagccacctgtcgtcatgttgtccaacatgacttctgagaagccactcggtaccaaacaaccgagagaacagtaattgcaccagcgaagggatccagaacaaaactccacagaacaaagcaacaatgagatggttctggtagaattcgccccaccatataccctggcgccaatgtaggtatgaatacatgaggacctttctttcccacgtcgccaatgatatgtttccacgtgtgaactcatctaccataagagcgtgatatgcagcatgagttgcactgaaggcagtactgagttccttaatgatcaatagatatttcactagcggttgctgatatctgagggatgagtttgagagcacttactggggacgaataagtgacactgagtctcccaccaaaagaatccgtccgccttcaaaagcggcattcgatgaacagaattctgttataacctgaatgaatgggttttggatcttgagtaggacttcgaggaaaggtgtggaaaacggaactgttttcgctatctgaacacgctcagcccagacatcggatcgaacgtgaccggcgggcacgatattatgatgaacatggcctgtaatctcatcttgcatgatcctttgtagtgagtctgtggtctcgttggtataccacaagaaattcatgtagcgttcacctaatttgagagagccgttttgccctggaatcatgtacatgatacaatggcttcggtgcatgcggaagacggtcacattactgctacagagctcacgtgtgctctcagatagctcgacctcaggcactgttcccctccaggcaacatatccaacgtactggcgctgggtatcagggctatacttggctcggatgaatgacgagggcccgtcagcagcaataacaagatcagctcgtaccgtttgggtcatgttatcattccggctcaggacggtcaaggcaagaggtccatctttcccttcgacgggagctatatcaatgacttctctttgagattcataggagcaaaatttgatgccgtcgacgttttccggaggtaaaggataatgagagcttacatatccatcaaagctcgaccgtagacggtggtaaaatgtctcccagtttgttatgtcacgccgcacgtcgaagaactgttgaatgcccgtgttacttgagagctggatgcgagtcgtcttatgagaaaagattgagtgatggcggtcgtgtcgcgataagaaacgtctggcatctaagcctaggcaaacacctgccatatgactgacccgctcatcttcccctttctctaaaatagtgatcctgtgacccgagtctctcaaagtaataccgcacatcagccccgc

SEQ ID NO: 29878 - DNA, 1023 bp, Muscodor strobelii
  misc_feature: SGI cDNA ID NO. 570267
  misc_feature: Elevated expression when VOC is produced
  misc_feature: Encodes the peptide sequence at SEQ ID NO 29879
atgggcgcccctttcaacgcagatgcacttgcacgcggcgtcctagctgcgggtctcgttctttcaagcctggcagtgttgttacgtctttacacacgagctttccgcgtcaagacagtccaactggaagactacgttgggctcggtggttatgctgcatatctcacgttgaccgcctacatattccggctcgtcgacaccggcaagttatttgtccacgcaggcgacttcgatctgcccgaaatacccggcttcgttcatacgttcttcgccggcgctatcgtataccacatcaccctattgtttctcaagaatgctatattgctcgaatggatcagcatcttcgtcccaagagggacgcacaccaggttcttctgggcgtgctgcagcgtccttgtcgtttcgactttgtattacgtcgtggcgacgtttgtcctcattttctcatgtcgcccgattgcgcgatactggaacatgggtttatcgggcacatgtatcaacatcagtctgaacaaccaagtcacatccgccttcaacctgttgcttgacgtcattatcttggtgctgcctcacatggtcatctggtcgctcaatatgcgaacggcaacgaaattgggtgtatcggtggtatttgccattgggctactagcatgtggtgtagcacttgcccgagttatagtgtccagcgaatcatctctccttcaggatgtcacatatcagatctcgacagttgcgctgttggtcttcgcggaaacgacagcggctatcctcgtcttctgtgcgcccgctatcccgcaaggagtggcattaatcggaacccaagcacaatcaatcacatcgtctctccgatcttcacggcgaccactaaatacggcttcaagttcgtggccacaaagatctagcgggtcacagtcttatcgctccgcatcgaagggtacgaagacaccatccgggtctactcgcgctctggcttcagagtatgaagagctcgatgacatggcaccaaataatacacgacggtga

SEQ ID NO: 29879 - protein, 340 aa, Muscodor strobelii
  misc_feature: SGI Peptide ID NO. 570267
  misc_feature (4)..(340): NCBI GI: 46118221 Blast Desc: FG04693.1 [Gibberella zeae PH-1]
  misc_feature (4)..(339): NCBI GI: 256727941 Blast Desc: NECHADRAFT_26479 [Nectria haematococca mpVI 77-13-4]
  misc_feature (1)..(295): NCBI GI: 212534224 Blast Desc: conserved [Penicillium marneffei ATCC 18224] gi|210069667|gb|EEA23757.1| conserved [Penicillium marneffei ATCC 18224]
  misc_feature (4)..(340): NCBI GI: 145607555 Blast Desc: MGG_04339 [Magnaporthe grisea 70-15] gi|145015080|gb|EDJ99648.1| MGG_04339 [Magnaporthe grisea 70-15]
  misc_feature (13)..(313): NCBI GI: 16945439 Blast Desc: related to integral membrane protein PTH11 [Neurospora crassa]
  misc_feature (4)..(340): NCBI GI: 238500906 Blast Desc: conserved [Aspergillus flavus NRRL3357] gi|220691924|gb|EED48271.1| conserved [Aspergillus flavus NRRL3357]
  misc_feature (4)..(315): NCBI GI: 169781106 Blast Desc: [Aspergillus oryzae RIB40] gi|83773758|dbj|BAE63883.1| protein product [Aspergillus oryzae]
  misc_feature (86)..(266): NCBI GI: 145259391 Blast Desc: An04g10010 [Aspergillus niger] gi|134074980|emb|CAK39060.1| protein product [Aspergillus niger]
  misc_feature (64)..(330): NCBI GI: 238505010 Blast Desc: conserved [Aspergillus flavus NRRL3357] gi|220689848|gb|EED46198.1| conserved [Aspergillus flavus NRRL3357]
  misc_feature (4)..(315): NCBI GI: 256731204 Blast Desc: NECHADRAFT_85215 [Nectria haematococca mpVI 77-13-4]
  misc_feature: Useful for introducing or modulating the production of volatile compounds
MGAPFNADALARGVLAAGLVLSSLAVLLRLYTRAFRVKTVQLEDYVGLGGYAAYLTLTAYIFRLVDTGKLFVHAGDFDLPEIPGFVHTFFAGAIVYHITLLFLKNAILLEWISIFVPRGTHTRFFWACCSVLVVSTLYYVVATFVLIFSCRPIARYWNMGLSGTCINISLNNQVTSAFNLLLDVIILVLPHMVIWSLNMRTATKLGVSVVFAIGLLACGVALARVIVSSESSLLQDVTYQISTVALLVFAETTAAILVFCAPAIPQGVALIGTQAQSITSSLRSSRRPLNTASSSWPQRSSGSQSYRSASKGTKTPSGSTRALASEYEELDDMAPNNTRR

SEQ ID NO: 29880 - DNA, 1960 bp, Muscodor strobelii
  misc_feature: SGI EST ID NO. CUFF.70588.0
  misc_feature: Variant of the nucleotide sequence at SEQ ID NO 29878
gtactgccgccgaatcagcgaccgctgctgcgttggagacttggaattgtaatacctcttgtaataattctgacaaggcagatgcagcatacgtatcacaccaggtgccagtaataatggcagtttcttgctcgagcttgctacctgcactgcgccgcagcaagagtcgcagcaatgcgacttttctcatgcaccacaagaacccattggtggaacagccacgactgaagcctgaaggaatgccacaccggtctgagagtcattcataacatgtccatcgcgagattgattgacagggtagaccattgaaggatcccgagaaaccatacctaagcaatgcatgtggctcctgtggtgaaagtcctataacccagatacttatcatacatatgtcgcccgcggctgctcggtgacttataattggcgtcagcatcagtaacccgagattcgcgacaacgactggcgagcctacgggtggcttttctctagggcccagctatcgacgccatgggcgcccctttcaacgcagatgcacttgcacgcggcgtcctagctgcgggtctcgttctttcaagcctggcagtgttgttacgtctttacacacgagctttccgcgtcaagacagtccaactggaagactacgttgggctcggtggttatgctgcatatctcacgttgaccgcctacatattccggctcgtcgacaccggcaagttatttgtccacgcaggcgacttcgatctgcccgaaatacccggcttcgttcatacgttcttcgccggcgctatcgtataccacatcaccctattgtttctcaagaatgctatattgctcgaatggatcagcatcttcgtcccaagagggacgcacaccaggttcttctgggcgtgctgcagcgtccttgtcgtttcgactttgtattacgtcgtggcgacgtttgtcctcattttctcatgtcgcccgattgcgcgatactggaacatgggtttatcgggcacatgtatcaacatcagtctgaacaaccaagtcacatccgccttcaacctgttgcttgacgtcattatcttggtgctgcctcacatggtcatctggtcgctcaatatgcgaacggcaacgaaattgggtgtatcggtggtatttgccattgggctactagcatgtggtgtagcacttgcccgagttatagtgtccagcgaatcatctctccttcaggatgtcacatatcagatctcgacagttgcgctgttggtcttcgcggaaacgacagcggctatcctcgtcttctgtgcgcccgctatcccgcaaggagtggcattaatcggaacccaagcacaatcaatcacatcgtctctccgatcttcacggcgaccactaaatacggcttcaagttcgtggccacaaagatctagcgggtcacagtcttatcgctccgcatcgaagggtacgaagacaccatccgggtctactcgcgctctggcttcagagtatgaagagctcgatgacatggcaccaaataatacacgacggtgattaacaccagaggtgaggctcgaattcgggactacgtggggatatcatcatcatcagttcatctactagtgttttactctgtctttaccaggaagtcaatcaaatctaaagagatagcctcgacccaaaaaaggccaatagtcatcctaagtaaaaagaaccctaatacagagtaattacattatggattacttaccaagagtacatgacccagagacagaaagtggacatgcttatagaagctgatgatagtaaaaaaccgaacaggagttactatgacatggctgcttttaccaagaaaagatgatatttggtccttacaagaagcattgcagcaatccgcgttgcgaacgacttgacaatattgactttcctagacccaacaccagacgaggcggttggatgaagttaccgtctatctcactatgtg

SEQ ID NO: 29881 - DNA, 417 bp, Muscodor strobelii
  misc_feature: SGI cDNA ID NO. 570268
  misc_feature: Encodes the peptide sequence at SEQ ID NO 29882
atgccgttgaccgatcgcctagctgcgcttagaggcaagaatcgcgcacctaaagagctttgtatcaagggtgacgatgggaatgtggattatactgagtcgcgcgagcgcgattgggtagacaccgattctgactccggctccgactactctgtcgatagtagaagcaccgtatccgaagcatccagcgcgaccacggtggatgataatgcgctcgaggcattatttcgcggcttcttaaatcagcacggtctctccaatccgtggccgcaggtcattacgggacagtcgcctcgcgacgcgaagcaaatcattgaaagatttctgcgacgctttgcagaagatcttgaatgcttggccactaaatcgcacgacactgtagatgaagaatcccaccgcatcattctcatccagtaa

SEQ ID NO: 29882 - protein, 138 aa, Muscodor strobelii
  misc_feature: SGI Peptide ID NO. 570268
MPLTDRLAALRGKNRAPKELCIKGDDGNVDYTESRERDWVDTDSDSGSDYSVDSRSTVSEASSATTVDDNALEALFRGFLNQHGLSNPWPQVITGQSPRDAKQIIERFLRRFAEDLECLATKSHDTVDEESHRIILIQ

SEQ ID NO: 29883 - DNA, 1572 bp, Muscodor strobelii
  misc_feature: SGI cDNA ID NO. 570269
  misc_feature: Encodes the peptide sequence at SEQ ID NO 29884
atgagtgaatttcttcgttgcttcagaagaccaaatcggtctgctatcaactccttacggaacgaactatatctgtccgagaaagcaaactcttggactactcatggatttattcctgatgatcaaattgccaaactgattactaggaagtcaacacggaacatcttcccagttcccagagatgtggccatcgagaagatgatacgggtgattgccatacttatatacatggagaaactaagtattggtctactcatcaccatgcagaaacaaggattcgccgacaagtctctacctgtaactgtatctgataaacatagcggccacttggtatcaattccaaagatgtctggcgagacgtttcccaaacttgaccctctctctcaacagcgcgaaacggcaaagccgttcccagccttcttcgacaatccttccgacgcaggcgagttctgtaagaagcaatggacattcttggcacctcatcttggtggagcccaacatctagagttagagccagcctgtatcttacccctcgtacacagctctcagcagtctttcataggaggccaaggtgaagtctacaaggtccaatttcaccacactcaccttgacatttacccagagccgactcaataccaaaatccccatattgcgctgaaacatatgacatcaggtacaccgaagcattttcaccgagaactgaacgccctgctcagaatgcagcgcctgaagcacaaccatttggtggatttgatagcgtcttttcatatgggtcccgtctattgcttgctattcccatgggctcaatcaggcactttacgagacttctggaagggaccggcaacagacgaacacaggtctcccgatctaatactctgggcgtttgagcaaatgcagggactctcaagtgcaataaaagcgatcaataatcccactgacaaagttgcagaccaggaaaacggaagacatggagatctcaaaccagataacattctcctctttgacggaggcccaactgctacgcctcgtggtatcttacgcattacagatgccgggctggcgcgttttcacttgtactacactaacatgaggcaagatggtacgaccacgaatggggcaacaatcgaatattcacctcccgaagctgtgaatgaaggcgaaaaacatagatcgcggttatttgacatgtggtcgctcggctgcgtctacattgaattcgttgcctggcttgtggggggatatattgaagtggaggatttcaggcgcaagaggaagcaagcctttgaatgcgaatactcccagttctacgtgacgaagagtcacaagttcagagaccatccagaagtaaaggcttatatagccctgcttagagaggatcagaggtgccagaagggcacctgctttagcgaactcttagatattatacaaacccacctacttgttatagacattgatgggcgcatagattcgtcaaaggttgacgagaagctgggcatcgttgtaaaacgtctgcgtggtaatgactatcattgctccagctttgcgccccgaagatttggcatgaacggttga

SEQ ID NO: 29884 - protein, 523 aa, Muscodor strobelii
  misc_feature: SGI Peptide ID NO. 570269
  misc_feature (323)..(407): Pfam Id: PF00069 Pfam Desc: Protein kinase domain
  misc_feature (150)..(507): NCBI GI: 256730245 Blast Desc: NECHADRAFT_82545 [Nectria haematococca mpVI 77-13-4]
  misc_feature (37)..(507): NCBI GI: 256721865 Blast Desc: NECHADRAFT_88069 [Nectria haematococca mpVI 77-13-4]
  misc_feature (37)..(481): NCBI GI: 256723898 Blast Desc: NECHADRAFT_78374 [Nectria haematococca mpVI 77-13-4]
  misc_feature (65)..(505): NCBI GI: 256723878 Blast Desc: [Nectria haematococca mpVI 77-13-4]
  misc_feature (24)..(484): NCBI GI: 256722820 Blast Desc: NECHADRAFT_87137 [Nectria haematococca mpVI 77-13-4]
  misc_feature (146)..(485): NCBI GI: 116202873 Blast Desc: CHGG_09321 [Chaetomium globosum CBS 148.51] gi|88177839|gb|EAQ85307.1| CHGG_09321 [Chaetomium globosum CBS 148.51]
  misc_feature (17)..(484): NCBI GI: 256723790 Blast Desc: NECHADRAFT_78344 [Nectria haematococca mpVI 77-13-4]
  misc_feature (150)..(503): NCBI GI: 121716138 Blast Desc: protein kinase domain protein [Aspergillus clavatus NRRL 1] gi|119403835|gb|EAW14252.1| protein kinase domain protein [Aspergillus clavatus NRRL 1]
  misc_feature (150)..(516): NCBI GI: 154300072 Blast Desc: BC1G_11225 [Botryotinia fuckeliana B05.10] gi|150856838|gb|EDN32030.1| BC1G_11225 [Botryotinia fuckeliana B05.10]
  misc_feature (37)..(505): NCBI GI: 256729997 Blast Desc: NECHADRAFT_82546 [Nectria haematococca mpVI 77-13-4]
MSEFLRCFRRPNRSAINSLRNELYLSEKANSWTTHGFIPDDQIAKLITRKSTRNIFPVPRDVAIEKMIRVIAILIYMEKLSIGLLITMQKQGFADKSLPVTVSDKHSGHLVSIPKMSGETFPKLDPLSQQRETAKPFPAFFDNPSDAGEFCKKQWTFLAPHLGGAQHLELEPACILPLVHSSQQSFIGGQGEVYKVQFHHTHLDIYPEPTQYQNPHIALKHMTSGTPKHFHRELNALLRMQRLKHNHLVDLIASFHMGPVYCLLFPWAQSGTLRDFWKGPATDEHRSPDLILWAFEQMQGLSSAIKAINNPTDKVADQENGRHGDLKPDNILLFDGGPTATPRGILRITDAGLARFHLYYTNMRQDGTTTNGATIEYSPPEAVNEGEKHRSRLFDMWSLGCVYIEFVAWLVGGYIEVEDFRRKRKQAFECEYSQFYVTKSHKFRDHPEVKAYIALLREDQRCQKGTCFSELLDIIQTHLLVIDIDGRIDSSKVDEKLGIVVKRLRGNDYHCSSFAPRRFGMNG

SEQ ID NO: 29885 - DNA, 632 bp, Muscodor strobelii
  misc_feature: SGI EST ID NO. CUFF.70623.0
  misc_feature: Variant of the nucleotide sequence at SEQ ID NO 29883
cccctcgtacacagctctcagcagtctttcataggaggccaaggtgaagtctacaaggtccaatttcaccacactcaccttgacatttacccagagccgactcaataccaaaatccccatattgcgctgaaacatatgacatcaggtacaccgaagcattttcaccgagaactgaacgccctgctcagaatgcagcgcctgaagcacaaccatttggtggatttgatagcgtcttttcatatgggtcccgtctattgcttgctattcccatgggctcaatcaggcactttacgagacttctggaagggaccggcaacagacgaacacaggtctcccgatctaatactctgggcgtttgagcaaatgcagggactctcaagtgcaataaaagcgatcaataatcccactgacaaagttgcagaccaggaaaacggaagacatggagatctcaaaccagataacattctcctctttgacggaggcccaactgctacgcctcgtggtatcttacgcattacagatgccgggctggcgcgttttcacttgtactacactaacatgaggcaagatggtacgaccacgaatggggcaacaatcgaatattcacctcccgaagctgtgaatgaaggcga

SEQ ID NO: 29886 - DNA, 801 bp, Muscodor strobelii
  misc_feature: SGI cDNA ID NO. 570270
  misc_feature: Elevated expression when VOC is produced
  misc_feature: Encodes the peptide sequence at SEQ ID NO 29887
atgccagacgaagagaaccagcttgctgtgcaaggcacagagttatccactggctcgttgaaaaatatggggaagaggctgcaggacagaagtcctggtatcgatgacattcttgacaatctcattagggccgcgcaagttgacctgttgcacctagatgctaaaaacaactcaactttgaacattgcgacactgcagcggataatcttgttccaacttcaacgtgagattatggagaagtcaaaaccgatcacgaatgggcgaccaggggacttgaagttactgaaagatgagggtctcatgactacaattgcaaagtacacccaaggaatacgtgactgggaattgatggtcgactacggaagaaaatcaggcggagatccaacaagagatcccttttgcatcagtagtaaatggagcttaacagccgacgcaatgaacgagaacggcatcctcgggcaacaagctacttaccatgccggcacactcaacaggaaaatcggcatctttaagcagcgaaaccaagaaaacagagatcgcgactggcaagagttgacacttcgctttagcatggctgtcgtggcaggcgttgcattgattgggcctatgctacttatggtactgcataagggaatcgtcactgatctggtcacaacatcggttgccgttgttatagtgtctgccattctatccaagtggtctacagcgacaccggaggtgatggtgggtactatagctgcttatgccgctgtgctcgttgtcttcgttggaacacttcaaccaatggaccattctgcgtga

SEQ ID NO: 29887 - protein, 266 aa, Muscodor strobelii
  misc_feature: SGI Peptide ID NO. 570270
  misc_feature (53)..(257): NCBI GI: 212528158 Blast Desc: conserved [Penicillium marneffei ATCC 18224] gi|210073634|gb|EEA27721.1| conserved [Penicillium marneffei ATCC 18224]
  misc_feature (60)..(257): NCBI GI: 116195502 Blast Desc: CHGG_04349 [Chaetomium globosum CBS 148.51] gi|88180262|gb|EAQ87730.1| CHGG_04349 [Chaetomium globosum CBS 148.51]
  misc_feature (126)..(258): NCBI GI: 256731928 Blast Desc: NECHADRAFT_41924 [Nectria haematococca mpVI 77-13-4]
  misc_feature (127)..(258): NCBI GI: 116199569 Blast Desc: [Chaetomium globosum CBS 148.51] gi|88179219|gb|EAQ86687.1| [Chaetomium globosum CBS 148.51]
  misc_feature (127)..(258): NCBI GI: 261356877 Blast Desc: conserved [Verticillium albo-atrum VaMs.102]
  misc_feature (60)..(257): NCBI GI: 116203329 Blast Desc: [Chaetomium globosum CBS 148.51] gi|88178067|gb|EAQ85535.1| [Chaetomium globosum CBS 148.51]
  misc_feature (188)..(256): NCBI GI: 169605669 Blast Desc: SNOG_05859 [Phaeosphaeria nodorum SN15] gi|111065803|gb|EAT86923.1| SNOG_05859 [Phaeosphaeria nodorum SN15]
  misc_feature (65)..(259): NCBI GI: 169772475 Blast Desc: [Aspergillus oryzae RIB40] gi|83768567|dbj|BAE58704.1| protein product [Aspergillus oryzae]
  misc_feature (188)..(258): NCBI GI: 156050237 Blast Desc: SS1G_07705 [Sclerotinia sclerotiorum 1980] gi|154692106|gb|EDN91844.1| SS1G_07705 [Sclerotinia sclerotiorum 1980]
  misc_feature (188)..(260): NCBI GI: 119499267 Blast Desc: NFIA_040700 [Neosartorya fischeri NRRL 181] gi|119414555|gb|EAW24494.1| conserved [Neosartorya fischeri NRRL 181]
  misc_feature: Useful for introducing or modulating the production of volatile compounds
MPDEENQLAVQGTELSTGSLKNMGKRLQDRSPGIDDILDNLIRAAQVDLLHLDAKNNSTLNIATLQRIILFQLQREIMEKSKPITNGRPGDLKLLKDEGLMTTIAKYTQGIRDWELMVDYGRKSGGDPTRDPFCISSKWSLTADAMNENGILGQQATYHAGTLNRKIGIFKQRNQENRDRDWQELTLRFSMAVVAGVALIGPMLLMVLHKGIVTDLVTTSVAVVIVSAILSKWSTATPEVMVGTIAAYAAVLVVFVGTLQPMDHSA

SEQ ID NO: 29888 - DNA, 1832 bp, Muscodor strobelii
  misc_feature: SGI EST ID NO. CUFF.70691.0
  misc_feature: Variant of the nucleotide sequence at SEQ ID NO 29886
accatcctagttagtcgacggctggtgagagcttgagcggggttcacccacttggtgattttgcgcggcgccaagtctgttattacttccgaacaatcgcgcgcaagtcgacaaggtggatttctctcttcagcgtgtctttatcagtgacgtggactcttaacccatagcatgtcaagtcgtcatggtgcggtgaatagatgctacggaaatcgtcgagcacgaaggaatggcatggaaatgtcaactatatttggcgtttatttgagggtcggaggtgtgtagtacagctgatatcctcggcgaatggtgcaatgcctctgacatggactggcgacaatcctggaggggtcttggagcggctgagacaagtacatagagtggtgcgaatgtttctaatcctggtagcgaagaactagatactgtggagggtaaagcagggcttgccgcatagatgtctttcatacatattaattagtctatacggtggacgaaagaggggacagactagctgtcgaccttgactatttatttcttcagcccggaagaattggatgccgatgtctcagaagccgccgccaatgccagacgaagagaaccagcttgctgtgcaaggcacagagttatccactggctcgttgaaaaatatggggaagaggctgcaggacagaagtcctggtatcgatgacattcttgacaatctcattagggccgcgcaagttgacctgttgcacctagatgctaaaaacaactcaactttgaacattgcgacactgcagcggataatcttgttccaacttcaacgtgagattatggagaagtcaaaaccgatcacgaatgggcgaccaggggacttgaagttactgaaagatgagggtctcatgactacaattgcaaagtacacccaaggaatacgtgactgggaattgatggtcgactacggaagaaaatcaggcggagatccaacaagagatcccttttgcatcagtagtaaatggagcttaacagccgacgcaatgaacgagaacggcatcctcgggcaacaagctacttaccatgccggcacactcaacaggaaaatcggcatctttaagcagcgaaaccaagaaaacagagatcgcgactggcaagagttgacacttcgctttagcatggctgtcgtggcaggcgttgcattgattgggcctatgctacttatggtactgcataagggaatcgtcactgatctggtcacaacatcggttgccgttgttatagtgtctgccattctatccaagtggtctacagcgacaccggaggtgatggtgggtactatagctgcttatgccgctgtgctcgttgtcttcgttggaacacttcaaccaatggaccattctgcgtgatatatatcctgcgacagtatgtgaaactaccttccgaagaacgattgacaagtaatagaacaacattcgtagctataacttccgcgaaagagcggtgccaatcaaccgttcatgccaaatcttcggggcgcaaagctggagcaatgatagtcattaccacgcagacgttttacaacgatgcccagcttctcgtcaacctttgacgaatctatgcgcccatcaatgtctataacaagtaggtgggtttgtataatatctaagagttcgctaaagcaggtgcccttctggcacctctgatcctctctaagcagggctatataagcctttacttctggatggtctctgaacttgtgactcttcgtcacgtagaactgggagtattcgcattcaaaggcttgcttcctcttgcgcctgaaatcctccacttcaatatatccccccacaagccag

SEQ ID NO: 29889 - DNA, 3834 bp, Muscodor strobelii
  misc_feature: SGI cDNA ID NO. 570271
  misc_feature: Encodes the peptide sequence at SEQ ID NO 29890
atgtcagacgccgagagctctcttaattatcagcggagtgaagactcagaaagcattctgtccgacatgattgtcgatggagagtacgttccggagtttagcttaggcatgagacccgatgtcaagcagctttaccgcccggatgatcgttcagcttggaccaactggtctcccgacgagaatcacgaagaagacggtcaggcaatctctttcgctcaggaatgcgccataatcattcgtagggaaccaagtgcaaatgacaagagtcaaacttctctgcactctatcacggttcatagcccgttgattagaaaggtgcttagcgtcacattccaagattacgaaagcttgaatacaagccttaaacaattgacattcaaagctccttttcaccccttctattaccggtggcatcggtttctgaagcttcgtcatgacgagcaagatcaacgcactaaggagcaccttgacctcctccactctatcctcaaggaagagatccaaccccaaatcgatgcgatggaagactatgctaagaacggagttatatgctttgaatacttgtgggctatatttgcgcccggcatgctcgttcatactgtagtcgacggccaggatcgcatactgtcactgagggacagtagatatacggcaagcatgagtggcgagtattttgccttagaatgccgctacattgattgcgacgggttgaactttggctatgtagcgacttcacttgagattggttcgttcgaaggcgtcaagaaattatcagagctcgattctatacctgctcatctccatgctcacccggagagtctcgtcaagcgcttgcttgctcgcggacagaaatttgagggccttaacggctttcaccatgtgtcgtactcaggattttacacagctagatcctcgagacaggtccggaagagacatctagaaaaaagccgcatcattattgatccacggacgttcaatgtatatggcaattcgaatcctcgtctggaccctttggactctgttatcgatgagagtccactctcagacgggtcattcagggaaaacgttatataccaagctaccagcgaagctcttcaacgctttcacagcgccttcgagtcacatctgcagcggtcgcgacaagcaaaattcgaagttcattccgagcctctcactcccgtgcagcgactactgtgtacttcaatggctaccgggtactccctcgcatctagaacgtgggctgagttctacgtcgagggcatcaccccaatacaatggagagaagacgcgttttcgcgcctcgttcttccccccggatacaaagatatcatctacgcctttgtcagacaacagttgtctcaggatgacgactttgacgatattatctctgaaaaggttatgattgacttagccatacttccagttgcggaagaaatgcgtctgcccctctattccttgagcgcaggagaactcggcgagacagcatcagatgtcgaggaatccttggagacggttcttgagctcagcaacaaatggaatgccgttctgctccttgacgaatgcgacatcttcttaaattcacgcacaacatctgatttacgacgtaatcgtcttgtctctatcttcctcagaaagttagagtattacaaaggcgtcatgtttttgacgacaaatcgtatcaaagacatggatgcagcttttgagtcccgcattcacctcacgataaactacccagatcttgatgctataagcaggctccacatttggaagacttgtgcgggtttgatgcgaaaccagaactcccgactcacagaacaagatttgatgacgctatcgcaacaggagatgaatggaagggagatcaagaatattgtcaagactgcttgtcttctatctaagcagaacaacgtgccgctagccatgaatcatgtccaattggtattgaaggtgagaaggaagagcattgctcacactttgagagcatcttataaaagcgcaatggccagcctgaaagagtatgtatatgagccaattgacacaacgcatccttgtatcaggctcttgtgcatcctgcctggatcgggtgctattcattgcgaactgaagttcgccgagccaaacgcgaaaccggaatacgaggctttgtcatactgctggggaacgtcaagcgaatcgaaacatatcattgtggacaacgcgagcttcgacgttacggacaacttgtatgcagctttaaagcggatgagaaaggaagcagagccgtacgtcatttgggttgacgcaatatgcattaaccagcagagtatcctggagaaaaacacttttgtgcccatgatgaaaactatttatcaagaggcccgtcgcgtcgtcatttggctgggtgaacatgaccgccggacgaaggaagcattcgcaagcatggaatttgctgcctcaaaagcccatccgattagacctggcaccacgacagcatgcgactggaaaagactgaagcgaggtgacaagactaaactccccttgctcggtcaaatatgggatgaagtcgaatcataccaagccagtcaagctctaagctccattttccaacgcccatggtttacgcgaacatggaccgtgcaagaacttgtagttgcaaatggtgtcattgttgtctgtggtgattttcagattaactgggaagttatgagacaggcgtggcgggcttgtgtcgagggattaacaggaggtgaatcgcttggatttctaatgaagacaagacgcgattggcagaggagcggccactcagggacagtgctcgattccatgcttccgaattggaatcgcggtgttacagaagagaaagatagaatatacggtgtcctcggcctcgctgcttcatcggggcaaaattacacaccagttcgcgtggattatgccgcagacacaggcgcgatatttgctgaagtcaccagaaaccacatgttaacaaccaagtccatctatgcactgagcttctgctctggttgtaaggaaacagcctggccaggaatcccgtcgtgggcatttgattgtaaacccgaccccacttgtgagccaggtccgccgtgttcattcgggtatacatacacttacgggaccaaaagattggtagcgaatgctgggacatacggcttgggcaccctgaaattttcggatgatggtcgttctctttgcctaacagggcaagagctagatacggtcgaaagtacaagtctgacattcccgggcatgtttgagctagacagcaatagggggcttgtggccaattctcatcagtcatctatgatcaatatcggttgggcgaaggcttacaacagtgctaaggagctgtggacttcagcttcttcagagctaaaactaccggcaaaccaatcgttagaggaggcaatctgcctaacaataggagcaactagagaacgtaacggttggactgctggcatgcaagccgaaataagacaggcgttccagaagtttgattcattcgctcggactctaggaaatcgtaaatattcaagagtggccgatttgatgccaatcttgtccggcagaggccctactgaactcagtctattctacgacactgcttcagcggctgcacacaggagagctttcagatcgaaaaccggattcatcgggctggggcctgcggaagctagagctggcgaccgcgtcttgatactgcagggcggtaaggctcctatggttgtgagagtgtctagccaggggcgaagattggtgggtgagtgctatgttcacggtgtcatggatgggaatgcatttgatcaaacgaaagctacagatatgtggttccagtag

SEQ ID NO: 29890 - protein, 1277 aa, Muscodor strobelii
  misc_feature: SGI Peptide ID NO. 570271
  misc_feature (712)..(874): Pfam Id: PF06985 Pfam Desc: Heterokaryon incompatibility protein (HET)
  misc_feature (712)..(798): Pfam Id: PF06985 Pfam Desc: Heterokaryon incompatibility protein (HET)
  misc_feature (35)..(655): NCBI GI: 256726505 Blast Desc: NECHADRAFT_39197 [Nectria haematococca mpVI 77-13-4]
  misc_feature (35)..(655): NCBI GI: 46123125 Blast Desc: FG05940.1 [Gibberella zeae PH-1]
  misc_feature (35)..(655): NCBI GI: 145607209 Blast Desc: MGG_04085 [Magnaporthe grisea 70-15] gi|145014809|gb|EDJ99377.1| MGG_04085 [Magnaporthe grisea 70-15]
  misc_feature (76)..(653): NCBI GI: 171684197 Blast Desc: protein product [Podospora anserina] gi|170942059|emb|CAP67711.1| protein product [Podospora anserina]
  misc_feature (28)..(659): NCBI GI: 238483793 Blast Desc: AAA family ATPase, [Aspergillus flavus NRRL3357] gi|220701185|gb|EED57523.1| AAA family ATPase, [Aspergillus flavus NRRL3357]
  misc_feature (14)..(658): NCBI GI: 159123389 Blast Desc: AAA family ATPase, [Aspergillus fumigatus A1163]
  misc_feature (29)..(659): NCBI GI: 169766984 Blast Desc: [Aspergillus oryzae RIB40] gi|83765818|dbj|BAE55961.1| protein product [Aspergillus oryzae]
  misc_feature (14)..(655): NCBI GI: 119483180 Blast Desc: AAA family ATPase, [Neosartorya fischeri NRRL 181] gi|119409773|gb|EAW19721.1| AAA family ATPase, [Neosartorya fischeri NRRL 181]
  misc_feature (40)..(651): NCBI GI: 121711781 Blast Desc: AAA family ATPase, [Aspergillus clavatus NRRL 1] gi|119401657|gb|EAW12080.1| AAA family ATPase, [Aspergillus clavatus NRRL 1]
  misc_feature (35)..(655): NCBI GI: 256731079 Blast Desc: NECHADRAFT_48916 [Nectria haematococca mpVI 77-13-4]
MSDAESSLNYQRSEDSESILSDMIVDGEYVPEFSLGMRPDVKQLYRPDDRSAWTNWSPDENHEEDGQAISFAQECAIIIRREPSANDKSQTSLHSITVHSPLIRKVLSVTFQDYESLNTSLKQLTFKAPFHPFYYRWHRFLKLRHDEQDQRTKEHLDLLHSILKEEIQPQIDAMEDYAKNGVICFEYLWAIFAPGMLVHTVVDGQDRILSLRDSRYTASMSGEYFALECRYIDCDGLNFGYVATSLEIGSFEGVKKLSELDSIPAHLHAHPESLVKRLLARGQKFEGLNGFHHVSYSGFYTARSSRQVRKRHLEKSRIIIDPRTFNVYGNSNPRLDPLDSVIDESPLSDGSFRENVIYQATSEALQRFHSAFESHLQRSRQAKFEVHSEPLTPVQRLLCTSMATGYSLASRTWAEFYVEGITPIQWREDAFSRLVLPPGYKDIIYAFVRQQLSQDDDFDDIISEKVMIDLAILPVAEEMRLPLYSLSAGELGETASDVEESLETVLELSNKWNAVLLLDECDIFLNSRTTSDLRRNRLVSIFLRKLEYYKGVMFLTTNRIKDMDAAFESRIHLTINYPDLDAISRLHIWKTCAGLMRNQNSRLTEQDLMTLSQQEMNGREIKNIVKTACLLSKQNNVPLAMNHVQLVLKVRRKSIAHTLRASYKSAMASLKEYVYEPIDTTHPCIRLLCILPGSGAIHCELKFAEPNAKPEYEALSYCWGTSSESKHIIVDNASFDVTDNLYAALKRMRKEAEPYVIWVDAICINQQSILEKNTFVPMMKTIYQEARRVVIWLGEHDRRTKEAFASMEFAASKAHPIRPGTTTACDWKRLKRGDKTKLPLLGQIWDEVESYQASQALSSIFQRPWFTRTWTVQELVVANGVIVVCGDFQINWEVMRQAWRACVEGLTGGESLGFLMKTRRDWQRSGHSGTVLDSMLPNWNRGVTEEKDRIYGVLGLAASSGQNYTPVRVDYAADTGAIFAEVTRNHMLTTKSIYALSFCSGCKETAWPGIPSWAFDCKPDPTCEPGPPCSFGYTYTYGTKRLVANAGTYGLGTLKFSDDGRSLCLTGQELDTVESTSLTFPGMFELDSNRGLVANSHQSSMINIGWAKAYNSAKELWTSASSELKLPANQSLEEAICLTIGATRERNGWTAGMQAEIRQAFQKFDSFARTLGNRKYSRVADLMPILSGRGPTELSLFYDTASAAAHRRAFRSKTGFIGLGPAEARAGDRVLILQGGKAPMVVRVSSQGRRLVGECYVHGVMDGNAFDQTKATDMWFQ

SEQ ID NO: 29891 - DNA, 263 bp, Muscodor strobelii
  misc_feature: SGI EST ID NO. CUFF.70645.0
  misc_feature: Variant of the nucleotide sequence at SEQ ID NO 29889
cttgagcgcaggagaactcggcgagacagcatcagatgtcgaggaatccttggagacggttcttgagctcagcaacaaatggaatgccgttctgctccttgacgaatgcgacatcttcttaaattcacgcacaacatctgatttacgacgtaatcgtcttgtctctatcttcctcagaaagttagagtattacaaaggcgtcatgtttttgacgacaaatcgtatcaaagacatggatgcagcttttgagtcccgcattcacc

SEQ ID NO: 29892 - DNA, 1794 bp, Muscodor strobelii
  misc_feature: SGI cDNA ID NO. 570272
  misc_feature: Encodes the peptide sequence at SEQ ID NO 29893
atgggtctgtacactgaactgccagatcacattcagacagttgacgttatcgtcgcgggaggcggcaccgccgggtgcatcgttgcttcaagattggccgatgctgatccgtctctctcaatcttgttgattgaggcagggcctaatggcgccggcaatcccagcgttgatttcccagccctcttcctcacgaatatactaccgaccgcaaccaccaccgtgtttcacaaaagcaacccgctgaaaactggtcgcgagatgttcgtacccgctggtcgggttctcggtggcggctcagctacgaacatgatgatgtacagccgagctcaacgctccgactgggattcgtggcagactcctggttggtctgcagacgagatgttgccgttcttgaagaagtttgaaacataccatggaccaggctcaatggaaagacatggttctgatggtccaattcatgtatccactggtacttttacaagcaggagatgtcaagattctttcgtggatgctatgagtcaagtcggctggcccgagattgaagatcttggcagtctggacgattgcaatggagtccaacgtgctgtaaggtacattggtcctgatgggaagcgtcaggacacggcgtctcgttacttgcagcccaggattcaggacggcgcgcacccaaatctccacgtgctcgttgaatcgcatgtcgtacgcgtcgtatttaagggaaataaggccaacggcattgtgtatcaccccaaagccgacggagcttctgaacgcactgtcaatgcgacgaaaatggttattttatgttctggcgcatttggtacaccagctgtgcttgagcgctctggtgttggccgcctagacattctccagagggcaggaatctctaatgttgtcgcagaagttcccggggtaggtcatgaatatgatgaccaccatctgctactttattcctacaaatcgagtctcaacgaagatgagaccatcgacgcgatattgacgggcaagctcaatcctgtggaactgattcaaaataaccacaagattctaggctggaacgctcaagacgtaacctgcaagctccggcctaccgacaaggatattacggcacttggcccagttttccaagaagcttgggacgaagagtttaaggagaaccctaataagccattgatgatgatggtgttggtcaattgctaccctggcgagccaattggcatccctcctgggcagtactttggtgtatctacattcaccacctatccgttctcacgcggccacgttcacatcacgggacctgatgtagctgatcccctagactttgagacaggtttctttgcagatgcaaagggtatcgatctcctaaaacatcgctgggcgtacaaaaagcagcgagaagtggcacgccgtatgtcagtatttcgcggggaatgggcaggaggtcacccgcctttcccgccggattctaaagccgcagtgaaggatatcgatggcccactcgcggacgtgaaggacatcgagtattccgcagacgatgacgctctgattgataagtggatcgtcgaaaatgtcagctcagcctggcattcgtcgggtacatgcaagatggcacctcttgatcagcatggtgtcgtcgataagaacttgagtgtttacggggttgagggactcaagatcgccgatctaagcatcgtgcctaagagcgtagctgcgaacactaacaatacagcccttgccattggggagaaggctgctgatatctttatcagagagttgggcctgacacccaagtaa

SEQ ID NO: 29893 - protein, 597 aa, Muscodor strobelii
  misc_feature: SGI Peptide ID NO. 570272
  misc_feature (415)..(584): Pfam Id: PF05199 Pfam Desc: GMC oxidoreductase
  misc_feature (14)..(327): Pfam Id: PF00732 Pfam Desc: GMC oxidoreductase
  misc_feature (504)..(584): Pfam Id: PF05199 Pfam Desc: GMC oxidoreductase
  misc_feature (415)..(497): Pfam Id: PF05199 Pfam Desc: GMC oxidoreductase
  misc_feature (15)..(53): Pfam Id: PF05834 Pfam Desc: Lycopene cyclase protein
  misc_feature (15)..(50): Pfam Id: PF07992 Pfam Desc: Pyridine nucleotide-disulphide oxidoreductase
  misc_feature (1)..(597): NCBI GI: 242821127 Blast Desc: glucose dehydrogenase, [Talaromyces stipitatus ATCC 10500] gi|218712539|gb|EED11964.1| glucose dehydrogenase, [Talaromyces stipitatus ATCC 10500]
  misc_feature (1)..(594): NCBI GI: 46115592 Blast Desc: FG03638.1 [Gibberella zeae PH-1]
  misc_feature (1)..(594): NCBI GI: 145250491 Blast Desc: An15g02200 [Aspergillus niger] gi|134082279|emb|CAK42323.1| protein product [Aspergillus niger]
  misc_feature (1)..(595): NCBI GI: 261361015 Blast Desc: alcohol oxidase [Verticillium albo-atrum VaMs.102]
  misc_feature (1)..(594): NCBI GI: 256722595 Blast Desc: [Nectria haematococca mpVI 77-13-4]
  misc_feature (1)..(592): NCBI GI: 189210457 Blast Desc: alcohol dehydrogenase [Pyrenophora tritici-repentis Pt-1C-BFP] gi|187977653|gb|EDU44279.1| alcohol dehydrogenase [Pyrenophora tritici-repentis Pt-1C-BFP]
  misc_feature (1)..(594): NCBI GI: 171677813 Blast Desc: protein product [Podospora anserina] gi|170936975|emb|CAP61633.1| protein product [Podospora anserina]
  misc_feature (1)..(596): NCBI GI: 256730307 Blast Desc: NECHADRAFT_94976 [Nectria haematococca mpVI 77-13-4]
  misc_feature (1)..(597): NCBI GI: 256723917 Blast Desc: NECHADRAFT_92276 [Nectria haematococca mpVI 77-13-4]
  misc_feature (2)..(592): NCBI GI: 169770081 Blast Desc: [Aspergillus oryzae RIB40] gi|83767369|dbj|BAE57508.1| protein product [Aspergillus oryzae]
  misc_feature (12)..(595): SWISSPROT Homolog: EC 1.1.3.13 Alcohol oxidase
MGLYTELPDHIQTVDVIVAGGGTAGCIVASRLADADPSLSILLIEAGPNGAGNPSVDFPALFLTNILPTATTTVFHKSNPLKTGREMFVPAGRVLGGGSATNMMMYSRAQRSDWDSWQTPGWSADEMLPFLKKFETYHGPGSMERHGSDGPIHVSTGTFTSRRCQDSFVDAMSQVGWPEIEDLGSLDDCNGVQRAVRYIGPDGKRQDTASRYLQPRIQDGAHPNLHVLVESHVVRVVFKGNKANGIVYHPKADGASERTVNATKMVILCSGAFGTPAVLERSGVGRLDILQRAGISNVVAEVPGVGHEYDDHHLLLYSYKSSLNEDETIDAILTGKLNPVELIQNNHKILGWNAQDVTCKLRPTDKDITALGPVFQEAWDEEFKENPNKPLMMMVLVNCYPGEPIGIPPGQYFGVSTFTTYPFSRGHVHITGPDVADPLDFETGFFADAKGIDLLKHRWAYKKQREVARRMSVFRGEWAGGHPPFPPDSKAAVKDIDGPLADVKDIEYSADDDALIDKWIVENVSSAWHSSGTCKMAPLDQHGVVDKNLSVYGVEGLKIADLSIVPKSVAANTNNTALAIGEKAADIFIRELGLTPK

SEQ ID NO: 29894 - DNA, 756 bp, Muscodor strobelii
  misc_feature: SGI cDNA ID NO. 570273
  misc_feature: Encodes the peptide sequence at SEQ ID NO 29895
atggcgtcccccgttccccccgtccccgacctcaagatcttccttgccaagaacggcttgaagtggcgcgatatgcgtcacatcacgaaagaccagcatcgcgacgataccatcacccgcgctctccagtccgccggcgtcctcaccaaagagggcgtcgacagcgccatcacccaggtcttcgaggttgcgcttcctgtcttcaaggaagctgagggcaactggaccacggccaccgtctctgccgtgcgctcgcagatcgactgggcccgcgacttgaccgacacggtcttctgggcgtttttccgccgcatcatcgccgcccgctgccgcttcgaccgcctcaatacggtcagagatgccaccaatcatccctcttccgtcctcgccgtaatggcctttcgccaggccgtcgagacggagtcgtatctcttccccatgatgtactattcggtcgagggattggataatgacaaagatgaggatgaggaggggatggactacgaatcctcggatgatgagtacgtcgcgcctcccgcccgcgccaacaccagtctccgcgctgctatcagcgccagtcttcagcagctccgtgctgctgagcccgaggcccagccccagccccagcccgaacctggccgcctggatacagaagaggagggccgtcttgcccaggaatttgacgacatggatatcgacgacgacggcggcgacgaggatgatgacgaggacgaggacatggacgaggacgagtaa

SEQ ID NO: 29895 - protein, 251 aa, Muscodor strobelii
  misc_feature: SGI Peptide ID NO. 570273
MASPVPPVPDLKIFLAKNGLKWRDMRHITKDQHRDDTITRALQSAGVLTKEGVDSAITQVFEVALPVFKEAEGNWTTATVSAVRSQIDWARDLTDTVFWAFFRRIIAARCRFDRLNTVRDATNHPSSVLAVMAFRQAVETESYLFPMMYYSVEGLDNDKDEDEEGMDYESSDDEYVAPPARANTSLRAAISASLQQLRAAEPEAQPQPQPEPGRLDTEEEGRLAQEFDDMDIDDDGGDEDDDEDEDMDEDE

SEQ ID NO: 29896 - DNA, 5061 bp, Muscodor strobelii
  misc_feature: SGI cDNA ID NO. 570274
  misc_feature: Encodes the peptide sequence at SEQ ID NO 29897
atggcggaagacagctccttgggcgctctacaggccctctaccgagagctgactctggtgtccgatgctctcaaagcagatcgcgacgagcgcggccgcactgccctgctgcgtgctgccgacctcgccttgctggagactgtagctgatgatttccagagtctcttggacaagcctgcgcggaagaaggaaagccgggacgcagtcttatcaggcaaggtgtcgttgcccgaaggcgagtggacgctgaacaaagacttccaagagatcattcttcaggtcgccgacgatctagacctcgatgagctcgaagcgacccgcctcgcgatccaggcagaggatgacgaaggaacactggggaggtcgagaaaggaatgcgccatcattcgctttcaccagcagagaaaatatctcctgagctgcatgttgctcctgctcgagttcgccaaggaggaggacgagttccaagacgatggcgtcgaaggcgactttggacgcatctcccaatatgtcaacctgaacatccttcgaggtaacacgtcgggggcgttgagcagcgcgacgaggcaaaagttcgtacccgcctgcatggcagctatgaccgccgtcagggcttggctgcagagcatttcggagcatgtgaatagcgcggccgtcttgggacgcgcaccggatccggcagcgcaggagaccatcgagttctcgcgtatgagccttgtgcagcaacatgagctcttggccatcatactttgctacgctatcgacagtcgcatggctaacgagtctgacttcactaacttcctccaagtgttccggaatgctagtagatatgacttctccattgttcatctggtccctgttcttggaactttcatcaccgtcttcggctcacctgagggaactgccagtatcgaacaggccagaaaactaaacgagatggtctgccagcattctgacaacaccacacgcgcaattccgttcctcgactctgctataagggcctggtggatcgttgagtacagtggctggtatatggaagatgccgctggctctggcctaccaaacatcgacttggatgaagaagataaacaaaggtctaggcagttcacagaggcattgaaggatggggctttcgatttcatgttagccgtggcagcggatgtgaagaccacagaatggcaagatccgtctcggaaccgactgaggcactgggctcagaaaagaacaccaccattgccgccggataccgtgcctttctcacctcagctacaggagcgtatggcgtctaaaatggatattttcgttgattccttcatctccaacatgcccgacgtgttgcggaaactgaaaatcgaggaagacgaacaacgccagaccagccagctcaaagagcaggatattgatttggaaagattccttcttatcattgcatatacctgcgaaggccgtcctcaagctgcagagaccttctgggccgacccggagagcaacctggctgggttcttacaatgggcgtcccgacgaacaacaacaccattacagactgcattttgcgagatgctgcaatgtctttcggatagcgctgagactgcaacatatgcgcatgacttcctcttagatgaaggccaccaattgcgcagaccgtcgtctattacttgggctcacattctcaaggaaatgacatatttcgtaaataaagtccgacaaaagccaacaacgatctcccaaacggtggcgccccgtggtggcaagtacgggaatgaagagacggaagacgaagctgagatcattatgctgcaagaatcgtatcttcgcctcatgacgaaactggcctctcagagcgaaactgcccgactgtacctgttacaactgccgaacgagagtttggtggaactccttttccaagcgatcagtagcgcagttggtcctcagataagggcctatgcatttggagcactgggcgctttcatgtcgcgaaaatcgttgttggagagctatgcgatgtggcggttcgtggaatcctgtttcacagggtttttcatctccccggatgtgtcagttagaaaccagagtccggcgacgaccttaccatccccttcgttcttcatggaggcattgttccaagagatgagtcctaacatggacgagactggcgcattcattcagttcttgactgttctgacctctcttccagagaatttcagccctttgaacgacgcgttgccatttcctgaagaccttggcgctgccacgcgcactcatcctggtattgaaccgtacatcgatttcatcttgggccacatgttttcgatgagggcaccggaagcacatgatcctatgcatcaaagagtattgcggttctactgtctcgatttcgcactgtcatgcgtctcgagctttaatgaagatctcattgtatttggcaatgtttccaacgtaaatgtcgactcggccattcaaacaaaagacttggagacttatgtgagtttgcatccctttgcccgtgtcatggagtggatgtacgacagtcggttcatgaaaggtcttctggacacgatacatcaaaatgcttcggatatcggcagggcaacacctgactcatctctcattctgggtgttctacgtgccgtcacgctattgtctaaagcgctagaccttcaggttacttacttggacgttgtacggcgatatactaaacctcagaaccgcaatccgagtcgctcgcctttcactcccacttcgaatgcatccttcacatccctagaggatggtctcgtgacaagtctcacactcatatccgaccttggtggctactgtggtataggacatccagatcttaccttggcgagcttgaaactactagagaaaatttcaacctctccgaaaatcattaccgcgtggcagtcgggaccgtcaaaccagaatcaccggaataaggccatcgttgctctagaggaacatggagatgcccagacgataagcggatcgttcgcggccgagttgaggactccgcttgatgaagaccgcaaagcagattctcccgagtaccagactaaagtttatatactggattttctatactcttgcttaagagcaaaccgagaccgcccaaccattgcccatctccttcttgggttccattgttcaacaaatgccctggagatcgagccggagagtgcatttgatgatagatcggctttgttccatttattgctccaaatcgcggttgaggtgccatcgcaagaagaaggaaatatgatgccatggcttgtttgcctcaaatacaaagccatgcgcattctaaagttgttgtggagctcagctttatcatcagtcatcgtcctcgaggagttgcgtgagaacgatttcttgtttcatatcctgctacaaggtctcgtgacacagcagagcaattcatgggacggggaagaagcaaaagggcctgatttcctgaccactgctgcagctcaaagttacgtggaatatctttccatgcgcggtatggcgttggagtacatcgcacatgagctgtgcagcgtatcgcagagcccgatgccagcgctgaagcgacggatattcgatgctctcggggggcagattagtatcgacggcttggactccatacaggtaccatcggttttccaatttcatgactcattgccgcagagcgactttgctgccccggagcccgaatgggaatcactaagaggatttgatccaactccatgtctggaacacgacgacgacggtaatgccatatataacctggacagggtccaagagatgctgctcctgaagcgctctgaaggcaatcaatcaacccagctagttttacagcaagacgctgctctttgggacaatgaagaggaacatatgttgttgtggttaaggtacctcaaccgtctagcacagataagagcatacagtctcaatgtactgggcgcctggacaagactcttgatgatcatgacgagctgcaatgaattcaaggggactaacagtatttccttcatcctccaaacattgcaggcaattctccccggccttgagacatacggagcacaaaaccccgtgccagctttggaattagcaaagcttgcacaggtattgctcttcaagctggacttcgcgaccatgacatcggccgacaaacagagccgcgcggttgaaaatttaaccagcgacaagttattccagctattgcagatctgcctgaacgcgattgcggcgtggtctggcgatcaagaattacgtgccgtttactacagcatttgctattcccatctcaccggcatgttggatcacgaccgaggatccctttcaggtctacaaaagacgaccaagacaatacagtccttcggcgagaagttgctcaatgtagtttgcgatgatgctttcggcggagacgtgggttgtcaatcggccgctctcgtatttttgaatacactcgtacgacttggcaggcaagataagaacaactatatcgtggaggcgcttaataggctgaatttcatcggtatcctcgttgattccttgaaggatgtgtcggcggaatgggtggaaactggccagacaggcgactctgactatcagtcatatctgaacgccaagcttgcactgttgctccaactctgccaaacacgagatggagcgaagtatgtactgcatgctaatattttccgaaccgtcgaagtctcgcgcctctttgccgccgaccccgagttgtcggttgagcccactgacactaaggcattagagaggcactatcttctgcttgtcaagatcgcccgagtcattggtgtcgccatcatcagccgaggatcacataacattcttcaaggcaggcgattcctcaccagtcacagaatgctgattatgcacgttctcaaacgctcagctggcataggagccggtgctggaaagatggatgcagccctagttgagcgcatcgatgaacttgccgaggctttcatgatcatcataacagcgaccggttttcttgagtttgaaaaccaagcgctgcccgagcagccggcagacgcaccgcttttattccactga

SEQ ID NO: 29897 - protein, 1686 aa, Muscodor strobelii
  misc_feature: SGI Peptide ID NO. 570274
  misc_feature (1)..(1686): NCBI GI: 46122281 Blast Desc: FG05518.1 [Gibberella zeae PH-1]
  misc_feature (1)..(1686): NCBI GI: 39954326 Blast Desc: MGG_08911 [Magnaporthe grisea 70-15] gi|145021145|gb|EDK05274.1| MGG_08911 [Magnaporthe grisea 70-15]
  misc_feature (1)..(1686): NCBI GI: 85086747 Blast Desc: NCU00273 [Neurospora crassa OR74A] gi|28918839|gb|EAA28508.1| [Neurospora crassa OR74A]
  misc_feature (1)..(1686): NCBI GI: 116207926 Blast Desc: CHGG_03256 [Chaetomium globosum CBS 148.51] gi|88183853|gb|EAQ91321.1| CHGG_03256 [Chaetomium globosum CBS 148.51]
  misc_feature (1)..(1686): NCBI GI: 171686354 Blast Desc: protein product [Podospora anserina] gi|170943138|emb|CAP68791.1| protein product [Podospora anserina]
  misc_feature (1)..(1678): NCBI GI: 154310600 Blast Desc: BC1G_06774 [Botryotinia fuckeliana B05.10] gi|150851314|gb|EDN26507.1| BC1G_06774 [Botryotinia fuckeliana B05.10]
  misc_feature (1)..(1293): NCBI GI: 261358296 Blast Desc: conserved [Verticillium albo-atrum VaMs.102]
  misc_feature (1)..(1674): NCBI GI: 169614435 Blast Desc: SNOG_10360 [Phaeosphaeria nodorum SN15] gi|160707347|gb|EAT82695.2| SNOG_10360 [Phaeosphaeria nodorum SN15]
  misc_feature (1)..(1675): NCBI GI: 189199892 Blast Desc: conserved [Pyrenophora tritici-repentis Pt-1C-BFP] gi|187983382|gb|EDU48870.1| conserved [Pyrenophora tritici-repentis Pt-1C-BFP]
  misc_feature (1)..(1685): NCBI GI: 115387347 Blast Desc: conserved [Aspergillus terreus NIH2624] gi|114195263|gb|EAU36963.1| conserved [Aspergillus terreus NIH2624]
MAEDSSLGALQALYRELTLVSDALKADRDERGRTALLRAADLALLETVADDFQSLLDKPARKKESRDAVLSGKVSLPEGEWTLNKDFQEIILQVADDLDLDELEATRLAIQAEDDEGTLGRSRKECAIIRFHQQRKYLLSCMLLLLEFAKEEDEFQDDGVEGDFGRISQYVNLNILRGNTSGALSSATRQKFVPACMAAMTAVRAWLQSISEHVNSAAVLGRAPDPAAQETIEFSRMSLVQQHELLAIILCYAIDSRMANESDFTNFLQVFRNASRYDFSIVHLVPVLGTFITVFGSPEGTASIEQARKLNEMVCQHSDNTTRAIPFLDSAIRAWWIVEYSGWYMEDAAGSGLPNIDLDEEDKQRSRQFTEALKDGAFDFMLAVAADVKTTEWQDPSRNRLRHWAQKRTPPLPPDTVPFSPQLQERMASKMDIFVDSFISNMPDVLRKLKIEEDEQRQTSQLKEQDIDLERFLLIIAYTCEGRPQAAETFWADPESNLAGFLQWASRRTTTPLQTAFCEMLQCLSDSAETATYAHDFLLDEGHQLRRPSSITWAHILKEMTYFVNKVRQKPTTISQTVAPRGGKYGNEETEDEAEIIMLQESYLRLMTKLASQSETARLYLLQLPNESLVELLFQAISSAVGPQIRAYAFGALGAFMSRKSLLESYAMWRFVESCFTGFFISPDVSVRNQSPATTLPSPSFFMEALFQEMSPNMDETGAFIQFLTVLTSLPENFSPLNDALPFPEDLGAATRTHPGIEPYIDFILGHMFSMRAPEAHDPMHQRVLRFYCLDFALSCVSSFNEDLIVFGNVSNVNVDSAIQTKDLETYVSLHPFARVMEWMYDSRFMKGLLDTIHQNASDIGRATPDSSLILGVLRAVTLLSKALDLQVTYLDVVRRYTKPQNRNPSRSPFTPTSNASFTSLEDGLVTSLTLISDLGGYCGIGHPDLTLASLKLLEKISTSPKIITAWQSGPSNQNHRNKAIVALEEHGDAQTISGSFAAELRTPLDEDRKADSPEYQTKVYILDFLYSCLRANRDRPTIAHLLLGFHCSTNALEIEPESAFDDRSALFHLLLQIAVEVPSQEEGNMMPWLVCLKYKAMRILKLLWSSALSSVIVLEELRENDFLFHILLQGLVTQQSNSWDGEEAKGPDFLTTAAAQSYVEYLSMRGMALEYIAHELCSVSQSPMPALKRRIFDALGGQISIDGLDSIQVPSVFQFHDSLPQSDFAAPEPEWESLRGFDPTPCLEHDDDGNAIYNLDRVQEMLLLKRSEGNQSTQLVLQQDAALWDNEEEHMLLWLRYLNRLAQIRAYSLNVLGAWTRLLMIMTSCNEFKGTNSISFILQTLQAILPGLETYGAQNPVPALELAKLAQVLLFKLDFATMTSADKQSRAVENLTSDKLFQLLQICLNAIAAWSGDQELRAVYYSICYSHLTGMLDHDRGSLSGLQKTTKTIQSFGEKLLNVVCDDAFGGDVGCQSAALVFLNTLVRLGRQDKNNYIVEALNRLNFIGILVDSLKDVSAEWVETGQTGDSDYQSYLNAKLALLLQLCQTRDGAKYVLHANIFRTVEVSRLFAADPELSVEPTDTKALERHYLLLVKIARVIGVAIISRGSHNILQGRRFLTSHRMLIMHVLKRSAGIGAGAGKMDAALVERIDELAEAFMIIITATGFLEFENQALPEQPADAPLLFH

SEQ ID NO: 29898 - DNA, 5756 bp, Muscodor strobelii
  misc_feature: SGI EST ID NO. CUFF.70730.0
  misc_feature: Variant of the nucleotide sequence at SEQ ID NO 29896
ccgcctacggataccctgcaaggcacgctttgtctgctagggtagagcttccgcgtctaacatttgctttgcagcacatatcaattcaagacttggagcttcgatttctcaacagccaagcatcgccctcctcctcgatttctgcaattgacgccctactacaccttgcgcctgcctcgaggcagcagcatattccatcccttttcgcgcctcgacacgcctcgacacgcctcgacacgcctcaatcgtcccaacgtcgccgccgatcgcaacgagccaccctcgtgtgcatgtgatacgcaaccctgcgtagcccgtcgcagtcgcatcccaccatgcgatagccaagttgctccctagctgcgacaaccatggcggaagacagctccttgggcgctctacaggccctctaccgagagctgactctggtgtccgatgctctcaaagcagatcgcgacgagcgcggccgcactgccctgctgcgtgctgccgacctcgccttgctggagactgtagctgatgatttccagagtctcttggacaagcctgcgcggaagaaggaaagccgggacgcagtcttatcaggcaaggtgtcgttgcccgaaggcgagtggacgctgaacaaagacttccaagagatcattcttcaggtcgccgacgatctagacctcgatgagctcgaagcgacccgcctcgcgatccaggcagaggatgacgaaggaacactggggaggtcgagaaaggaatgcgccatcattcgctttcaccagcagagaaaatatctcctgagctgcatgttgctcctgctcgagttcgccaaggaggaggacgagttccaagacgatggcgtcgaaggcgactttggacgcatctcccaatatgtcaacctgaacatccttcgaggtaacacgtcgggggcgttgagcagcgcgacgaggcaaaagttcgtacccgcctgcatggcagctatgaccgccgtcagggcttggctgcagagcatttcggagcatgtgaatagcgcggccgtcttgggacgcgcaccggatccggcagcgcaggagaccatcgagttctcgcgtatgagccttgtgcagcaacatgagctcttggccatcatactttgctacgctatcgacagtcgcatggctaacgagtctgacttcactaacttcctccaagtgttccggaatgctagtagatatgacttctccattgttcatctggtccctgttcttggaactttcatcaccgtcttcggctcacctgagggaactgccagtatcgaacaggccagaaaactaaacgagatggtctgccagcattctgacaacaccacacgcgcaattccgttcctcgactctgctataagggcctggtggatcgttgagtacagtggctggtatatggaagatgccgctggctctggcctaccaaacatcgacttggatgaagaagataaacaaaggtctaggcagttcacagaggcattgaaggatggggctttcgatttcatgttagccgtggcagcggatgtgaagaccacagaatggcaagatccgtctcggaaccgactgaggcactgggctcagaaaagaacaccaccattgccgccggataccgtgcctttctcacctcagctacaggagcgtatggcgtctaaaatggatattttcgttgattccttcatctccaacatgcccgacgtgttgcggaaactgaaaatcgaggaagacgaacaacgccagaccagccagctcaaagagcaggatattgatttggaaagattccttcttatcattgcatatacctgcgaaggccgtcctcaagctgcagagaccttctgggccgacccggagagcaacctggctgggttcttacaatgggcgtcccgacgaacaacaacaccattacagactgcattttgcgagatgctgcaatgtctttcggatagcgctgagactgcaacatatgcgcatgacttcctcttagatgaaggccaccaattgcgcagaccgtcgtctattacttgggctcacattctcaaggaaatgacatatttcgtaaataaagtccgacaaaagccaacaacgatctcccaaacggtggcgccccgtggtggcaagtacgggaatgaagagacggaagacgaagctgagatcattatgctgcaagaatcgtatcttcgcctcatgacgaaactggcctctcagagcgaaactgcccgactgtacctgttacaactgccgaacgagagtttggtggaactccttttccaagcgatcagtagcgcagttggtcctcagataagggcctatgcatttggagcactgggcgctttcatgtcgcgaaaatcgttgttggagagctatgcgatgtggcggttcgtggaatcctgtttcacagggtttttcatctccccggatgtgtcagttagaaaccagagtccggcgacgaccttaccatccccttcgttcttcatggaggcattgttccaagagatgagtcctaacatggacgagactggcgcattcattcagttcttgactgttctgacctctcttccagagaatttcagccctttgaacgacgcgttgccatttcctgaagaccttggcgctgccacgcgcactcatcctggtattgaaccgtacatcgatttcatcttgggccacatgttttcgatgagggcaccggaagcacatgatcctatgcatcaaagagtattgcggttctactgtctcgatttcgcactgtcatgcgtctcgagctttaatgaagatctcattgtatttggcaatgtttccaacgtaaatgtcgactcggccattcaaacaaaagacttggagacttatgtgagtttgcatccctttgcccgtgtcatggagtggatgtacgacagtcggttcatgaaaggtcttctggacacgatacatcaaaatgcttcggatatcggcagggcaacacctgactcatctctcattctgggtgttctacgtgccgtcacgctattgtctaaagcgctagaccttcaggttacttacttggacgttgtacggcgatatactaaacctcagaaccgcaatccgagtcgctcgcctttcactcccacttcgaatgcatccttcacatccctagaggatggtctcgtgacaagtctcacactcatatccgaccttggtggctactgtggtataggacatccagatcttaccttggcgagcttgaaactactagagaaaatttcaacctctccgaaaatcattaccgcgtggcagtcgggaccgtcaaaccagaatcaccggaataaggccatcgttgctctagaggaacatggagatgcccagacgataagcggatcgttcgcggccgagttgaggactccgcttgatgaagaccgcaaagcagattctcccgagtaccagactaaagtttatatactggattttctatactcttgcttaagagcaaaccgagaccgcccaaccattgcccatctccttcttgggttccattgttcaacaaatgccctggagatcgagccggagagtgcatttgatgatagatcggctttgttccatttattgctccaaatcgcggttgaggtgccatcgcaagaagaaggaaatatgatgccatggcttgtttgcctcaaatacaaagccatgcgcattctaaagttgttgtggagctcagctttatcatcagtcatcgtcctcgaggagttgcgtgagaacgatttcttgtttcatatcctgctacaaggtctcgtgacacagcagagcaattcatgggacggggaagaagcaaaagggcctgatttcctgaccactgctgcagctcaaagttacgtggaatatctttccatgcgcggtatggcgttggagtacatcgcacatgagctgtgcagcgtatcgcagagcccgatgccagcgctgaagcgacggatattcgatgctctcggggggcagattagtatcgacggcttggactccatacaggtaccatcggttttccaatttcatgactcattgccgcagagcgactttgctgccccggagcccgaatgggaatcactaagaggatttgatccaactccatgtctggaacacgacgacgacggtaatgccatatataacctggacagggtccaagagatgctgctcctgaagcgctctgaaggcaatcaatcaacccagctagttttacagcaagacgctgctctttgggacaatgaagaggaacatatgttgttgtggttaaggtacctcaaccgtctagcacagataagagcatacagtctcaatgtactgggcgcctggacaagactcttgatgatcatgacgagctgcaatgaattcaaggggactaacagtatttccttcatcctccaaacattgcaggcaattctccccggccttgagacatacggagcacaaaaccccgtgccagctttggaattagcaaagcttgcacaggtattgctcttcaagctggacttcgcgaccatgacatcggccgacaaacagagccgcgcggttgaaaatttaaccagcgacaagttattccagctattgcagatctgcctgaacgcgattgcggcgtggtctggcgatcaagaattacgtgccgtttactacagcatttgctattcccatctcaccggcatgttggatcacgaccgaggatccctttcaggtctacaaaagacgaccaagacaatacagtccttcggcgagaagttgctcaatgtagtttgcgatgatgctttcggcggagacgtgggttgtcaatcggccgctctcgtatttttgaatacactcgtacgacttggcaggcaagataagaacaactatatcgtggaggcgcttaataggctgaatttcatcggtatcctcgttgattccttgaaggatgtgtcggcggaatgggtggaaactggccagacaggcgactctgactatcagtcatatctgaacgccaagcttgcactgttgctccaactctgccaaacacgagatggagcgaagtatgtactgcatgctaatattttccgaaccgtcgaagtctcgcgcctctttgccgccgaccccgagttgtcggttgagcccactgacactaaggcattagagaggcactatcttctgcttgtcaagatcgcccgagtcattggtgtcgccatcatcagccgaggatcacataacattcttcaaggcaggcgattcctcaccagtcacagaatgctgattatgcacgttctcaaacgctcagctggcataggagccggtgctggaaagatggatgcagccctagttgagcgcatcgatgaacttgccgaggctttcatgatcatcataacagcgaccggttttcttgagtttgaaaaccaagcgctgcccgagcagccggcagacgcaccgcttttattccactgatccccatacatgagacactgacgaaggagttcttatcatgaaggcctgcgaagctacgagaatcggagtaattgagagatagatacttgtacgaaaacttacggacatagtggagttctgactaaaagacggcgcaagagaatgagagataaaaggcataagactttgtaatgaagataccacctttcatgatttacgcatacgctaacacggtgatatgaattaatcaagtgacgcaaaactgtagcagatgacagaccacaaatgagccctgacgatggctctagttcttattcattcatctattcgttcattcgttcgttc

SEQ ID NO: 29899 - DNA, 8685 bp, Muscodor strobelii
  misc_feature: SGI cDNA ID NO. 570275
  misc_feature: Encodes the peptide sequence at SEQ ID NO 29900
atgccacctcgatcgggagctcgagagctcaccatgaaaaatgccatagaggcagtcgaaagaggtagcaggacaactgctgcatctggtatagatgatctcctacatatattcaaacatgaagaagcagccgccgatttatctcaacttactgataaaaactaccaccagctctttgaggctatcttccgatataccctcaaagagaaggaggcgtactataagcccaaatctaaaaccggagcagccggtaagcttgccagatgtgctgagttgcttcgcgtgagtgtcgaacatggcgcgccgagaatcaagaaaaagaccctcttggctgttattgaccacatcacggatattctcccgcattcagaggatggccttgtgccacccttggtatcggactgcatcagggctctagctgttctccttggacacggagccaacgtcgagttgttagctacgcaagatagtgaaagttggtttacctgtgttgactttgttgtgcaactcatctctcagcaaatcgaccagccgggcgatgattctggaccgtctcgtgcctccccgaccccttcgatcgtcggggcgtcgatgacagtatcactatcaacccctcgatcattgttagcatcaaggcgtggcgccggcgacagatcacacagtcaattatcggacctcatgggatgcctccttatcttagtatctgggagtaatgcacctctcctacaacgttgcaaagagattacgacgattgctttacaagtgctgcaactacgacgcctgagtttaggtcggcttcatcaacgagcctttgccatcgtaaacgcactgctcgtaattacacagacggatgatactgcgcaagctagttacttagccactgagtgcttaccgcttctgactcattggtggcggagtacaagtgcttctagctccgacgtcttgtcgaatctcatccgaacggagatgctcaaggtgttctataacatacacttgcagcttgagttcttgattaggcgcaatgaagatccctcgcttcgagaagacattgggggtctggccgaaatactttggatcgaatactcgaaacgcgacgaacgcgcccaacttcaacaagatgatattgcctatatggttgattatgagactgcaaaccagtttcgtattcagtcattttctttgcgatctttcaatagtgatagggagaggcagtgggcaatcgttcatatcattgcacttttagaagcgctgatgtggaaagaatctcgacctttactcacaagacccagtgctgaagaacagccgcgcaagagacagcgaaaagatacaggttctagtagacttcgctacaagctccagtctgtcgatcggactacgcagttcacagcattacagatactgccattcttttcgtctcacgtggacattgcagcggatgatattctcgacttactctccattctgataggcattgtcactaacaagaacacgcgtctatcaacatggacgatgatcgcttgtgccagtctcgctttcaagactcacgctacagatggagatctgaaggctttatggaaacagacttggcagattgcagtacgctccataagcatggcgggaaattgcagggctgcaagttttctcctatgttctattttgaccaataacctcctcccatataccgagattatggaagacatcaaggacatcgttactgctgcagatgtcagtgggccgccagtacttgtggactcttcaatccaattaatggccgcattgctccggctgcgtaatcatcatcttccaaacgcaagccacacgactaacaaccatgttgttcgctggatgctatcacgttggtttcctaccgaactcacatttatttcttcttattctgctcatgtttctcccttgaacatggcgaatattatacgggcagtatgtggcgaagaagaaatatcgttatccggtgtcactcaaacggtggctggtcccattgcagaaacattgcttctgttacaagaacggaagactgtcgtcaagtatctgttactgcttagagacagcccagtagatgagtacacgaagagcacgacagattcgcgcgcggaaagtcctgcagcgaatttcacggattccatgagtgttcaggtaacgaaaaagctagtagccgaacttttctactcgaaactcgaggaaattggtgccttgtgtgattcttggactaagaagacagaaagttcgagccatatcacacctgagaggctacaaagtgtcattgcgtgtctcgtcctgggaactctagtgctcccaatcctaaaggacgtcaacactcgtcagtcgcaagagactgaagacgttatctttcggattcttcgagacctcctcaattcgctctcccttgcggaggatagccagtttctcttcgaatgtgttctgcgatcccttcgggcttatatgcccaaaatgacaagcagtcatctgtcacgattctcgaaggatttcccttacctccaccagctctttgctgaagtctcaacttctttccgcaaaaacagaaatgataccatagacgtggacatgaacgacgacttcgaaaccctaggcagtcagtcgagcatcagctccgatgtgatcgatgttcctaggcgggagtctgcgatcattttccatccgacgtgtttttacaacgatgctatgcagcgtattcatttcctacatctcctacatgaagatgcaggtcaagttggactcatcccagtctcgtggcttgacgcctttctacacttatccgataaagaggtcttatcttgtcgcgtgatggtcaaggagatgttcgattcggacttagtcatcaatccagatgatgcgcaaagggtcattgagagaatgggagccttaatagggcgagcattatttcaaaccagtgaggtagcactcgacctgtgcctggatttgatggaaggctttatgccaatctggtgcaacgaggagtgcgaattatcgttacttgtaggggacttctacaagcattacctaacaacgggtctttcaaacaatttattctcgtcgcaggtgcagatggcattgtcccggatgttgctacgactagctttcgaaggggagaaatttcctgaaggtctagagatgaatagtccaaaggactctcttcttcagattatggaccgaggtctattgtcggtcaaattttacgtgggcacacgacttcctagcatatttgggcgctatgttctgaagctccacgaggagatgtttgtcgacatcctgaacattctccctacagacgaactggttttcgagggaattgcgctgcggctctttgtgctggcagaagtagcccgagagtggccaactctcctgcgaagaggtatttaccacatcttcgagacccctggcaaagtcccgacgtcaaaagagcacgcggcctactgccttaaaaagattgccttgacactaaagctagatgatcctcgacaactttttgatcttttctcatctcagttgctgtatacttggcttgacgagggaactgtcgaagacattccttttgagatttttggattttctagccttgaggagctccttcgtcgagcccaggcggaagccgcagcactgatagtaatgcgcagccaggatgatgcgttagcagaactggctcgtatacttggtacaccactatctcaacttgttcagcgcaattgggccaaaatactagcatacagcatggctcatgacatcagcaccatgaataacgacctgagccggactggcgaaagccgacttcgcaaaatcgtaggacgggagccatttctggaaaatgtctacaacaactacgtcgacattatcggcacttttatttctcttatcgaccaagaagaccccattgaaagatattgggcgaaagacgatactatgaaatatgctgccgagattatgcagaatatcaggcagtgtgggcattcagatgtcttactcggggctaatcagcagcccgcgtttcgtccgaaatatttgacaagacagattaggcttctctgtagtcgcactgaatacgacttccctgatatgtggaattctgccatggttgttgcagttgctaggaaattgttcaacagcatacacagtgcactaggccccttgtatgcatgttccgttctccgcaaggtacgagtgttaatatgtatggccggcccgtatgcatacaagtcatatccgttggaaatgctcctacattcgatacgtccgtatctcgcagacacggaatgtgccgacgatgcacttgggataagccagtatttacttgagaaagggctcgaagatttgtctagttcgccctctttccttgccgggtattcgttatgcgcattaacatccttgcgggtctttcttgaaacatcacagtcaagcacgacccaggaaagccaattcaaggcaacaatgagcaaagctcaaaaattttgctcgtggctcgtaacgtatttagagaaatatgccgggtccgtcatgaaaaacgatgctttgcgccctgggttcagatctatcaccgagtctgcagctcagcttgtccaaacgggaattgcagaatggggcacacatgaaagcaaacttctacttgatatccttcaggatgaatctagtgaagctgggcttttgacggccacatcgcgcaaaatagcacttgagctgctttgtcgtcagtttactatgccaacacttgccagctctgattttgtccgctcggatgaagaagcccaggcactagccgcagctgtctggagaagctgccaggcacaaaatctcaatgacgattatcttgcctgggtcggtcgagttgttggtagaagtttcgcagcgtctggacatattgatgaaggcttgctgcgggaatcgcaaattttgaaacactctgaagacacacagggtgactttgcctcagaacaaggtcttctaagtctcttacatgatctcactgcggatgatgactgcaccaaagccggccttgccgaatcagctctgagaacgatagtctccgaggccgctttcaaagctgacgatgtactgctcggagcttgtcagagagcattgtctgatcagctcatcgaagcctccgattggaagccgtatcgcacgccgccatcggacaatctcccaatcaacggaattagagaagatgagatcctttgtccggagtcgatcgaaagtcgcacctggtctgaagatattactgtatacctgatacagaaagcaccaaagaatatcgttcttagtgctttgatccctatcctcaaaacagtcgagggtttcgctaaacatgcgtttccatatatcatccatcttgttttgttgagtgaacgcaagcaacagcaatccgctaggcggaaactgtcagcggcatcgaagtcctggttccaatgtggctcaggtatggcactggataatatcacacttttaatgaatgctatactctacatgcgaacacagcaattgccaggggagagctccatggcagaacgaacactatggctggacctcgatctatcatcggcggcttccgctgctgccaaatgtggcatgttcaaaacggccctgttatttgtcgaactaacaacgtcagacggagcccgcacttctcgtcgttcatctgccgctcgtactcatgagtccactgatctccttttaaacgtattcgaaaatattgatgatccagatgcgtattatggtttaagccaagattcaagcttgactaatatcctggctcgcctcgagtacgagaaagacggtgcgaaaagccttgcgttccgcggtgcccaatatgatagtcatgtgagaaatggagatccagcttcgaccgttgatagccaatctctcattggtactctaggaagcttgggtctatcagggctatcgtactcgcttttacagaatcagcagagcttggagaacgcaacgagtgccgttgaaagtacttttgatactgcgaggaggctagaaacttggaatctgcctgctcctagctcctcgcgcgatcctaccgtgacaatttacaaggcttatcaagcgtggagccaatctacggatctgacaacagtaaggcaagttacatggactggatttaacgagactatgcggggcatactcacacctgataccggtgcggcatcacttcgcaaacatttaagctcccttgcagccttgacagagctaaacgataccgtcgacattgtcgacccgtcaagtcttgagcaactcctcgagacttttcatagccgttcaaactggatgcatagtggacgtgaaatagcaaaggttgaaccaccactggcccgattggcccaagtcaagtcgatgttactctcgtcaggcattcacagatatcatcaagcgttccaggaatcactcaacatcgccacctctctctcacatctcgtacagcctagtgcagaccttggattgtatatcgattctgccactcgtgtcgaagctgctgattctctctgggatcatggagaaatgatgtcttctatccgcatgcttcaactcattgatgaagacactgatctcaaaaagcagactatcgccgtcaatcgatctgatctacttgccaagacggcccatcagatatccgttgcaaagctcgagaagcccgacagtatccagaagaactaccttcagccagctttgaaggagttgaaaggcaaagcagatggtacagaggccggcaaagtgtaccatcaatttgccgtattttgcgatgaacaactgcagaatcccgatagtcttgaagacctagcccgtctacaacatttaagacagggaaaaagtgatgaagttatgcagctaagggaacttcggagcaatgccaaagacacgcaggctaggaacaggttcggcgctcaccttaacaaggcgcagcaatggcttgacctagatgagcaggagctacgtcgagtgcagcaaagccgaacagaatttgtacggcttagtctagagaactatctcctctcgttaacggcttcagatgagcataacaatgatgctcttcggtttacggccctttggcttgagcgcgcgggcgaagatttcacgaatgacgctgtcaggaaacacatcgaccgagtgccaaccagaaagttcgcaacgctcatgaatcagctgacgtctcggcttctagatcagaacaactccttccagaagctgcttcttgagcttgtataccgcatttgcgtcgatcatccttatcatgggatgtatcagatttggtccggcacacgatctaaagttaagaaagaagatgaggttgctcggctccgaaaacaagctactgataaagtagcgaagaagttggcgctgacagagttgtctacgatcacttggtcggctattgacaaaactagcaaaatgtaccataattttgcaatcgaaactggctataaggcaggccaaaaggcacaaatcaaggattcacctacggctgctgcgttgtcaattgcactctccaaatacagaataccacctcccacgatgcaaatagaactagctacggaccgggactactctcgcattcccttgattgtcaagctggaaccaagtatgactatcgcaagcggtgtgagcgcaccgaagatcatcacaatcgtaggaacaaacggccagcgattcaaacagttagtcaaaggaggcaatgacgatctccgccaagatgcgatcatggaacaagtttttgcggctgtttcgtcagttttgaagcttcaccgatccacgcgccaacggaatcttggtatcagaacgtacaaagtattgccattgacatcaatatccggtctcatcgagttcgtgtcaaatacaatacccctgcatgactatctgatgccggcccatgagcgctatcatcctaaagacttgaagggctcacagtgtcgtaaggagatttcaaattgccaaacaaagtcatctgagacccgtcttgccacgtacaagaaaatgactgaaagattccaccccgtcatgcgctatttcttcatggaatacttcccggatccggacgactggttcgcgagacggacggcgtatacacgcaccacagcagccatctccatactcggccatgtccttgggttgggcgatcgacacggtcacaatattcttctcgactccagtaacggtgaggtagtgcatatcgatctcggtgtcgcatttgaaactggtcgtgtacttcccgtccccgagctcgtgcccttccgcttgacgagagatatcatagatggcatggggatcactaaaaccgaaggggtattccggcgatgctgcgaattcacactcgacgctctacgagaagaaacatactccatcatgacaatccttgacgtgctacgctacgatcccctgtattcgtggtccatcagccctgtgcgcatcgccaaactacaagacacgcgccgagatgacgcggatgaagaaagtgagattaaggccaagaggaagactggcctcgggaaccatggccttgtcaatgaacccagtgaagcagatcgcgcattagaggttgtgaggaagaaattaagcaagacattgagtgttactgcgacagtcaatgatctcattaatcaggcaacagatgagagaaatttgtctgtattgtattcaggttgggctgcatatgcttaa

SEQ ID NO: 29900 - protein, 2894 aa, Muscodor strobelii
  misc_feature: SGI Peptide ID NO. 570275
  misc_feature (2862)..(2894): Pfam Id: PF02260 Pfam Desc: FATC domain
  misc_feature (2560)..(2807): Pfam Id: PF00454 Pfam Desc: Phosphatidylinositol 3- and 4-kinase
  misc_feature (1)..(2894): NCBI GI: 261358295 Blast Desc: ataxia telangiectasia mutated [Verticillium albo-atrum VaMs.102]
  misc_feature (52)..(2894): NCBI GI: 171686356 Blast Desc: protein product [Podospora anserina] gi|170943139|emb|CAP68792.1| protein product [Podospora anserina]
  misc_feature (12)..(2894): NCBI GI: 189030944 Blast Desc: protein product [Podospora anserina] gi|170943139|emb|CAP68792.1| protein product [Podospora anserina]
  misc_feature (25)..(2887): NCBI GI: 164428983 Blast Desc: NCU00274 [Neurospora crassa OR74A] gi|157072363|gb|EAA28509.2| [Neurospora crassa OR74A]
  misc_feature (568)..(2894): NCBI GI: 256729894 Blast Desc: NECHADRAFT_95538 [Nectria haematococca mpVI 77-13-4]
  misc_feature (266)..(2889): NCBI GI: 145614202 Blast Desc: MGG_11316 [Magnaporthe grisea 70-15] gi|145021147|gb|EDK05276.1| MGG_11316 [Magnaporthe grisea 70-15]
  misc_feature (663)..(2894): NCBI GI: 46122283 Blast Desc: FG05519.1 [Gibberella zeae PH-1] gi|90111973|sp|Q4IB89.1|ATM_GIBZE RecName: Full=Serine/threonine-protein kinase TEL1; AltName: checkpoint 1;
  misc_feature (1167)..(2894): NCBI GI: 116207928 Blast Desc: CHGG_03257 [Chaetomium globosum CBS 148.51] gi|88183854|gb|EAQ91322.1| CHGG_03257 [Chaetomium globosum CBS 148.51]
  misc_feature (919)..(2894): NCBI GI: 156058426 Blast Desc: SS1G_03224 [Sclerotinia sclerotiorum 1980] gi|154701012|gb|EDO00751.1| SS1G_03224 [Sclerotinia sclerotiorum 1980]
  misc_feature (8)..(2894): NCBI GI: 239613012 Blast Desc: phosphotidylinositol kinase Tel1 [Ajellomyces dermatitidis ER-3]
  misc_feature (12)..(2894): SWISSPROT Homolog: EC 2.7.11.1 Non-specific serine/threonine protein kinase
MPPRSGARELTMKNAIEAVERGSRTTAASGIDDLLHIFKHEEAAADLSQLTDKNYHQLFEAIFRYTLKEKEAYYKPKSKTGAAGKLARCAELLRVSVEHGAPRIKKKTLLAVIDHITDILPHSEDGLVPPLVSDCIRALAVLLGHGANVELLATQDSESWFTCVDFVVQLISQQIDQPGDDSGPSRASPTPSIVGASMTVSLSTPRSLLASRRGAGDRSHSQLSDLMGCLLILVSGSNAPLLQRCKEITTIALQVLQLRRLSLGRLHQRAFAIVNALLVITQTDDTAQASYLATECLPLLTHWWRSTSASSSDVLSNLIRTEMLKVFYNIHLQLEFLIRRNEDPSLREDIGGLAEILWIEYSKRDERAQLQQDDIAYMVDYETANQFRIQSFSLRSFNSDRERQWAIVHIIALLEALMWKESRPLLTRPSAEEQPRKRQRKDTGSSRLRYKLQSVDRTTQFTALQILPFFSSHVDIAADDILDLLSILIGIVTNKNTRLSTWTMIACASLAFKTHATDGDLKALWKQTWQIAVRSISMAGNCRAASFLLCSILTNNLLPYTEIMEDIKDIVTAADVSGPPVLVDSSIQLMAALLRLRNHHLPNASHTTNNHVVRWMLSRWFPTELTFISSYSAHVSPLNMANIIRAVCGEEEISLSGVTQTVAGPIAETLLLLQERKTVVKYLLLLRDSPVDEYTKSTTDSRAESPAANFTDSMSVQVTKKLVAELFYSKLEEIGALCDSWTKKTESSSHITPERLQSVIACLVLGTLVLPILKDVNTRQSQETEDVIFRILRDLLNSLSLAEDSQFLFECVLRSLRAYMPKMTSSHLSRFSKDFPYLHQLFAEVSTSFRKNRNDTIDVDMNDDFETLGSQSSISSDVIDVPRRESAIIFHPTCFYNDAMQRIHFLHLLHEDAGQVGLIPVSWLDAFLHLSDKEVLSCRVMVKEMFDSDLVINPDDAQRVIERMGALIGRALFQTSEVALDLCLDLMEGFMPIWCNEECELSLLVGDFYKHYLTTGLSNNLFSSQVQMALSRMLLRLAFEGEKFPEGLEMNSPKDSLLQIMDRGLLSVKFYVGTRLPSIFGRYVLKLHEEMFVDILNILPTDELVFEGIALRLFVLAEVAREWPTLLRRGIYHIFETPGKVPTSKEHAAYCLKKIALTLKLDDPRQLFDLFSSQLLYTWLDEGTVEDIPFEIFGFSSLEELLRRAQAEAAALIVMRSQDDALAELARILGTPLSQLVQRNWAKILAYSMAHDISTMNNDLSRTGESRLRKIVGREPFLENVYNNYVDIIGTFISLIDQEDPIERYWAKDDTMKYAAEIMQNIRQCGHSDVLLGANQQPAFRPKYLTRQIRLLCSRTEYDFPDMWNSAMVVAVARKLFNSIHSALGPLYACSVLRKVRVLICMAGPYAYKSYPLEMLLHSIRPYLADTECADDALGISQYLLEKGLEDLSSSPSFLAGYSLCALTSLRVFLETSQSSTTQESQFKATMSKAQKFCSWLVTYLEKYAGSVMKNDALRPGFRSITESAAQLVQTGIAEWGTHESKLLLDILQDESSEAGLLTATSRKIALELLCRQFTMPTLASSDFVRSDEEAQALAAAVWRSCQAQNLNDDYLAWVGRVVGRSFAASGHIDEGLLRESQILKHSEDTQGDFASEQGLLSLLHDLTADDDCTKAGLAESALRTIVSEAAFKADDVLLGACQRALSDQLIEASDWKPYRTPPSDNLPINGIREDEILCPESIESRTWSEDITVYLIQKAPKNIVLSALIPILKTVEGFAKHAFPYIIHLVLLSERKQQQSARRKLSAASKSWFQCGSGMALDNITLLMNAILYMRTQQLPGESSMAERTLWLDLDLSSAASAAAKCGMFKTALLFVELTTSDGARTSRRSSAARTHESTDLLLNVFENIDDPDAYYGLSQDSSLTNILARLEYEKDGAKSLAFRGAQYDSHVRNGDPASTVDSQSLIGTLGSLGLSGLSYSLLQNQQSLENATSAVESTFDTARRLETWNLPAPSSSRDPTVTIYKAYQAWSQSTDLTTVRQVTWTGFNETMRGILTPDTGAASLRKHLSSLAALTELNDTVDIVDPSSLEQLLETFHSRSNWMHSGREIAKVEPPLARLAQVKSMLLSSGIHRYHQAFQESLNIATSLSHLVQPSADLGLYIDSATRVEAADSLWDHGEMMSSIRMLQLIDEDTDLKKQTIAVNRSDLLAKTAHQISVAKLEKPDSIQKNYLQPALKELKGKADGTEAGKVYHQFAVFCDEQLQNPDSLEDLARLQHLRQGKSDEVMQLRELRSNAKDTQARNRFGAHLNKAQQWLDLDEQELRRVQQSRTEFVRLSLENYLLSLTASDEHNNDALRFTALWLERAGEDFTNDAVRKHIDRVPTRKFATLMNQLTSRLLDQNNSFQKLLLELVYRICVDHPYHGMYQIWSGTRSKVKKEDEVARLRKQATDKVAKKLALTELSTITWSAIDKTSKMYHNFAIETGYKAGQKAQIKDSPTAAALSIALSKYRIPPPTMQIELATDRDYSRIPLIVKLEPSMTIASGVSAPKIITIVGTNGQRFKQLVKGGNDDLRQDAIMEQVFAAVSSVLKLHRSTRQRNLGIRTYKVLPLTSISGLIEFVSNTIPLHDYLMPAHERYHPKDLKGSQCRKEISNCQTKSSETRLATYKKMTERFHPVMRYFFMEYFPDPDDWFARRTAYTRTTAAISILGHVLGLGDRHGHNILLDSSNGEVVHIDLGVAFETGRVLPVPELVPFRLTRDIIDGMGITKTEGVFRRCCEFTLDALREETYSIMTILDVLRYDPLYSWSISPVRIAKLQDTRRDDADEESEIKAKRKTGLGNHGLVNEPSEADRALEVVRKKLSKTLSVTATVNDLINQATDERNLSVLYSGWAAYA

SEQ ID NO: 29901 - DNA, 11534 bp, Muscodor strobelii
  misc_feature: SGI EST ID NO. CUFF.70696.0
  misc_feature: Variant of the nucleotide sequence at SEQ ID NO 29899
cagccggtaagcttgccagatgtgctgagttgcttcgcgtgagtgtcgaacatggcgcgccgagaatcaagaaaaagaccctcttggctgttattgaccacatcacggatattctcccgcattcagaggatggccttgtgccacccttggtatcggactgcatcagggctctagctgttctccttggacacggagccaacgtcgagttgttagctacgcaagatagtgaaagttggtttacctgtgttgactttgttgtgcaactcatctctcagcaaatcgaccagccgggcgatgattctggaccgtctcgtgcctccccgaccccttcgatcgtcggggcgtcgatgacagtatcactatcaacccctcgatcattgttagcatcaaggcgtggcgccggcgacagatcacacagtcaattatcggacctcatgggatgcctccttatcttagtatctgggagtaatgcacctctcctacaacgttgcaaagagattacgacgattgctttacaagtgctgcaactacgacgcctgagtttaggtcggcttcatcaacgagcctttgccatcgtaaacgcactgctcgtaattacacagacggatgatactgcgcaagctagttacttagccactgagtgcttaccgcttctgactcattggtggcggagtacaagtgcttctagctccgacgtcttgtcgaatctcatccgaacggagatgctcaaggtgttctataacatacacttgcagcttgagttcttgattaggcgcaatgaagatccctcgcttcgagaagacattgggggtctggccgaaatactttggatcgaatactcgaaacgcgacgaacgcgcccaacttcaacaagatgatattgcctatatggttgattatgagactgcaaaccagtttcgtattcagtcattttctttgcgatctttcaatagtgatagggagaggcagtgggcaatcgttcatatcattgcacttttagaagcgctgatgtggaaagaatctcgacctttactcacaagacccagtgctgaagaacagccgcgcaagagacagcgaaaagatacaggttctagtagacttcgctacaagctccagtctgtcgatcggactacgcagttcacagcattacagatactgccattcttttcgtctcacgtggacattgcagcggatgatattctcgacttactctccattctgataggcattgtcactaacaagaacacgcgtctatcaacatggacgatgatcgcttgtgccagtctcgctttcaagactcacgctacagatggagatctgaaggctttatggaaacagacttggcagattgcagtacgctccataagcatggcgggaaattgcagggctgcaagttttctcctatgttctattttgaccaataacctcctcccatataccgagattatggaagacatcaaggacatcgttactgctgcagatgtcagtgggccgccagtacttgtggactcttcaatccaattaatggccgcattgctccggctgcgtaatcatcatcttccaaacgcaagccacacgactaacaaccatgttgttcgctggatgctatcacgttggtttcctaccgaactcacatttatttcttcttattctgctcatgtttctcccttgaacatggcgaatattatacgggcagtatgtggcgaagaagaaatatcgttatccggtgtcactcaaacggtggctggtcccattgcagaaacattgcttctgttacaagaacggaagactgtcgtcaagtatctgttactgcttagagacagcccagtagatgagtacacgaagagcacgacagattcgcgcgcggaaagtcctgcagcgaatttcacggattccatgagtgttcaggtaacgaaaaagctagtagccgaacttttctactcgaaactcgaggaaattggtgccttgtgtgattcttggactaagaagacagaaagttcgagccatatcacacctgagaggctacaaagtgtcattgcgtgtctcgtcctgggaactctagtgctcccaatcctaaaggacgtcaacactcgtcagtcgcaagagactgaagacgttatctttcggattcttcgagacctcctcaattcgctctcccttgcggaggatagccagtttctcttcgaatgtgttctgcgatcccttcgggcttatatgcccaaaatgacaagcagtcatctgtcacgattctcgaaggatttcccttacctccaccagctctttgctgaagtctcaacttctttccgcaaaaacagaaatgataccatagacgtggacatgaacgacgacttcgaaaccctaggcagtcagtcgagcatcagctccgatgtgatcgatgttcctaggcgggagtctgcgatcattttccatccgacgtgtttttacaacgatgctatgcagcgtattcatttcctacatctcctacatgaagatgcaggtcaagttggactcatcccagtctcgtggcttgacgcctttctacacttatccgataaagaggtcttatcttgtcgcgtgatggtcaaggagatgttcgattcggacttagtcatcaatccagatgatgcgcaaagggtcattgagagaatgggagccttaatagggcgagcattatttcaaaccagtgaggtagcactcgacctgtgcctggatttgatggaaggctttatgccaatctggtgcaacgaggagtgcgaattatcgttacttgtaggggacttctacaagcattacctaacaacgggtctttcaaacaatttattctcgtcgcaggtgcagatggcattgtcccggatgttgctacgactagctttcgaaggggagaaatttcctgaaggtctagagatgaatagtccaaaggactctcttcttcagattatggaccgaggtctattgtcggtcaaattttacgtgggcacacgacttcctagcatatttgggcgctatgttctgaagctccacgaggagatgtttgtcgacatcctgaacattctccctacagacgaactggttttcgagggaattgcgctgcggctctttgtgctggcagaagtagcccgagagtggccaactctcctgcgaagaggtatttaccacatcttcgagacccctggcaaagtcccgacgtcaaaagagcacgcggcctactgccttaaaaagattgccttgacactaaagctagatgatcctcgacaactttttgatcttttctcatctcagttgctgtatacttggcttgacgagggaactgtcgaagacattccttttgagatttttggattttctagccttgaggagctccttcgtcgagcccaggcggaagccgcagcactgatagtaatgcgcagccaggatgatgcgttagcagaactggctcgtatacttggtacaccactatctcaacttgttcagcgcaattgggccaaaatactagcatacagcatggctcatgacatcagcaccatgaataacgacctgagccggactggcgaaagccgacttcgcaaaatcgtaggacgggagccatttctggaaaatgtctacaacaactacgtcgacattatcggcacttttatttctcttatcgaccaagaagaccccattgaaagatattgggcgaaagacgatactatgaaatatgctgccgagattatgcagaatatcaggcagtgtgggcattcagatgtcttactcggggctaatcagcagcccgcgtttcgtccgaaatatttgacaagacagattaggcttctctgtagtcgcactgaatacgacttccctgatatgtggaattctgccatggttgttgcagttgctaggaaattgttcaacagcatacacagtgcactaggccccttgtatgcatgttccgttctccgcaaggtacgagtgttaatatgtatggccggcccgtatgcatacaagtcatatccgttggaaatgctcctacattcgatacgtccgtatctcgcagacacggaatgtgccgacgatgcacttgggataagccagtatttacttgagaaagggctcgaagatttgtctagttcgccctctttccttgccgggtattcgttatgcgcattaacatccttgcgggtctttcttgaaacatcacagtcaagcacgacccaggaaagccaattcaaggcaacaatgagcaaagctcaaaaattttgctcgtggctcgtaacgtatttagagaaatatgccgggtccgtcatgaaaaacgatgctttgcgccctgggttcagatctatcaccgagtctgcagctcagcttgtccaaacgggaattgcagaatggggcacacatgaaagcaaacttctacttgatatccttcaggatgaatctagtgaagctgggcttttgacggccacatcgcgcaaaatagcacttgagctgctttgtcgtcagtttactatgccaacacttgccagctctgattttgtccgctcggatgaagaagcccaggcactagccgcagctgtctggagaagctgccaggcacaaaatctcaatgacgattatcttgcctgggtcggtcgagttgttggtagaagtttcgcagcgtctggacatattgatgaaggcttgctgcgggaatcgcaaattttgaaacactctgaagacacacagggtgactttgcctcagaacaaggtcttctaagtctcttacatgatctcactgcggatgatgactgcaccaaagccggccttgccgaatcagctctgagaacgatagtctccgaggccgctttcaaagctgacgatgtactgctcggagcttgtcagagagcattgtctgatcagctcatcgaagcctccgattggaagccgtatcgcacgccgccatcggacaatctcccaatcaacggaattagagaagatgagatcctttgtccggagtcgatcgaaagtcgcacctggtctgaagatattactgtatacctgatacagaaagcaccaaagaatatcgttcttagtgctttgatccctatcctcaaaacagtcgagggtttcgctaaacatgcgtttccatatatcatccatcttgttttgttgagtgaacgcaagcaacagcaatccgctaggcggaaactgtcagcggcatcgaagtcctggttccaatgtggctcaggtatggcactggataatatcacacttttaatgaatgctatactctacatgcgaacacagcaattgccaggggagagctccatggcagaacgaacactatggctggacctcgatctatcatcggcggcttccgctgctgccaaatgtggcatgttcaaaacggccctgttatttgtcgaactaacaacgtcagacggagcccgcacttctcgtcgttcatctgccgctcgtactcatgagtccactgatctccttttaaacgtattcgaaaatattgatgatccagatgcgtattatggtttaagccaagattcaagcttgactaatatcctggctcgcctcgagtacgagaaagacggtgcgaaaagccttgcgttccgcggtgcccaatatgatagtcatgtgagaaatggagatccagcttcgaccgttgatagccaatctctcattggtactctaggaagcttgggtctatcagggctatcgtactcgcttttacagaatcagcagagcttggagaacgcaacgagtgccgttgaaagtacttttgatactgcgaggaggctagaaacttggaatctgcctgctcctagctcctcgcgcgatcctaccgtgacaatttacaaggcttatcaagcgtggagccaatctacggatctgacaacagtaaggcaagttacatggactggatttaacgagactatgcggggcatactcacacctgataccggtgcggcatcacttcgcaaacatttaagctcccttgcagccttgacagagctaaacgataccgtcgacattgtcgacccgtcaagtcttgagcaactcctcgagacttttcatagccgttcaaactggatgcatagtggacgatacgatgaagtctcaggaatactatctcgcagagatacgactatgagtgtgttctcacattatacaatgcgcagtgaaatagcaaaggttgaaccaccactggcccgattggcccaagtcaagtcgatgttactctcgtcaggcattcacagatatcatcaagcgttccaggaatcactcaacatcgccacctctctctcacatctcgtacagcctagtgcagaccttggattgtatatcgattctgccactcgtgtcgaagctgctgattctctctgggatcatggagaaatgatgtcttctatccgcatgcttcaactcattgatgaagacactgatctcaaaaagcagactatcgccgtcaatcgatctgatctacttgccaagacggcccatcagatatccgttgcaaagctcgagaagcccgacagtatccagaagaactaccttcagccagctttgaaggagttgaaaggcaaagcagatggtacagaggccggcaaagtgtaccatcaatttgccgtattttgcgatgaacaactgcagaatcccgatagtcttgaagacctagcccgtctacaacatttaagacagggaaaaagtgatgaagttatgcagctaagggaacttcggagcaatgccaaagacacgcaggctaggaacaggttcggcgctcaccttaacaaggcgcagcaatggcttgacctagatgagcaggagctacgtcgagtgcagcaaagccgaacagaatttgtacggcttagtctagagaactatctcctctcgttaacggcttcagatgagcataacaatgatgctcttcggtttacggccctttggcttgagcgcgcgggcgaagatttcacgaatgacgctgtcaggaaacacatcgaccgagtgccaaccagaaagttcgcaacgctcatgaatcagctgacgtctcggcttctagatcagaacaactccttccagaagctgcttcttgagcttgtataccgcatttgcgtcgatcatccttatcatgggatgtatcagatttggtccggcacacgatctaaagttaagaaagaagatgaggttgctcggctccgaaaacaagctactgataaagtagcgaagaagttggcgctgacagagttgtctacgatcacttggtcggctattgacaaaactagcaaaatgtaccataattttgcaatcgaaactggctataaggcaggccaaaaggcacaaatcaaggattcacctacggctgctgcgttgtcaattgcactctccaaatacagaataccacctcccacgatgcaaatagaactagctacggaccgggactactctcgcattcccttgattgtcaagctggaaccaagtatgactatcgcaagcggtgtgagcgcaccgaagatcatcacaatcgtaggaacaaacggccagcgattcaaacagttagtcaaaggaggcaatgacgatctccgccaagatgcgatcatggaacaagtttttgcggctgtttcgtcagttttgaagcttcaccgatccacgcgccaacggaatcttggtatcagaacgtacaaagtattgccattgacatcaatatccggtctcatcgagttcgtgtcaaatacaatacccctgcatgactatctgatgccggcccatgagcgctatcatcctaaagacttgaagggctcacagtgtcgtaaggagatttcaaattgccaaacaaagtcatctgagacccgtcttgccacgtacaagaaaatgactgaaagattccaccccgtcatgcgctatttcttcatggaatacttcccggatccggacgactggttcgcgagacggacggcgtatacacgcaccacagcagccatctccatactcggccatgtccttgggttgggcgatcgacacggtcacaatattcttctcgactccagtaacggtgaggtagtgcatatcgatctcggtgtcgcatttgaaactggtcgtgtacttcccgtccccgagctcgtgcccttccgcttgacgagagatatcatagatggcatggggatcactaaaaccgaaggggtattccggcgatgctgcgaattcacactcgacgctctacgagaagaaacatactccatcatgacaatccttgacgtgctacgctacgatcccctgtattcgtggtccatcagccctgtgcgcatcgccaaactacaagacacgcgccgagatgacgcggatgaagaaagtgagattaaggccaagaggaagactggcctcgggaaccatggccttgtcaatgaacccagtgaagcagatcgcgcattagaggttgtgaggaagaaattaagcaagacattgagtgttactgcgacagtcaatgatctcattaatcaggcaacagatgagagaaatttgtctgtattgtattcaggttgggctgcatatgcttaatgcacgcaagtaatatagatcgcaagataccccttgtatatatgctgtgttcctttcttgtcattaaaatgctactggtacgagattgtagatggaaagggatatgtagcgaggtacatatatacataattgagtaatttgacttattcttcacgtcctaggaccaatccaaacctctcatgccttgaaggcataaatccatgtttgagtgaagtagtgatgttccagtggtctctttttctcagtgaatccgtaaaatttgcgcccttggtatttcatcccccctatccgttgccttttcacgacccgatgagaacacgcgctattcatctcaatagtctgaaaaatacattatttccagagctatcttttaacacttccctatcaccaactctttccaccccataatcccgttctccaaagcttttagcacataccccattccaatcactactttattccgatcagacatcttgcattacgtataatacccgaaatcagaccgctctaactccctcaactaccaacaacgacctcctttctatcccccatttcagcctcaatcttagcagcagcagcctccgccttccccctcctcttcctcgccctccggatctcaatctccacatgcgccatctcggcattcacggagcacagccgcgggataatgccctcgacggcgcggataccgtggccttgcgcttgacgtaacgacatcggggccatgagaccaaaccagcggagaggatcccttcgcattccagtttttgacgaggatgtattcgagtccgcggcggcggtggatttctgttctgtctgtggatttgtgtctatatttgacgcgtctgtctcctcggcaggagcgtccaaggaaccggtgggatggtcatccttgctgtcattgtacttctcacccgcttctcccccttctggcttcacgacaaggaacttcgggatacattcaccacctcccaacacattcccaatttcttcctttccctcttcttggtcagaataaggcagggtaagaggctgtagtgaagccgagacgagacgagtggcttgcatccgctcatcgtagaaatctctcccgtaccagacacctctttctgctgagaaatttgcgcgcgctatgctttggtatatgcctgtttggagagtgtttagttctgcgcgcagagttgtgtattcgttcagtaggtgcaggtagtgctctaagagggtgtcgatctttgtctgctctgaagccattttgggtgggttgggtttgagaatagggtgtgtgatttgaagagtaggttgaagtgtcaaatgcgttatttacaatcctaagtgagctatttccaccaatagatcctatcacttagttcggatagacagccttgagcgttaatctggtgtgaagagcttgaataattttgatgctggtaagtgaagcctaatgcaattgcagggtaggttgggatggagtccggcacgccacacctaaaattgcctgcttgtatgtgagttcacttggttaaggaatcctcacacttttgtctaggaataatggcgctgtatcacctccaacgatgcaccatcttcgttgtcatcttgaatacgcttggaattattcatgtctgattctgatacctgccactagcaagtgtcactagtcgtcgaagcatcagccacgccgccaactcatcaataagtctacagtgtttccgttaaccccagaaccatgcagaggatagttcatgatcgtgaacctgggggatggcatgattgaaccctatagatggttccctaagtacaaaaatagataacagctgatgtgggcggcatttggagctgcaatgatcctctgcgcctcgaccgacaagaaaggtaggtagtatacacagatgtatttaggttgatagatcttttaccgcctcataggaaccgccttaccctccgatccccctctatgctgttgcctagctgagaagcagctgtgcgaatagacaggtcaatataagcagtgcgacatgagtaatatgacccaactgcaatgatccgtggtggccgtcttctcactcgtccaagtgtcatctccgcaagggcaactcggggcaaactgaatctatgtcacacgcgagccttaaggctatcagaaagaaaaaattgtttagcgtctttcccttcagatagattacattaaacccgggcgaatgccacggcgccagtgatgacgcagatgccggccttatgcaagacgtgcatatactactaaaccagcagccgggataggtccaggttgtagtgatcttgcgacacgcatgcgcgaggccagctcgcaattctgcagcttgtttctccaacgtccatcctaagggttcgagtattgagggtgtcgtagagatgttccagaagacggaaggaagaatgcctccaccaaaggatcactagcacatattttgttcaaggggtctcgtggctagccacgaggcgggcctgtttgtcggaactgttatgcgaaagagccgtgatgtcgtgcggtccgggcaaatttccgatatacatgcaaactcattcgtcatgttgaagagttgttgcgatactcaatgacttcatagaatatgcgcaacgttggagagataagctttgatgcgatggatgggtcgagtcgctggctgtctaacgtgaccttgtactcttgttccatcttcaacttacattatgtcgtaactagctaatgctgctatctatcgcgatgatgtgacattttcgaaactcttcacagtatcttcagccattcctttctcaggtacccaagcccatcttgtgcgcttgaaacaaaatcatctgtcaatgtcgaatggaatacgtatgtcaggaaatttgtgtcttggcattggactatttggcacatcggcgtacaccgacacgcctcttcttatcagcctcgacagcgctttgggaccgttgagctatcaggatgtggtgtacatccgtagcgtaaagaaaatggacaaagattcctcgagtttg

SEQ ID NO: 29902 - DNA, 735 bp, Muscodor strobelii
  misc_feature: SGI cDNA ID NO. 570276
  misc_feature: Encodes the peptide sequence at SEQ ID NO 29903
atggcttcagagcagacaaagatcgacaccctcttagagcactacctgcacctactgaacgaatacacaactctgcgcgcagaactaaacactctccaaacaggcatataccaaagcatagcgcgcgcaaatttctcagcagaaagaggtgtctggtacgggagagatttctacgatgagcggatgcaagccactcgtctcgtctcggcttcactacagcctcttaccctgccttattctgaccaagaagagggaaaggaagaaattgggaatgtgttgggaggtggtgaatgtatcccgaagttccttgtcgtgaagccagaagggggagaagcgggtgagaagtacaatgacagcaaggatgaccatcccaccggttccttggacgctcctgccgaggagacagacgcgtcaaatatagacacaaatccacagacagaacagaaatccaccgccgccgcggactcgaatacatcctcgtcaaaaactggaatgcgaagggatcctctccgctggtttggtctcatggccccgatgtcgttacgtcaagcgcaaggccacggtatccgcgccgtcgagggcattatcccgcggctgtgctccgtgaatgccgagatggcgcatgtggagattgagatccggagggcgaggaagaggagggggaaggcggaggctgctgctgctaagattgaggctgaaatgggggatagaaaggaggtcgttgttggtagttga

SEQ ID NO: 29903 - protein, 244 aa, Muscodor strobelii
  misc_feature: SGI Peptide ID NO. 570276
  misc_feature (7)..(213): NCBI GI: 39976737 Blast Desc: MGG_06271 [Magnaporthe grisea 70-15] gi|145016333|gb|EDK00823.1| MGG_06271 [Magnaporthe grisea 70-15]
  misc_feature (8)..(213): NCBI GI: 116191973 Blast Desc: [Chaetomium globosum CBS 148.51] gi|88181617|gb|EAQ89085.1| [Chaetomium globosum CBS 148.51]
  misc_feature (7)..(235): NCBI GI: 171686824 Blast Desc: protein product [Podospora anserina] gi|170943373|emb|CAP69026.1| protein product [Podospora anserina]
  misc_feature (3)..(213): NCBI GI: 164425064 Blast Desc: NCU11319 [Neurospora crassa OR74A] gi|157070774|gb|EDO65107.1| NCU11319 [Neurospora crassa OR74A]
  misc_feature (8)..(223): NCBI GI: 238505960 Blast Desc: conserved [Aspergillus flavus NRRL3357] gi|220690296|gb|EED46646.1| conserved [Aspergillus flavus NRRL3357]
  misc_feature (8)..(219): NCBI GI: 255945057 Blast Desc: Pc20g07730 [Penicillium chrysogenum Wisconsin 54-1255] gi|211588031|emb|CAP86102.1| Pc20g07730 [Penicillium chrysogenum Wisconsin 54-1255]
  misc_feature (8)..(222): NCBI GI: 145245347 Blast Desc: An11g09830 [Aspergillus niger] gi|134079641|emb|CAK97067.1| protein product [Aspergillus niger]
  misc_feature (6)..(229): NCBI GI: 156033303 Blast Desc: [Sclerotinia sclerotiorum 1980] gi|154699130|gb|EDN98868.1| [Sclerotinia sclerotiorum 1980]
  misc_feature (8)..(222): NCBI GI: 67537192 Blast Desc: AN4766.2 [Aspergillus nidulans FGSC A4] gi|40741618|gb|EAA60808.1| AN4766.2 [Aspergillus nidulans FGSC A4] gi|259482391|tpe|CBF76830.1| TPA: conserved [Aspergillus FGSC
  misc_feature (13)..(222): NCBI GI: 189202748 Blast Desc: [Pyrenophora tritici-repentis Pt-1C-BFP] gi|187984809|gb|EDU50297.1| [Pyrenophora tritici-repentis Pt-1C-BFP]
MASEQTKIDTLLEHYLHLLNEYTTLRAELNTLQTGIYQSIARANFSAERGVWYGRDFYDERMQATRLVSASLQPLTLPYSDQEEGKEEIGNVLGGGECIPKFLVVKPEGGEAGEKYNDSKDDHPTGSLDAPAEETDASNIDTNPQTEQKSTAAADSNTSSSKTGMRRDPLRWFGLMAPMSLRQAQGHGIRAVEGIIPRLCSVNAEMAHVEIEIRRARKRRGKAEAAAAKIEAEMGDRKEVVVGS

SEQ ID NO: 29904 - DNA, 630 bp, Muscodor strobelii
  misc_feature: SGI cDNA ID NO. 570277
  misc_feature: Encodes the peptide sequence at SEQ ID NO 29905
atggtagtctctacgataaaatgcgtcgtcgttggtgacggtgcggtcggcaagacctgcctgctgatcagttacaccaccaacaagtttccctccgaatatgtccccactgtcttcgacaactacgccgtcaccgtgatgatcggtgacgagccgtacacgttggggctcttcgatactgccggacaagaggattacgaccgtctacgacccctttcttacccgcagaccgatgtcttcctcatatgcttcagtgtcatatcgcccgcctcgttcgaaaacgttcgcgagaagtggtttccagagatcagccatcactgcccccacgttcctctcctcatcgtcggcacacagaccgatctgagggaagacccaaccgtccgggaaaaactcgccaagcagaagatgatgcctgtacggaaggaagacggcgagcggatggccaaggaactcgagcggagggccaatcaaggaaaggagaagaagagggacatcaccgtcaaatacgtcgagtgctctgccttgactcagtacaagctcaaggacgtattcgacgaggcgatcgttgctgctctggaaccaccaaaggaagataccaagtttaagaaaagcaaatgtagtatcctctaa

SEQ ID NO: 29905 - protein, 209 aa, Muscodor strobelii
  misc_feature: SGI Peptide ID NO. 570277
  misc_feature (7)..(120): Pfam Id: PF08477 Pfam Desc: Miro-like protein
  misc_feature (7)..(193): Pfam Id: PF00071 Pfam Desc: Ras family
  misc_feature (1)..(209): NCBI GI: 215434293 Blast Desc: Cdc42p [Fonsecaea monophora] gi|215434295|gb|ACJ66840.1| Cdc42p [Fonsecaea monophora]
  misc_feature (1)..(209): NCBI GI: 225559348 Blast Desc: conserved [Ajellomyces capsulatus G186AR] gi|240282280|gb|EER45783.1| small GTPase [Ajellomyces capsulatus H143]
  misc_feature (1)..(209): NCBI GI: 261190008 Blast Desc: small GTPase [Ajellomyces dermatitidis SLH14081] gi|239591242|gb|EEQ73823.1| small GTPase [Ajellomyces dermatitidis SLH14081] gi|239606304|gb|EEQ83291.1| small GTPase
  misc_feature (1)..(209): NCBI GI: 5679285 Blast Desc: AF162788_1 Cdc42-1p [Exophiala dermatitidis]
  misc_feature (1)..(209): NCBI GI: 119192818 Blast Desc: cell division control protein 42 [Coccidioides immitis RS] gi|240105953|gb|EER24146.1| GTP binding protein Cdc42, [Coccidioides posadasii C735 delta SOWgp]
  misc_feature (1)..(209): NCBI GI: 242776811 Blast Desc: Rho GTPase ModA, [Talaromyces stipitatus ATCC 10500] gi|218722525|gb|EED21943.1| Rho GTPase ModA, [Talaromyces stipitatus ATCC 10500]
  misc_feature (1)..(209): NCBI GI: 115400705 Blast Desc: cell division control protein 42 [Aspergillus terreus NIH2624] gi|114191607|gb|EAU33307.1| cell division control protein 42 [Aspergillus terreus NIH2624]
  misc_feature (1)..(209): NCBI GI: 13641190 Blast Desc: GTPase CDC42 [Colletotrichum trifolii]
  misc_feature (1)..(209): NCBI GI: 39974775 Blast Desc: MGG_00466 [Magnaporthe grisea 70-15] gi|8132884|gb|AAF73431.1|AF250928_1 GTP-binding protein [Magnaporthe grisea] gi|145018639|gb|EDK02918.1| MGG_00466 grisea
  misc_feature (1)..(209): NCBI GI: 70989707 Blast Desc: Rho GTPase ModA [Aspergillus fumigatus Af293] gi|119480335|ref|XP_001260196.1| Rho GTPase ModA, [Neosartorya fischeri NRRL 181] gi|66847334|gb|EAL87665.1| Rho GTPase ModA,
MVVSTIKCVVVGDGAVGKTCLLISYTTNKFPSEYVPTVFDNYAVTVMIGDEPYTLGLFDTAGQEDYDRLRPLSYPQTDVFLICFSVISPASFENVREKWFPEISHHCPHVPLLIVGTQTDLREDPTVREKLAKQKMMPVRKEDGERMAKELERRANQGKEKKRDITVKYVECSALTQYKLKDVFDEAIVAALEPPKEDTKFKKSKCSIL

SEQ ID NO: 29906 - DNA, 2343 bp, Muscodor strobelii
  misc_feature: SGI EST ID NO. CUFF.70999.0
  misc_feature: Variant of the nucleotide sequence at SEQ ID NO 29904
gaactgtcacgacatcagccaaccaagttcgtgactgacaggctggagccaaccaacggcaggctcatcgagagggaaagcacgattgggagaaaggtcacgcaaagcaaaggggcaggaggtggaagcgcgtattgcacctggcagcgacataccgctttccctctcttagcagaagacccgactatctcttgcattggaagttgcaacttgcaagtcttcagcaagttctttcctcggcgcattgactgcttcacgggccatccatcatttaccaaccatctcgggccaagattagaggacctagtagaattccgtctatctaatcaccccaaggagacaagcagagaaagttggaaggcaccgtctctccggccgtctccccctattgtactattagtcggtccagtctttggtgcgacagcccaagttctgcccgcgtccctagttctggcaattgggttatcgactcccaacacatctacttacgatacggtagaatctgctcgctcccagctcccggcttttttctagcaccgcaagcaacacaggtcacatacgcagccctgtcatcactggccattgcccgcacgccaggtcaccgtgactgtcactgtcactgccactgccatcaagctcctccccacctcaaagcccccatgttgctgccaatgcaatcgtctttttgatcctataaaccgcctcgatccgtcccctttcctctcctctcccgagtcttggtttctgcctcgacgtcaattgctcctcctagtactctcaacctgcctgccttgtgccttcgtatccttttacaccagtcacccgacctacgcttttgagacaaagcctcaagttgctgctgtcaatccctctgtctctttcctctctctccactacttggattctcgcccaccggtgcatctgaccctgattgcctgctgccgtctacatcgcccagcgcaggccactccaagcagtcttaaggcaccccaaccccagcctgcaacgcccgagtcagggagaataacggccgatacccgcccaccttcaaacgtcggcgcgcctgtgatcgccatcatttgccaagctaccgcataagccaccccaacttcactcaactccaacttcagcattcgtaactctgcatatccatactctcaacaaggagatactcatcaattcacaatggtagtctctacgataaaatgcgtcgtcgttggtgacggtgcggtcggcaagacctgcctgctgatcagttacaccaccaacaagtttccctccgaatatgtccccactgtcttcgacaactacgccgtcaccgtgatgatcggtgacgagccgtacacgttggggctcttcgatactgccggacaagaggattacgaccgtctacgacccctttcttacccgcagaccgatgtcttcctcatatgcttcagtgtcatatcgcccgcctcgttcgaaaacgttcgcgagaagtggtttccagagatcagccatcactgcccccacgttcctctcctcatcgtcggcacacagaccgatctgagggaagacccaaccgtccgggaaaaactcgccaagcagaagatgatgcctgtacggaaggaagacggcgagcggatggccaaggaactcgagcggagggccaatcaaggaaaggagaagaagagggacatcaccgtcaaatacgtcgagtgctctgccttgactcagtacaagctcaaggacgtattcgacgaggcgatcgttgctgctctggaaccaccaaaggaagataccaagtttaagaaaagcaaatgtagtatcctctaaacagtggatatggcatgctatttggaatcaatcggctccgtatggattgcggatactagaacggaaaatgataggaatgcggaccgctttggcagtaatctactctggttacgtgccttcgatagttcgcaaagtggttcgggctcgcagcaaaattgcgatcaacagccctgtacatacaggagagtgtggcttcagacttcttagatttgtctgtcggggaaatacccgttgcagcccaccgactctcaagaagcagatctcaggtgcatcgccaagggaaacggtacaaaagcatgggcaccttcaaaacggtagcacaagtcttttttgacctgtttctttccgtcttattttgagacttttcgccggcctgctaagcttggaggggacattcacagtacaggaaggacttcgataggatttgtttggcgattggagtgcttctgaaattaaatgattcctcttctcagcaaagtacacgccgcccacgaaaattgcatcatctgtggaatagaccgcgcactg

SEQ ID NO: 29907 - DNA, 1191 bp, Muscodor strobelii
  misc_feature: SGI cDNA ID NO. 570278
  misc_feature: Encodes the peptide sequence at SEQ ID NO 29908
atgagggttcatgagctaatatggactgcgctttggactgcgctgggtgtcggagcttgtggtgagaatggggataagaggacttggaccagggaagagattcaggagttggaggttaaatgggggactgattgggcgtttagcggtatatctacatttgcgcatttgaagcatgttaaatgcttgacgaacccggaggagctttatgatattgccgttattggggcgccgtttgatactgctgttagttatcgtcctggcgctcgttttggcccgcgagctatccgagccgcatcagcaagacaaacgacgttccgtggtttcaatccaagagcaggtctgaatccgtatcaaaattgggcgaagattcttgactgcggggacatacccgtggtccccatcgataatgcacaagctttgatgcaaatgagcgctgcgttctctgaactcgggtcacgaccgtctttctctcctcagctaccaaaaccaaaactcatcactttaggcggtgatcactcgctctccctccccgctcttcgagcattgaaggctgtctacggcccagtgagagtcttgcacttcgacgcacatctagacacatggcatccagcaaaatacccttcatactgggcgaccgaacaagcgaatttcaaccacggaagtatgttctggctagccgggcaggaagggctcctcgcgaacagcactactacagcaagcgggagtgtccacgcagggatcagaacgagactaagcgggaatgacttcgaagatcacgacgatgatacaaatcaaggctggttgaggatttcggcggatgagatcgatgatatggggacgaaaggggtgattgatacgattatgagcacgctaggcactgaggacccggtgtacttgagcgtggatatcgatgtgcttgatcctgcgtttgcgcctggcacgggaacgcctgagccgggtgggtggacgacgagggagttgattaggattttgaggggggttgaggggttgaatgttgtgggtgctgatgttgtcgaggttgcgccggcttatcaggggaatggggaggagacggcgcttgcggctgcgcaggttgtttatgagattttgagttcggttgttaagaggggtgctaaggagttgggaatgggaatgggaaagacggaggggagtgggaaggatgagttgtag

SEQ ID NO: 29908 - protein, 396 aa, Muscodor strobelii
  misc_feature: SGI Peptide ID NO. 570278
  misc_feature (67)..(374): Pfam Id: PF00491 Pfam Desc: Arginase family
  misc_feature (271)..(374): Pfam Id: PF00491 Pfam Desc: Arginase family
  misc_feature (167)..(200): Pfam Id: PF00491 Pfam Desc: Arginase family
  misc_feature (67)..(99): Pfam Id: PF00491 Pfam Desc: Arginase family
  misc_feature (22)..(396): NCBI GI: 145611336 Blast Desc: MGG_11574 [Magnaporthe grisea 70-15] gi|145018640|gb|EDK02919.1| MGG_11574 [Magnaporthe grisea 70-15]
  misc_feature (25)..(396): NCBI GI: 46122137 Blast Desc: FG05446.1 [Gibberella zeae PH-1]
  misc_feature (8)..(396): NCBI GI: 189189876 Blast Desc: agmatinase, mitochondrial precursor [Pyrenophora tritici-repentis Pt-1C-BFP] gi|187972883|gb|EDU40382.1| agmatinase, mitochondrial precursor [Pyrenophora tritici-repentis
  misc_feature (27)..(396): NCBI GI: 156033299 Blast Desc: SS1G_13725 [Sclerotinia sclerotiorum 1980] gi|154699128|gb|EDN98866.1| SS1G_13725 [Sclerotinia sclerotiorum 1980]
  misc_feature (25)..(396): NCBI GI: 169607901 Blast Desc: SNOG_07015 [Phaeosphaeria nodorum SN15] gi|111064546|gb|EAT85666.1| SNOG_07015 [Phaeosphaeria nodorum SN15]
  misc_feature (30)..(396): NCBI GI: 154290188 Blast Desc: BC1G_15520 [Botryotinia fuckeliana B05.10] gi|150847854|gb|EDN23047.1| BC1G_15520 [Botryotinia fuckeliana B05.10]
  misc_feature (18)..(396): NCBI GI: 258574119 Blast Desc: UREG_00755 [Uncinocarpus reesii 1704] gi|237901507|gb|EEP75908.1| UREG_00755 [Uncinocarpus reesii 1704]
  misc_feature (30)..(396): NCBI GI: 212532881 Blast Desc: agmatinase, [Penicillium marneffei ATCC 18224] gi|210071961|gb|EEA26050.1| agmatinase, [Penicillium marneffei ATCC 18224]
  misc_feature (35)..(380): NCBI GI: 119192820 Blast Desc: CIMG_00787 [Coccidioides immitis RS]
  misc_feature (30)..(396): NCBI GI: 242776806 Blast Desc: agmatinase, [Talaromyces stipitatus ATCC 10500] gi|218722524|gb|EED21942.1| agmatinase, [Talaromyces stipitatus ATCC 10500]
  misc_feature (40)..(376): SWISSPROT Homolog: EC 3.5.3.11 Agmatinase
MRVHELIWTALWTALGVGACGENGDKRTWTREEIQELEVKWGTDWAFSGISTFAHLKHVKCLTNPEELYDIAVIGAPFDTAVSYRPGARFGPRAIRAASARQTTFRGFNPRAGLNPYQNWAKILDCGDIPVVPIDNAQALMQMSAAFSELGSRPSFSPQLPKPKLITLGGDHSLSLPALRALKAVYGPVRVLHFDAHLDTWHPAKYPSYWATEQANFNHGSMFWLAGQEGLLANSTTTASGSVHAGIRTRLSGNDFEDHDDDTNQGWLRISADEIDDMGTKGVIDTIMSTLGTEDPVYLSVDIDVLDPAFAPGTGTPEPGGWTTRELIRILRGVEGLNVVGADVVEVAPAYQGNGEETALAAAQVVYEILSSVVKRGAKELGMGMGKTEGSGKDEL

SEQ ID NO: 29909 - DNA, 4449 bp, Muscodor strobelii
  misc_feature: SGI EST ID NO. CUFF.71004.0
  misc_feature: Variant of the nucleotide sequence at SEQ ID NO 29907
gcagctcacgcgactcagctcgtagtctcctgcttctttggagatacaatgcatgtggggatgccagcacggcatgccgtatgtaagactgaggttaggtcgcgtagcgcatgagtggactggttgatcgttcatgcaagataacagaactacgtacacgggactgcccaggccacctaccccgacgccctccgacagctaattgagggccgagccaagacccggtgcgattgtcggccgttgaggaggtatagacctggagtacctgccttataagtgattctatacttttgctttttcgtcctgggagtatactcggggtgttgctaattgatccttctgactatatggtgatttatccctgcttcagtcttacagctattgcattcctgagctgtgcaacggctgaaccccacctacctatctgatcgaagtggatgaataccagacgtcatgagggttcatgagctaatatggactgcgctttggactgcgctgggtgtcggagcttgtggtgagaatggggataagaggacttggaccagggaagagattcaggagttggaggttaaatgggggactgattgggcgtttagcggtatatctacatttgcgcatttgaagcatgttaaatgcttgacgaacccggaggagctttatgatattgccgttattggggcgccgtttgatactgctgttagttatcgtcctggcgctcgttttggcccgcgagctatccgagccgcatcagcaagacaaacgacgttccgtggtttcaatccaagagcaggtctgaatccgtatcaaaattgggcgaagattcttgactgcggggacatacccgtggtccccatcgataatgcacaagctttgatgcaaatgagcgctgcgttctctgaactcgggtcacgaccgtctttctctcctcagctaccaaaaccaaaactcatcactttaggcggtgatcactcgctctccctccccgctcttcgagcattgaaggctgtctacggcccagtgagagtcttgcacttcgacgcacatctagacacatggcatccagcaaaatacccttcatactgggcgaccgaacaagcgaatttcaaccacggaagtatgttctggctagccgggcaggaagggctcctcgcgaacagcactactacagcaagcgggagtgtccacgcagggatcagaacgagactaagcgggaatgacttcgaagatcacgacgatgatacaaatcaaggctggttgaggatttcggcggatgagatcgatgatatggggacgaaaggggtgattgatacgattatgagcacgctaggcactgaggacccggtgtacttgagcgtggatatcgatgtgcttgatcctgcgtttgcgcctggcacgggaacgcctgagccgggtgggtggacgacgagggagttgattaggattttgaggggggttgaggggttgaatgttgtgggtgctgatgttgtcgaggttgcgccggcttatcaggggaatggggaggagacggcgcttgcggctgcgcaggttgtttatgagattttgagttcggttgttaagaggggtgctaaggagttgggaatgggaatgggaaagacggaggggagtgggaaggatgagttgtaggctgtgagagagtcgagagaggtgagctgtggatgagggcgacggtaacggtaaccatgaggtgaagagatatcacacttcgagatcttggcaatgtgtcttgcggccccggttgacattcactggcatggaatatcgttgaagattcctgagcttagatagtagaaggtccgtcaagcgtacatgctcaattcagaatatgaactcaacgtgttggacttagatccatactatcatctaacatagcgactgtccgcggtttccctggccctggaattaacttgacggctccgagattcaaggggcttctgaaactgttgacccgtgtgactcatttgatccaaggagatatctaatcgtgtctcaggaggatttatttaaggctgtgacatgcgtgttcagaatgccattagcggctgttcctaacattcctgatatcctctaatttgaggttgcacagaaacactaccgctcctgccgggttcgcagcgccgtgagtcaaaccgttatcaaaacacgtaggacggcaagcgctatcttccgctatcagcgcaacgcgcaacggtgtcaattgagctttaaccccaccacccctcgtctctctcgaataattccagacagctttcgcaaacaaccccacattcgcccaattcccaattcgacactacacaattacccgagtcgcatcttcagtatcgtctggtatttctcattcattaggcctacaaacaaccagggacgtctagacatggcagacgtcgtgcacgagctcgccgagcgtacgaaagtatgcgaaaaatgctacatcgacaccgatactggcaaggatgacgagactgcagacggaaccgagttcaaaccctacaaatcccttcccttcgcctacatccagaacttcgagaaggaaacaccgcaattttggacgcgcgcatctgtcacaggtcctgtcgcagacgacgaagatcctgccgtgagattattgtggaaggaacccgccaagagcgctgtcaaaaaagcccagaacgccctcgatgctcacaagaagaaggttcagaagcagaagcaggccgctgccgccaaggacgagcaagacaaggcaaagctagccacccaagaggctgctaagaagattgtactgaagcaggatgcgtcactggccgccccggtcaagatcaagattgggcgcaaggacatcgagtttggcacgagagtaaaggtcatgggacgcatccatcgtttgcgcgcacagaagcaagccacattcattactttggtagatggatacggacagcttcagtgtgtcctgcaagccggcgacctgaccaagacatacgatgcccttaattttgctcaaggaacatcattggcgttgtacggagagctgcgtcaggtgcccgagggacaatcggcgccagatggcagagagttgcacgttgactactatgaagtgcttggcgcgtctcctagtgatgaggatgccattaccaacaaggtttcctctcaatctaaccagtgggatcagcagatgttggacaacaggcatctggtgctgcggggcgagaacgcctctgccatcatgaagatccgagctgccgttgagcgcgccttccagaaggtgtacgacgatatggagatcaccaaagtctcgccccctgcccttgtgcagacacaagtcgaaggtggagctactctgttcagcgcaccatactacgacgagaccgcctacctgacccagtcctctcagctatacctcgagactgtcttgcctagcttaggcgatgtctattgcatcgagaagtcgttccgtgccgagaagagtttgacccgccgccatctctctgaatacacccacgttgaggccgaactcgattacattgacttcaacgatctactcgagcatctagaggaggtgatgtgccgggtgattgacctcgtccttgccaaccccacgatcgcaggatacataaaggagctcaaccccaacttccagaagccatcgcgtcctttcaagcgcatgaagtacgccgatgccatcgattggctcaacgctcaggatcctccaatcttgaacgaagataaccgcccacacgtcttcggtgatgatatcgccgaggccgccgagcgtaagatgactgatatcatcaaccgacctatcttcctcactcacttccctgtcgagatcaaggccttctacatgaagaaggatccgtccgacttgcgtgttacggagagtgtcgattgcttgatgcctggtgtcggtgagatcgtgggtggaagtatgaggatggagggttacgatgagctgttggctgcttatgagaagcagggtattcctgcaaaggactattactggtacactgaccagcggaagtatggtacttcgcctcacggcggatacggtctgggtctcgaacgtttcctcgcttggattgctaaccagcatactgtccggactacttgtctttatcctcgctttatgggccgttgcaagccttgagttgttgaagacggtacaatattgctaaatcagttcggagaacgatgatgcgtcctcggtatatgcttgaccaaacatgaaatctgttccggggtagagtatagaagtcagatgaggaaggactcgggtttctgggcagactcggatggattgctagctagcttgctagtgaattgatagaatattcacaagattttctgatgattactcgggaagaatcgatagtatcagagtcatctctagagtctcgatctcaagtgtaactctacaaggccgcgtaatacgcatatctcatcctttggaacacg

SEQ ID NO: 29910 - DNA, 1749 bp, Muscodor strobelii
  misc_feature: SGI cDNA ID NO. 570279
  misc_feature: Reduced expression when VOC is produced
  misc_feature: Encodes the peptide sequence at SEQ ID NO 29911
atggcagacgtcgtgcacgagctcgccgagcgtacgaaagtatgcgaaaaatgctacatcgacaccgatactggcaaggatgacgagactgcagacggaaccgagttcaaaccctacaaatcccttcccttcgcctacatccagaacttcgagaaggaaacaccgcaattttggacgcgcgcatctgtcacaggtcctgtcgcagacgacgaagatcctgccgtgagattattgtggaaggaacccgccaagagcgctgtcaaaaaagcccagaacgccctcgatgctcacaagaagaaggttcagaagcagaagcaggccgctgccgccaaggacgagcaagacaaggcaaagctagccacccaagaggctgctaagaagattgtactgaagcaggatgcgtcactggccgccccggtcaagatcaagattgggcgcaaggacatcgagtttggcacgagagtaaaggtcatgggacgcatccatcgtttgcgcgcacagaagcaagccacattcattactttggtagatggatacggacagcttcagtgtgtcctgcaagccggcgacctgaccaagacatacgatgcccttaattttgctcaaggaacatcattggcgttgtacggagagctgcgtcaggtgcccgagggacaatcggcgccagatggcagagagttgcacgttgactactatgaagtgcttggcgcgtctcctagtgatgaggatgccattaccaacaaggtttcctctcaatctaaccagtgggatcagcagatgttggacaacaggcatctggtgctgcggggcgagaacgcctctgccatcatgaagatccgagctgccgttgagcgcgccttccagaaggtgtacgacgatatggagatcaccaaagtctcgccccctgcccttgtgcagacacaagtcgaaggtggagctactctgttcagcgcaccatactacgacgagaccgcctacctgacccagtcctctcagctatacctcgagactgtcttgcctagcttaggcgatgtctattgcatcgagaagtcgttccgtgccgagaagagtttgacccgccgccatctctctgaatacacccacgttgaggccgaactcgattacattgacttcaacgatctactcgagcatctagaggaggtgatgtgccgggtgattgacctcgtccttgccaaccccacgatcgcaggatacataaaggagctcaaccccaacttccagaagccatcgcgtcctttcaagcgcatgaagtacgccgatgccatcgattggctcaacgctcaggatcctccaatcttgaacgaagataaccgcccacacgtcttcggtgatgatatcgccgaggccgccgagcgtaagatgactgatatcatcaaccgacctatcttcctcactcacttccctgtcgagatcaaggccttctacatgaagaaggatccgtccgacttgcgtgttacggagagtgtcgattgcttgatgcctggtgtcggtgagatcgtgggtggaagtatgaggatggagggttacgatgagctgttggctgcttatgagaagcagggtattcctgcaaaggactattactggtacactgaccagcggaagtatggtacttcgcctcacggcggatacggtctgggtctcgaacgtttcctcgcttggattgctaaccagcatactgtccggactacttgtctttatcctcgctttatgggccgttgcaagccttga

SEQ ID NO: 29911 - protein, 582 aa, Muscodor strobelii
  misc_feature: SGI Peptide ID NO. 570279
  misc_feature (155)..(235): Pfam Id: PF01336 Pfam Desc: OB-fold nucleic acid binding domain
  misc_feature (257)..(578): Pfam Id: PF00152 Pfam Desc: tRNA synthetases class II (D, K and N)
  misc_feature (5)..(582): NCBI GI: 261360164 Blast Desc: asparaginyl-tRNA synthetase [Verticillium albo-atrum VaMs.102]
  misc_feature (5)..(582): NCBI GI: 154294100 Blast Desc: conserved [Botryotinia fuckeliana B05.10] gi|150845057|gb|EDN20250.1| conserved [Botryotinia fuckeliana B05.10]
  misc_feature (5)..(542): NCBI GI: 156033277 Blast Desc: conserved [Sclerotinia sclerotiorum 1980] gi|154699117|gb|EDN98855.1| conserved [Sclerotinia sclerotiorum 1980]
  misc_feature (6)..(582): NCBI GI: 85084624 Blast Desc: asparaginyl-tRNA synthetase [Neurospora crassa OR74A] gi|28918438|gb|EAA28112.1| asparaginyl-tRNA synthetase [Neurospora crassa OR74A]
  misc_feature (5)..(582): NCBI GI: 171686828 Blast Desc: protein product [Podospora anserina] gi|170943375|emb|CAP69028.1| protein product [Podospora anserina]
  misc_feature (19)..(582): NCBI GI: 240105966 Blast Desc: asparaginyl-tRNA synthetase, [Coccidioides posadasii C735 delta SOWgp]
  misc_feature (19)..(582): NCBI GI: 119192776 Blast Desc: asparaginyl-tRNA synthetase, cytoplasmic [Coccidioides immitis RS]
  misc_feature (19)..(582): NCBI GI: 258574089 Blast Desc: asparaginyl-tRNA synthetase [Uncinocarpus reesii 1704] gi|237901492|gb|EEP75893.1| asparaginyl-tRNA synthetase [Uncinocarpus reesii 1704]
  misc_feature (19)..(582): NCBI GI: 115400689 Blast Desc: asparaginyl-tRNA synthetase [Aspergillus terreus NIH2624] gi|114191599|gb|EAU33299.1| asparaginyl-tRNA synthetase [Aspergillus terreus NIH2624]
  misc_feature (19)..(582): NCBI GI: 67900984 Blast Desc: AN7479.2 [Aspergillus nidulans FGSC A4] gi|40742869|gb|EAA62059.1| AN7479.2 [Aspergillus nidulans FGSC A4] gi|259483785|tpe|CBF79459.1| TPA: cytoplasmic synthetase, A4]
  misc_feature (19)..(582): SWISSPROT Homolog: EC 6.1.1.22 Asparagine--tRNA ligase
  misc_feature: Useful for introducing or modulating the production of volatile compounds
MADVVHELAERTKVCEKCYIDTDTGKDDETADGTEFKPYKSLPFAYIQNFEKETPQFWTRASVTGPVADDEDPAVRLLWKEPAKSAVKKAQNALDAHKKKVQKQKQAAAAKDEQDKAKLATQEAAKKIVLKQDASLAAPVKIKIGRKDIEFGTRVKVMGRIHRLRAQKQATFITLVDGYGQLQCVLQAGDLTKTYDALNFAQGTSLALYGELRQVPEGQSAPDGRELHVDYYEVLGASPSDEDAITNKVSSQSNQWDQQMLDNRHLVLRGENASAIMKIRAAVERAFQKVYDDMEITKVSPPALVQTQVEGGATLFSAPYYDETAYLTQSSQLYLETVLPSLGDVYCIEKSFRAEKSLTRRHLSEYTHVEAELDYIDFNDLLEHLEEVMCRVIDLVLANPTIAGYIKELNPNFQKPSRPFKRMKYADAIDWLNAQDPPILNEDNRPHVFGDDIAEAAERKMTDIINRPIFLTHFPVEIKAFYMKKDPSDLRVTESVDCLMPGVGEIVGGSMRMEGYDELLAAYEKQGIPAKDYYWYTDQRKYGTSPHGGYGLGLERFLAWIANQHTVRTTCLYPRFMGRCKP

SEQ ID NO: 29912 - DNA, 4449 bp, Muscodor strobelii; identical to SEQ ID NO: 29909
  misc_feature: SGI EST ID NO. CUFF.71004.0
  misc_feature: Variant of the nucleotide sequence at SEQ ID NO 29910

SEQ ID NO: 29913 - DNA, 1098 bp, Muscodor strobelii
  misc_feature: SGI cDNA ID NO. 570280
  misc_feature: Elevated expression when VOC is produced
  misc_feature: Encodes the peptide sequence at SEQ ID NO 29914
atggcgacgatcagcgtaaacacaccaccacctgctattatcacaactatccctatcgaaaacaccataaacctcagcggcacaaacgttcctcctcttctgagtgtatatactccatcgcctttctgcaatacacagtggttttatgatccatcccggcccgacgatgtctatagtggcatcgccgattacaacattgactttgcggattgtcaaccattgcagtggacgtctagcttttacagccctggtgtatgcccgagtgggcaggtattcaaggctgtcactgaggcagtgtacagtcttacagcagatggcggcctattaacatattacgcgggaacctgttgcagcagtggtttcatattgactggtttcgactgttactcaacatttgattcgggaatgactgtcatgttacagcatactacggacgatgatgtgatactaactaccgtactcacgaaatcggtgactgctgtcgctgctccgatcgaaatgcgctggcaagaaaaggatctctcgtcatttcctgcgtctctagctgcatcgttgagagttgccatgggattgcctgcatttaccagtgattcgacagcctcaactgcatcgcattatactgtaaaatcatctacggcgatgacctctctaccattggaaagccaagcgccaggatcagcggatgccagaacatcattatcgagaggggccattgctgggatcagcatcggggcagtagtcacagtacttctattcggaatcttcgcattcctcgcgctatcgagacgctggaagggtaaaaatttgacagaggatgagcccggaagcaacgaactaccagcacaaacggtagaactggaacatgcgaacaaggatttcaaacatttcagcggcggaacatggagatctgaactggcaaccatgtcttcacctaatcctagcgagcttgagggagggaactcccgagcccagagcaatcttgattcaaggataagtgcctactccgggtcaacattcactgggcctgctgccgagctcgctgcctcgaacacctggccccaacaccaggaagccatccccgaagctcgtgaaggctag

SEQ ID NO: 29914 - protein, 365 aa, Muscodor strobelii
  misc_feature: SGI Peptide ID NO. 570280
  misc_feature (160)..(330): NCBI GI: 169603892 Blast Desc: SNOG_04955 [Phaeosphaeria nodorum SN15] gi|111066226|gb|EAT87346.1| SNOG_04955 [Phaeosphaeria nodorum SN15]
  misc_feature (32)..(241): NCBI GI: 154284638 Blast Desc: [Ajellomyces capsulatus NAm1] gi|150406755|gb|EDN02296.1| [Ajellomyces capsulatus NAm1]
  misc_feature (72)..(295): NCBI GI: 240106314 Blast Desc: CPC735_058770 [Coccidioides posadasii C735 delta SOWgp]
  misc_feature (72)..(316): NCBI GI: 119191874 Blast Desc: [Coccidioides immitis RS]
  misc_feature: Useful for introducing or modulating the production of volatile compounds
MATISVNTPPPAIITTIPIENTINLSGTNVPPLLSVYTPSPFCNTQWFYDPSRPDDVYSGIADYNIDFADCQPLQWTSSFYSPGVCPSGQVFKAVTEAVYSLTADGGLLTYYAGTCCSSGFILTGFDCYSTFDSGMTVMLQHTTDDDVILTTVLTKSVTAVAAPIEMRWQEKDLSSFPASLAASLRVAMGLPAFTSDSTASTASHYTVKSSTAMTSLPLESQAPGSADARTSLSRGAIAGISIGAVVTVLLFGIFAFLALSRRWKGKNLTEDEPGSNELPAQTVELEHANKDFKHFSGGTWRSELATMSSPNPSELEGGNSRAQSNLDSRISAYSGSTFTGPAAELAASNTWPQHQEAIPEAREG

SEQ ID NO: 29915 - DNA, 1400 bp, Muscodor strobelii
  misc_feature: SGI EST ID NO. CUFF.70712.0
  misc_feature: Variant of the nucleotide sequence at SEQ ID NO 29913
gaatgcgccgtcgacttccgtgccatgtatatcattcaaagatttttgctattgtcatgattctcagctgtttgcctgaccctcaactgcggctatcgtgaaaagatggcgacgatcagcgtaaacacaccaccacctgctattatcacaactatccctatcgaaaacaccataaacctcagcggcacaaacgttcctcctcttctgagtgtatatactccatcgcctttctgcaatacacagtggttttatgatccatcccggcccgacgatgtctatagtggcatcgccgattacaacattgactttgcggattgtcaaccattgcagtggacgtctagcttttacagccctggtgtatgcccgagtgggcaggtattcaaggctgtcactgaggcagtgtacagtcttacagcagatggcggcctattaacatattacgcgggaacctgttgcagcagtggtttcatattgactggtttcgactgttactcaacatttgattcgggaatgactgtcatgttacagcatactacggacgatgatgtgatactaactaccgtactcacgaaatcggtgactgctgtcgctgctccgatcgaaatgcgctggcaagaaaaggatctctcgtcatttcctgcgtctctagctgcatcgttgagagttgccatgggattgcctgcatttaccagtgattcgacagcctcaactgcatcgcattatactgtaaaatcatctacggcgatgacctctctaccattggaaagccaagcgccaggatcagcggatgccagaacatcattatcgagaggggccattgctgggatcagcatcggggcagtagtcacagtacttctattcggaatcttcgcattcctcgcgctatcgagacgctggaagggtaaaaatttgacagaggatgagcccggaagcaacgaactaccagcacaaacggtagaactggaacatgcgaacaaggatttcaaacatttcagcggcggaacatggagatctgaactggcaaccatgtcttcacctaatcctagcgagcttgagggagggaactcccgagcccagagcaatcttgattcaaggataagtgcctactccgggtcaacattcactgggcctgctgccgagctcgctgcctcgaacacctggccccaacaccaggaagccatccccgaagctcgtgaaggctagatagatgcaatattacgtttcgtggatgatatcagttcaagccctatttgtgttatgaaatgaaatacgccgcccacaaatagtatcattaagtgagccacaagaatacgagaaatcaatgtcctggtttacgagatccgataggtcttgatagatatagttcactggctaatgaatgacaatagttatagagatgg

SEQ ID NO: 29916 - DNA, 2385 bp, Muscodor strobelii
  misc_feature: SGI cDNA ID NO. 570281
  misc_feature: Encodes the peptide sequence at SEQ ID NO 29917
atgcaggacctctctgtctcgggcatccctacagggcctgccgctgctaactcgaacactcgattcggtcatgcttctaagccttcgaatagcgacaccggcttctcccacggcgcattcacttcaaacgtctcttcgttcgcggatagacctcatcgtcggggcaacattccttctatcaacactcagcagatgaacccgcctactcacaacagcatcgcagacatggctactcccggcactggctacgacatgcagttcactcctttgctgccctcgcagctccttctcgggagtccctttcagcctggttctcccactgcatttgccagtcctgcgttccagagcatacctgggtttcagcagtaccagcagacgaatggtcaatcacaccaaaatggctcaatcagtcccatccagcaacacatggctcctcagagttatcagacaatggtttcacccactggatatggagcgccgcagttcttcccgcctcagtcgcccacggggaactacgcaaacatggccaaccagctccagatgcagccgcagtcgcctgtgacgatgggtaataacgtcgtcactagcactagccgaaccgtgtacctaggaaacatcccgcctgacactaccgcggaggagattttgggtcatgttaggagcggtcagattgaatccgtccgtcttcttcctgataagaactgtgctttcatctcatttcttgatgccaatgctgccactcacttccactcagatgccattctgaaaaagctctgcatcaagggtcaggacatcaagatcggatggggcaaaccctcgcaagttcccacttcagttgcgctcgcagtccagcaatctggagcttctcgaaacgtttacctaggtaacctgcctgaggagattgctgaggaggaattacgcgaggacctaggcaaatttggtgccattgacaccatcaagattgttcgtgagaagaacattgcttttgttcactttttgtcagtggccaatgctatgaaggccgttcaacagttgccccaggagcccaagtggcaatctccccgccgtgtttactatggcaaggatcgttgcgcttatgtttccaaaactcaacaacagaatgctgcacagtaccttggcatcgctccaggatatgcccacatgctgactggtcaagaccgcgatgtcatctcaagcgcacttgcgcagcaatctgtagctgctgccgcagtcgcaactacagctggcgggatcaataacctgggcaatcgaactatttacctaggcaacattcaccctgagacgacaattgaagaaatctgcaacgttgtacgcggcggcctccttcaccacatccgatacattccagacaagcatatttgcttcgtgaccttcattgatcctaccgcggccgcttcattctatgcgctcagtaacatccaaggtctcatgattcacaatcgtcgtctgaagatcggatggggcaagcactccggtgctctcccgccagccattgccttggctgttagtggcggtgcctcacgtaacgtttatattggcaaccttgatgaaacctggaccgaggagcggctgcgacaagatttctccgagtacggtgaaattgagcttgtcaacacattgagagaaaagagctgtgcgtttgtcaatttcacgaacatcgccaacgccatcaaggccattgaagccattcgcagcaaggacgagtacaaaaagtttaaagtgaacttcggcaaggaccgttgtggaaaccagccacgtcaattgcaacaacagtcacagtcacctcgtgacggcgttccttcacctccacctggtggcagtggcagtggcaactcgcccacaaacgccacgtctcccttgtcaacaaacggtcaaaatatgtatggacccaacaacaatcctctaacgatgtatttgcaacaagtgtcgcagcaggctcatcagcaacagcatcagcaacagcagatgttagtttcgcaacaagctgcactgtttggcactgcttcgtcatcgccaagtgaactgaagttggagataccccagcagggccacatgcctgggcatgggcagtcagcaagtatttcgaacggctacggagctccacagagtgccgtatcgggaactacaactatcggcgggttgctcgcgcctggtcgcagtcaacacaaccgcgccctcagtcttcccgtctttgctcctctcgagaatggtggtaatagtcccattggtgctgttggaactattggcggcgacggagaacgcagaggacaccactaccagtcaagctttggtggaattggctctgggcttggtcttgccattcaaggtggactgaacggatgggaagaggaggtcgcgaattag

SEQ ID NO: 29917 - protein, 794 aa, Muscodor strobelii
  misc_feature: SGI Peptide ID NO. 570281
  misc_feature (292)..(357): Pfam Id: PF00076 Pfam Desc: RNA recognition motif. (a.k.a. RRM, RBD, or RNP domain)
  misc_feature (517)..(583): Pfam Id: PF00076 Pfam Desc: RNA recognition motif. (a.k.a. RRM, RBD, or RNP domain)
  misc_feature (292)..(346): Pfam Id: PF00076 Pfam Desc: RNA recognition motif. (a.k.a. RRM, RBD, or RNP domain)
  misc_feature (517)..(569): Pfam Id: PF00076 Pfam Desc: RNA recognition motif. (a.k.a. RRM, RBD, or RNP domain)
  misc_feature (201)..(248): Pfam Id: PF00076 Pfam Desc: RNA recognition motif. (a.k.a. RRM, RBD, or RNP domain)
  misc_feature (21)..(794): NCBI GI: 116191983 Blast Desc: CHGG_05709 [Chaetomium globosum CBS 148.51] gi|88181622|gb|EAQ89090.1| CHGG_05709 [Chaetomium globosum CBS 148.51]
  misc_feature (1)..(794): NCBI GI: 46122133 Blast Desc: FG05444.1 [Gibberella zeae PH-1]
  misc_feature (21)..(794): NCBI GI: 85084632 Blast Desc: negative regulator of differentiation 1 [Neurospora crassa OR74A] gi|28918440|gb|EAA28114.1| negative regulator of differentiation 1 [Neurospora crassa OR74A]
  misc_feature (1)..(794): NCBI GI: 39954174 Blast Desc: MGG_08898 [Magnaporthe grisea 70-15] gi|145021158|gb|EDK05287.1| MGG_08898 [Magnaporthe grisea 70-15]
  misc_feature (1)..(735): NCBI GI: 171686830 Blast Desc: protein product [Podospora anserina] gi|170943376|emb|CAP69029.1| protein product [Podospora anserina]
  misc_feature (47)..(793): NCBI GI: 156033281 Blast Desc: SS1G_13716 [Sclerotinia sclerotiorum 1980] gi|154699119|gb|EDN98857.1| SS1G_13716 [Sclerotinia sclerotiorum 1980]
  misc_feature (75)..(793): NCBI GI: 154294096 Blast Desc: BC1G_14118 [Botryotinia fuckeliana B05.10] gi|150845055|gb|EDN20248.1| BC1G_14118 [Botryotinia fuckeliana B05.10]
  misc_feature (1)..(794): NCBI GI: 261360165 Blast Desc: RNA recognition motif containing protein [Verticillium albo-atrum VaMs.102]
  misc_feature (20)..(791): NCBI GI: 238501882 Blast Desc: differentiation regulator (Nrd1), [Aspergillus flavus NRRL3357] gi|220692412|gb|EED48759.1| differentiation regulator (Nrd1), [Aspergillus flavus NRRL3357]
  misc_feature (20)..(791): NCBI GI: 169769412 Blast Desc: [Aspergillus oryzae RIB40] gi|83767034|dbj|BAE57174.1| protein product [Aspergillus oryzae]
MQDLSVSGIPTGPAAANSNTRFGHASKPSNSDTGFSHGAFTSNVSSFADRPHRRGNIPSINTQQMNPPTHNSIADMATPGTGYDMQFTPLLPSQLLLGSPFQPGSPTAFASPAFQSIPGFQQYQQTNGQSHQNGSISPIQQHMAPQSYQTMVSPTGYGAPQFFPPQSPTGNYANMANQLQMQPQSPVTMGNNVVTSTSRTVYLGNIPPDTTAEEILGHVRSGQIESVRLLPDKNCAFISFLDANAATHFHSDAILKKLCIKGQDIKIGWGKPSQVPTSVALAVQQSGASRNVYLGNLPEEIAEEELREDLGKFGAIDTIKIVREKNIAFVHFLSVANAMKAVQQLPQEPKWQSPRRVYYGKDRCAYVSKTQQQNAAQYLGIAPGYAHMLTGQDRDVISSALAQQSVAAAAVATTAGGINNLGNRTIYLGNIHPETTIEEICNVVRGGLLHHIRYIPDKHICFVTFIDPTAAASFYALSNIQGLMIHNRRLKIGWGKHSGALPPAIALAVSGGASRNVYIGNLDETWTEERLRQDFSEYGEIELVNTLREKSCAFVNFTNIANAIKAIEAIRSKDEYKKFKVNFGKDRCGNQPRQLQQQSQSPRDGVPSPPPGGSGSGNSPTNATSPLSTNGQNMYGPNNNPLTMYLQQVSQQAHQQQHQQQQMLVSQQAALFGTASSSPSELKLEIPQQGHMPGHGQSASISNGYGAPQSAVSGTTTIGGLLAPGRSQHNRALSLPVFAPLENGGNSPIGAVGTIGGDGERRGHHYQSSFGGIGSGLGLAIQGGLNGWEEEVAN

SEQ ID NO: 29918 - DNA, 4024 bp, Muscodor strobelii
  misc_feature: SGI EST ID NO. CUFF.70723.0
  misc_feature: Variant of the nucleotide sequence at SEQ ID NO 29916
cgtacggcgggctgtccttgtcctgccttaccacaccccgactcaccacacccgtcgttcctggcgctcacgaaacatctcgtctgcagcgcttggcctggcaagtctgggctggctgggtctctgcctcacctctcattttgacgcccccctgtcggctgcgtctctccttaacccttcgttcatccctattcatcgcctctcctcttctcaacctccacctatcctattttctccgcctgttgtatcttaccctattcaatcattcgttctctttgcttgttctttacactacttacttgcccagaccgcctgggatcttctccctcttctgtttacctactgtcgttctctacagcttcttaatattgcttgatatatctgtctttggaaaatctcgattctcccttttttgccggccattacgtgcgcatacgacactcgctgaacctgcttactgtcaaccacgagctgccattctgccacgactatacagtttagtcaccaagctgcaaatttgcaaacaagagaaatatcagcagcaggaagaaaggagggctttgttgtctacttatacgacttctcgacgctcgtttctgacgcacatatcgatttaccgcgctttctttggagcttcgacactcgtccggtctttgtttgccagctaccgggtccgatcatcccacactcaaagaatcacgtcccttcgaggtcacgatccgtcgtggatattcgatcgctatactttgacgcttggtgttggctattgtcggccaaagtgaatattgtgtgcttacctcggccagctcgaggtatcatcccagatcttggcaaatcgtacgcttggacaagctcgaaacacgttgaatcgcacacaattcgctagcaaatcaaaacaatcaaccccaccgtcgatattctgcatatagtctatatcctcgaccatcggtggcattttcccgcgccctcacaatagggtcagcttaccgcctgtcattgcttattgttttggagagacacgaaattgctcagttcgcccctttagacaagtagctcttgtaatagcacggtgcttggcggtcagcataacacgcctacacctgatccagcaccttctttcttacgttgtgcctttgaaagggcacgtctaatctttcacgacggcggttctttcacagcaatcaagggacaaccttgtccctcctcatcttctcgggatgcaggacctctctgtctcgggcatccctacagggcctgccgctgctaactcgaacactcgattcggtcatgcttctaagccttcgaatagcgacaccggcttctcccacggcgcattcacttcaaacgtctcttcgttcgcggatagacctcatcgtcggggcaacattccttctatcaacactcagcagatgaacccgcctactcacaacagcatcgcagacatggctactcccggcactggctacgacatgcagttcactcctttgctgccctcgcagctccttctcgggagtccctttcagcctggttctcccactgcatttgccagtcctgcgttccagagcatacctgggtttcagcagtaccagcagacgaatggtcaatcacaccaaaatggctcaatcagtcccatccagcaacacatggctcctcagagttatcagacaatggtttcacccactggatatggagcgccgcagttcttcccgcctcagtcgcccacggggaactacgcaaacatggccaaccagctccagatgcagccgcagtcgcctgtgacgatgggtaataacgtcgtcactagcactagccgaaccgtgtacctaggaaacatcccgcctgacactaccgcggaggagattttgggtcatgttaggagcggtcagattgaatccgtccgtcttcttcctgataagaactgtgctttcatctcatttcttgatgccaatgctgccactcacttccactcagatgccattctgaaaaagctctgcatcaagggtcaggacatcaagatcggatggggcaaaccctcgcaagttcccacttcagttgcgctcgcagtccagcaatctggagcttctcgaaacgtttacctaggtaacctgcctgaggagattgctgaggaggaattacgcgaggacctaggcaaatttggtgccattgacaccatcaagattgttcgtgagaagaacattgcttttgttcactttttgtcagtggccaatgctatgaaggccgttcaacagttgccccaggagcccaagtggcaatctccccgccgtgtttactatggcaaggatcgttgcgcttatgtttccaaaactcaacaacagaatgctgcacagtaccttggcatcgctccaggatatgcccacatgctgactggtcaagaccgcgatgtcatctcaagcgcacttgcgcagcaatctgtagctgctgccgcagtcgcaactacagctggcgggatcaataacctgggcaatcgaactatttacctaggcaacattcaccctgagacgacaattgaagaaatctgcaacgttgtacgcggcggcctccttcaccacatccgatacattccagacaagcatatttgcttcgtgaccttcattgatcctaccgcggccgcttcattctatgcgctcagtaacatccaaggtctcatgattcacaatcgtcgtctgaagatcggatggggcaagcactccggtgctctcccgccagccattgccttggctgttagtggcggtgcctcacgtaacgtttatattggcaaccttgatgaaacctggaccgaggagcggctgcgacaagatttctccgagtacggtgaaattgagcttgtcaacacattgagagaaaagagctgtgcgtttgtcaatttcacgaacatcgccaacgccatcaaggccattgaagccattcgcagcaaggacgagtacaaaaagtttaaagtgaacttcggcaaggaccgttgtggaaaccagccacgtcaattgcaacaacagtcacagtcacctcgtgacggcgttccttcacctccacctggtggcagtggcagtggcaactcgcccacaaacgccacgtctcccttgtcaacaaacggtcaaaatatgtatggacccaacaacaatcctctaacgatgtatttgcaacaagtgtcgcagcaggctcatcagcaacagcatcagcaacagcagatgttagtttcgcaacaagctgcactgtttggcactgcttcgtcatcgccaagtgaactgaagttggagataccccagcagggccacatgcctgggcatgggcagtcagcaagtatttcgaacggctacggagctccacagagtgccgtatcgggaactacaactatcggcgggttgctcgcgcctggtcgcagtcaacacaaccgcgccctcagtcttcccgtctttgctcctctcgagaatggtggtaatagtcccattggtgctgttggaactattggcggcgacggagaacgcagaggacaccactaccagtcaagctttggtggaattggctctgggcttggtcttgccattcaaggtggactgaacggatgggaagaggaggtcgcgaattaggaggaaggcgcctctgaagtccgagataatatattgtaatcattacgttgatttctcaaggagttgtcatcaagggttctccagtctccatttattgcatgattttttcggccaaaagtccctgggaaagtggaagagtctggtcctttgccgaggcagagattgcatacggaaaaatcctgtaatggcaggatcagacgacgagagtggaaagatatgctggaagtagctgagacatcccaaggggaaaatattgcattgatattatgcaaagataaggggcagatatatagcaacggatgaaagcgaaggaagatgggaaatggccgtggcactgagtacatggcatcggttgacttgaataagcatgggcatggaggtaatacaagataaagaatatcagttataaaacatgtccgaat

SEQ ID NO: 29919 - DNA, 456 bp, Muscodor strobelii
  misc_feature: SGI cDNA ID NO. 570282
  misc_feature: Elevated expression when VOC is produced
  misc_feature: Encodes the peptide sequence at SEQ ID NO 29920
atgtatttgcaacaagtgtcgcagcaggctcatcagcaacagcatcagcaacagcagatgttagtttcgcaacaagctgcactgtttggcactgcttcgtcatcgccaagtgaactgaagttggagataccccagcagggccacatgcctgggcatgggcagtcagcaagtatttcgaacggctacggagctccacagagtgccgtatcgggaactacaactatcggcgggttgctcgcgcctggtcgcagtcaacacaaccgcgccctcagtcttcccgtctttgctcctctcgagaatggtggtaatagtcccattggtgctgttggaactattggcggcgacggagaacgcagaggacaccactaccagtcaagctttggtggaattggctctgggcttggtcttgccattcaaggtggactgaacggatgggaagaggaggtcgcgaattag

SEQ ID NO: 29920 - protein, 151 aa, Muscodor strobelii
  misc_feature: SGI Peptide ID NO. 570282
  misc_feature (1)..(151): NCBI GI: 116191983 Blast Desc: CHGG_05709 [Chaetomium globosum CBS 148.51] gi|88181622|gb|EAQ89090.1| CHGG_05709 [Chaetomium globosum CBS 148.51]
  misc_feature (1)..(151): NCBI GI: 46122133 Blast Desc: FG05444.1 [Gibberella zeae PH-1]
  misc_feature (1)..(151): NCBI GI: 85084632 Blast Desc: negative regulator of differentiation 1 [Neurospora crassa OR74A] gi|28918440|gb|EAA28114.1| negative regulator of differentiation 1 [Neurospora crassa OR74A]
  misc_feature (1)..(151): NCBI GI: 39954174 Blast Desc: MGG_08898 [Magnaporthe grisea 70-15] gi|145021158|gb|EDK05287.1| MGG_08898 [Magnaporthe grisea 70-15]
  misc_feature (1)..(151): NCBI GI: 256729737 Blast Desc: [Nectria haematococca mpVI 77-13-4]
  misc_feature (1)..(151): NCBI GI: 261360165 Blast Desc: RNA recognition motif containing protein [Verticillium albo-atrum VaMs.102]
  misc_feature (37)..(150): NCBI GI: 154294096 Blast Desc: BC1G_14118 [Botryotinia fuckeliana B05.10] gi|150845055|gb|EDN20248.1| BC1G_14118 [Botryotinia fuckeliana B05.10]
  misc_feature (45)..(150): NCBI GI: 156033281 Blast Desc: SS1G_13716 [Sclerotinia sclerotiorum 1980] gi|154699119|gb|EDN98857.1| SS1G_13716 [Sclerotinia sclerotiorum 1980]
  misc_feature (1)..(92): NCBI GI: 171686830 Blast Desc: protein product [Podospora anserina] gi|170943376|emb|CAP69029.1| protein product [Podospora anserina]
  misc_feature (1)..(148): NCBI GI: 67900986 Blast Desc: AN7480.2 [Aspergillus nidulans FGSC A4] gi|40742870|gb|EAA62060.1| AN7480.2 [Aspergillus nidulans FGSC A4] gi|259483786|tpe|CBF79461.1| TPA: differentiation regulator
  misc_feature: Useful for introducing or modulating the production of volatile compounds
MYLQQVSQQAHQQQHQQQQMLVSQQAALFGTASSSPSELKLEIPQQGHMPGHGQSASISNGYGAPQSAVSGTTTIGGLLAPGRSQHNRALSLPVFAPLENGGNSPIGAVGTIGGDGERRGHHYQSSFGGIGSGLGLAIQGGLNGWEEEVAN

SEQ ID NO: 29921 - DNA, 4024 bp, Muscodor strobelii; identical to SEQ ID NO: 29918
  misc_feature: SGI EST ID NO. CUFF.70723.0
  misc_feature: Variant of the nucleotide sequence at SEQ ID NO 29919

SEQ ID NO: 29922 - DNA, 237 bp, Muscodor strobelii
  misc_feature: SGI cDNA ID NO. 570283
  misc_feature: Encodes the peptide sequence at SEQ ID NO 29923
atggaatacaacgacgaaaccccggaattgaagactgaagataacgagtccgtaaaggatgaggacgcctgcgctgtagaatggcgtaaggcagtcagaatcgcacaactgtttgagctgaccctcgatatcttctgtgataacaataaaccaatgagtatggagatatggtttagcgagtacaagagacggcccttgggccgtgtctatctctttgagaaggagagatgggtctag

SEQ ID NO: 29923 - protein, 78 aa, Muscodor strobelii
  misc_feature: SGI Peptide ID NO. 570283
MEYNDETPELKTEDNESVKDEDACAVEWRKAVRIAQLFELTLDIFCDNNKPMSMEIWFSEYKRRPLGRVYLFEKERWV

SEQ ID NO: 29924 - DNA, 2166 bp, Muscodor strobelii
  misc_feature: SGI cDNA ID NO. 570284
  misc_feature: Encodes the peptide sequence at SEQ ID NO 29925
atgacgtttccaaagtatgagtacgcaccgctcgatgcacagagccgcgaggttcgcctggttacgcttctgcctgggaagctcgaggatgatatccacattacgatagatcatgttccattgctgccgctggccgaccacccctgcaccaaaatcactatccaggagctgcaaaagactcttccgccggagtggaaagtccgaagaactatcgaagagaaattcatattctgcatcccgggtggcaaggacgagagcggcaacagtgtgacatcgtggacacacccagctccagactttgatcattcgttgtatcaggatcccctcctgggcttagaatcgaattatgaaccgaagtacgaggctttgtcatacgtctggggttcccctgaggaccctggaacaataagggtaggtagtccaccaacgacaacactgcaagtcacccagaacctatcatgcgcactccgctacctgcgctacgcagataagtcccgtacgatgtggatcgacgctatctgtatcaaccaagacgacaacaccgagcgcagtgagcaagtgcgacgcatggacagcatctacaaatcggcggaccgcgtcgtcgtctggctggggccgtctacagcgaccagccagcacgctcttgagaccctggggcgcatcggcgagcaggtcgagctgtccctagacaactggaagatgcgcgcccccggctgcgccgagccaagctggtacctctccgatacccagttgccgtacggcgaaggcacctgggaggccatatacgagctgctgtcgcgcgcgtggttctcgcgactgtgggtgctgcaggagatccagctcggcaacccgttccggaccgtcgtgcagtgcggcgagcagaccgtggcctggtatgcgttcaggagggcgctgtggtgtctgcggttcaagacccgcatgcctctcccggagctccgggagacgctgatcggcttgacgtcgctctacaaatacgtgatcggcgagaacctgtttgatctcgtcggcagagcgcgggcgcgacactgctccgactctcgggacaaggtgtacgctttgttgggcatctgttcgcccgcgctggtccgtaggatcctacccagctactcacagcctgttggcgatgtgtatcgagacattttcctcgtctacctcgagtgctcgcggcgactggagatgctcgaggactgcgaacacagagctggagcgatcgatgcgccgtcttgggtcccagactggtcaagagaacggcatatggggaggttgttctcggaatgctccgcgagcggcacgtcttgcgcggagaccaggtatatcgcgcccggcgtgttggaagtgacgggggtggcgtgcggcgaggttcgtgaggtaaaaagcccaatagcgtcagatggctcacaactgccgtcgtatcacaagcttgtggagtgggtgcgcagttgccagccccaggatgcggcgcgaagggcatacatgacgggccagaccgcgcaggaggcatatatcatggccgtttgcctgggccggacaaaggaacgcttgccagccctgcgctaccccctggtgaaggagtggaaggagttcctgttgcccgacgatctcgacggcccagatctccttgacggtgcaagctataacatgagattcgtcattcgccaacttagcagcagggcgtttgtcactacgtcagaaggccatattgggcttgctcctccgggtacaaggccaggggacatagtcgctgtgattctaggctgccacacgcccatgatcctccggcctgttaacaacaacactggtctgcgagtagttggggcttgctacatgtacggcttaatggacgccgaggcactgcttgggcatctcccggagccctggagattccaggcggcggtagatgtcagaggatactttgtgccgtcctaccggaactcgagcgccggagaggtgacagaggaagacccccggcttgaggaggctttggaatggaagcgggtaccattcgatcttactccagatgatccgatcatttgtacgcgattccggcacaaagatagtgggcaactgatccactgggatccgcgattgagcgcagcggcactgaggaagcgcggcgtggacctacaagcattcaagttggtgtga

SEQ ID NO: 29925 - protein, 721 aa, Muscodor strobelii
  misc_feature: SGI Peptide ID NO. 570284
  misc_feature (120)..(278): Pfam Id: PF06985 Pfam Desc: Heterokaryon incompatibility protein (HET)
  misc_feature (6)..(721): NCBI GI: 154311024 Blast Desc: BC1G_06630 [Botryotinia fuckeliana B05.10] gi|150851034|gb|EDN26227.1| BC1G_06630 [Botryotinia fuckeliana B05.10]
  misc_feature (6)..(721): NCBI GI: 115492481 Blast Desc: [Aspergillus terreus NIH2624] gi|114197728|gb|EAU39428.1| [Aspergillus terreus NIH2624]
  misc_feature (6)..(721): NCBI GI: 256727220 Blast Desc: NECHADRAFT_32743 [Nectria haematococca mpVI 77-13-4]
  misc_feature (6)..(721): NCBI GI: 256719970 Blast Desc: NECHADRAFT_98482 [Nectria haematococca mpVI 77-13-4]
  misc_feature (5)..(704): NCBI GI: 46139411 Blast Desc: FG11220.1 [Gibberella zeae PH-1]
  misc_feature (6)..(721): NCBI GI: 169603560 Blast Desc: SNOG_04789 [Phaeosphaeria nodorum SN15] gi|111066060|gb|EAT87180.1| SNOG_04789 [Phaeosphaeria nodorum SN15]
  misc_feature (173)..(721): NCBI GI: 145609067 Blast Desc: MGG_09107 [Magnaporthe grisea 70-15] gi|145016510|gb|EDK00940.1| MGG_09107 [Magnaporthe grisea 70-15]
  misc_feature (5)..(721): NCBI GI: 39974569 Blast Desc: MGG_00569 [Magnaporthe grisea 70-15] gi|145018530|gb|EDK02809.1| MGG_00569 [Magnaporthe grisea 70-15]
  misc_feature (3)..(585): NCBI GI: 261357884 Blast Desc: conserved [Verticillium albo-atrum VaMs.102]
  misc_feature (120)..(721): NCBI GI: 171678935 Blast Desc: protein product [Podospora anserina] gi|170937538|emb|CAP62196.1| protein product [Podospora anserina]
MTFPKYEYAPLDAQSREVRLVTLLPGKLEDDIHITIDHVPLLPLADHPCTKITIQELQKTLPPEWKVRRTIEEKFIFCIPGGKDESGNSVTSWTHPAPDFDHSLYQDPLLGLESNYEPKYEALSYVWGSPEDPGTIRVGSPPTTTLQVTQNLSCALRYLRYADKSRTMWIDAICINQDDNTERSEQVRRMDSIYKSADRVVVWLGPSTATSQHALETLGRIGEQVELSLDNWKMRAPGCAEPSWYLSDTQLPYGEGTWEAIYELLSRAWFSRLWVLQEIQLGNPFRTVVQCGEQTVAWYAFRRALWCLRFKTRMPLPELRETLIGLTSLYKYVIGENLFDLVGRARARHCSDSRDKVYALLGICSPALVRRILPSYSQPVGDVYRDIFLVYLECSRRLEMLEDCEHRAGAIDAPSWVPDWSRERHMGRLFSECSASGTSCAETRYIAPGVLEVTGVACGEVREVKSPIASDGSQLPSYHKLVEWVRSCQPQDAARRAYMTGQTAQEAYIMAVCLGRTKERLPALRYPLVKEWKEFLLPDDLDGPDLLDGASYNMRFVIRQLSSRAFVTTSEGHIGLAPPGTRPGDIVAVILGCHTPMILRPVNNNTGLRVVGACYMYGLMDAEALLGHLPEPWRFQAAVDVRGYFVPSYRNSSAGEVTEEDPRLEEALEWKRVPFDLTPDDPIICTRFRHKDSGQLIHWDPRLSAAALRKRGVDLQAFKLV

SEQ ID NO: 29926 - DNA, 4109 bp, Muscodor strobelii
  misc_feature: SGI EST ID NO. CUFF.70741.0
  misc_feature: Variant of the nucleotide sequence at SEQ ID NO 29924
cgtttgtgccccttgccctttggccttcttaccgctatccaaaagtaaggaaggtactgagcatctgccacattttctgaggcctcttgacaaccctaggacccccgcccggataaagtagcattatgacgagattggccatgtgcatgtggcagggctgtttacagggctgactgcctacctcagagcgcgtagaagcacggatgcctagagcctttttgaagagcatctacacagtcacatacatattgagcggcagtattctatcgtggacaatgccagcacagttccgcctttggctcaatctgagggtgtcatgacgtttccaaagtatgagtacgcaccgctcgatgcacagagccgcgaggttcgcctggttacgcttctgcctgggaagctcgaggatgatatccacattacgatagatcatgttccattgctgccgctggccgaccacccctgcaccaaaatcactatccaggagctgcaaaagactcttccgccggagtggaaagtccgaagaactatcgaagagaaattcatattctgcatcccgggtggcaaggacgagagcggcaacagtgtgacatcgtggacacacccagctccagactttgatcattcgttgtatcaggatcccctcctgggcttagaatcgaattatgaaccgaagtacgaggctttgtcatacgtctggggttcccctgaggaccctggaacaataagggtaggtagtccaccaacgacaacactgcaagtcacccagaacctatcatgcgcactccgctacctgcgctacgcagataagtcccgtacgatgtggatcgacgctatctgtatcaaccaagacgacaacaccgagcgcagtgagcaagtgcgacgcatggacagcatctacaaatcggcggaccgcgtcgtcgtctggctggggccgtctacagcgaccagccagcacgctcttgagaccctggggcgcatcggcgagcaggtcgagctgtccctagacaactggaagatgcgcgcccccggctgcgccgagccaagctggtacctctccgatacccagttgccgtacggcgaaggcacctgggaggccatatacgagctgctgtcgcgcgcgtggttctcgcgactgtgggtgctgcaggagatccagctcggcaacccgttccggaccgtcgtgcagtgcggcgagcagaccgtggcctggtatgcgttcaggagggcgctgtggtgtctgcggttcaagacccgcatgcctctcccggagctccgggagacgctgatcggcttgacgtcgctctacaaatacgtgatcggcgagaacctgtttgatctcgtcggcagagcgcgggcgcgacactgctccgactctcgggacaaggtgtacgctttgttgggcatctgttcgcccgcgctggtccgtaggatcctacccagctactcacagcctgttggcgatgtgtatcgagacattttcctcgtctacctcgagtgctcgcggcgactggagatgctcgaggactgcgaacacagagctggagcgatcgatgcgccgtcttgggtcccagactggtcaagagaacggcatatggggaggttgttctcggaatgctccgcgagcggcacgtcttgcgcggagaccaggtatatcgcgcccggcgtgttggaagtgacgggggtggcgtgcggcgaggttcgtgaggtaaaaagcccaatagcgtcagatggctcacaactgccgtcgtatcacaagcttgtggagtgggtgcgcagttgccagccccaggatgcggcgcgaagggcatacatgacgggccagaccgcgcaggaggcatatatcatggccgtttgcctgggccggacaaaggaacgcttgccagccctgcgctaccccctggtgaaggagtggaaggagttcctgttgcccgacgatctcgacggcccagatctccttgacggtgcaagctataacatgagattcgtcattcgccaacttagcagcagggcgtttgtcactacgtcagaaggccatattgggcttgctcctccgggtacaaggccaggggacatagtcgctgtgattctaggctgccacacgcccatgatcctccggcctgttaacaacaacactggtctgcgagtagttggggcttgctacatgtacggcttaatggacgccgaggcactgcttgggcatctcccggagccctggagattccaggcggcggtagatgtcagaggatactttgtgccgtcctaccggaactcgagcgccggagaggtgacagaggaagacccccggcttgaggaggctttggaatggaagcgggtaccattcgatcttactccagatgatccgatcatttgtacgcgattccggcacaaagatagtgggcaactgatccactgggatccgcgattgagcgcagcggcactgaggaagcgcggcgtggacctacaagcattcaagttggtgtgaagagtgtggtctgggaatgatgccgttcgggatatgtcaggcatcgataatcggacagcaagttgggcggagggctacattgcattattggagatgcaggtccactgccatctgggcagacagacagggacaatgagactttggggtttcgaggcacttcacgatacgatggtatcctaaagaggttgtaaacaaagctcgtacgtgagtctacccctagctcacggctgtacccgtcatcgcatgtgagtatgtatctacttatagttatacccccgtctacgtcgattgccgttacatcagatcgacgggcggtcggactcggagtacgagagcattgcgagtagagagcccggtcatccatcgcctcagtggtatcctgattctcgatgagatcccggtggatattgccccagatatggcagcccatcttcgtgattacaacgaaggctttcatggcaattaccgcaaggtctctcattgtaattcgagcgaaggctctgacggcgatccgaagcagtataagcggtagaagaaagtgacaaaggccgtcaacatagctgctcccagccgcgattctagagtgtcttgtctgccattttctgatttctctttcttataacaattctgcagggccgtcgcaacgttgtggagaggctaagaaactgtactcctgcgagaatctgcagcatcttaagatgctaaaggcacacgcacaaacatccgccaacctgaggaacaaaagttacgacgatgctatcaacaaaaaccgtcgcgacgtcaactcaacgcttgccaacaaccgttcgataaatgtcaccgcagtgttgattcaatggtcttcggcgaaaccccaatatgggtattatccctaagacgcatcagacatcactgatatggcaagtaagaatgatgcaaaagatccattctccgaccgagcctaaaaggatgaaatcattgtgaatactataacttcctggtgttggtcaaattttgggagccgcaacgctaaggaccctgaacagtctatcagggatagagactatcagctggttgacttcgtcgcaggcgacgatgaagaaacttagattgtagataatgacgaagacgaggattccgccgatgagagcagttgttacagggtcgtcgacggtgatcaatacgaggtgaatgagtttgagaatgatgaagacgataatgatgaggatgaagaaaaggtgcagggctatgaagatcaagacacagtggtagagtaaaaggactaaaacaaaggccatcaagctgacaacgaggccaaatgtcatattgacgatctcgcgtccgacagcgaggagagcaatgactctgatgattcgaactatgaagacgagtcgagcttgaagaagatagcctcttctcctgagatgcgacgctcttccaagcgatgtaaagtttgatacgaagaagcatgtgtatggcgtgctggtattcctcagtggtagaggtgccgggctttctccatgtgagacaggacacgttccaattattgtgtactttttttggtacgtgtgccaagacagtagtactatgacacacctgtgtgattaggaagagcaatagagtctagtaagggatatatgcatttcag

SEQ ID NO: 29927 - DNA, 1254 bp, Muscodor strobelii
  misc_feature: SGI cDNA ID NO. 570285
  misc_feature: Encodes the peptide sequence at SEQ ID NO 29928
atgctgtcaactttgtttctgaatttgttcgtcttgccctttgcactaggtgcgtcctcctggatcgtacctggtgccgtttggtacgataccgatggcaagaaaattaacgcacatggcggcggcattgtacagcgtgaaagcacgttctattggacgggacactctgcagaaaatgaaacccccatgatgtactcgtcaaccgatctcatcaattggcagaatctaggagcgcagtcgaccgtgtcagccatgtggcggccaaagtctgcgaagccaaacggttcattctggctttttggtcaacaagaccgctacagtttatctctgaaatcaggtcagctcgttggggggtacacacagtccgcaaaagtctacatcccccccaatagttacacatattctgataccggcatgtttctggatccaacttcgaacacatggtatcttcttacgagtgccgaccataacatcgttcagatcaacaagatcaactcggacggatccttgggcgacagggcctcgcagctggctgctggtgcatacgaagctcctgggctcttctacgccaacggggtgtattttctgatttgttcaggaaaaacgggctggagagctaatcctaacaaagttttctgggctacctctataaacggtccctggacgggagggactgatattgcgcccgcggcagaaaatacttacaactctcaaaacacctttgagttaactattgccggatctcaacagacaacctacatctatatgggcgatgactgggattcaaaaggcggcgtggattccaactacgtctggctgccgatgaaggttgacaccagcgcgaagacggtcaacttgaactactacgccatgtggaaagtcgacgtaaagacaggcgctgtctcgtccgcaaaggcaacgaagcgacacgaggcgaaccatttactttcaaagagaacagcagcaagtaatgggccacaagagatgactttcaggaatgtcacgggtaccggagacctgcaatgggtcgcgttcgactattcagtcaacgatcctagcactggtgaggcgtacatcatggtgaacgatgaacctgcctttaacatttcaactttgaattcacgcgccggataccaccattcagtgcctgtgcaactcaagctcagagctggcgatgacaacactattgtgattggatcgatcggtgacagcgacttcgaagttacggtaaatgggcttgctctcttcgattaa

SEQ ID NO: 29928 - protein, 417 aa, Muscodor strobelii
  misc_feature: SGI Peptide ID NO. 570285
  misc_feature (6)..(401): NCBI GI: 189197383 Blast Desc: galactan 1,3-beta-galactosidase [Pyrenophora tritici-repentis Pt-1C-BFP] gi|187980977|gb|EDU47603.1| galactan 1,3-beta-galactosidase [Pyrenophora tritici-repentis Pt-1C-BFP]
  misc_feature (18)..(416): NCBI GI: 63108312 Blast Desc: galactan 1,3-beta-galactosidase [Phanerochaete chrysosporium]
  misc_feature (6)..(401): NCBI GI: 169762958 Blast Desc: [Aspergillus oryzae RIB40] gi|83770407|dbj|BAE60540.1| protein product [Aspergillus oryzae]
  misc_feature (21)..(351): NCBI GI: 169621833 Blast Desc: SNOG_14129 [Phaeosphaeria nodorum SN15] gi|111057246|gb|EAT78366.1| SNOG_14129 [Phaeosphaeria nodorum SN15]
  misc_feature (1)..(401): NCBI GI: 115399392 Blast Desc: conserved [Aspergillus terreus NIH2624] gi|114192168|gb|EAU33868.1| conserved [Aspergillus terreus NIH2624]
  misc_feature (15)..(407): NCBI GI: 261354007 Blast Desc: glycosyl hydrolase family 43 protein [Verticillium albo-atrum VaMs.102]
  misc_feature (1)..(401): NCBI GI: 255948380 Blast Desc: Pc22g09450 [Penicillium chrysogenum Wisconsin 54-1255] gi|211591974|emb|CAP98233.1| Pc22g09450 [Penicillium chrysogenum Wisconsin 54-1255]
  misc_feature (5)..(416): NCBI GI: 225618750 Blast Desc: exo-beta-(1->3)-galactanase [Irpex lacteus]
  misc_feature (6)..(400): NCBI GI: 169844516 Blast Desc: CC1G_03773 [Coprinopsis cinerea okayama7#130] gi|116510091|gb|EAU92986.1| CC1G_03773 [Coprinopsis cinerea okayama7#130]
  misc_feature (11)..(401): NCBI GI: 67524413 Blast Desc: AN2664.2 [Aspergillus nidulans FGSC A4] gi|40743882|gb|EAA63066.1| AN2664.2 [Aspergillus nidulans FGSC A4] gi|259486426|tpe|CBF84252.1| TPA: beta-glucanase, nidulans
MLSTLFLNLFVLPFALGASSWIVPGAVWYDTDGKKINAHGGGIVQRESTFYWTGHSAENETPMMYSSTDLINWQNLGAQSTVSAMWRPKSAKPNGSFWLFGQQDRYSLSLKSGQLVGGYTQSAKVYIPPNSYTYSDTGMFLDPTSNTWYLLTSADHNIVQINKINSDGSLGDRASQLAAGAYEAPGLFYANGVYFLICSGKTGWRANPNKVFWATSINGPWTGGTDIAPAAENTYNSQNTFELTIAGSQQTTYIYMGDDWDSKGGVDSNYVWLPMKVDTSAKTVNLNYYAMWKVDVKTGAVSSAKATKRHEANHLLSKRTAASNGPQEMTFRNVTGTGDLQWVAFDYSVNDPSTGEAYIMVNDEPAFNISTLNSRAGYHHSVPVQLKLRAGDDNTIVIGSIGDSDFEVTVNGLALFD

SEQ ID NO: 29929 - DNA, 1160 bp, Muscodor strobelii
  misc_feature: SGI EST ID NO. CUFF.70765.0
  misc_feature: Variant of the nucleotide sequence at SEQ ID NO 29927
gttcaggaaaaacgggctggagagctaatcctaacaaagttttctgggctacctctataaacggtccctggacgggagggactgatattgcgcccgcggcagaaaatacttacaactctcaaaacacctttgagttaactattgccggatctcaacagacaacctacatctatatgggcgatgactgggattcaaaaggcggcgtggattccaactacgtctggctgccgatgaaggttgacaccagcgcgaagacggtcaacttgaactactacgccatgtggaaagtcgacgtaaagacaggcgctgtctcgtccgcaaaggcaacgaagcgacacgaggcgaaccatttactttcaaagagaacagcagcaagtaatgggccacaagagatgactttcaggaatgtcacgggtaccggagacctgcaatgggtcgcgttcgactattcagtcaacgatcctagcactggtgaggcgtacatcatggtgaacgatgaacctgcctttaacatttcaactttgaattcacgcgccggataccaccattcagtgcctgtgcaactcaagctcagagctggcgatgacaacactattgtgattggatcgatcggtgacagcgacttcgaagttacggtaaatgggcttgctctcttcgattaagagataacgtgccagagttatgtatgagattaagccgggcgaatccagcataaggagtagcccatgtcttccaaaacgcgtctataagctcaatgacagatgtgctctgcactattttttcttctgatgcgcaccgctagcgccgtgttgcttgccccatttctgtactttgatatccatatcccaccgaatgaaaatcatcacaactaaagttatcccgcccaggattgtgttgacaaggcctttccaaaaccctcccctgacgctgccacccattacacttgtcatgaccagtctaatgattgtgctcgtgggcaccaagtcttcgccactttctaggccgcgaatggcacgacgcgcacattcgtgaggttgtaaaacttggtcaccctcttccagtgactttgttagatctgtcttgactgcattctcatcttccagtgactgcgtgggcattgtagcagggaagacagtgtgaactcgcacttgaggtagatc

SEQ ID NO: 29930 - DNA, 672 bp, Muscodor strobelii
  misc_feature: SGI cDNA ID NO. 570286
  misc_feature: Encodes the peptide sequence at SEQ ID NO 29931
atggacagtaactatttctcctctgtatatatggcgcatgcgatcctgaacgaatggttcgcgtctgctgtagccgaaacaaacgagagtcagcgatctgggcgtttgagacaggggagaataggaatcgtaaaacctccggcacggcacatcgtattcacgggttctttcgtgtcattctacagctttgcaggctttacgccctacagcccctctaaagccgctgtccgttcactatctgattccctctcacaggagatgaatctgtacgcgagcgcatatccagatctacctcaagtgcgagttcacactgtcttccctgctacaatgcccacgcagtcactggaagatgagaatgcagtcaagacagatctaacaaagtcactggaagagggtgaccaagttttacaacctcacgaatgtgcgcgtcgtgccattcgcggcctagaaagtggcgaagacttggtgcccacgagcacaatcattagactggtcatgacaagtgtaatgggtggcagcgtcaggggagggttttggaaaggccttgtcaacacaatcctgggcgggataactttagttgtgatgattttcattcggtgggatatggatatcaaagtacagaaatggggcaagcaacacggcgctagcggtgcgcatcagaagaaaaaatag

SEQ ID NO: 29931 - protein, 223 aa, Muscodor strobelii
  misc_feature: SGI Peptide ID NO. 570286
  misc_feature (1)..(217): NCBI GI: 46126935 Blast Desc: FG07845.1 [Gibberella zeae PH-1]
  misc_feature (1)..(217): NCBI GI: 256724435 Blast Desc: NECHADRAFT_98034 [Nectria haematococca mpVI 77-13-4]
  misc_feature (1)..(221): NCBI GI: 154314327 Blast Desc: BC1G_05257 [Botryotinia fuckeliana B05.10] gi|150848902|gb|EDN24095.1| BC1G_05257 [Botryotinia fuckeliana B05.10]
  misc_feature (1)..(212): NCBI GI: 156036168 Blast Desc: SS1G_12770 [Sclerotinia sclerotiorum 1980] gi|154698178|gb|EDN97916.1| SS1G_12770 [Sclerotinia sclerotiorum 1980]
  misc_feature (1)..(214): NCBI GI: 154291758 Blast Desc: BC1G_15038 [Botryotinia fuckeliana B05.10] gi|150846617|gb|EDN21810.1| BC1G_15038 [Botryotinia fuckeliana B05.10]
  misc_feature (1)..(214): NCBI GI: 156034537 Blast Desc: SS1G_13203 [Sclerotinia sclerotiorum 1980] gi|154698607|gb|EDN98345.1| SS1G_13203 [Sclerotinia sclerotiorum 1980]
  misc_feature (1)..(223): NCBI GI: 164429000 Blast Desc: NCU00302 [Neurospora crassa OR74A] gi|166214990|sp|Q7RZR2.2|TSC10_NEUCR RecName: Full=3-ketodihydrosphingosine reductase tsc-10; AltName: AltName:
  misc_feature (1)..(214): NCBI GI: 171686438 Blast Desc: protein product [Podospora anserina] gi|170943180|emb|CAP68833.1| protein product [Podospora anserina]
  misc_feature (1)..(198): NCBI GI: 116208054 Blast Desc: CHGG_03320 [Chaetomium globosum CBS 148.51] gi|88183917|gb|EAQ91385.1| CHGG_03320 [Chaetomium globosum CBS 148.51]
  misc_feature (1)..(214): NCBI GI: 238839058 Blast Desc: 3-ketodihydrosphingosine reductase tsc10 [Microsporum canis CBS 113480]
  misc_feature (1)..(223): SWISSPROT Homolog: EC 1.1.1.102 3-dehydrosphinganine reductase
MDSNYFSSVYMAHAILNEWFASAVAETNESQRSGRLRQGRIGIVKPPARHIVFTGSFVSFYSFAGFTPYSPSKAAVRSLSDSLSQEMNLYASAYPDLPQVRVHTVFPATMPTQSLEDENAVKTDLTKSLEEGDQVLQPHECARRAIRGLESGEDLVPTSTIIRLVMTSVMGGSVRGGFWKGLVNTILGGITLVVMIFIRWDMDIKVQKWGKQHGASGAHQKKK

SEQ ID NO: 29932 - DNA, 560 bp, Muscodor strobelii
  misc_feature: SGI EST ID NO. CUFF.70769.0
  misc_feature: Variant of the nucleotide sequence at SEQ ID NO 29930
tgacaatggaaggttatcaccacgtatgtcttgcgataaccatcagctcatggtaaagctgttcctcgagaacatgggtgttttcacgtcgaagaacgagtttccggtcgatggtcggacggttctgatcacaggcgggtcgaagggtttaggactgaatgtggctttgcagctcgcagaaaaaggcgccagcgtgattattgtcgcacgagacgcaggaaacttgcaaactgccgcggcagagatatcaagacgagctcgagacgacgacgcgcaacgttttcattttatcagtgcagatgttaccacagcagatgaatgcaaacgcgtagtgggcgaggctacaaaatggaatggggcacctccagacattgtctggtgttgcagtggcagcgcttaccccacgttgtttgttgacacgccactcgataaattccaatcgatgatggacagtaactatttctcctctgtatatatggcgcatgcgatcctgaacgaatggttcgcgtctgctgtagccgaaacaaacgagagtcagcgatctgggcgtttgagacagg

SEQ ID NO: 29933 - DNA, 1068 bp, Muscodor strobelii
  misc_feature: SGI cDNA ID NO. 570287
  misc_feature: Encodes the peptide sequence at SEQ ID NO 29934
atggtaaagctgttcctcgagaacatgggtgttttcacgtcgaagaacgagtttccggtcgatggtcggacggttctgatcacaggcgggtcgaagggtttaggactgaatgtggctttgcagctcgcagaaaaaggcgccagcgtgattattgtcgcacgagacgcaggaaacttgcaaactgccgcggcagagatatcaagacgagctcgagacgacgacgcgcaacgttttcattttatcagtgcagatgttaccacagcagatgaatgcaaacgcgtagtgggcgaggctacaaaatggaatggggcacctccagacattgtctggtgttgcagtggcagcgcttaccccacgttgtttgttgacacgccactcgataaattccaatcgatgatggacagtaactatttctcctctgtatatatggcgcatgcgatcctgaacgaatggttcgcgtctgctgtagccgaaacaaacgagagtcagcgatctgggcgtttgagacaggggagaataggaatcgtaaaacctccggcacggcacatcgtattcacgggttctttcgtgtcattctacagctttgcaggctttacgccctacagcccctctaaagccgctgtccgttcactatctgattccctctcacaggagatgaatctgtacgcgagcgcatatccagatctacctcaagtgcgagttcacactgtcttccctgctacaatgcccacgcagtcactggaagatgagaatgcagtcaagacagatctaacaaagtcactggaagagggtgaccaagttttacaacctcacgaatgtgcgcgtcgtgccattcgcggcctagaaagtggcgaagacttggtgcccacgagcacaatcattagactggtcatgacaagtgtaatgggtggcagcgtcaggggagggttttggaaaggccttgtcaacacaatcctgggcgggataactttagttgtgatgattttcattcggtgggatatggatatcaaagtacagaaatggggcaagcaacacggcgctagcggtgcgcatcagaagaaaaaatag

SEQ ID NO: 29934 - protein, 355 aa, Muscodor strobelii
  misc_feature: SGI Peptide ID NO. 570287
  misc_feature (23)..(220): Pfam Id: PF00106 Pfam Desc: short chain dehydrogenase
  misc_feature (23)..(109): Pfam Id: PF00106 Pfam Desc: short chain dehydrogenase
  misc_feature (24)..(98): Pfam Id: PF08659 Pfam Desc: KR domain
  misc_feature (9)..(349): NCBI GI: 256724435 Blast Desc: NECHADRAFT_98034 [Nectria haematococca mpVI 77-13-4]
  misc_feature (9)..(349): NCBI GI: 46126935 Blast Desc: FG07845.1 [Gibberella zeae PH-1]
  misc_feature (9)..(348): NCBI GI: 154314327 Blast Desc: BC1G_05257 [Botryotinia fuckeliana B05.10] gi|150848902|gb|EDN24095.1| BC1G_05257 [Botryotinia fuckeliana B05.10]
  misc_feature (9)..(344): NCBI GI: 156036168 Blast Desc: SS1G_12770 [Sclerotinia sclerotiorum 1980] gi|154698178|gb|EDN97916.1| SS1G_12770 [Sclerotinia sclerotiorum 1980]
  misc_feature (12)..(346): NCBI GI: 115491549 Blast Desc: conserved [Aspergillus terreus NIH2624] gi|114197262|gb|EAU38962.1| conserved [Aspergillus terreus NIH2624]
  misc_feature (9)..(346): NCBI GI: 154291758 Blast Desc: BC1G_15038 [Botryotinia fuckeliana B05.10] gi|150846617|gb|EDN21810.1| BC1G_15038 [Botryotinia fuckeliana B05.10]
  misc_feature (13)..(348): NCBI GI: 121701773 Blast Desc: 3-ketosphinganine reductase (Tsc10), [Aspergillus clavatus NRRL 1] gi|119397294|gb|EAW07725.1| 3-ketosphinganine reductase (Tsc10), [Aspergillus clavatus NRRL 1]
  misc_feature (16)..(350): NCBI GI: 212542601 Blast Desc: 3-ketosphinganine reductase (Tsc10), [Penicillium marneffei ATCC 18224] gi|210066362|gb|EEA20455.1| 3-ketosphinganine reductase (Tsc10), [Penicillium marneffei ATCC
  misc_feature (15)..(346): NCBI GI: 145239629 Blast Desc: An08g03450 [Aspergillus niger] gi|134076972|emb|CAK45381.1| protein product [Aspergillus niger]
  misc_feature (12)..(346): NCBI GI: 238839058 Blast Desc: 3-ketodihydrosphingosine reductase tsc10 [Microsporum canis CBS 113480]
  misc_feature (9)..(355): SWISSPROT Homolog: EC 1.1.1.102 3-dehydrosphinganine reductase
MVKLFLENMGVFTSKNEFPVDGRTVLITGGSKGLGLNVALQLAEKGASVIIVARDAGNLQTAAAEISRRARDDDAQRFHFISADVTTADECKRVVGEATKWNGAPPDIVWCCSGSAYPTLFVDTPLDKFQSMMDSNYFSSVYMAHAILNEWFASAVAETNESQRSGRLRQGRIGIVKPPARHIVFTGSFVSFYSFAGFTPYSPSKAAVRSLSDSLSQEMNLYASAYPDLPQVRVHTVFPATMPTQSLEDENAVKTDLTKSLEEGDQVLQPHECARRAIRGLESGEDLVPTSTIIRLVMTSVMGGSVRGGFWKGLVNTILGGITLVVMIFIRWDMDIKVQKWGKQHGASGAHQKKK

SEQ ID NO: 29935 - DNA, 560 bp, Muscodor strobelii; identical to SEQ ID NO: 29932
  misc_feature: SGI EST ID NO. CUFF.70769.0
  misc_feature: Variant of the nucleotide sequence at SEQ ID NO 29933

SEQ ID NO: 29936 - DNA, 288 bp, Muscodor strobelii
  misc_feature: SGI cDNA ID NO. 570288
  misc_feature: Encodes the peptide sequence at SEQ ID NO 29937
atggtaaagctgttcctcgagaacatgggtgttttcacgtcgaagaacgagtttccggtcgatggtcggacggttctgatcacaggcgggtcgaagggtttaggactgaatgtggctttgcagctcgcagaaaaaggcgccagcgtgattattgtcgcacgagacgcaggaaacttgcaaactgccgcggcagagatatcagttggtgacgagctcgagacgacgacgcgcaacgttttcattttatcagtgcagatgttaccacagcagatgaatgcaaacgcgtag

SEQ ID NO: 29937 - protein, 95 aa, Muscodor strobelii
  misc_feature: SGI Peptide ID NO. 570288
  misc_feature (23)..(66): Pfam Id: PF00106 Pfam Desc: short chain dehydrogenase
  misc_feature (24)..(52): Pfam Id: PF08659 Pfam Desc: KR domain
  misc_feature (9)..(77): NCBI GI: 154314327 Blast Desc: BC1G_05257 [Botryotinia fuckeliana B05.10] gi|150848902|gb|EDN24095.1| BC1G_05257 [Botryotinia fuckeliana B05.10]
  misc_feature (9)..(86): NCBI GI: 46126935 Blast Desc: FG07845.1 [Gibberella zeae PH-1]
  misc_feature (9)..(81): NCBI GI: 164429000 Blast Desc: NCU00302 [Neurospora crassa OR74A] gi|166214990|sp|Q7RZR2.2|TSC10_NEUCR RecName: Full=3-ketodihydrosphingosine reductase tsc-10; AltName: AltName:
  misc_feature (1)..(81): NCBI GI: 116208054 Blast Desc: CHGG_03320 [Chaetomium globosum CBS 148.51] gi|88183917|gb|EAQ91385.1| CHGG_03320 [Chaetomium globosum CBS 148.51]
  misc_feature (9)..(67): NCBI GI: 256724435 Blast Desc: NECHADRAFT_98034 [Nectria haematococca mpVI 77-13-4]
  misc_feature (9)..(69): NCBI GI: 156036168 Blast Desc: SS1G_12770 [Sclerotinia sclerotiorum 1980] gi|154698178|gb|EDN97916.1| SS1G_12770 [Sclerotinia sclerotiorum 1980]
  misc_feature (13)..(62): NCBI GI: 121701773 Blast Desc: 3-ketosphinganine reductase (Tsc10), [Aspergillus clavatus NRRL 1] gi|119397294|gb|EAW07725.1| 3-ketosphinganine reductase (Tsc10), [Aspergillus clavatus NRRL 1]
  misc_feature (16)..(81): NCBI GI: 212542601 Blast Desc: 3-ketosphinganine reductase (Tsc10), [Penicillium marneffei ATCC 18224] gi|210066362|gb|EEA20455.1| 3-ketosphinganine reductase (Tsc10), [Penicillium marneffei ATCC
  misc_feature (9)..(77): NCBI GI: 145611474 Blast Desc: MGG_00362 [Magnaporthe grisea 70-15] gi|145018748|gb|EDK03027.1| MGG_00362 [Magnaporthe grisea 70-15]
  misc_feature (12)..(66): NCBI GI: 115491549 Blast Desc: conserved [Aspergillus terreus NIH2624] gi|114197262|gb|EAU38962.1| conserved [Aspergillus terreus NIH2624]
  misc_feature (9)..(81): SWISSPROT Homolog: EC 1.1.1.102 3-dehydrosphinganine reductase
MVKLFLENMGVFTSKNEFPVDGRTVLITGGSKGLGLNVALQLAEKGASVIIVARDAGNLQTAAAEISVGDELETTTRNVFILSVQMLPQQMNANA

SEQ ID NO: 29938 - DNA, 560 bp, Muscodor strobelii; identical to SEQ ID NO: 29932
  misc_feature: SGI EST ID NO. CUFF.70769.0
  misc_feature: Variant of the nucleotide sequence at SEQ ID NO 29936

SEQ ID NO: 29939 - DNA, 1026 bp, Muscodor strobelii
  misc_feature: SGI cDNA ID NO. 570289
  misc_feature: Elevated expression when VOC is produced
  misc_feature: Encodes the peptide sequence at SEQ ID NO 29940
atggctcttatacgaatgctttcagctgctttgctcgttgcagcatctttttacttgatcatcgtccagtactggatgagtactgcagtgcctccagcgaaaacgaaagagcaggaaggcgatttatccatacctcgaattggtatcggaacatggctgtcggacagaaacaaggttgctcacgcagtcgagtttgctttaaagtccggctacgcgcatattgatgcagcacttatctacaaaaatgaagatcgaacagggaagggaatatgggcagccaatcgaccgcgcaacgagatatgggtaacaagcaaattatggaatgccgatcatcggccgaccgaggcgacggcagcaattcaacaatcgctcaatgaccttggcctggaatatcttgacttgtatctaattcattggccagttgcgttcgttccgggaaagggaacagtgatagatcgggacacaacgatcattgatacttggagagtaatggaaaacctcgcgcggtccaacctgacaagaaaaatcggtatatcgaacttttcgaagcgcgacgtacaaacgatcatggatatatgtgtgatctgtccatatgcgcacgaatttgagacgcatccatacctacaacagcaggacttcgtcgattatcacaaagcgatcggtgtcgaggtgattgcctactctccacttgccaataccaatcccgtctataagggcaaaacaagactggacccgatcctccaagatcctttctggaagagactggccgacgagaaaaatgcaacagtcgctcagtcagtccttgcctgggcacttcaaagggggaccgtggtcattccgaaaagtacccacgagggacacatcttagagaatcttggggctgtgaatgtcagtttcacagaaaaggaaatgcgccagatctctcagcaggatagaaaggcacgattcaataatccggggaaaggttggggtgtcaaactcttcgaagggctggacgatgctagcgatttgggtgaggaactgtga

SEQ ID NO: 29940 - protein, 341 aa, Muscodor strobelii
  misc_feature: SGI Peptide ID NO. 570289
  misc_feature (37)..(312): Pfam Id: PF00248 Pfam Desc: Aldo/keto reductase family
  misc_feature (1)..(332): NCBI GI: 46115350 Blast Desc: FG03517.1 [Gibberella zeae PH-1]
  misc_feature (42)..(334): NCBI GI: 242797060 Blast Desc: dihydrodiol dehydrogenase, [Talaromyces stipitatus ATCC 10500] gi|218719523|gb|EED18943.1| dihydrodiol dehydrogenase, [Talaromyces stipitatus ATCC 10500]
  misc_feature (44)..(332): NCBI GI: 261194669 Blast Desc: aldehyde reductase [Ajellomyces dermatitidis SLH14081] gi|239588277|gb|EEQ70920.1| aldehyde reductase [Ajellomyces dermatitidis SLH14081]
  misc_feature (44)..(332): NCBI GI: 255952881 Blast Desc: Pc21g01220 [Penicillium chrysogenum Wisconsin 54-1255] gi|211588904|emb|CAP95019.1| Pc21g01220 [Penicillium chrysogenum Wisconsin 54-1255]
  misc_feature (44)..(332): NCBI GI: 239613443 Blast Desc: aldehyde reductase [Ajellomyces dermatitidis ER-3]
  misc_feature (44)..(332): NCBI GI: 240111887 Blast Desc: aldehyde reductase [Coccidioides posadasii C735 delta SOWgp]
  misc_feature (44)..(332): NCBI GI: 119173665 Blast Desc: CIMG_10264 [Coccidioides immitis RS]
  misc_feature (44)..(332): NCBI GI: 16797783 Blast Desc: aldehyde reductase [Coccidioides posadasii]
  misc_feature (44)..(332): NCBI GI: 169763832 Blast Desc: [Aspergillus oryzae RIB40] gi|238489797|ref|XP_002376136.1| aldehyde reductase (AKR1), [Aspergillus flavus NRRL3357] gi|83770844|dbj|BAE60977.1| protein
  misc_feature (1)..(332): NCBI GI: 154321688 Blast Desc: BC1G_00991 [Botryotinia fuckeliana B05.10] gi|150850238|gb|EDN25431.1| BC1G_00991 [Botryotinia fuckeliana B05.10]
  misc_feature (44)..(319): SWISSPROT Homolog: EC 1.1.1.2 Alcohol dehydrogenase (NADP(+))
  misc_feature: Useful for introducing or modulating the production of volatile compounds
MALIRMLSAALLVAASFYLIIVQYWMSTAVPPAKTKEQEGDLSIPRIGIGTWLSDRNKVAHAVEFALKSGYAHIDAALIYKNEDRTGKGIWAANRPRNEIWVTSKLWNADHRPTEATAAIQQSLNDLGLEYLDLYLIHWPVAFVPGKGTVIDRDTTIIDTWRVMENLARSNLTRKIGISNFSKRDVQTIMDICVICPYAHEFETHPYLQQQDFVDYHKAIGVEVIAYSPLANTNPVYKGKTRLDPILQDPFWKRLADEKNATVAQSVLAWALQRGTVVIPKSTHEGHILENLGAVNVSFTEKEMRQISQQDRKARFNNPGKGWGVKLFEGLDDASDLGEEL

SEQ ID NO: 29941 - DNA, 852 bp, Muscodor strobelii
  misc_feature: SGI cDNA ID NO. 570290
  misc_feature: Encodes the peptide sequence at SEQ ID NO 29942
atggctgacccagacagcaccacggttggcggtccgccgaagatcttttgccttggcctgcctagaaccggcactgagtctatgtcccaagcactgcgcattctgggttatgaacccgtccatcatgctgtcgccatgatcactaatggctgggatacatcttggatagaaagagccgcagaagcacactatcccggtacagacccttggcgaggacaagaagccggacaagaaaaaaaagcgcgacagtttactcgcgcggaatgggacgaaattttcggctcatttgctgtcgtgactgacgttagttggaagtttgctccatcactgattgctgcatatccagacgctcgcgttattctgacagagcgcgatgtcggcaagtgggaacgcagcgtcaatgaaaccatcattgatcgcctttggcctcaaggcctcttgttgcaatttgtatcacggtgttacggctatcttgataccgacgcttggagtatggctgatggtacacgggctacgtatctaggcaagtttggcgcaacagggccagaagacctacgtacgaagctgcgggcagcgtatgccagccatgagaaggaaatcaaggaagctgtccctgcagatcgtcttctgtgctataaaatcggagacggatgggaacctctatgcaagtttcttgaaaaagacgtccccgagatgccgtatcctcatggcaacgatgcaggggcatttgagcgatggcacaaacagcagcggagagctaaaataagaaaagcattaggaagggggctttcgtactgcacagcagcagcgacaattggcgctgctgtatgttatgggaataatttgagatga

SEQ ID NO: 29942 - protein, 283 aa, Muscodor strobelii
  misc_feature: SGI Peptide ID NO. 570290
  misc_feature (14)..(276): NCBI GI: 46120546 Blast Desc: FG04920.1 [Gibberella zeae PH-1]
  misc_feature (12)..(244): NCBI GI: 46120454 Blast Desc: FG04874.1 [Gibberella zeae PH-1]
  misc_feature (4)..(266): NCBI GI: 256728010 Blast Desc: NECHADRAFT_45960 [Nectria haematococca mpVI 77-13-4]
  misc_feature (12)..(261): NCBI GI: 145607804 Blast Desc: MGG_10067 [Magnaporthe grisea 70-15] gi|145015300|gb|EDJ99836.1| MGG_10067 [Magnaporthe grisea 70-15]
  misc_feature (14)..(276): NCBI GI: 189196286 Blast Desc: conserved [Pyrenophora tritici-repentis Pt-1C-BFP] gi|187980360|gb|EDU46986.1| conserved [Pyrenophora tritici-repentis Pt-1C-BFP]
  misc_feature (14)..(262): NCBI GI: 238837557 Blast Desc: conserved [Microsporum canis CBS 113480]
  misc_feature (14)..(263): NCBI GI: 256728993 Blast Desc: NECHADRAFT_93184 [Nectria haematococca mpVI 77-13-4]
  misc_feature (12)..(273): NCBI GI: 116198675 Blast Desc: CHGG_07493 [Chaetomium globosum CBS 148.51] gi|88178772|gb|EAQ86240.1| CHGG_07493 [Chaetomium globosum CBS 148.51]
  misc_feature (11)..(256): NCBI GI: 154304931 Blast Desc: BC1G_09051 [Botryotinia fuckeliana B05.10] gi|150853913|gb|EDN29105.1| BC1G_09051 [Botryotinia fuckeliana B05.10]
  misc_feature (12)..(243): NCBI GI: 256727924 Blast Desc: NECHADRAFT_7929 [Nectria haematococca mpVI 77-13-4]
MADPDSTTVGGPPKIFCLGLPRTGTESMSQALRILGYEPVHHAVAMITNGWDTSWIERAAEAHYPGTDPWRGQEAGQEKKARQFTRAEWDEIFGSFAVVTDVSWKFAPSLIAAYPDARVILTERDVGKWERSVNETIIDRLWPQGLLLQFVSRCYGYLDTDAWSMADGTRATYLGKFGATGPEDLRTKLRAAYASHEKEIKEAVPADRLLCYKIGDGWEPLCKFLEKDVPEMPYPHGNDAGAFERWHKQQRRAKIRKALGRGLSYCTAAATIGAAVCYGNNLR

SEQ ID NO: 29943 - DNA, 1195 bp, Muscodor strobelii
  misc_feature: SGI EST ID NO. CUFF.70784.0
  misc_feature: Variant of the nucleotide sequence at SEQ ID NO 29941
cgtaaatccaatctttcactttctgtgtcatattcataattagatactgttttctctgtattgaattcttttcatgacgaaaaagtcgtcgcatcagttccatacgatggctgacccagacagcaccacggttggcggtccgccgaagatcttttgccttggcctgcctagaaccggcactgagtctatgtcccaagcactgcgcattctgggttatgaacccgtccatcatgctgtcgccatgatcactaatggctgggatacatcttggatagaaagagccgcagaagcacactatcccggtacagacccttggcgaggacaagaagccggacaagaaaaaaaagcgcgacagtttactcgcgcggaatgggacgaaattttcggctcatttgctgtcgtgactgacgttagttggaagtttgctccatcactgattgctgcatatccagacgctcgcgttattctgacagagcgcgatgtcggcaagtgggaacgcagcgtcaatgaaaccatcattgatcgcctttggcctcaaggcctcttgttgcaatttgtatcacggtgttacggctatcttgataccgacgcttggagtatggctgatggtacacgggctacgtatctaggcaagtttggcgcaacagggccagaagacctacgtacgaagctgcgggcagcgtatgccagccatgagaaggaaatcaaggaagctgtccctgcagatcgtcttctgtgctataaaatcggagacggatgggaacctctatgcaagtttcttgaaaaagacgtccccgagatgccgtatcctcatggcaacgatgcaggggcatttgagcgatggcacaaacagcagcggagagctaaaataagaaaagcattaggaagggggctttcgtactgcacagcagcagcgacaattggcgctgctgtatgttatgggaataatttgagatgaattttttcaaattcttcctagagctttatagagtgtggtgtagctagcggcggtgtttcgtttaaatctccgataacatacacttaattgtcggcgctgaagagaggcgctgtagaaatttcacatgacaccgaattcgacgaagatgcaagacactgactatgtcccatgtcacacatacccccaacctccaacccgaatcccctctcttcctgagaagcgtaaacccaagtgaag

SEQ ID NO: 29944 - DNA, 885 bp, Muscodor strobelii
  misc_feature: SGI cDNA ID NO. 570291
  misc_feature: Encodes the peptide sequence at SEQ ID NO 29945
atgtcagaagaaggatttcctcgattcacgaaatttccaatagagattcaagcaccagtatggcagtttgcgctactgcatcattttaaatcatacgagcccatatgctcgctatggctcgactatgctgatcaaacagagaagatacctgaaatcatgttggacgagttttcagtggcgcggatcacaaaccccattcaattcgtttgtcgagatgctcgcactgcatcgataagctttgtcgagcagatgaggcctctatactctatgagacttagacgattcccttacaacggttacatgccacccggtacattggcgccaataccgtctctcaacttcccgtatcctgtcaaacaaatcctggtcgattcgcctttcggaggctatgaccatgtaatggtgacagagatgcttcctctagtcaataacaatacatctgtcgaaaggctcattatcaaagatactgctggaccgggacgctggggagacgaagaggagccttggtttacgttaaaagagcccctagccacaagcgacaagatcactgtcgttcaaggggacaagagtcgatataatgttccttcagaaccgaagcctgaggaaggtcgcccgtctggcataccaaaagatgtaaaccgccaggatgacattttcgcagaagccgagggcttggaatttgtgactttgaaggacaatgttcggtatggagaagtgcttcgcgtcttcacgggacaggtgggtcatcaaatgatcccaccgctgaaggccaaatgtgtcttgaacaattggggcaatttccggatgaatgatatcagagtattgtgcgaacgaggcatgcctaatattaaatctatatgtcttctgagtaagatcgagggctag

SEQ ID NO: 29945 - protein, 294 aa, Muscodor strobelii
  misc_feature: SGI Peptide ID NO. 570291
MSEEGFPRFTKFPIEIQAPVWQFALLHHFKSYEPICSLWLDYADQTEKIPEIMLDEFSVARITNPIQFVCRDARTASISFVEQMRPLYSMRLRRFPYNGYMPPGTLAPIPSLNFPYPVKQILVDSPFGGYDHVMVTEMLPLVNNNTSVERLIIKDTAGPGRWGDEEEPWFTLKEPLATSDKITVVQGDKSRYNVPSEPKPEEGRPSGIPKDVNRQDDIFAEAEGLEFVTLKDNVRYGEVLRVFTGQVGHQMIPPLKAKCVLNNWGNFRMNDIRVLCERGMPNIKSICLLSKIEG

SEQ ID NO: 29946 - DNA, 771 bp, Muscodor strobelii
  misc_feature: SGI cDNA ID NO. 570292
  misc_feature: Encodes the peptide sequence at SEQ ID NO 29947
atgatatttactttttcatctcttttacttctagcggccatcatctgcgtggccactggtcagcaatcaacctgcccagatgttcatatcttcggggcacgcgaaacaacagcgccgccaggttttggctcatcgagtaccctagtggcattgatacaggaagcctatccgagtgcgacatccgaatccattatttatcccgcagctggaggaaatgcttatggcgcaagcgttacaatcggggtggtagctattgtgaatcaaaccgacatgttcttccagaagtgcccaaacaccaatttggtgatcgtaggatattctcaaggtgcacagattgtggacgatgcattctgcggcgggccggatgggtcttccttgaatatgacgaaagagagcgtgtctgcaggtgtcagtcgaatgacatcagctattatggtacttatgggaaatcctcgaaatgttgctggtcgaaagggaaatgtcggtaacgcgaccgtcggcgggtttgcagcgcgtcccgcgggattccaatgccacgcttttgagaatatcactcaatcgtattgcgacgcagcagacccgttctgcgcccaggggaacagtacagcgacacatcaaggatatggtaaggaatatggacaagacgcgcttgatttcgtcactaagaggcttggagaaaagacgaatagcgcatccgctacctcatgttcgaggattattttcatgaccattgttattatgatatcgtgttcaatccgccttcttggctga

SEQ ID NO: 29947 - protein, 256 aa, Muscodor strobelii
  misc_feature: SGI Peptide ID NO. 570292
  misc_feature (23)..(225): Pfam Id: PF01083 Pfam Desc: Cutinase
  misc_feature (1)..(224): NCBI GI: 115391459 Blast Desc: acetylxylan esterase precursor [Aspergillus terreus NIH2624] gi|114194158|gb|EAU35858.1| acetylxylan esterase precursor [Aspergillus terreus NIH2624]
  misc_feature (1)..(224): NCBI GI: 119473547 Blast Desc: acetyl xylan esterase (Axe1), [Neosartorya fischeri NRRL 181] gi|119406802|gb|EAW16752.1| acetyl xylan esterase (Axe1), [Neosartorya fischeri NRRL 181]
  misc_feature (1)..(224): NCBI GI: 70985713 Blast Desc: acetyl xylan esterase (Axe1) [Aspergillus fumigatus Af293] gi|66845991|gb|EAL86324.1| acetyl xylan esterase (Axe1), [Aspergillus fumigatus Af293] gi|159128503|gb|EDP53618.1| acetyl
  misc_feature (1)..(224): NCBI GI: 121712511 Blast Desc: acetyl xylan esterase (Axe1), [Aspergillus clavatus NRRL 1] gi|119402019|gb|EAW12441.1| acetyl xylan esterase (Axe1), [Aspergillus clavatus NRRL 1]
  misc_feature (19)..(224): NCBI GI: 261354068 Blast Desc: acetylxylan esterase [Verticillium albo-atrum VaMs.102]
  misc_feature (5)..(224): NCBI GI: 156051031 Blast Desc: SS1G_08104 [Sclerotinia sclerotiorum 1980] gi|154692503|gb|EDN92241.1| SS1G_08104 [Sclerotinia sclerotiorum 1980]
  misc_feature (10)..(229): NCBI GI: 212539978 Blast Desc: acetyl xylan esterase (Axe1), [Penicillium marneffei ATCC 18224] gi|210067443|gb|EEA21535.1| acetyl xylan esterase (Axe1), [Penicillium marneffei ATCC 18224]
  misc_feature (21)..(224): NCBI GI: 261352926 Blast Desc: acetylxylan esterase [Verticillium albo-atrum VaMs.102]
  misc_feature (1)..(224): NCBI GI: 115396496 Blast Desc: acetylxylan esterase precursor [Aspergillus terreus NIH2624] gi|114193456|gb|EAU35156.1| acetylxylan esterase precursor [Aspergillus terreus NIH2624]
  misc_feature (5)..(224): NCBI GI: 154296703 Blast Desc: BC1G_12379 [Botryotinia fuckeliana B05.10] gi|150843218|gb|EDN18411.1| BC1G_12379 [Botryotinia fuckeliana B05.10]
  misc_feature (3)..(225): SWISSPROT Homolog: EC 3.1.1.72 Acetylxylan esterase
MIFTFSSLLLLAAIICVATGQQSTCPDVHIFGARETTAPPGFGSSSTLVALIQEAYPSATSESIIYPAAGGNAYGASVTIGVVAIVNQTDMFFQKCPNTNLVIVGYSQGAQIVDDAFCGGPDGSSLNMTKESVSAGVSRMTSAIMVLMGNPRNVAGRKGNVGNATVGGFAARPAGFQCHAFENITQSYCDAADPFCAQGNSTATHQGYGKEYGQDALDFVTKRLGEKTNSASATSCSRIIFMTIVIMISCSIRLLG

SEQ ID NO: 29948 - DNA, 1865 bp, Muscodor strobelii
  misc_feature: SGI EST ID NO. CUFF.70851.1
  misc_feature: Variant of the nucleotide sequence at SEQ ID NO 29946
aatcaaaccgacatgttcttccagaagtgcccaaacaccaatttggtgatcgtaggatattctcaaggtgcacagattgtggacgatgcattctgcggcgggccggatgggtcttccttgaatatgacgaaagagagcgtgtctgcaggtgtcagtcgaatgacatcagctattatggtgtgtataaaacactcccgtctttctttcttgctcatcattttctaatgggactcatgctgatatgtctggtagtaaatacttttatttcgattcgaagccctggcaccggcctagaaattccataatataacccttcaatttcaaactgagacggataacgaaagggactaacatgctttaatgcactagacttatgggaaatcctcgaaatgttgctggtcgaaagggaaatgtcggtaacgcgaccgtcggcgggtttgcagcgcgtcccgcgggattccaatgccacgcttttgagaatatcactcaatcgtattgcgacgcagcagacccgttctgcgcccaggggaacagtacagcgacacatcaaggatatggtaaggaatatggacaagacgcgcttgatttcgtcactaagaggcttggagaaaagacgaatagcgcatccgctacctcatgttcgaggattattttcatgaccattgttattatgatatcgtgttcaatccgccttcttggctgatttggtccttgaggggtttgatccttcttgagtcgaaatccgaacgacgtgtgtctgtggtagaaatttctgaattaatgatgaacgaaatatctcatttactcttgcaactcgagaatgtaacgttcttctctcgcgattattgcgacaaaatgggacgtgttaacagaactcgactatgcggcgaaccttgcaattcggattgatctcaacaacagcatctgcgtcgtctatcaggctaacaaatgtcctagtctagccctcgatcttactcagaagacatatagatttaatattaggcatgcctcgttcgcacaatactctgatatcattcatccggaaattgccccaattgttcaagacacatttggccttcagcggtgggatcatttgatgacccacctgtcccgtgaagacgcgaagcacttctccataccgaacattgtccttcaaagtcacaaattccaagccctcggcttctgcgaaaatgtcatcctggcggtttacatcttttggtatgccagacgggcgaccttcctcaggcttcggttctgaaggaacattatatcgactcttgtccccttgaacgacagtgatcttgtcgcttgtggctaggggctcttttaacgtaaaccaaggctcctcttcgtctccccagcgtcccggtccagcagtatctttgataatgagcctttcgacagatgtattgttattgactagaggaagcatctctgtcaccattacatggtcatagcctccgaaaggcgaatcgaccaggatttgtttgacaggatacgggaagttgagagacggtattggcgccaatgtaccgggtggcatgtaaccgttgtaagggaatcgtctaagtctcatagagtatagaggcctcatctgctcgacaaagcttatcgatgcagtgcgagcatctcgacaaacgaattgaatggggtttgtgatccgcgccactgaaaactcgtccaacatgatttcaggtatcttctctgtttgatcagcatagtcgagccatagcgagcatatgggctcgtatgatttaaaatgatgcagtagcgcaaactgccatactggtgcttgaatctctattggaaatttcgtgaatcgaggaaatccttcttctgacatttcaaatcgatgggcgtcttgg

SEQ ID NO: 29949 - DNA, 1449 bp, Muscodor strobelii
  misc_feature: SGI cDNA ID NO. 570293
  misc_feature: Encodes the peptide sequence at SEQ ID NO 29950
atggctgatgatacaagagacaacgagcctcgtcagagcggcgacccgcatatactggactcccaaaatggaacagccatacttcgtcaagccaaggcgcttcaggcagagatccagcagtttgcagaccacctttccaccgtgtatgatgggtacttccacaaatttccaaagaacatgcacatgtcacttttgaatgatgtgaaaattgaagtttccaacttggagtccgatgttaactcgtcggaccctatggcaaaccatcggatatcgtctaacaatctgccgttcatacaagcggtatgggatactgccaagatgtcagagaacatcatcaagataaggcatcctatatttagcggtccctttaaacgcgagcgccaccttcgcgctcccgggacgacaatttacggcataatcagtcaaggcgactctgaaccaaagagaaatcagaacactcgctcaatgcgaattgacgtaattgctgatggcggtctgacgtggtacaaagtgtctgccttgacgaatcggcgtctcgagttcgacatggcgaaagaagctgtcttcagtgatgacagcgatggcgaagagtccaacggcatttcgaaagacatttcagatgttccgctagttaagcttgcaacggaacttgcaagaatatcaaagggccatcaagttcgacaccaaagcccaaggccagttcttgtgctacccagaatatttgagaaagaatctattcaaatccatcagcttctagattcatgccgtgatatgggtgtcgccataatatgtggcgatgctctttccccagccgaccccatctcccaagatttgttggacaggatggcaccaagcccacgagcacagataactcccgtactgaacatcgatacttctgttcttgtagccttggcgtcagacatcgctcatgacaatgtggagaagcaatcctggtttggccattcgtgcctcgaccacatagatctcgagaagatcgatccacttgcgccaaagctatttgatatattaggcagtcatgagcttgtttgtacgagagaagcatcaagtgctctcgcgcgaattgtacatcatatgggcacgaacagtgaaaacgcgagggcaaatttgctcctctgtgttgatgactcgatgacgcgcgagcaacgtgttcaaagcttggggtcgttatcgttgcacgcgaccagcatcccttctggattgcggcttcctattcgtattgtagacagcaacgaagataactgtcaagatcaatttcttcctcctgttcaggagaagcttgaccaattaaccgaacctgggcgatcagttttctcctacgggtgggcaaaatccttaacaacagtcacctgtaattattgtaggtttcctatgcatgtgaacacacattattctactgactcgtacatgcagtggccgcaaaagtactag

SEQ ID NO: 29950 - protein, 482 aa, Muscodor strobelii
  misc_feature: SGI Peptide ID NO. 570293
  misc_feature (15)..(458): NCBI GI: 154296578 Blast Desc: BC1G_12697 [Botryotinia fuckeliana B05.10] gi|150843280|gb|EDN18473.1| BC1G_12697 [Botryotinia fuckeliana B05.10]
  misc_feature (79)..(458): NCBI GI: 119174771 Blast Desc: CIMG_09343 [Coccidioides immitis RS]
  misc_feature (79)..(458): NCBI GI: 240106934 Blast Desc: CPC735_017230 [Coccidioides posadasii C735 delta SOWgp]
  misc_feature (88)..(479): NCBI GI: 70997329 Blast Desc: conserved [Aspergillus fumigatus Af293] gi|66851050|gb|EAL91376.1| conserved [Aspergillus fumigatus Af293] gi|159126859|gb|EDP51975.1| conserved [Aspergillus A1163]
  misc_feature (84)..(482): NCBI GI: 169779225 Blast Desc: [Aspergillus oryzae RIB40] gi|83772816|dbj|BAE62944.1| protein product [Aspergillus oryzae]
  misc_feature (61)..(462): NCBI GI: 189199504 Blast Desc: conserved [Pyrenophora tritici-repentis Pt-1C-BFP] gi|187983188|gb|EDU48676.1| conserved [Pyrenophora tritici-repentis Pt-1C-BFP]
  misc_feature (88)..(479): NCBI GI: 119478847 Blast Desc: NFIA_074820 [Neosartorya fischeri NRRL 181] gi|119407613|gb|EAW17562.1| conserved [Neosartorya fischeri NRRL 181]
  misc_feature (15)..(444): NCBI GI: 156058966 Blast Desc: SS1G_03495 [Sclerotinia sclerotiorum 1980] gi|154701282|gb|EDO01021.1| SS1G_03495 [Sclerotinia sclerotiorum 1980]
  misc_feature (61)..(461): NCBI GI: 169625403 Blast Desc: SNOG_15973 [Phaeosphaeria nodorum SN15] gi|111055432|gb|EAT76552.1| SNOG_15973 [Phaeosphaeria nodorum SN15]
  misc_feature (88)..(458): NCBI GI: 121713834 Blast Desc: conserved [Aspergillus clavatus NRRL 1] gi|119402681|gb|EAW13102.1| conserved [Aspergillus clavatus NRRL 1]
MADDTRDNEPRQSGDPHILDSQNGTAILRQAKALQAEIQQFADHLSTVYDGYFHKFPKNMHMSLLNDVKIEVSNLESDVNSSDPMANHRISSNNLPFIQAVWDTAKMSENIIKIRHPIFSGPFKRERHLRAPGTTIYGIISQGDSEPKRNQNTRSMRIDVIADGGLTWYKVSALTNRRLEFDMAKEAVFSDDSDGEESNGISKDISDVPLVKLATELARISKGHQVRHQSPRPVLVLPRIFEKESIQIHQLLDSCRDMGVAIICGDALSPADPISQDLLDRMAPSPRAQITPVLNIDTSVLVALASDIAHDNVEKQSWFGHSCLDHIDLEKIDPLAPKLFDILGSHELVCTREASSALARIVHHMGTNSENARANLLLCVDDSMTREQRVQSLGSLSLHATSIPSGLRLPIRIVDSNEDNCQDQFLPPVQEKLDQLTEPGRSVFSYGWAKSLTTVTCNYCRFPMHVNTHYSTDSYMQWPQKY

SEQ ID NO: 29951 - DNA, 1095 bp, Muscodor strobelii
  misc_feature: SGI cDNA ID NO. 570294
  misc_feature: Encodes the peptide sequence at SEQ ID NO 29952
atgggaccaacggttaccctcaaaagtgtaagctctgcgatcgtgccgctactacgagctagactcagacaatgctgtaaactagagaccggaaccacagtcgatatttctagtatcgacttggtcaaaaacgtgacatggttctcctcaggtggctataattccatatggctcgtgacactgcacgaagtggtagatggagtcaacacgttcatactgcgcctcccttgcgacgatgcgcttcttccttatcaaattacgaatgaagtcgccttcaggaaattcattgctgcaaaattacctcacgttccagtgcctcgcgttttccattattcagccactgatcattccgattcttcattcattgccgaagaattcattcagggtgataatctgagctctgcatggatgacgtttgatattgcacagaaagaaagttttgcccgcaagctggcggagattcttgttgacctagctgaagtgcagtttgataaaatcggcggcttagacccttcgactttctcaccggctccaacagtcgaaggtgtcaagatcttcaagggccgacggaaatttcacaaagacgattgttacccgatcggtccttatagcaccactaaggagtacatcttggcttgttatgatcgtgagatatactatcacagccacgcgtctgctgacgacattgactgtgacctgttccaggatcaatctgtccagtcattcataagtcaactgcaggaaagacgacgagtaatcgctgtgcaggatattgtagacgagcctttcgttcttgtgcatggtgattttcatgcgcgcaacgttctaattcgtgacgaacgaattgtggccattctagattgggagttcgcaggatcgtatccgttgagtgaaacactttcaggcgaaaacgtcgaagtcgtcgatgctacgtctcaagagttagacgaggagaataccctctggggcgagaagttacgagattatgttagtctagaattgaagtgtagagactgggatcaagaaaagatcaataaactcctaggagatggggacgcagaccttggcatagctaggacggagatgttcccttaa

SEQ ID NO: 29952 - protein, 364 aa, Muscodor strobelii
  misc_feature: SGI Peptide ID NO. 570294
  misc_feature (44)..(329): Pfam Id: PF01636 Pfam Desc: Phosphotransferase enzyme family
  misc_feature (44)..(292): Pfam Id: PF01636 Pfam Desc: Phosphotransferase enzyme family
  misc_feature (51)..(296): NCBI GI: 169606738 Blast Desc: SNOG_06416 [Phaeosphaeria nodorum SN15] gi|111065127|gb|EAT86247.1| SNOG_06416 [Phaeosphaeria nodorum SN15]
  misc_feature (152)..(273): NCBI GI: 261196157 Blast Desc: [Ajellomyces dermatitidis SLH14081] gi|239587615|gb|EEQ70258.1| [Ajellomyces dermatitidis SLH14081]
  misc_feature (5)..(295): NCBI GI: 238492695 Blast Desc: conserved [Aspergillus flavus NRRL3357] gi|220696078|gb|EED52420.1| conserved [Aspergillus flavus NRRL3357]
  misc_feature (51)..(296): NCBI GI: 238844481 Blast Desc: phosphotransferase family protein [Microsporum canis CBS 113480]
  misc_feature (5)..(295): NCBI GI: 169782958 Blast Desc: [Aspergillus oryzae RIB40] gi|83774685|dbj|BAE64808.1| protein product [Aspergillus oryzae]
  misc_feature (49)..(295): NCBI GI: 238845500 Blast Desc: conserved [Microsporum canis CBS 113480]
  misc_feature (44)..(301): NCBI GI: 256721267 Blast Desc: NECHADRAFT_17767 [Nectria haematococca mpVI 77-13-4]
  misc_feature (59)..(314): NCBI GI: 258578005 Blast Desc: [Uncinocarpus reesii 1704] gi|237903450|gb|EEP77851.1| [Uncinocarpus reesii 1704]
  misc_feature (50)..(293): NCBI GI: 170093475 Blast Desc: [Laccaria bicolor S238N-H82] gi|164647818|gb|EDR12062.1| [Laccaria bicolor S238N-H82]
  misc_feature (88)..(295): NCBI GI: 159125657 Blast Desc: conserved [Aspergillus fumigatus A1163]
MGPTVTLKSVSSAIVPLLRARLRQCCKLETGTTVDISSIDLVKNVTWFSSGGYNSIWLVTLHEVVDGVNTFILRLPCDDALLPYQITNEVAFRKFIAAKLPHVPVPRVFHYSATDHSDSSFIAEEFIQGDNLSSAWMTFDIAQKESFARKLAEILVDLAEVQFDKIGGLDPSTFSPAPTVEGVKIFKGRRKFHKDDCYPIGPYSTTKEYILACYDREIYYHSHASADDIDCDLFQDQSVQSFISQLQERRRVIAVQDIVDEPFVLVHGDFHARNVLIRDERIVAILDWEFAGSYPLSETLSGENVEVVDATSQELDEENTLWGEKLRDYVSLELKCRDWDQEKINKLLGDGDADLGIARTEMFP

SEQ ID NO: 29953 - DNA, 560 bp, Muscodor strobelii
  misc_feature: SGI EST ID NO. CUFF.70801.0
  misc_feature: Variant of the nucleotide sequence at SEQ ID NO 29951
cgtgccgctactacgagctagactcagacaatgctgtaaactagagaccggaaccacagtcgatatttctagtatcgacttggtcaaaaacgtgacatggttctcctcaggtggctataattccatatggctcgtgacactgcacgaagtggtagatggagtcaacacgttcatactgcgcctcccttgcgacgatgcgcttcttccttatcaaattacgaatgaagtcgccttcaggaaattcattgctgcaaaattacctcacgttccagtgcctcgcgttttccattattcagccactgatcattccgattcttcattcattgccgaagaattcattcagggtgataatctgagctctgcatggatgacgtttgatattgcacagaaagaaagttttgcccgcaagctggcggagattcttgttgacctagctgaagtgcagtttgataaaatcggcggcttagacccttcgactttctcaccggctccaacagtcgaaggtgtcaagatcttcaagggccgacggaaatttcacaaagacgattgttacccgatcg

SEQ ID NO: 29954 - DNA, 1878 bp, Muscodor strobelii
  misc_feature: SGI cDNA ID NO. 570295
  misc_feature: Elevated expression when VOC is produced
  misc_feature: Encodes the peptide sequence at SEQ ID NO 29955
atgacgaacactgagaatacaacgtcatcccagcctataggaacacagtgtaatataaaggcatatcacgagactaccaaggatggaattccggtctctaagcctatcgacaatccctatggcgaatatgaagatcgagatgctgatagcgtctttgcgcttgttatcaagagaaccttcgagccgaatcaaccgaagaaaatcagcttgaccgtcaactcgccacacatcttggcagcattcagaagtgttgtgccgcatgagtatcctgttgcgtctgattttaccaagccactggttctccagacaccctttagcatgctagtacattattggaaggaactagaagcttatcgcagtaaagtctcgcaagtcaagtcagagcaacgccagcatttagatctcctttccgagttcatggaaaaggagcttaagtctgatagagacgtagcgatcaagatgattgacgaaggcagaatcgccttcgacaatgcttggatcatcttcaaacctggagaagtcctgtactctgagtacaatgatcagccttggctcctcaagtgtcaaaaagctgtgtatgaaaaacaccccgaagacggaccgtacatggagatccacgcggagtacacagagcacgatggtacggttgtcggaactgcggttgccaagttcaatctttcacaacgcgaagttttcccgcaagatacttcggtgcctatcacaggactgaaggtataccctcgcgactacaatgcctttcattctgaccgcctcgaggcgcgcctggcagagcggggcagaaaattcttggaacttcaagagaaagtcacgatgcgctaccagggcgccgcagaatggttgaagacacctccgctagattattacgacccatcaggctgcagatatagaggcgtgtggttgccttataccgagacggggagagtcattcttgaccgcaaaacatacggggaagaacaaaaaatgaatcatgtgagggtcaaatctgacaagccagtgcttgcaacatgtccgccatatacgactgggtatagtctcagccgaaaggattgggtccgtctcctagttgacaacatcgaggacccaagctggaagcctaatccttgggattcactcgttttaccagaaaaagagaaggtattgcttcgatcattagtcacgtcgcatcagtactccaagaatcccagagatcagtcccagcagaagggtaagggattggtagtgctacttcatggtacgcctggaagtgggaaaacgctgactgccgaggtcgccgccgaagcaagcaaaaaggctctcgtagctacctctgttggggaactaatgcgccagtcaacgatgttttcaggctcactcgcattcgagagcatgctgaaaaagtgtctccaatatgctacaatctggcaagctgtcgtgctcctcgacgaggcagatgtctttctagagacgcgtacaaacaataatgccgacaaaaactctttcgttgccatattcctcaaagagcttgagtatttcagtggtattgtgtttctgacgaccaatcgcgttagtcatttcgacaaagcgatgaagtcacgtattcacctcgcgctcggttacacaccgccccgtcctgacgttcgcaaacagatttggagacgctaccttggggccgttcctgagaacgagacagacattaagattgaggaggtagttgattcattagcgatctccgagttgaatggcagagagattgcaaatgccgtcaacacagcccgtactatggcacgatatgagaaaaaggctcttgacatggatcaccttgagacagtgctcgatgtccggaatacatttgaccagagcttgcagactgatagctag

SEQ ID NO: 29955 - protein, 625 aa, Muscodor strobelii
  misc_feature: SGI Peptide ID NO. 570295
  misc_feature (413)..(597): Pfam Id: PF00004 Pfam Desc: ATPase family associated with various cellular activities (AAA)
  misc_feature (413)..(595): Pfam Id: PF00004 Pfam Desc: ATPase family associated with various cellular activities (AAA)
  misc_feature (3)..(619): NCBI GI: 46138977 Blast Desc: FG11003.1 [Gibberella zeae PH-1]
  misc_feature (1)..(613): NCBI GI: 171693837 Blast Desc: protein product [Podospora anserina] gi|170946867|emb|CAP73671.1| protein product [Podospora anserina]
  misc_feature (45)..(625): NCBI GI: 240110384 Blast Desc: ATPase, AAA family protein [Coccidioides posadasii C735 delta SOWgp]
  misc_feature (52)..(621): NCBI GI: 39940826 Blast Desc: MGG_11021 [Magnaporthe grisea 70-15] gi|145010948|gb|EDJ95604.1| MGG_11021 [Magnaporthe grisea 70-15]
  misc_feature (32)..(613): NCBI GI: 189209339 Blast Desc: conserved [Pyrenophora tritici-repentis Pt-1C-BFP] gi|187977095|gb|EDU43721.1| conserved [Pyrenophora tritici-repentis Pt-1C-BFP]
  misc_feature (52)..(625): NCBI GI: 238483793 Blast Desc: AAA family ATPase, [Aspergillus flavus NRRL3357] gi|220701185|gb|EED57523.1| AAA family ATPase, [Aspergillus flavus NRRL3357]
  misc_feature (42)..(613): NCBI GI: 149211295 Blast Desc: MGCH7_ch7g1105 [Magnaporthe grisea 70-15] gi|86197060|gb|EAQ71698.1| MGCH7_ch7g1105 [Magnaporthe grisea 70-15]
  misc_feature (42)..(613): NCBI GI: 145601452 Blast Desc: MGG_10327 [Magnaporthe grisea 70-15] gi|145009519|gb|EDJ94186.1| MGG_10327 [Magnaporthe grisea 70-15]
  misc_feature (2)..(613): NCBI GI: 169617988 Blast Desc: SNOG_12178 [Phaeosphaeria nodorum SN15] gi|111059470|gb|EAT80590.1| SNOG_12178 [Phaeosphaeria nodorum SN15]
  misc_feature (12)..(614): NCBI GI: 115397169 Blast Desc: [Aspergillus terreus NIH2624] gi|114192367|gb|EAU34067.1| [Aspergillus terreus NIH2624]
  misc_feature: Useful for introducing or modulating the production of volatile compounds
MTNTENTTSSQPIGTQCNIKAYHETTKDGIPVSKPIDNPYGEYEDRDADSVFALVIKRTFEPNQPKKISLTVNSPHILAAFRSVVPHEYPVASDFTKPLVLQTPFSMLVHYWKELEAYRSKVSQVKSEQRQHLDLLSEFMEKELKSDRDVAIKMIDEGRIAFDNAWIIFKPGEVLYSEYNDQPWLLKCQKAVYEKHPEDGPYMEIHAEYTEHDGTVVGTAVAKFNLSQREVFPQDTSVPITGLKVYPRDYNAFHSDRLEARLAERGRKFLELQEKVTMRYQGAAEWLKTPPLDYYDPSGCRYRGVWLPYTETGRVILDRKTYGEEQKMNHVRVKSDKPVLATCPPYTTGYSLSRKDWVRLLVDNIEDPSWKPNPWDSLVLPEKEKVLLRSLVTSHQYSKNPRDQSQQKGKGLVVLLHGTPGSGKTLTAEVAAEASKKALVATSVGELMRQSTMFSGSLAFESMLKKCLQYATIWQAVVLLDEADVFLETRTNNNADKNSFVAIFLKELEYFSGIVFLTTNRVSHFDKAMKSRIHLALGYTPPRPDVRKQIWRRYLGAVPENETDIKIEEVVDSLAISELNGREIANAVNTARTMARYEKKALDMDHLETVLDVRNTFDQSLQTDS

SEQ ID NO: 29956 - DNA, 2221 bp, Muscodor strobelii
  misc_feature: SGI EST ID NO. CUFF.70835.0
  misc_feature: Variant of the nucleotide sequence at SEQ ID NO 29954
cctctacatgccatggccttgaggcgttggtatgccttacgtttgacaagcttgctacacttgaaaacaacgtctataaaatgaacatgctcgcccacgactcattatctctcaaattcggacacagttccacgcgttgcacgcccacgtcaaccttatcagtattgaccattgctcatcttcaactacgacggctcaggaactagctaaaactatccagtcgacaatgacgaacactgagaatacaacgtcatcccagcctataggaacacagtgtaatataaaggcatatcacgagactaccaaggatggaattccggtctctaagcctatcgacaatccctatggcgaatatgaagatcgagatgctgatagcgtctttgcgcttgttatcaagagaaccttcgagccgaatcaaccgaagaaaatcagcttgaccgtcaactcgccacacatcttggcagcattcagaagtgttgtgccgcatgagtatcctgttgcgtctgattttaccaagccactggttctccagacaccctttagcatgctagtacattattggaaggaactagaagcttatcgcagtaaagtctcgcaagtcaagtcagagcaacgccagcatttagatctcctttccgagttcatggaaaaggagcttaagtctgatagagacgtagcgatcaagatgattgacgaaggcagaatcgccttcgacaatgcttggatcatcttcaaacctggagaagtcctgtactctgagtacaatgatcagccttggctcctcaagtgtcaaaaagctgtgtatgaaaaacaccccgaagacggaccgtacatggagatccacgcggagtacacagagcacgatggtacggttgtcggaactgcggttgccaagttcaatctttcacaacgcgaagttttcccgcaagatacttcggtgcctatcacaggactgaaggtataccctcgcgactacaatgcctttcattctgaccgcctcgaggcgcgcctggcagagcggggcagaaaattcttggaacttcaagagaaagtcacgatgcgctaccagggcgccgcagaatggttgaagacacctccgctagattattacgacccatcaggctgcagatatagaggcgtgtggttgccttataccgagacggggagagtcattcttgaccgcaaaacatacggggaagaacaaaaaatgaatcatgtgagggtcaaatctgacaagccagtgcttgcaacatgtccgccatatacgactgggtatagtctcagccgaaaggattgggtccgtctcctagttgacaacatcgaggacccaagctggaagcctaatccttgggattcactcgttttaccagaaaaagagaaggtattgcttcgatcattagtcacgtcgcatcagtactccaagaatcccagagatcagtcccagcagaagggtaagggattggtagtgctacttcatggtacgcctggaagtgggaaaacgctgactgccgaggtcgccgccgaagcaagcaaaaaggctctcgtagctacctctgttggggaactaatgcgccagtcaacgatgttttcaggctcactcgcattcgagagcatgctgaaaaagtgtctccaatatgctacaatctggcaagctgtcgtgctcctcgacgaggcagatgtctttctagagacgcgtacaaacaataatgccgacaaaaactctttcgttgccatattcctcaaagagcttgagtatttcagtggtattgtgtttctgacgaccaatcgcgttagtcatttcgacaaagcgatgaagtcacgtattcacctcgcgctcggttacacaccgccccgtcctgacgttcgcaaacagatttggagacgctaccttggggccgttcctgagaacgagacagacattaagattgaggaggtagttgattcattagcgatctccgagttgaatggcagagagattgcaaatgccgtcaacacagcccgtactatggcacgatatgagaaaaaggctcttgacatggatcaccttgagacagtgctcgatgtccggaatacatttgaccagagcttgcagactgatagctagcttgagcagatcgtcaatgctgcttgcgttcccatcctaagagcaatctagaatagattagttccagcagactgttagaacccttgtaaagcattttcttcagggcaaactcataaa

SEQ ID NO: 29957 - DNA, 834 bp, Muscodor strobelii
  misc_feature: SGI cDNA ID NO. 570296
  misc_feature: Encodes the peptide sequence at SEQ ID NO 29958
atgcctggcgttaccacaaagtacgatgcgattcccgggcccctaggtcttgcgtccgcttcgcttgaagggaaggtggcccttgtgaccggtgctggacgtggtattggtcgtgagatggcacttgagcttggccgtcgtggcgcaaaggtcatcgtgaactacgcaaatagcaaagagtcagcagaagaggtggtgcaacaaattaagaagaatggaacagacgcagcctcaattaaggcgaacgtttctaaggtctctgatatcgtgaggatgttcgatgaggcgataaagattttcggcaaactgaacatcgtgtgctccaacagcggtgtcgtctcattcggtcatgttaaagatgtcacagaagaggaatttgaccgagtctttgcaacgaacacacgagggcagttttttgttgcccgcgaagcttataagcacctcgaggtaggcggccgcctgatccttatgggatccatcactggtcaagccaagggtgttcccatgcatgcggtgtactccggttctaaaggcacgattgagacctttgcccgctgcatggctattgatttcggggacaagaaaatcacagtcaatgtcatcgctccgggtggtatcaagacagatatgtaccatgccgtgtgccgcgagtacatccctaatggcaagaatttatcagacgaagaggtggacgagtatgcctgcacatggtcaccactacaccgtgtcggtctgccgattgatatcgcacgtgtcgtctgctttcttgcttcacaagacggggaatgggtcaatggcaaagtcatcggcattgacggccacgctatgatgtag

SEQ ID NO: 29958 - protein, 277 aa, Muscodor strobelii
  misc_feature: SGI Peptide ID NO. 570296
  misc_feature (25)..(192): Pfam Id: PF00106 Pfam Desc: short chain dehydrogenase
  misc_feature (26)..(197): Pfam Id: PF08659 Pfam Desc: KR domain
  misc_feature (1)..(277): NCBI GI: 116206214 Blast Desc: tetrahydroxynaphthalene reductase [Chaetomium globosum CBS 148.51] gi|88182997|gb|EAQ90465.1| tetrahydroxynaphthalene reductase [Chaetomium globosum CBS 148.51]
  misc_feature (1)..(277): NCBI GI: 39968319 Blast Desc: tetrahydroxynaphthalene reductase [Magnaporthe grisea 70-15] gi|3287916|sp|Q12634.2|T4HR_MAGGR RecName: Full=Tetrahydroxynaphthalene reductase; AltName: Full=T4HN grisea
  misc_feature (1)..(277): NCBI GI: 14488430 Blast Desc: tetrahydroxynaphthalene reductase [Magnaporthe grisea 70-15] gi|3287916|sp|Q12634.2|T4HR_MAGGR RecName: Full=Tetrahydroxynaphthalene reductase; AltName: Full=T4HN grisea
  misc_feature (1)..(277): NCBI GI: 171678351 Blast Desc: protein product [Podospora anserina] gi|170937245|emb|CAP61902.1| protein product [Podospora anserina]
  misc_feature (2)..(277): NCBI GI: 2624733 Blast Desc: protein product [Podospora anserina] gi|170937245|emb|CAP61902.1| protein product [Podospora anserina]
  misc_feature (1)..(262): NCBI GI: 41018254 Blast Desc: THR1_GLOLA RecName: Full=Trihydroxynaphthalene reductase; AltName: Full=T3HN reductase gi|1902911|dbj|BAA18962.1| reductase [Colletotrichum lagenarium]
  misc_feature (8)..(277): NCBI GI: 156043347 Blast Desc: SS1G_10677 [Sclerotinia sclerotiorum 1980] gi|154695064|gb|EDN94802.1| SS1G_10677 [Sclerotinia sclerotiorum 1980]
  misc_feature (8)..(277): NCBI GI: 154316598 Blast Desc: BC1G_04230 [Botryotinia fuckeliana B05.10] gi|150846030|gb|EDN21223.1| BC1G_04230 [Botryotinia fuckeliana B05.10]
  misc_feature (6)..(277): NCBI GI: 12745775 Blast Desc: AF317668_1 reductase [Ophiostoma floccosum]
  misc_feature (1)..(277): NCBI GI: 164422924 Blast Desc: tetrahydroxynaphthalene reductase, variant [Neurospora crassa OR74A] gi|157069873|gb|EDO64912.1| tetrahydroxynaphthalene reductase, variant [Neurospora crassa OR74A]
  misc_feature (1)..(277): SWISSPROT Homolog: EC 1.1.1.252 Tetrahydroxynaphthalene reductase
MPGVTTKYDAIPGPLGLASASLEGKVALVTGAGRGIGREMALELGRRGAKVIVNYANSKESAEEVVQQIKKNGTDAASIKANVSKVSDIVRMFDEAIKIFGKLNIVCSNSGVVSFGHVKDVTEEEFDRVFATNTRGQFFVAREAYKHLEVGGRLILMGSITGQAKGVPMHAVYSGSKGTIETFARCMAIDFGDKKITVNVIAPGGIKTDMYHAVCREYIPNGKNLSDEEVDEYACTWSPLHRVGLPIDIARVVCFLASQDGEWVNGKVIGIDGHAMM

SEQ ID NO: 29959 - DNA, 812 bp, Muscodor strobelii
  misc_feature: SGI EST ID NO. CUFF.70826.0
  misc_feature: Variant of the nucleotide sequence at SEQ ID NO 29957
gtcatcgtgaactacgcaaatagcaaagagtcagcagaagaggtggtgcaacaaattaagaagaatggaacagacgcagcctcaattaaggcgaacgtttctaaggtctctgatatcgtgaggatgttcgatgaggcgataaagattttcggcaaactgaacatcgtgtgctccaacagcggtgtcgtctcattcggtcatgttaaagatgtcacagaagaggaatttgaccgagtctttgcaacgaacacacgagggcagttttttgttgcccgcgaagcttataagcacctcgaggtaggcggccgcctgatccttatgggatccatcactggtcaagccaagggtgttcccatgcatgcggtgtactccggttctaaaggcacgattgagacctttgcccgctgcatggctattgatttcggggacaagaaaatcacagtcaatgtcatcgctccgggtggtatcaagacagatatgtaccatgccgtgtgccgcgagtacatccctaatggcaagaatttatcagacgaagaggtggacgagtatgcctgcacatggtcaccactacaccgtgtcggtctgccgattgatatcgcacgtgtcgtctgctttcttgcttcacaagacggggaatgggtcaatggcaaagtcatcggcattgacggccacgctatgatgtagaatctcacatgagtatacaattgtgatcttagaagcccaccactcaacacataattgcaactactgcgctgattgagtatgctattccatatcgttccagtagacagtcaatacaccactcatgtacc

SEQ ID NO: 29960 - DNA, 1794 bp, Muscodor strobelii
  misc_feature: SGI cDNA ID NO. 570297
  misc_feature: Encodes the peptide sequence at SEQ ID NO 29961
atgtctcgatccagtcttgttctgattgcttcgaccttgcctatggtcttagcaaaaagcttccaacactatgcgaaactgccaacaggatggactgcaatggacagggtagatgggagcagcatgcagactttctcaatcgcattaacaatgcagaatattgacaagctagagtccaagttgctgtctgtctcaatgcccggctccgaagagtatggcgcccattgggatgatgaaaccgtgaaaagctacttcgctccctccaaggaagcagtatctagcgtgaccaattggctagagggaagtggcattgccaactacaacgtcaatggtgcatttgtcgacttcggcgctgacatcaacactgtcaatacgctcttgaatgcatcatatcaacactatactaaggatggcataacaaaactccgaacgctatcgtacagcatcccagaagacattcaagagcacatagcgctcatagacccaggtctttacttcggatcttccaaggcattcctcccgacacccacacgcactcagcctaaactcccatccaaaaaacgggcaaccaaggtcaccgtcgatgcgtcatgccaaacatcaatcacaccagcttgtctaaaggagttgtacaacgtcggaaactacacgcccaaagcagatttaggaagtaaggtcggatttgggagttttctgaatcaatctgccttatacagcgatgtgtcgaagtatgaggatttcttcggcatcccacagcagaatttcaccgtcgtgcttatcgcaaatgcgacaaatgaccagaatccagcgaccgcttcgataggtgaggcggatctggatgctgagaatatcatcggcattgcgcatcctttgccgatgattgagttcatcacagggggttcgccacctttcgtgccaaacatcgatcagcccactgcggcggataatcagaacgaaccttacgtgccgtactaccggtacttgttagatcaagccaacgacactctaccacaagtaatctcaaactcgtacggcgacgaagaagactccgtacccgaggactacgcaatcctaacatgcaacctaatcggcatgctaggtctccgcgggataacaatcctcgagtcctcaggtgatctcggcgtaggcgccggctgtctcgcaccagactacaaaaccgtagagttcaacgccatcttccccgctacctgtccatatctcacatccgtgggcggcacagtcgacgtcacgcccgaaatcgcgtgggtcggcagctcaggcgggtttagcaactacttttcgcaacctgattggcaatcggccgcaattactgaatatttgacgacagtgtcgaatgagacatatgcatattatggccagtacacaaacttctctggccgcggatttcctgacgtcgcgggtcatagcgtgagccctgactaccaggttatctatgccggctcaccctcagcatcgggcggaacaagtgcagcggcgcccgtctgggcaggtattgtcggtttgttgaacgatgctcgcttccgggctggaaagccgtcgttgggattcttgaacccactgatttaccaatatggaccagatgttttgatagatatcacgggtggttatgccaaagggtgcgacggtaaaaatacacagagtggcggttcagagccggcgggctcgggtatcgtgcctggtgcgaggtggaatgctacggtggggtgggatcctacgactgggtatggtactccggatttccagaagttgaagaatttggtgttgagtttgtag

SEQ ID NO: 29961 - protein, 597 aa, Muscodor strobelii
  misc_feature: SGI Peptide ID NO. 570297
  misc_feature (28)..(166): Pfam Id: PF09286 Pfam Desc: Pro-kumamolisin, activation domain
  misc_feature (1)..(597): NCBI GI: 46114460 Blast Desc: FG03072.1 [Gibberella zeae PH-1]
  misc_feature (51)..(597): NCBI GI: 256730681 Blast Desc: [Nectria haematococca mpVI 77-13-4]
  misc_feature (8)..(596): NCBI GI: 154321758 Blast Desc: BC1G_01026 [Botryotinia fuckeliana B05.10] gi|150850273|gb|EDN25466.1| BC1G_01026 [Botryotinia fuckeliana B05.10]
  misc_feature (8)..(596): NCBI GI: 156045898 Blast Desc: SS1G_09225 [Sclerotinia sclerotiorum 1980] gi|154693621|gb|EDN93359.1| SS1G_09225 [Sclerotinia sclerotiorum 1980]
  misc_feature (22)..(597): NCBI GI: 242798348 Blast Desc: tripeptidyl peptidase A [Talaromyces stipitatus ATCC 10500] gi|218716496|gb|EED15917.1| tripeptidyl peptidase A [Talaromyces stipitatus ATCC 10500]
  misc_feature (7)..(597): NCBI GI: 212541546 Blast Desc: tripeptidyl peptidase A [Penicillium marneffei ATCC 18224] gi|210068227|gb|EEA22319.1| tripeptidyl peptidase A [Penicillium marneffei ATCC 18224]
  misc_feature (8)..(597): NCBI GI: 121708799 Blast Desc: tripeptidyl peptidase A [Aspergillus clavatus NRRL 1] gi|119400399|gb|EAW10825.1| tripeptidyl peptidase A [Aspergillus clavatus NRRL 1]
  misc_feature (3)..(597): NCBI GI: 169776800 Blast Desc: [Aspergillus oryzae RIB40] gi|238502107|ref|XP_002382287.1| tripeptidyl peptidase A [Aspergillus flavus NRRL3357] gi|83771602|dbj|BAE61733.1| protein
  misc_feature (8)..(597): NCBI GI: 119499774 Blast Desc: tripeptidyl peptidase A [Neosartorya fischeri NRRL 181] gi|119414809|gb|EAW24747.1| tripeptidyl peptidase A [Neosartorya fischeri NRRL 181]
  misc_feature (6)..(597): NCBI GI: 70993168 Blast Desc: tripeptidyl peptidase A [Aspergillus fumigatus Af293] gi|74671885|sp|Q4WQU0.1|SED4_ASPFU RecName: Full=Tripeptidyl-peptidase sed4; AltName: Full=Sedolisin-D; A A
  misc_feature (27)..(590): SWISSPROT Homolog: EC 3.4.14.9 Tripeptidyl-peptidase I
MSRSSLVLIASTLPMVLAKSFQHYAKLPTGWTAMDRVDGSSMQTFSIALTMQNIDKLESKLLSVSMPGSEEYGAHWDDETVKSYFAPSKEAVSSVTNWLEGSGIANYNVNGAFVDFGADINTVNTLLNASYQHYTKDGITKLRTLSYSIPEDIQEHIALIDPGLYFGSSKAFLPTPTRTQPKLPSKKRATKVTVDASCQTSITPACLKELYNVGNYTPKADLGSKVGFGSFLNQSALYSDVSKYEDFFGIPQQNFTVVLIANATNDQNPATASIGEADLDAENIIGIAHPLPMIEFITGGSPPFVPNIDQPTAADNQNEPYVPYYRYLLDQANDTLPQVISNSYGDEEDSVPEDYAILTCNLIGMLGLRGITILESSGDLGVGAGCLAPDYKTVEFNAIFPATCPYLTSVGGTVDVTPEIAWVGSSGGFSNYFSQPDWQSAAITEYLTTVSNETYAYYGQYTNFSGRGFPDVAGHSVSPDYQVIYAGSPSASGGTSAAAPVWAGIVGLLNDARFRAGKPSLGFLNPLIYQYGPDVLIDITGGYAKGCDGKNTQSGGSEPAGSGIVPGARWNATVGWDPTTGYGTPDFQKLKNLVLSL

SEQ ID NO: 29962 - DNA, 2091 bp, Muscodor strobelii
  misc_feature: SGI EST ID NO. CUFF.70837.0
  misc_feature: Variant of the nucleotide sequence at SEQ ID NO 29960
ccgtaattgacgctgccgagctgcatcctgtcaagctccgccattggtgtgaattccgtacaaaagatagaggcaacaatacgaggaaggatggggaatccttgctgcacggattatatgaatatcaagagcatctctctccgtttctcctcatcttcacttcatccctatccatctccgtctactgtgtcgctcacaaacggtcccaggcacaatgtctcgatccagtcttgttctgattgcttcgaccttgcctatggtcttagcaaaaagcttccaacactatgcgaaactgccaacaggatggactgcaatggacagggtagatgggagcagcatgcagactttctcaatcgcattaacaatgcagaatattgacaagctagagtccaagttgctgtctgtctcaatgcccggctccgaagagtatggcgcccattgggatgatgaaaccgtgaaaagctacttcgctccctccaaggaagcagtatctagcgtgaccaattggctagagggaagtggcattgccaactacaacgtcaatggtgcatttgtcgacttcggcgctgacatcaacactgtcaatacgctcttgaatgcatcatatcaacactatactaaggatggcataacaaaactccgaacgctatcgtacagcatcccagaagacattcaagagcacatagcgctcatagacccaggtctttacttcggatcttccaaggcattcctcccgacacccacacgcactcagcctaaactcccatccaaaaaacgggcaaccaaggtcaccgtcgatgcgtcatgccaaacatcaatcacaccagcttgtctaaaggagttgtacaacgtcggaaactacacgcccaaagcagatttaggaagtaaggtcggatttgggagttttctgaatcaatctgccttatacagcgatgtgtcgaagtatgaggatttcttcggcatcccacagcagaatttcaccgtcgtgcttatcgcaaatgcgacaaatgaccagaatccagcgaccgcttcgataggtgaggcggatctggatgctgagaatatcatcggcattgcgcatcctttgccgatgattgagttcatcacagggggttcgccacctttcgtgccaaacatcgatcagcccactgcggcggataatcagaacgaaccttacgtgccgtactaccggtacttgttagatcaagccaacgacactctaccacaagtaatctcaaactcgtacggcgacgaagaagactccgtacccgaggactacgcaatcctaacatgcaacctaatcggcatgctaggtctccgcgggataacaatcctcgagtcctcaggtgatctcggcgtaggcgccggctgtctcgcaccagactacaaaaccgtagagttcaacgccatcttccccgctacctgtccatatctcacatccgtgggcggcacagtcgacgtcacgcccgaaatcgcgtgggtcggcagctcaggcgggtttagcaactacttttcgcaacctgattggcaatcggccgcaattactgaatatttgacgacagtgtcgaatgagacatatgcatattatggccagtacacaaacttctctggccgcggatttcctgacgtcgcgggtcatagcgtgagccctgactaccaggttatctatgccggctcaccctcagcatcgggcggaacaagtgcagcggcgcccgtctgggcaggtattgtcggtttgttgaacgatgctcgcttccgggctggaaagccgtcgttgggattcttgaacccactgatttaccaatatggaccagatgttttgatagatatcacgggtggttatgccaaagggtgcgacggtaaaaatacacagagtggcggttcagagccggcgggctcgggtatcgtgcctggtgcgaggtggaatgctacggtggggtgggatcctacgactgggtatggtactccggatttccagaagttgaagaatttggtgttgagtttgtagagggtattagatacacttgtgtcgtgcatcttgggatttttagatggcaagggttgtatgtcacataaactacaaaaattcaa

SEQ ID NO: 29963 - DNA, 759 bp, Muscodor strobelii
  misc_feature: SGI cDNA ID NO. 570298
  misc_feature: Reduced expression when VOC is produced
  misc_feature: Encodes the peptide sequence at SEQ ID NO 29964
atggcgcttcactccgcaagcggaggcgacaccggggacaagttcatcttcgccccagcaggccaacaagcccgtggccaagccgaacagttcactctctctgctctcacaaaagcagatctcgatgcacactcacccatcgcccaattccacacctggttctctcacgctcagaagtccggccgtgtctcacatcccgagacttgctgcttagcgactgcttcgttgccatcgggccgtgtatcatctcgcatggtgtatctcaaggagctagacactaagggtttcgtcatctactctaacttcggcacttcgaggaaagctagggatttagccagtaatgcgtacgcgagcttgacattttggtgggaagatctcgagagacaggtccgtgtcgagggtcccgctgtgaggatggagagggaggaaagtcagaagtatttcgatacgagagtccgtgggagtaggattggagcttgggctagtcggcagagtcaagttctcaaacctgagggtgatgaagacgatggcagaaaggaacttgagggttgggttaaggatgtcgagcagaagtttgaaggcgaggagcagattcccgtccccgagttttggggcggactaaggataatacccgagtctgtggagttttggcagggaaggcagaataggctgcatgatcggtttgtgtacgcgaagaaggagcagaagggagatgctgtcaatgggagcgaatggacgctagagagactcagcccgtag

SEQ ID NO: 29964 - protein, 252 aa, Muscodor strobelii
  misc_feature: SGI Peptide ID NO. 570298
  misc_feature (33)..(143): Pfam Id: PF01243 Pfam Desc: Pyridoxamine 5'-phosphate oxidase
  misc_feature (63)..(143): Pfam Id: PF01243 Pfam Desc: Pyridoxamine 5'-phosphate oxidase
  misc_feature (1)..(252): NCBI GI: 46136247 Blast Desc: FG09639.1 [Gibberella zeae PH-1]
  misc_feature (1)..(252): NCBI GI: 256727052 Blast Desc: [Nectria haematococca mpVI 77-13-4]
  misc_feature (1)..(252): NCBI GI: 85105145 Blast Desc: pyridoxamine 5'-phosphate oxidase [Neurospora crassa OR74A] gi|28923481|gb|EAA32661.1| pyridoxamine 5'-phosphate oxidase [Neurospora crassa OR74A]
  misc_feature (1)..(252): NCBI GI: 154301538 Blast Desc: BC1G_10096 [Botryotinia fuckeliana B05.10] gi|150855758|gb|EDN30950.1| BC1G_10096 [Botryotinia fuckeliana B05.10]
  misc_feature (1)..(252): NCBI GI: 171690378 Blast Desc: protein product [Podospora anserina] gi|170945137|emb|CAP71248.1| protein product [Podospora anserina]
  misc_feature (1)..(252): NCBI GI: 156032668 Blast Desc: SS1G_13739 [Sclerotinia sclerotiorum 1980] gi|154699142|gb|EDN98880.1| SS1G_13739 [Sclerotinia sclerotiorum 1980]
  misc_feature (1)..(252): NCBI GI: 116196270 Blast Desc: CHGG_04733 [Chaetomium globosum CBS 148.51] gi|88180646|gb|EAQ88114.1| CHGG_04733 [Chaetomium globosum CBS 148.51]
  misc_feature (27)..(252): NCBI GI: 39951785 Blast Desc: MGG_01535 [Magnaporthe grisea 70-15] gi|145020623|gb|EDK04752.1| MGG_01535 [Magnaporthe grisea 70-15]
  misc_feature (3)..(252): NCBI GI: 189205939 Blast Desc: pyridoxamine 5'-phosphate oxidase [Pyrenophora tritici-repentis Pt-1C-BFP] gi|187975397|gb|EDU42023.1| pyridoxamine 5'-phosphate oxidase [Pyrenophora tritici-repentis
  misc_feature (3)..(252): NCBI GI: 169611186 Blast Desc: SNOG_08701 [Phaeosphaeria nodorum SN15] gi|111062749|gb|EAT83869.1| SNOG_08701 [Phaeosphaeria nodorum SN15]
  misc_feature (5)..(252): SWISSPROT Homolog: EC 1.4.3.5 Pyridoxal 5'-phosphate synthase
  misc_feature: Useful for introducing or modulating the production of volatile compounds
MALHSASGGDTGDKFIFAPAGQQARGQAEQFTLSALTKADLDAHSPIAQFHTWFSHAQKSGRVSHPETCCLATASLPSGRVSSRMVYLKELDTKGFVIYSNFGTSRKARDLASNAYASLTFWWEDLERQVRVEGPAVRMEREESQKYFDTRVRGSRIGAWASRQSQVLKPEGDEDDGRKELEGWVKDVEQKFEGEEQIPVPEFWGGLRIIPESVEFWQGRQNRLHDRFVYAKKEQKGDAVNGSEWTLERLSP

SEQ ID NO: 29965 - DNA, 1184 bp, Muscodor strobelii
  misc_feature: SGI EST ID NO. CUFF.70921.1
  misc_feature: Variant of the nucleotide sequence at SEQ ID NO 29963
ggggcgttcatgtttgaagctccacttaccaggtaacacctggagtcgaacgatgtcatgactttagcacacttacttatctcctatactcgcaacatcacgcgaggaacaccacatcttaaatcaccgaatactttttagcagcaccagaattcaagtttcatgttgtcaattcctagccgtgcactcaggtctaccgctctcagaccgctcggcaaaatggcgcttcactccgcaagcggaggcgacaccggggacaagttcatcttcgccccagcaggccaacaagcccgtggccaagccgaacagttcactctctctgctctcacaaaagcagatctcgatgcacactcacccatcgcccaattccacacctggttctctcacgctcagaagtccggccgtgtctcacatcccgagacttgctgcttagcgactgcttcgttgccatcgggccgtgtatcatctcgcatggtgtatctcaaggagctagacactaagggtttcgtcatctactctaacttcggcacttcgaggaaagctagggatttagccagtaatgcgtacgcgagcttgacattttggtgggaagatctcgagagacaggtccgtgtcgagggtcccgctgtgaggatggagagggaggaaagtcagaagtatttcgatacgagagtccgtgggagtaggattggagcttgggctagtcggcagagtcaagttctcaaacctgagggtgatgaagacgatggcagaaaggaacttgagggttgggttaaggatgtcgagcagaagtttgaaggcgaggagcagattcccgtccccgagttttggggcggactaaggataatacccgagtctgtggagttttggcagggaaggcagaataggctgcatgatcggtttgtgtacgcgaagaaggagcagaagggagatgctgtcaatgggagcgaatggacgctagagagactcagcccgtaggagaagacaagcatgcaatcatcaattccgattgtctctaggttcctgatgttgccctatacgggtattagcttcagcaccttgaggcctagtcaaaggctttgacaaacgggatgatgttgtcaagcaactcatgaaaccaagctttggtttcccatagttgtgaatagactagacaatactatatatttagaccttagcagcag

SEQ ID NO: 29966 - DNA, 987 bp, Muscodor strobelii
  misc_feature: SGI cDNA ID NO. 570299
  misc_feature: Reduced expression when VOC is produced
  misc_feature: Encodes the peptide sequence at SEQ ID NO 29967
atgccatccgatgccgaggcccgcgcgaccattgcgagtctgcgcgagtcgctgtgctctgaggcgaccccgctgcccgtccgtttccgcgctctcttttcgctgaagcacctggccaaacacgaggccgacgacaactccaaggccgccatcgaagcgatcgcagccggtttcgcatcgccatccgcccttttaaaacatgagttagcctactgcctgggccaatccgcaaatctcgccgccgctacccctctacaaaaggtgctatccgatgtgcacgaagaccccatgtgcagacacgaagctgccgaggcactgggtgcgctgggcgatgcaggaaacttggacatcttgcgcaagtttcgcgatcgcgagggcgaagatgtggttgtcgtagagacgtgcgagatcgccatcgaccggatagagtgggagaactcagagcaaagaaagaaagagaagctacaccagagtgatttcgcctccatcgatcccgcaccacccatggccgagtctacccagaccgtcgacgagctcgagaaggccctgatggacactagctcgcccttgttcctgcggtaccgcgccatgttcgccctccgcgacctcgcctctccaccggacctacccaccgccgttcccgccgtcctcgctctcgccaaaggttttgccgactcatctgccctcttccgacacgagatcgcatttgtctttggccagctttcccatcccgcatccatacccgccctcacggcggcgctggctgatgtcgaggaagcgagtatggtgcgccatgaagcggctgaggcactcggcagtctcggcgaggaagagggcgtcgaggagacattgaagaagttcctgcatgacaaggagaaggtggtgcgcgagagtgtcatcgtggcgctcgacatggccgactttgaagcatcgggccaggccgagtatgccctcatccctgaggcagcgcaacaggtggcggcatag

SEQ ID NO: 29967 - protein, 328 aa, Muscodor strobelii
  misc_feature: SGI Peptide ID NO. 570299
  misc_feature (230)..(256): Pfam Id: PF03130 Pfam Desc: PBS lyase HEAT-like repeat
  misc_feature (263)..(290): Pfam Id: PF03130 Pfam Desc: PBS lyase HEAT-like repeat
  misc_feature (2)..(324): NCBI GI: 261352552 Blast Desc: deoxyhypusine hydroxylase [Verticillium albo-atrum VaMs.102]
  misc_feature (10)..(323): NCBI GI: 256727533 Blast Desc: [Nectria haematococca mpVI 77-13-4]
  misc_feature (7)..(327): NCBI GI: 46136515 Blast Desc: FG09773.1 [Gibberella zeae PH-1] gi|121923621|sp|Q4HZ35.1|DOHH_GIBZE RecName: Full=Deoxyhypusine hydroxylase; Short=DOHH; AltName: Full=Deoxyhypusine AltName:
  misc_feature (9)..(321): NCBI GI: 171688634 Blast Desc: protein product [Podospora anserina] gi|170944279|emb|CAP70389.1| protein product [Podospora anserina]
  misc_feature (9)..(327): NCBI GI: 85104699 Blast Desc: NCU05252 [Neurospora crassa OR74A] gi|74628811|sp|Q7S891.1|DOHH_NEUCR RecName: Full=Deoxyhypusine hydroxylase; Short=DOHH; AltName: Full=Deoxyhypusine AltName:
  misc_feature (14)..(322): NCBI GI: 116196356 Blast Desc: CHGG_04776 [Chaetomium globosum CBS 148.51] gi|121927619|sp|Q2H0C0.1|DOHH_CHAGB RecName: Full=Deoxyhypusine hydroxylase; Short=DOHH; AltName: Full=Deoxyhypusine AltName: CBS
  misc_feature (5)..(328): NCBI GI: 255948314 Blast Desc: Pc22g09120 [Penicillium chrysogenum Wisconsin 54-1255] gi|211591941|emb|CAP98200.1| Pc22g09120 [Penicillium chrysogenum Wisconsin 54-1255]
  misc_feature (11)..(322): NCBI GI: 154286260 Blast Desc: HCAG_00971 [Ajellomyces capsulatus NAm1] gi|150407566|gb|EDN03107.1| HCAG_00971 [Ajellomyces capsulatus NAm1]
  misc_feature (11)..(322): NCBI GI: 240274891 Blast Desc: deoxyhypusine hydroxylase [Ajellomyces capsulatus H143]
  misc_feature (11)..(322): NCBI GI: 225558458 Blast Desc: deoxyhypusine hydroxylase [Ajellomyces capsulatus G186AR]
  misc_feature (9)..(327): SWISSPROT Homolog: EC 1.14.99.29 Deoxyhypusine monooxygenase
  misc_feature: Useful for introducing or modulating the production of volatile compounds
MPSDAEARATIASLRESLCSEATPLPVRFRALFSLKHLAKHEADDNSKAAIEAIAAGFASPSALLKHELAYCLGQSANLAAATPLQKVLSDVHEDPMCRHEAAEALGALGDAGNLDILRKFRDREGEDVVVVETCEIAIDRIEWENSEQRKKEKLHQSDFASIDPAPPMAESTQTVDELEKALMDTSSPLFLRYRAMFALRDLASPPDLPTAVPAVLALAKGFADSSALFRHEIAFVFGQLSHPASIPALTAALADVEEASMVRHEAAEALGSLGEEEGVEETLKKFLHDKEKVVRESVIVALDMADFEASGQAEYALIPEAAQQVAA

SEQ ID NO: 29968 - DNA, 2203 bp, Muscodor strobelii
  misc_feature: SGI EST ID NO. CUFF.71047.0
  misc_feature: Variant of the nucleotide sequence at SEQ ID NO 29966
ttttggaggtgaattatcatttctggttcattcaagactgtgatcatcaaacttcatgctgagaacggtgggacgggaagctcataataattgagaaagacatgagatatgcttcttgttctttagtcatataatgacattgtgatactaatttagagtagctatcatttgttccaattgatctcgaatctgagaagcaatgtgagacaaaggcgtgggtgttagccaagtgggaggagggccgtggagggcacatgtcgaagggtgggctgatggctgcaagacgcgggacatgcattaggtggggcatctgataaaagtttttggaggggtccagtccatcccactctgcctgactgtatcgataaagcccgtcttcgaaatatttgggatctggacagccatcaacgtcgcatttcactcgctcaaagctcaatagatcgtcatcttgacaactgctcaacgatgccatccgatgccgaggcccgcgcgaccattgcgagtctgcgcgagtcgctgtgctctgaggcgaccccgctgcccgtccgtttccgcgctctcttttcgctgaagcacctggccaaacacgaggccgacgacaactccaaggccgccatcgaagcgatcgcagccggtttcgcatcgccatccgcccttttaaaacatgagttagcctactgcctgggccaatccgcaaatctcgccgccgctacccctctacaaaaggtgctatccgatgtgcacgaagaccccatgtgcagacacgaagctgccgaggcactgggtgcgctgggcgatgcaggaaacttggacatcttgcgcaagtttcgcgatcgcgagggcgaagatgtggttgtcgtagagacgtgcgagatcgccatcgaccggatagagtgggagaactcagagcaaagaaagaaagagaagctacaccagagtgatttcgcctccatcgatcccgcaccacccatggccgagtctacccagaccgtcgacgagctcgagaaggccctgatggacactagctcgcccttgttcctgcggtaccgcgccatgttcgccctccgcgacctcgcctctccaccggacctacccaccgccgttcccgccgtcctcgctctcgccaaaggttttgccgactcatctgccctcttccgacacgagatcgcatttgtctttggccagctttcccatcccgcatccatacccgccctcacggcggcgctggctgatgtcgaggaagcgagtatggtgcgccatgaagcggctgaggcactcggcagtctcggcgaggaagagggcgtcgaggagacattgaagaagttcctgcatgacaaggagaaggtggtgcgcgagagtgtcatcgtggcgctcgacatggccgactttgaagcatcgggccaggccgagtatgccctcatccctgaggcagcgcaacaggtggcggcatagacatctctttttatcgcatgagcatggcgggtgggttggcgttcgggtcggctgggtaggcttatacaaaaatgatttctcgctcctaatttgtccaattgtatctgtagaatcgtcgcatctcgtgagggtattagttgtttgtattccacctgtgtgtctcctatcagtatgcctatcgcaagacggtcgcaagctgtccaggagcagtccacgtacttgtttccacatttgacacaggtatagaagattgtgctgccctcatcggcgctgcgcaactgcaccgccgagaacttgacctcgttgttgccacacttctcgcatgtctcgttggtgaaggcctcggtgttgatcttgtgcgtctcgacagtctggacgatagacagcttctgtcgcagcagggaggggaagtcggagggtttgctcttggtcatgactgttttggatggcttatctgccaattgtagagacaagattagcgactgaaaaaaggtgaggaatgttacaatattgcgtatgcttgattgggaaaccgacctgcattatcgcgtccacaacactcgcagtgcagaatattctgcacattgcctttagacacaggcaggagattgccgcagtcagtgcagaaaatgagagaacctatcgatgccattgttttctcgtgtgacgcggatgcgcgtatgagctttggcgctatagatatcgttgatagtctacaaagtcctctagaattctgaaatcgaagtcgcag

SEQ ID NO: 29969 - DNA, 369 bp, Muscodor strobelii
  misc_feature: SGI cDNA ID NO. 570300
  misc_feature: Reduced expression when VOC is produced
  misc_feature: Encodes the peptide sequence at SEQ ID NO 29970
atggcatcgataggttctctcattttctgcactgactgcggcaatctcctgcctgtgtctaaaggcaatgtgcagaatattctgcactgcgagtgttgtggacgcgataatgcagataagccatccaaaacagtcatgaccaagagcaaaccctccgacttcccctccctgctgcgacagaagctgtctatcgtccagactgtcgagacgcacaagatcaacaccgaggccttcaccaacgagacatgcgagaagtgtggcaacaacgaggtcaagttctcggcggtgcagttgcgcagcgccgatgagggcagcacaatcttctatacctgtgtcaaatgtggaaacaagtggaatacaaacaactaa

SEQ ID NO: 29970 - protein, 122 aa, Muscodor strobelii
  misc_feature: SGI Peptide ID NO. 570300
  misc_feature (81)..(119): Pfam Id: PF01096 Pfam Desc: Transcription factor S-II (TFIIS)
  misc_feature (82)..(119): Pfam Id: PF01096 Pfam Desc: Transcription factor S-II (TFIIS)
  misc_feature (1)..(122): NCBI GI: 85104696 Blast Desc: NCU05251 [Neurospora crassa OR74A] gi|28923362|gb|EAA32552.1| [Neurospora crassa OR74A]
  misc_feature (1)..(117): NCBI GI: 116196354 Blast Desc: conserved [Chaetomium globosum CBS 148.51] gi|88180688|gb|EAQ88156.1| conserved [Chaetomium globosum CBS 148.51]
  misc_feature (1)..(122): NCBI GI: 261352551 Blast Desc: DNA-directed RNA polymerase I subunit RPA12 [Verticillium albo-atrum VaMs.102]
  misc_feature (1)..(122): NCBI GI: 154317407 Blast Desc: BC1G_03055 [Botryotinia fuckeliana B05.10] gi|150844229|gb|EDN19422.1| BC1G_03055 [Botryotinia fuckeliana B05.10]
  misc_feature (1)..(120): NCBI GI: 171688636 Blast Desc: protein product [Podospora anserina] gi|170944280|emb|CAP70390.1| protein product [Podospora anserina]
  misc_feature (1)..(122): NCBI GI: 70989655 Blast Desc: DNA-directed RNA polymerase I 13.1 kDa polypeptide [Aspergillus fumigatus Af293] gi|66847308|gb|EAL87639.1| DNA-directed RNA polymerase I 13.1 kDa polypeptide, [Aspergillus
  misc_feature (1)..(122): NCBI GI: 225684280 Blast Desc: DNA-directed RNA polymerase i 13.7 kda polypeptide [Paracoccidioides brasiliensis Pb03]
  misc_feature (1)..(118): NCBI GI: 121710080 Blast Desc: DNA-directed RNA polymerase I 13.1 kDa polypeptide, [Aspergillus clavatus NRRL 1] gi|119400806|gb|EAW11230.1| DNA-directed RNA polymerase I 13.1 kDa polypeptide, [Aspergillus
  misc_feature (1)..(122): NCBI GI: 255948316 Blast Desc: Pc22g09130 [Penicillium chrysogenum Wisconsin 54-1255] gi|211591942|emb|CAP98201.1| Pc22g09130 [Penicillium chrysogenum Wisconsin 54-1255]
  misc_feature (1)..(122): NCBI GI: 261188676 Blast Desc: DNA-directed RNA polymerase I polypeptide [Ajellomyces dermatitidis SLH14081] gi|239593110|gb|EEQ75691.1| DNA-directed RNA polymerase I polypeptide [Ajellomyces dermatitidis SLH14081]
  misc_feature (7)..(120): SWISSPROT Homolog: EC 2.7.7.6 DNA-directed RNA polymerase
  misc_feature: Useful for introducing or modulating the production of volatile compounds
MASIGSLIFCTDCGNLLPVSKGNVQNILHCECCGRDNADKPSKTVMTKSKPSDFPSLLRQKLSIVQTVETHKINTEAFTNETCEKCGNNEVKFSAVQLRSADEGSTIFYTCVKCGNKWNTNN

SEQ ID NO: 29971 - DNA, 2117 bp, Muscodor strobelii
  misc_feature: SGI EST ID NO. CUFF.71048.1
  misc_feature: Variant of the nucleotide sequence at SEQ ID NO 29969
ctgcgacttcgatttcagaattctagaggactttgtagactatcaacgatatctatagcgccaaagctcatacgcgcatccgcgtcacacgagaaaacaatggcatcgataggttctctcattttctgcactgactgcggcaatctcctgcctgtgtctaaaggcaatgtgcagaatattctgcactgcgagtgttgtggacgcgataatgcagataagccatccaaaacagtcatgaccaagagcaaaccctccgacttcccctccctgctgcgacagaagctgtctatcgtccagactgtcgagacgcacaagatcaacaccgaggccttcaccaacgagacatgcgagaagtgtggcaacaacgaggtcaagttctcggcggtgcagttgcgcagcgccgatgagggcagcacaatcttctatacctgtgtcaaatgtggaaacaagtggaatacaaacaactaataccctcacgagatgcgacgattctacagatacaattggacaaattaggagcgagaaatcatttttgtataagcctacccagccgacccgaacgccaacccacccgccatgctcatgcgataaaaagagatgtctatgccgccacctgttgcgctgcctcagggatgagggcatactcggcctggcccgatgcttcaaagtcggccatgtcgagcgccacgatgacactctcgcgcaccaccttctccttgtcatgcaggaacttcttcaatgtctcctcgacgccctcttcctcgccgagactgccgagtgcctcagccgcttcatggcgcaccatactcgcttcctcgacatcagccagcgccgccgtgagggcgggtatggatgcgggatgggaaagctggccaaagacaaatgcgatctcgtgtcggaagagggcagatgagtcggcaaaacctttggcgagagcgaggacggcgggaacggcggtgggtaggtccggtggagaggcgaggtcgcggagggcgaacatggcgcggtaccgcaggaacaagggcgagctagtgtccatcagggccttctcgagctcgtcgacggtctgggtagactcggccatgggtggtgcgggatcgatggaggcgaaatcactgaagatccaggttagcgacacaagattattcccgatcagattaatcaacgagcaatacaaacctctggtgtagcttctctttctttctttgctctgagttctcccactctatccggtcgatggcgatctcgcacgtctctacgacaaccacatcttcgccctcgcgatcgcgaaacttgcgcaagatgtccaagtttcctgcatcgcccagcgcacccagtgcctcggcagcttcgtgtctgcacatggggtcttcgtgcacatcggatagcaccttttgtagaggggtagcggcggcgagatttgcggattggcccaggcagtaggctaactcatgttttaaaagggcggatggcgatgcgaaaccggctgcgatcgcttcgatggcggccttggagttgtcgtcggcctcgtgtttggccaggtgcttcagcgaaaagagagcgcggaaacggacgggcagcggggtcgcctcagagcacagcgactcgcgcagactcgcaatggtcgcgcgggcctcggcatcggatggcatcgttgagcagttgtcaagatgacgatctattgagctttgagcgagtgaaatgcgacgttgatggctgtccagatcccaaatatttcgaagacgggctttatcgatacagtcaggcagagtgggatggactggacccctccaaaaacttttatcagatgccccacctaatgcatgtcccgcgtcttgcagccatcagcccacccttcgacatgtgccctccacggccctcctcccacttggctaacacccacgcctttgtctcacattgcttctcagattcgagatcaattggaacaaatgatagctactctaaattagtatcacaatgtcattatatgactaaagaacaagaagcatatctcatgtctttctcaattattatgagcttcccgtcccaccgttctcagcatgaagtttgatgatcacagtcttgaatgaaccagaaatgataattcacctccaaaa

SEQ ID NO: 29972 - DNA, 5709 bp, Muscodor strobelii
  misc_feature: SGI cDNA ID NO. 570301
  misc_feature: Encodes the peptide sequence at SEQ ID NO 29973
atggcgcatccgcaccaataccaccagaacggcatcccgcctcaatatgcgcagcgccaacagcaacagccgggccatgcgagcccggcggcggatgcgcgccaaggtcgcacgcggccgttctcgttggaagaggctctgccgtacacgcccttcacctcggtgtttcccttcaacccagacatcctcaacaaccccaccattgccgcgggctcgctggccccatcgctcgcacatcgtgtctctcgcgacgacttcgacgccctcaacaaggaagccgagaacccccaccagtccaagcgcctcgactccagccttgaatatgtctcccacttgctaagggccgagaagacaacccagtaccagttcaagacgccgcccaatacttcgttacccaccccaagttcgagtaaaagcatgaccaacggtctctctccctttacgaaactggttctggacagcgcctctcccgactttcgctacccatcagcctctaattcggccgaggcgaccccgacccatcgaccaaacatgcccgccgctcctaaaaagtcacccaaccagcgcaagtcagacgtccacaaggtggtcaagcataacccggcggcggtgaatgcccaggccgtcgcacgtaacaagtcgcgtatcgagatacatctgcccaccatcgctcaacgcaatgccgccgaggccttgcttgcggggaaagccccggccccgacgcctaccaagaccccgagccagccccagactgtttcgccggccgatttaatgatgccgacgaaagtgacacccgtccctccacctcagataccatccatacccacgacatcaccgactccggctgtaccacaagcctctccacagcagcctctagctccggaaccatctccagttgctctcaaagtcgagaaatcggacacgcccccgaaggctgtggtctctgcctcgcaggacccaccgccatcatcagcaacttcgtcttctcagaaggctaccgttgtcgttgagctatcaaacacaaatttcaacaaggaagagttcgctgtagtgccggattcccccgaggctccaacccatttgtccaccaggagggtggatggagactatgacgactcgctaaatgccgatctcaaccaccaggaaagagccaaaatcattttcgcggaccttaagagaagtctgctggaaatatttcacgccgaagagcaattctcatatcagcaaggaacctcctctcatctgatttatgcgacgccggaacaggagataacacttactccagctgcgcacgagcgcgctcagaaacagatcaaacgagcaatagatgcaggctgtttcggcagggccccggccgactctctccacaggatacaacgtctaagtgaaggctcactgaagtacgccgaatcgcttgatgttaagatcagcgattcctggggagagactgaagtcggcttctggctacaacaactccctgacgttgacatcggtcttagggctgctcgaacagctctccgcatcatgtgtggtggtcgggaggagaaacagctgtactcggaagatcttattaccctgggtcttaatctcttcaaaaacgttatagagggcgtcatcgtgcccattgcggagcttcgaaactctggctcaactgctgatctgtttcgcctccttactcctcacaagaaactcatcatcgccatcttcaattctagtcaacggctttactcgttaatgtctgatttaataacaagcatcgaagtctcggagactttcagcagctccctagaatacctctcatctcaactgatgttcgtggagaacgcctataccgagaaagactctgtggtcggagtcatcaagtttgatgggctccgcctcgtggcgatgaacatgctatcacagatatttctgcgaagtccggctcaacgagaaggcattctgcgtgagctcttatcgtcgctcgaaaagcttcctgtgggaaaacagaaggctaggcagttcaaactctctgaaggtggtagtatacagccaatttcagctttgatcatgcgattggtccaagccagcgccggcaaggtcgacgacagtaaggacgaccaacgatcccaggtcatggattctatcgaaggcaatggaacaccgctagccaataccaatcaagcgaatactcacagtcccttcactattcggacagagacacaggctgccattgacaatgagattgcggttcaggagcttgaaggtcttagcacgccgcttttcacgggcgcatggcgtcacgcaaactatgtcatccaatacatcatcaagcgagcttcgacatccaccaaaaccggcgatacaccgtacagaaatctgctcgacttattcatcgaagatttcacgacttgttttgattcgccagattggcccgccgctgagcttttgctccaaataaccatgaatatgatgttcaagcagatcgatgataagaactccgcccccgcaaggaacatggcacttgagctactgggtgtgatggctgcgtccatatcaaagctgaggtctcatgtccgtaaaattgcaaacgggtttgagggcagcagttctgatgagcttggtacttggctcactgatctaactctgtcagctctcgacgatactctatctcaggatagggcattcatgtgggaaggcccataccgtattgtccttgagttcacccaggatcgcgtggctgaagacgaacacctacggagtgccacatcgtatcttgttactgattgggcctcccaggcttgcaaagcatacgactcccctggcgatgaagactctgatgaacgtaatatggagtttggacgaattgcgtttcgtttgcggaacatgattggggacccaaagtggttggcgagagaattcagattcaagtcggtgggccatactcatgctaaactctctcaggcaatcattttgctacgatcacagttctgtcggaatttcaaggtcgtcttgaatatcctcatgggttccatgaccacggatcaagcaactgtccgcagccgcagcctcaaaagcgtcaaccaaatccttgagacggaccctactattctcgatggcgatagtgttttcgttgaccttatcctgcgttgctcgagcgattcgtccccacaagttcgtgacacggctcttgggttaatagggaagtgcatgactatgagacctagactggaagagaggatgacccccactgtcatcgatcgatttctcgatgctggcgtaggcgttcggaaacgagccatgaagcttgcaaaggagatataccttggcaacgaaaagaaagccgtgcggagcacgattgcgaacggcctactgcatcgaatgcaggatcccgatgagggcgtccgagatcttgcaaaacaaaccattgaagagatatggatctcgccattttataaagatgacgattcagtggcgtttaagcagtcactcacggatcatgtggctttgattgtccagacagcgaaacaaggcaccacagcactcatcctcgacaaggtctttcagaccattctatcgcccgagtccaaaatgtgcgatgccaacacccgcgtctgcacaaagctcgtcgccaacatgtttgacctactcgataatccggactctgatgacccttccatgcctgcaggcaaggatgcactgcaagtcttgatgattctagcaaaagcagacccgaagcttttcacgtttgagcaagtcaagcttctcgaacctcatatcgttagcgtgggcactagcgaagatcttgccgtctcaagagctgtggttgtcatttaccggcgggtattaccgcaggtctctagtgtccattcgcagttccttacgacaatacgcagctcactcctgcgtgcgactccaaaggtcactcgaagtcttctcgactatgttgttgcttgcgtctggatcatttgtggtcttcttcaatcaaccgagcctgtggccgctctcgtttgttccagtcttgttggcgtccaaaagatacgaggtgtcttggccaagggcttggaaccaacacagatcaagatgttcgagcgctactcactcattgtgggcatgattgggaagcactgccaacttgacagccacgcggatttcatcaggagcaagattccaacttggaaggatggtactgtctccaagctcatggtcgatatcctttgtcctttcgcacaacctaacttgcccgccgacgtgagacgacctgcattagatgcaatcggacttgtttgtcagtctaacccgaggaactttgttgctaaaaatgtgatcttcgtcttcgaacaggttttcaagcaacagacggtcgccctggagtcgatggtgttacggtctttcaaagagtttttgtttactgaagaacagagatccgaccagtcgacagccgctgcgccgaaagagaagagggatctcaaggtaatggggagtacgagttttgatgacgtggccagtgcgactactcagcgctttctgaccgagatcacacgcatttcgcttgccactcaagatgaccatgctcatcttgcggtcgaaatcctggccagcattaaccgacaaggccttgtccatccgaaagagacaggcgtcacctggatcactctagagacgtgtccaatcaccaaaatttcagagctagcgtatcgtgaacacaaggctcttcatgagaagcacgagagtgtgcttgagcgagaatatgctaaagcagttcaggcagcatttcagtatcaacgagatgtcgtgaaagatccccgtggagccactgagtccccattcacctcgaaacttcacctgcttatcgaaattctcaagattagcaaggccaagaaccgacagaggtgcttggaaaagatcgtgggacagcttcaattcgaacccttcgagcttgatgtcagtcaaagcctgccttcacaggtggcatattctcgcttcctggtcgaaaatatcgctttctttgagtatgtcagcatcggcgatctccaggcaataattgcaggcttggagaagctagtcagcagcaccggtgctggtattgcgcagacgatggagtctgagatctttcaagtgcgcatggaccaggagatgattgcggagcaacttggggccggcgatgcagctgctacagcaccccttttcccagactccattgatagccaaagacttcgccgcttaataagcggctcgatgattctgtccgctgtttgggaagcacgcagctatctcaggcgactatatgggcacagtgccaagcgcgaagtcaaggggaaaggcgcaagcaaggatctcaccaaaccaccggtcaaggttcaaggggttaacggcgaaaagttctgggaagatatcgctacaatcatgtccgcgctagacacgccagagcgcatgatgcagcagtgcaaggcattcgtagatctcatgaacgtggatagtgaggtgaagattggagctgaagacgacgatgttgatgctgaaggggatcctttaactccagaagcgggtgatgatgacgatgaagctgctggtgatggccgtggtcgcaagaggaaggcggctggaactcctggcggtcgtggcaagaaacgggcgcggagcaactcccgacaacctcgaggtcggggtcgaccgcgcaagcaacaacctgaggatgacatggatgacgacgatgggtcatgggcatag

SEQ ID NO: 29973 - protein, 1902 aa, Muscodor strobelii
  misc_feature: SGI Peptide ID NO. 570301
  misc_feature (1)..(1897): NCBI GI: 85104692 Blast Desc: NCU05250 [Neurospora crassa OR74A] gi|28923361|gb|EAA32551.1| conserved [Neurospora crassa OR74A]
  misc_feature (204)..(1901): NCBI GI: 116196352 Blast Desc: CHGG_04774 [Chaetomium globosum CBS 148.51] gi|88180687|gb|EAQ88155.1| CHGG_04774 [Chaetomium globosum CBS 148.51]
  misc_feature (26)..(1887): NCBI GI: 261352550 Blast Desc: conserved [Verticillium albo-atrum VaMs.102]
  misc_feature (92)..(1887): NCBI GI: 171688638 Blast Desc: protein product [Podospora anserina] gi|170944281|emb|CAP70391.1| protein product [Podospora anserina]
  misc_feature (38)..(1901): NCBI GI: 256727532 Blast Desc: NECHADRAFT_32977 [Nectria haematococca mpVI 77-13-4]
  misc_feature (317)..(1901): NCBI GI: 46136513 Blast Desc: FG09772.1 [Gibberella zeae PH-1]
  misc_feature (38)..(1899): NCBI GI: 39952167 Blast Desc: MGG_01726 [Magnaporthe grisea 70-15] gi|145020430|gb|EDK04559.1| MGG_01726 [Magnaporthe grisea 70-15]
  misc_feature (27)..(1901): NCBI GI: 156049255 Blast Desc: SS1G_08334 [Sclerotinia sclerotiorum 1980] gi|154692733|gb|EDN92471.1| SS1G_08334 [Sclerotinia sclerotiorum 1980]
  misc_feature (23)..(1886): NCBI GI: 154317405 Blast Desc: BC1G_03054 [Botryotinia fuckeliana B05.10] gi|150844228|gb|EDN19421.1| BC1G_03054 [Botryotinia fuckeliana B05.10]
  misc_feature (291)..(1900): NCBI GI: 225558456 Blast Desc: conserved [Ajellomyces capsulatus G186AR]
MAHPHQYHQNGIPPQYAQRQQQQPGHASPAADARQGRTRPFSLEEALPYTPFTSVFPFNPDILNNPTIAAGSLAPSLAHRVSRDDFDALNKEAENPHQSKRLDSSLEYVSHLLRAEKTTQYQFKTPPNTSLPTPSSSKSMTNGLSPFTKLVLDSASPDFRYPSASNSAEATPTHRPNMPAAPKKSPNQRKSDVHKVVKHNPAAVNAQAVARNKSRIEIHLPTIAQRNAAEALLAGKAPAPTPTKTPSQPQTVSPADLMMPTKVTPVPPPQIPSIPTTSPTPAVPQASPQQPLAPEPSPVALKVEKSDTPPKAVVSASQDPPPSSATSSSQKATVVVELSNTNFNKEEFAVVPDSPEAPTHLSTRRVDGDYDDSLNADLNHQERAKIIFADLKRSLLEIFHAEEQFSYQQGTSSHLIYATPEQEITLTPAAHERAQKQIKRAIDAGCFGRAPADSLHRIQRLSEGSLKYAESLDVKISDSWGETEVGFWLQQLPDVDIGLRAARTALRIMCGGREEKQLYSEDLITLGLNLFKNVIEGVIVPIAELRNSGSTADLFRLLTPHKKLIIAIFNSSQRLYSLMSDLITSIEVSETFSSSLEYLSSQLMFVENAYTEKDSVVGVIKFDGLRLVAMNMLSQIFLRSPAQREGILRELLSSLEKLPVGKQKARQFKLSEGGSIQPISALIMRLVQASAGKVDDSKDDQRSQVMDSIEGNGTPLANTNQANTHSPFTIRTETQAAIDNEIAVQELEGLSTPLFTGAWRHANYVIQYIIKRASTSTKTGDTPYRNLLDLFIEDFTTCFDSPDWPAAELLLQITMNMMFKQIDDKNSAPARNMALELLGVMAASISKLRSHVRKIANGFEGSSSDELGTWLTDLTLSALDDTLSQDRAFMWEGPYRIVLEFTQDRVAEDEHLRSATSYLVTDWASQACKAYDSPGDEDSDERNMEFGRIAFRLRNMIGDPKWLAREFRFKSVGHTHAKLSQAIILLRSQFCRNFKVVLNILMGSMTTDQATVRSRSLKSVNQILETDPTILDGDSVFVDLILRCSSDSSPQVRDTALGLIGKCMTMRPRLEERMTPTVIDRFLDAGVGVRKRAMKLAKEIYLGNEKKAVRSTIANGLLHRMQDPDEGVRDLAKQTIEEIWISPFYKDDDSVAFKQSLTDHVALIVQTAKQGTTALILDKVFQTILSPESKMCDANTRVCTKLVANMFDLLDNPDSDDPSMPAGKDALQVLMILAKADPKLFTFEQVKLLEPHIVSVGTSEDLAVSRAVVVIYRRVLPQVSSVHSQFLTTIRSSLLRATPKVTRSLLDYVVACVWIICGLLQSTEPVAALVCSSLVGVQKIRGVLAKGLEPTQIKMFERYSLIVGMIGKHCQLDSHADFIRSKIPTWKDGTVSKLMVDILCPFAQPNLPADVRRPALDAIGLVCQSNPRNFVAKNVIFVFEQVFKQQTVALESMVLRSFKEFLFTEEQRSDQSTAAAPKEKRDLKVMGSTSFDDVASATTQRFLTEITRISLATQDDHAHLAVEILASINRQGLVHPKETGVTWITLETCPITKISELAYREHKALHEKHESVLEREYAKAVQAAFQYQRDVVKDPRGATESPFTSKLHLLIEILKISKAKNRQRCLEKIVGQLQFEPFELDVSQSLPSQVAYSRFLVENIAFFEYVSIGDLQAIIAGLEKLVSSTGAGIAQTMESEIFQVRMDQEMIAEQLGAGDAAATAPLFPDSIDSQRLRRLISGSMILSAVWEARSYLRRLYGHSAKREVKGKGASKDLTKPPVKVQGVNGEKFWEDIATIMSALDTPERMMQQCKAFVDLMNVDSEVKIGAEDDDVDAEGDPLTPEAGDDDDEAAGDGRGRKRKAAGTPGGRGKKRARSNSRQPRGRGRPRKQQPEDDMDDDDGSWA

SEQ ID NO: 29974 - DNA, 6393 bp, Muscodor strobelii
  misc_feature: SGI EST ID NO. CUFF.70933.1
  misc_feature: Variant of the nucleotide sequence at SEQ ID NO 29972
taccagtcgcaactttcgagccgaatacagcttcaaacacctcgacgacacggcttctctatggcctttgacgacgagtcctgcccaattgcaagacagcatcaagtgcagcacggatgagccgctaatgcaagcacctgaagatacggatcgcacagcgttgctctagctgtgctcagaaccgtcttcgacacccctcgagatgacatcgtcggcagcatcgttgctctagaggaagaggtggaataattcgactcgctaccatggcgcatccgcaccaataccaccagaacggcatcccgcctcaatatgcgcagcgccaacagcaacagccgggccatgcgagcccggcggcggatgcgcgccaaggtcgcacgcggccgttctcgttggaagaggctctgccgtacacgcccttcacctcggtgtttcccttcaacccagacatcctcaacaaccccaccattgccgcgggctcgctggccccatcgctcgcacatcgtgtctctcgcgacgacttcgacgccctcaacaaggaagccgagaacccccaccagtccaagcgcctcgactccagccttgaatatgtctcccacttgctaagggccgagaagacaacccagtaccagttcaagacgccgcccaatacttcgttacccaccccaagttcgagtaaaagcatgaccaacggtctctctccctttacgaaactggttctggacagcgcctctcccgactttcgctacccatcagcctctaattcggccgaggcgaccccgacccatcgaccaaacatgcccgccgctcctaaaaagtcacccaaccagcgcaagtcagacgtccacaaggtggtcaagcataacccggcggcggtgaatgcccaggccgtcgcacgtaacaagtcgcgtatcgagatacatctgcccaccatcgctcaacgcaatgccgccgaggccttgcttgcggggaaagccccggccccgacgcctaccaagaccccgagccagccccagactgtttcgccggccgatttaatgatgccgacgaaagtgacacccgtccctccacctcagataccatccatacccacgacatcaccgactccggctgtaccacaagcctctccacagcagcctctagctccggaaccatctccagttgctctcaaagtcgagaaatcggacacgcccccgaaggctgtggtctctgcctcgcaggacccaccgccatcatcagcaacttcgtcttctcagaaggctaccgttgtcgttgagctatcaaacacaaatttcaacaaggaagagttcgctgtagtgccggattcccccgaggctccaacccatttgtccaccaggagggtggatggagactatgacgactcgctaaatgccgatctcaaccaccaggaaagagccaaaatcattttcgcggaccttaagagaagtctgctggaaatatttcacgccgaagagcaattctcatatcagcaaggaacctcctctcatctgatttatgcgacgccggaacaggagataacacttactccagctgcgcacgagcgcgctcagaaacagatcaaacgagcaatagatgcaggctgtttcggcagggccccggccgactctctccacaggatacaacgtctaagtgaaggctcactgaagtacgccgaatcgcttgatgttaagatcagcgattcctggggagagactgaagtcggcttctggctacaacaactccctgacgttgacatcggtcttagggctgctcgaacagctctccgcatcatgtgtggtggtcgggaggagaaacagctgtactcggaagatcttattaccctgggtcttaatctcttcaaaaacgttatagagggcgtcatcgtgcccattgcggagcttcgaaactctggctcaactgctgatctgtttcgcctccttactcctcacaagaaactcatcatcgccatcttcaattctagtcaacggctttactcgttaatgtctgatttaataacaagcatcgaagtctcggagactttcagcagctccctagaatacctctcatctcaactgatgttcgtggagaacgcctataccgagaaagactctgtggtcggagtcatcaagtttgatgggctccgcctcgtggcgatgaacatgctatcacagatatttctgcgaagtccggctcaacgagaaggcattctgcgtgagctcttatcgtcgctcgaaaagcttcctgtgggaaaacagaaggctaggcagttcaaactctctgaaggtggtagtatacagccaatttcagctttgatcatgcgattggtccaagccagcgccggcaaggtcgacgacagtaaggacgaccaacgatcccaggtcatggattctatcgaaggcaatggaacaccgctagccaataccaatcaagcgaatactcacagtcccttcactattcggacagagacacaggctgccattgacaatgagattgcggttcaggagcttgaaggtcttagcacgccgcttttcacgggcgcatggcgtcacgcaaactatgtcatccaatacatcatcaagcgagcttcgacatccaccaaaaccggcgatacaccgtacagaaatctgctcgacttattcatcgaagatttcacgacttgttttgattcgccagattggcccgccgctgagcttttgctccaaataaccatgaatatgatgttcaagcagatcgatgataagaactccgcccccgcaaggaacatggcacttgagctactgggtgtgatggctgcgtccatatcaaagctgaggtctcatgtccgtaaaattgcaaacgggtttgagggcagcagttctgatgagcttggtacttggctcactgatctaactctgtcagctctcgacgatactctatctcaggatagggcattcatgtgggaaggcccataccgtattgtccttgagttcacccaggatcgcgtggctgaagacgaacacctacggagtgccacatcgtatcttgttactgattgggcctcccaggcttgcaaagcatacgactcccctggcgatgaagactctgatgaacgtaatatggagtttggacgaattgcgtttcgtttgcggaacatgattggggacccaaagtggttggcgagagaattcagattcaagtcggtgggccatactcatgctaaactctctcaggcaatcattttgctacgatcacagttctgtcggaatttcaaggtcgtcttgaatatcctcatgggttccatgaccacggatcaagcaactgtccgcagccgcagcctcaaaagcgtcaaccaaatccttgagacggaccctactattctcgatggcgatagtgttttcgttgaccttatcctgcgttgctcgagcgattcgtccccacaagttcgtgacacggctcttgggttaatagggaagtgcatgactatgagacctagactggaagagaggatgacccccactgtcatcgatcgatttctcgatgctggcgtaggcgttcggaaacgagccatgaagcttgcaaaggagatataccttggcaacgaaaagaaagccgtgcggagcacgattgcgaacggcctactgcatcgaatgcaggatcccgatgagggcgtccgagatcttgcaaaacaaaccattgaagagatatggatctcgccattttataaagatgacgattcagtggcgtttaagcagtcactcacggatcatgtggctttgattgtccagacagcgaaacaaggcaccacagcactcatcctcgacaaggtctttcagaccattctatcgcccgagtccaaaatgtgcgatgccaacacccgcgtctgcacaaagctcgtcgccaacatgtttgacctactcgataatccggactctgatgacccttccatgcctgcaggcaaggatgcactgcaagtcttgatgattctagcaaaagcagacccgaagcttttcacgtttgagcaagtcaagcttctcgaacctcatatcgttagcgtgggcactagcgaagatcttgccgtctcaagagctgtggttgtcatttaccggcgggtattaccgcaggtctctagtgtccattcgcagttccttacgacaatacgcagctcactcctgcgtgcgactccaaaggtcactcgaagtcttctcgactatgttgttgcttgcgtctggatcatttgtggtcttcttcaatcaaccgagcctgtggccgctctcgtttgttccagtcttgttggcgtccaaaagatacgaggtgtcttggccaagggcttggaaccaacacagatcaagatgttcgagcgctactcactcattgtgggcatgattgggaagcactgccaacttgacagccacgcggatttcatcaggagcaagattccaacttggaaggatggtactgtctccaagctcatggtcgatatcctttgtcctttcgcacaacctaacttgcccgccgacgtgagacgacctgcattagatgcaatcggacttgtttgtcagtctaacccgaggaactttgttgctaaaaatgtgatcttcgtcttcgaacaggttttcaagcaacagacggtcgccctggagtcgatggtgttacggtctttcaaagagtttttgtttactgaagaacagagatccgaccagtcgacagccgctgcgccgaaagagaagagggatctcaaggtaatggggagtacgagttttgatgacgtggccagtgcgactactcagcgctttctgaccgagatcacacgcatttcgcttgccactcaagatgaccatgctcatcttgcggtcgaaatcctggccagcattaaccgacaaggccttgtccatccgaaagagacaggcgtcacctggatcactctagagacgtgtccaatcaccaaaatttcagagctagcgtatcgtgaacacaaggctcttcatgagaagcacgagagtgtgcttgagcgagaatatgctaaagcagttcaggcagcatttcagtatcaacgagatgtcgtgaaagatccccgtggagccactgagtccccattcacctcgaaacttcacctgcttatcgaaattctcaagattagcaaggccaagaaccgacagaggtgcttggaaaagatcgtgggacagcttcaattcgaacccttcgagcttgatgtcagtcaaagcctgccttcacaggtggcatattctcgcttcctggtcgaaaatatcgctttctttgagtatgtcagcatcggcgatctccaggcaataattgcaggcttggagaagctagtcagcagcaccggtgctggtattgcgcagacgatggagtctgagatctttcaagtgcgcatggaccaggagatgattgcggagcaacttggggccggcgatgcagctgctacagcaccccttttcccagactccattgatagccaaagacttcgccgcttaataagcggctcgatgattctgtccgctgtttgggaagcacgcagctatctcaggcgactatatgggcacagtgccaagcgcgaagtcaaggggaaaggcgcaagcaaggatctcaccaaaccaccggtcaaggttcaaggggttaacggcgaaaagttctgggaagatatcgctacaatcatgtccgcgctagacacgccagagcgcatgatgcagcagtgcaaggcattcgtagatctcatgaacgtggatagtgaggtgaagattggagctgaagacgacgatgttgatgctgaaggggatcctttaactccagaagcgggtgatgatgacgatgaagctgctggtgatggccgtggtcgcaagaggaaggcggctggaactcctggcggtcgtggcaagaaacgggcgcggagcaactcccgacaacctcgaggtcggggtcgaccgcgcaagcaacaacctgaggatgacatggatgacgacgatgggtcatgggcatagatgtttcttcaggcggatacagtataactttacaaaactgggctcgaggagtgccctttactagaagcgtggagatttctagaaagtagctggaatcgcaggagtcatggggttttcatctggattggcgttcatgtgcagaggatctgcgactggagttattatattttcccggggcaggtgggagcaatgttttcggcgacttacttgctttcgtttggggccggatgatacctcttctcgtttgctattgaacaccaggcgcgtggctagctatttcgcctggacccttagatttggtctgggtgtgtaataagatcttcttcctcttgccaaattggcgagattgtactgcatgtagtctttgatgggaatgtgtgtaattattgacttgtgtaaatgtggaataaatgtgcattgg

SEQ ID NO: 29975 - DNA, 768 bp, Muscodor strobelii
  misc_feature: SGI cDNA ID NO. 570302
  misc_feature: Encodes the peptide sequence at SEQ ID NO 29976
atgtcgcttaccaccaagcccctaattttcttcgtgccgggcgcctggcaagaccaaacatgttactcctacgtgcgcaaatcgctcgaagaccgcggcttcgagacagatgcttcggatctcgcaaccgtcggatccacagaccctaacgttgggctctatgacgatgcgcaaaaagtccgaaaagcactgttgagacacatcgacgccggaaaatctgttctagtagttgggcactcgttcggtggtttcgtgtcatcaaatgctgtttatgaattaggagtcgctcaacgtaagacagagggaaaagaaggtggtgtgctcatgctactattcctcgcctcaggattcgtagggaaaggtgaaagcatcacaggcgccttcggtggacacgtaccagagttcttcgacttaacggttcccggccaggtatccgtctttacgccagaggagatcttctatcactgtgtggcaccggagatcatcgcagccgcaatcgcctcactcaagcccatgccagagcgtactattactgatatcgctgagcatagcgcttgggaagagggcattacctgtggttatatcttcacttcacaggataaagcggttccttttgaagttcaaaaagggatatttgcaaagtatttgcctgaaggaacatggagtgctacgctcgactcaagtcatagtccgtatttgagtatgccagatcagttggctgataagattgtcgaggctgttgagtctgttcaagcgaagagtggttga

SEQ ID NO: 29976 - protein, 255 aa, Muscodor strobelii
  misc_feature: SGI Peptide ID NO. 570302
  misc_feature (3)..(254): NCBI GI: 46137141 Blast Desc: FG10086.1 [Gibberella zeae PH-1]
  misc_feature (4)..(248): NCBI GI: 256720361 Blast Desc: NECHADRAFT_56035 [Nectria haematococca mpVI 77-13-4]
  misc_feature (7)..(236): NCBI GI: 39962316 Blast Desc: MGG_09610 [Magnaporthe grisea 70-15] gi|149209091|ref|XP_001521920.1| MGCH7_ch7g38 [Magnaporthe grisea 70-15] gi|86195993|gb|EAQ70631.1| MGCH7_ch7g38 [Magnaporthe
  misc_feature (3)..(248): NCBI GI: 46115632 Blast Desc: FG03658.1 [Gibberella zeae PH-1]
  misc_feature (9)..(254): NCBI GI: 145242936 Blast Desc: An11g00150 [Aspergillus niger] gi|134078686|emb|CAK48248.1| protein product [Aspergillus niger]
  misc_feature (3)..(255): NCBI GI: 255939366 Blast Desc: Pc16g00290 [Penicillium chrysogenum Wisconsin 54-1255] gi|211585075|emb|CAP92699.1| Pc16g00290 [Penicillium chrysogenum Wisconsin 54-1255]
  misc_feature (2)..(250): NCBI GI: 119182859 Blast Desc: CIMG_06428 [Coccidioides immitis RS]
  misc_feature (9)..(246): NCBI GI: 145251583 Blast Desc: An15g07840 [Aspergillus niger] gi|134082840|emb|CAK42671.1| protein product [Aspergillus niger]
  misc_feature (6)..(255): NCBI GI: 259487984 Blast Desc: TPA: conserved [Aspergillus nidulans FGSC A4]
  misc_feature (3)..(245): NCBI GI: 145235585 Blast Desc: An03g05620 [Aspergillus niger] gi|134058128|emb|CAK38322.1| protein product [Aspergillus niger]
MSLTTKPLIFFVPGAWQDQTCYSYVRKSLEDRGFETDASDLATVGSTDPNVGLYDDAQKVRKALLRHIDAGKSVLVVGHSFGGFVSSNAVYELGVAQRKTEGKEGGVLMLLFLASGFVGKGESITGAFGGHVPEFFDLTVPGQVSVFTPEEIFYHCVAPEIIAAAIASLKPMPERTITDIAEHSAWEEGITCGYIFTSQDKAVPFEVQKGIFAKYLPEGTWSATLDSSHSPYLSMPDQLADKIVEAVESVQAKSG

SEQ ID NO: 29977 - DNA, 1212 bp, Muscodor strobelii
  misc_feature: SGI cDNA ID NO. 570303
  misc_feature: Encodes the peptide sequence at SEQ ID NO 29978
atgaagaccgttctcgccgcactcctcagttccataccgagcgctgctgccgctgcagtggcaacgcctgatgccgtgttcaaagcgattccggacgtagcaacaaagcttaaggtagacacgatcaccgcaaaggctattgctagcttcgaggacaatcttgcaaagactccatcgcctggatgtagtgcagccgatgttgtcgctcgtcgagagtttgttagcggttcgttgtctaaagccgagagactagactatattaaagccgtgcaatgtttaattgctcttcccgcgaagacccccgcaagcattgcgcctggcgcaaagacccgatttgatgatttcatcgcggcacactctcaacggacgcggacaatccacttcacaggtaacttcttggcctggcatagatggttcgtctggaattatgagaatgcccttcgcacagagtgtggatatgaaggctatcaaccatactgggattggcctaagtatgcttcggcacctcagaattcgcccatattcaacggagacgagtacagcttaagtggaaacggcgattatgtcccacacaacggcactgctatcttacccgccggccttgggggtggctacgttacgaccggtccgttcgctaatatgatcaccaatctcggcccagagaccagcctagcgtacaacccgcgaccattcaagagggatgttggacctgctgtagcaactcgatataccaactatacttcgattcttgacctactatcaatgcctgatttggacactttcacgatttttctacaggggtcgggtgatgaacaaggacctcacgggggcggacattttacgatcaagtacgtttctctcctatttaccgaagcttcggaaaccctatctattcacaaagatgctcacccgattcggtcatgtagcggtgaccctagcggtgacgtctatatctcaccaggcgatccagccttttggcttcatcacgcccaagttgatcgatcctgggcattatggcaggcacttgatccagaagagcgacaacttgctctcggctctgggctgtactctcacgttacttggcaaaacgaccccgagtctgagttgacatcgcttgatgatgtgctcgacttgggatacgctggaccctccgtcactgtcagggagatgatgaacactacaaatattaatatgtgctacttctactactaa

SEQ ID NO: 29978 - protein, 403 aa, Muscodor strobelii
  misc_feature: SGI Peptide ID NO. 570303
  misc_feature (42)..(384): Pfam Id: PF00264 Pfam Desc: Common central domain of tyrosinase
  misc_feature (314)..(342): Pfam Id: PF00264 Pfam Desc: Common central domain of tyrosinase
  misc_feature (39)..(402): NCBI GI: 261353312 Blast Desc: conserved [Verticillium albo-atrum VaMs.102]
  misc_feature (59)..(402): NCBI GI: 171676702 Blast Desc: protein product [Podospora anserina] gi|170936418|emb|CAP61075.1| protein product [Podospora anserina]
  misc_feature (11)..(402): NCBI GI: 39972235 Blast Desc: MGG_07419 [Magnaporthe grisea 70-15] gi|145016597|gb|EDK01027.1| MGG_07419 [Magnaporthe grisea 70-15]
  misc_feature (59)..(378): NCBI GI: 116194886 Blast Desc: CHGG_04041 [Chaetomium globosum CBS 148.51] gi|88179954|gb|EAQ87422.1| CHGG_04041 [Chaetomium globosum CBS 148.51]
  misc_feature (40)..(400): NCBI GI: 164423623 Blast Desc: NCU11382 [Neurospora crassa OR74A] gi|157070171|gb|EDO64979.1| conserved [Neurospora crassa OR74A]
  misc_feature (22)..(402): NCBI GI: 119185216 Blast Desc: CIMG_07314 [Coccidioides immitis RS]
  misc_feature (15)..(402): NCBI GI: 258564688 Blast Desc: conserved [Uncinocarpus reesii 1704] gi|237908596|gb|EEP82997.1| conserved [Uncinocarpus reesii 1704]
  misc_feature (9)..(402): NCBI GI: 171689858 Blast Desc: protein product [Podospora anserina] gi|170944891|emb|CAP71002.1| protein product [Podospora anserina]
  misc_feature (62)..(402): NCBI GI: 67538282 Blast Desc: AN5311.2 [Aspergillus nidulans FGSC A4] gi|40743281|gb|EAA62471.1| AN5311.2 [Aspergillus nidulans FGSC A4] gi|259485249|tpe|CBF82122.1| TPA: tyrosinase, AFUA_3G01070)
  misc_feature (6)..(402): NCBI GI: 256728532 Blast Desc: NECHADRAFT_85924 [Nectria haematococca mpVI 77-13-4]
  misc_feature (103)..(340): SWISSPROT Homolog: EC 1.14.18.1 Monophenol monooxygenase
MKTVLAALLSSIPSAAAAAVATPDAVFKAIPDVATKLKVDTITAKAIASFEDNLAKTPSPGCSAADVVARREFVSGSLSKAERLDYIKAVQCLIALPAKTPASIAPGAKTRFDDFIAAHSQRTRTIHFTGNFLAWHRWFVWNYENALRTECGYEGYQPYWDWPKYASAPQNSPIFNGDEYSLSGNGDYVPHNGTAILPAGLGGGYVTTGPFANMITNLGPETSLAYNPRPFKRDVGPAVATRYTNYTSILDLLSMPDLDTFTIFLQGSGDEQGPHGGGHFTIKYVSLLFTEASETLSIHKDAHPIRSCSGDPSGDVYISPGDPAFWLHHAQVDRSWALWQALDPEERQLALGSGLYSHVTWQNDPESELTSLDDVLDLGYAGPSVTVREMMNTTNINMCYFYY

SEQ ID NO: 29979 - DNA, 909 bp, Muscodor strobelii
  misc_feature: SGI cDNA ID NO. 570304
  misc_feature: Encodes the peptide sequence at SEQ ID NO 29980
atgtcagtgccgtccgcatccaatcctcgtcctctcacctggctcgtcacagggtgcagtagtggaatcgggctcgcgctggctcgccacgttctctcctccggggataatctcatcgccagttcacgaaatccgagtaagacgccgtctcttgtctcggaaatcacaagctttccaggtggtaaggggcgttggatcacacttgattctttcccgggcggaatcgatgtcctcgttaacaacgccggattttctgtcttgggttccgtcgaagatgtggacgaggaaatcgcaaaggcgcagttcgagacgaatttctggggtgtaaatagaacatgcaaggccatgctgccccacatgagagagcgcgggacacgtggaagaaagaagagcacgatagtcaacatgagtagtcttctaggagtgacgacgttccccggcgtgggaatgtatgctgcgagtaaatgggcactagaggggatgtcgcaggctttggcgcaggaggttgctgtctttggcatacgtgtactcattgctgagtttggagcttttcggactagttttttgagctcttcttcagcaggagggggaatgcgcgagtttccgccgtcgtcaccgtacatgaaacctcatgttgtgggattggcgcttgaggcagaacatgaaaaagacgggaatcaggaaggagatccggagaaaggcgcaaaggttctttatgatactattgtggctggtttcgaggaagagaaagccgatgttgggaaagatgggctcggttctgtcctgagagtgccaattggtgccgatgcatgggaaataggctggcgccagtttgaacagaatagacgcgatcatgagattacaagaggtgtagctaggtacaaaaatggtagagaatatgcgggttaa

SEQ ID NO: 29980 - protein, 302 aa, Muscodor strobelii
  misc_feature: SGI Peptide ID NO. 570304
  misc_feature (12)..(170): Pfam Id: PF00106 Pfam Desc: short chain dehydrogenase
  misc_feature (73)..(170): Pfam Id: PF00106 Pfam Desc: short chain dehydrogenase
  misc_feature (12)..(56): Pfam Id: PF00106 Pfam Desc: short chain dehydrogenase
  misc_feature (11)..(292): NCBI GI: 70990156 Blast Desc: short chain oxidoreductase/dehydrogenase [Aspergillus fumigatus Af293] gi|66847559|gb|EAL87889.1| short chain oxidoreductase/dehydrogenase, [Aspergillus fumigatus Af293]
  misc_feature (11)..(284): NCBI GI: 159130409 Blast Desc: short chain oxidoreductase/dehydrogenase, [Aspergillus fumigatus A1163]
  misc_feature (12)..(210): NCBI GI: 169613565 Blast Desc: SNOG_09913 [Phaeosphaeria nodorum SN15] gi|160707189|gb|EAT82248.2| SNOG_09913 [Phaeosphaeria nodorum SN15]
  misc_feature (10)..(293): NCBI GI: 145233649 Blast Desc: An02g10680 [Aspergillus niger] gi|134057129|emb|CAK44417.1| protein product [Aspergillus niger]
  misc_feature (13)..(284): NCBI GI: 121703399 Blast Desc: short chain oxidoreductase/dehydrogenase, [Aspergillus clavatus NRRL 1] gi|119398107|gb|EAW08538.1| short chain oxidoreductase/dehydrogenase, [Aspergillus clavatus NRRL 1]
  misc_feature (11)..(284): NCBI GI: 119497429 Blast Desc: short chain oxidoreductase/dehydrogenase, [Neosartorya fischeri NRRL 181] gi|119413635|gb|EAW23576.1| short chain oxidoreductase/dehydrogenase, [Neosartorya fischeri NRRL 181]
  misc_feature (12)..(270): NCBI GI: 115387054 Blast Desc: ATEG_07382 [Aspergillus terreus NIH2624] gi|114191066|gb|EAU32766.1| ATEG_07382 [Aspergillus terreus NIH2624]
  misc_feature (12)..(296): NCBI GI: 242800438 Blast Desc: short chain oxidoreductase/dehydrogenase, [Talaromyces stipitatus ATCC 10500] gi|218716933|gb|EED16354.1| short chain oxidoreductase/dehydrogenase, [Talaromyces stipitatus ATCC 10500]
  misc_feature (13)..(292): NCBI GI: 67523875 Blast Desc: AN2393.2 [Aspergillus nidulans FGSC A4] gi|40745348|gb|EAA64504.1| AN2393.2 [Aspergillus nidulans FGSC A4] gi|259487797|tpe|CBF86753.1| TPA: short chain AFUA_1G01770)
  misc_feature (13)..(272): NCBI GI: 212530208 Blast Desc: short chain oxidoreductase/dehydrogenase, [Penicillium marneffei ATCC 18224] gi|210074659|gb|EEA28746.1| short chain oxidoreductase/dehydrogenase, [Penicillium marneffei ATCC 18224]
  misc_feature (15)..(184): SWISSPROT Homolog: EC 1.1.1.30 3-hydroxybutyrate dehydrogenase
MSVPSASNPRPLTWLVTGCSSGIGLALARHVLSSGDNLIASSRNPSKTPSLVSEITSFPGGKGRWITLDSFPGGIDVLVNNAGFSVLGSVEDVDEEIAKAQFETNFWGVNRTCKAMLPHMRERGTRGRKKSTIVNMSSLLGVTTFPGVGMYAASKWALEGMSQALAQEVAVFGIRVLIAEFGAFRTSFLSSSSAGGGMREFPPSSPYMKPHVVGLALEAEHEKDGNQEGDPEKGAKVLYDTIVAGFEEEKADVGKDGLGSVLRVPIGADAWEIGWRQFEQNRRDHEITRGVARYKNGREYAG

SEQ ID NO: 29981 - DNA, 480 bp, Muscodor strobelii
  misc_feature: SGI cDNA ID NO. 570305
  misc_feature: Encodes the peptide sequence at SEQ ID NO 29982
atgaataaagtgatcaaccatgggctcgggctacacatatgggctgcgcctagagatgcgactaaggcgtgggctattgggcttttcataagcatcatcgcctattccattggcttgacgacagtgaagctttctacgctatatttctactggcgcattttctcagccaagccctctttcaagatccaaattctagtcttagcggggattatgatatgctgggcaatagctacgattctcgttgatattttccaatgcgttccactccacgcaacatggcaacgcttcgacccagatcatcctatcagggtctatgattgccctatcgatgggctagccttcttctggggtagcgcaatcccgaatatcatcacagatgcctgggtcgtcctgttgccgttgccttacgtctacagccttcaattacgcttgccccagaagatagcggcagctggtgttttcctgctaggtttcttgtga

SEQ ID NO: 29982 - protein, 159 aa, Muscodor strobelii
  misc_feature: SGI Peptide ID NO. 570305
  misc_feature (4)..(157): NCBI GI: 145605202 Blast Desc: MGG_02160 [Magnaporthe grisea 70-15] gi|145013050|gb|EDJ97691.1| MGG_02160 [Magnaporthe grisea 70-15]
  misc_feature (7)..(157): NCBI GI: 159127132 Blast Desc: integral membrane protein, [Aspergillus fumigatus A1163]
  misc_feature (5)..(157): NCBI GI: 146323527 Blast Desc: integral membrane protein [Aspergillus fumigatus Af293] gi|129558246|gb|EAL92076.2| integral membrane protein, [Aspergillus fumigatus Af293]
  misc_feature (1)..(159): NCBI GI: 169626164 Blast Desc: SNOG_16361 [Phaeosphaeria nodorum SN15] gi|160705778|gb|EAT76347.2| SNOG_16361 [Phaeosphaeria nodorum SN15]
  misc_feature (7)..(159): NCBI GI: 119489954 Blast Desc: NFIA_061980 [Neosartorya fischeri NRRL 181] gi|119411094|gb|EAW21037.1| conserved [Neosartorya fischeri NRRL 181]
  misc_feature (7)..(157): NCBI GI: 121712242 Blast Desc: conserved [Aspergillus clavatus NRRL 1] gi|119401888|gb|EAW12310.1| conserved [Aspergillus clavatus NRRL 1]
  misc_feature (26)..(157): NCBI GI: 238839092 Blast Desc: conserved [Microsporum canis CBS 113480]
  misc_feature (34)..(159): NCBI GI: 256728302 Blast Desc: NECHADRAFT_54313 [Nectria haematococca mpVI 77-13-4]
  misc_feature (5)..(157): NCBI GI: 154301240 Blast Desc: [Botryotinia fuckeliana B05.10] gi|150856191|gb|EDN31383.1| [Botryotinia fuckeliana B05.10]
  misc_feature (25)..(159): NCBI GI: 256720423 Blast Desc: NECHADRAFT_98298 [Nectria haematococca mpVI 77-13-4]
MNKVINHGLGLHIWAAPRDATKAWAIGLFISIIAYSIGLTTVKLSTLYFYWRIFSAKPSFKIQILVLAGIMICWAIATILVDIFQCVPLHATWQRFDPDHPIRVYDCPIDGLAFFWGSAIPNIITDAWVVLLPLPYVYSLQLRLPQKIAAAGVFLLGFL

SEQ ID NO: 29983 - DNA, 302 bp, Muscodor strobelii
  misc_feature: SGI EST ID NO. CUFF.70888.0
  misc_feature: Variant of the nucleotide sequence at SEQ ID NO 29981
ctttcaagatccaaattctagtcttagcggggattatgatatgctgggcaatagctacgattctcgttgatattttccaatgcgttccactccacgcaacatggcaacgcttcgacccagatcatcctatcagggtctatgattgccctatcgatgggctagccttcttctggggtagcgcaatcccgaatatcatcacagatgcctgggtcgtcctgttgccgttgccttacgtctacagccttcaattacgcttgccccagaagatagcggcagctggtgttttcctgctaggtttcttg

SEQ ID NO: 29984 - DNA, 276 bp, Muscodor strobelii
  misc_feature: SGI cDNA ID NO. 570306
  misc_feature: Elevated expression when VOC is produced
  misc_feature: Encodes the peptide sequence at SEQ ID NO 29985
atgactgttagaatcattgctgcggctctgatcgtcgcctgctacgatatccacttgtccgagcatcacgacaactactacttcatcatgtccagggttcacaaccgcatcaacagctacttgtacgacatcatgcaccggctccactactggctccggcactggttcgagcacaagcaccgccacttatactggcacgactacgcccgccacaacgaccatgaatatcagcccgacatccagcaccacgagtcttgccagcagcactacagctag

SEQ ID NO: 29985 - protein, 91 aa, Muscodor strobelii
  misc_feature: SGI Peptide ID NO. 570306
  misc_feature: Useful for introducing or modulating the production of volatile compounds
MTVRIIAAALIVACYDIHLSEHHDNYYFIMSRVHNRINSYLYDIMHRLHYWLRHWFEHKHRHLYWHDYARHNDHEYQPDIQHHESCQQHYS

SEQ ID NO: 29986 - DNA, 592 bp, Muscodor strobelii
  misc_feature: SGI EST ID NO. CUFF.70900.0
  misc_feature: Variant of the nucleotide sequence at SEQ ID NO 29984
cgccaatccgaaagtgacaccggagcacttgcggcagggactcgccgtttggcagccaagaaaacatacttagaggttgccgtgtgcgcgctatttaccagtgacatgaggctgaaccaatccgagatcagcaattatcaaggactattgttaatgggcagtctatctttacgattcaatgcagcatgataggtcatgttagggttggattcaccctcggtagtgacggtattcacattgaaaacctgctcacgaattcaacccgcttgttgattccggaccgagttcagtccagataataatgccattatgcttgataaatcgggttgagacaataatcgattgagatcccgatgtttgataatgactgttagaatcattgctgcggctctgatcgtcgcctgctgtcagagattgttcgaccctttcgtcttgtccaacatatagcacaagcacgacgacgtcagctacgatatccacttgtccgagcatcacgacaactactacttcatcatgtccagggttcacaaccgcatcaacagctacttgtacgacatcatgcaccggctccactactggctccggcactggt

SEQ ID NO: 29987 - DNA, 2241 bp, Muscodor strobelii
  misc_feature: SGI cDNA ID NO. 570307
  misc_feature: Elevated expression when VOC is produced
  misc_feature: Encodes the peptide sequence at SEQ ID NO 29988
atggcgtctcagcagctcaacgccgctggaaacccgcccatcatcacctttggcatgccgtctctgaccgtgccaaccaccacgctcaatgagacattcatccaaagaactcctcaccaggctgatccattccggggattactagcagaagacaggtttttgagagaagtcaagggatgcgaccaaaaagaactctatcggtttgactgtctcaacacggttgacacagctggcgacacactcgtcatagttcggtttcccaacagcacacataagtatgtcaactgttgtaacgaacggtggactacaagagaattctttttcgaatctcacaaactattagcaacaggatccaccgtgttcaagaaacttctctcacctaaggctcaagctcaagcccgacgcaacaatgacagccaccctgatctggtagccaaagtcaagttcatattagatctgacgccgaaatctgaggaaattgaagcggcccagctggtcattgatttatcgctctcgcagggtgttagggattggtggctatcccatgatatcgccggcgcacctgactggcttgtgtctggacacgacgatgactgccccagccatgacacgatccccaccgcttgccctcacttggtagaggattttaatgggaaactcagtgctcgcaacgccgtcgacgaatttgaccctcctctgtcccgtacaatctcggattattgcccgattcgccaccgagctgcgattctgcgtctgcttcttgtcattaaagacggagaactagtactgaactccgctccgcgagtggctactatggcagtgatcgcaaaacactttgactgtatcaatgttgtgcaaaatcaagttctccaatggttcttggcagaaggaaatcccaactacaacaatgttgactttattgatgtcaatgctgaggataccttgaatattgggtggctcttggaaataccatccctgactcggactgcctttcgtctacttgtagccgaaaaggctgtcaatattctcgccaagggcgtgaaaggagagttcagcgaaaggccgccaatcaagctgagatgtccccgaggcactcttacagaggaacagcagacctgtatcgaacatgccggtcgcaagcttgcagaaagaactgcatctctgtggagcgatcttacatctacatcttctgatactcataagatattctgccctgcggggcctgcggggtgggaagcaaatctaatggatcctaatgaaaacatacttcgcgggcgtattagggattctattgcaaagatggtattcacggctttgagtgcacccacggcagatcaatttgccgccaaggacacaataacacaactctataccacctactcgcaatttgtgtcgtcgagcacaatagacgcccaactgcttccggtccaacgtgttctgacgaaatcattttgggatacgctccgcgactggaatctgccgactttatttaatgagagactgatcgcagactcgggccttccaggagtagcgctgcatgaatggcccgacgtacattggaggtccgcaatgctggcgctcccagaccaattcggaaaagaaatccgtactttggcaagatcttgggctgttccggatatcgaattgccacttcggggcaatcgtctatttgtacttggtcttagtgacgaggagtttaatttccttcccccatgggctggaggtttgaatgacgactctgctcacatattcaaccccgaggtaccacctgcggaattcgactttcttacctcaccgggcccgagtatctacattgggcagccattggagggttacgacgatgacggacaaagtaccatcggaccagataccgctgtaacaggaactgggacaattactaatgggttttccattcgcccagctgtttcagacaccttatccgattttagcgatcatccaatgaccgattatagctcaacttatactatcgatccgcccattcttctatcggaagaacctccaattactcagagacagaatgttgtgacagaggatatggatatggatctgctctattataccgacgaggagaacgaatgggatgattcagatgaccagggggcgcctaccccagcaacgaagcttcgattgattcaggaagtgtcgcccaaggggggcaaacatcggacctcccaatccgatcacgtcattggcactcacttggttgcgcctaggctatga

SEQ ID NO: 29988 - protein, 746 aa, Muscodor strobelii
  misc_feature: SGI Peptide ID NO. 570307
  misc_feature (47)..(388): NCBI GI: 46136567 Blast Desc: FG09799.1 [Gibberella zeae PH-1]
  misc_feature (73)..(602): NCBI GI: 116196266 Blast Desc: CHGG_04731 [Chaetomium globosum CBS 148.51] gi|88180644|gb|EAQ88112.1| CHGG_04731 [Chaetomium globosum CBS 148.51]
  misc_feature (66)..(606): NCBI GI: 164423557 Blast Desc: NCU08281 [Neurospora crassa OR74A] gi|157070145|gb|EAA32571.2| [Neurospora crassa OR74A]
  misc_feature (78)..(392): NCBI GI: 154301564 Blast Desc: BC1G_10109 [Botryotinia fuckeliana B05.10] gi|150855771|gb|EDN30963.1| BC1G_10109 [Botryotinia fuckeliana B05.10]
  misc_feature (64)..(388): NCBI GI: 256726975 Blast Desc: NECHADRAFT_21139 [Nectria haematococca mpVI 77-13-4]
  misc_feature (61)..(607): NCBI GI: 145613554 Blast Desc: MGG_11188 [Magnaporthe grisea 70-15] gi|145020617|gb|EDK04746.1| MGG_11188 [Magnaporthe grisea 70-15]
  misc_feature (78)..(341): NCBI GI: 261352327 Blast Desc: conserved [Verticillium albo-atrum VaMs.102]
  misc_feature (9)..(621): NCBI GI: 171690374 Blast Desc: protein product [Podospora anserina] gi|170945135|emb|CAP71246.1| protein product [Podospora anserina]
  misc_feature (233)..(392): NCBI GI: 156032692 Blast Desc: SS1G_13751 [Sclerotinia sclerotiorum 1980] gi|154699154|gb|EDN98892.1| SS1G_13751 [Sclerotinia sclerotiorum 1980]
  misc_feature (107)..(489): NCBI GI: 145240431 Blast Desc: An08g07465 [Aspergillus niger] gi|134077380|emb|CAK39994.1| protein product [Aspergillus niger]
  misc_feature: Useful for introducing or modulating the production of volatile compounds
MASQQLNAAGNPPIITFGMPSLTVPTTTLNETFIQRTPHQADPFRGLLAEDRFLREVKGCDQKELYRFDCLNTVDTAGDTLVIVRFPNSTHKYVNCCNERWTTREFFFESHKLLATGSTVFKKLLSPKAQAQARRNNDSHPDLVAKVKFILDLTPKSEEIEAAQLVIDLSLSQGVRDWWLSHDIAGAPDWLVSGHDDDCPSHDTIPTACPHLVEDFNGKLSARNAVDEFDPPLSRTISDYCPIRHRAAILRLLLVIKDGELVLNSAPRVATMAVIAKHFDCINVVQNQVLQWFLAEGNPNYNNVDFIDVNAEDTLNIGWLLEIPSLTRTAFRLLVAEKAVNILAKGVKGEFSERPPIKLRCPRGTLTEEQQTCIEHAGRKLAERTASLWSDLTSTSSDTHKIFCPAGPAGWEANLMDPNENILRGRIRDSIAKMVFTALSAPTADQFAAKDTITQLYTTYSQFVSSSTIDAQLLPVQRVLTKSFWDTLRDWNLPTLFNERLIADSGLPGVALHEWPDVHWRSAMLALPDQFGKEIRTLARSWAVPDIELPLRGNRLFVLGLSDEEFNFLPPWAGGLNDDSAHIFNPEVPPAEFDFLTSPGPSIYIGQPLEGYDDDGQSTIGPDTAVTGTGTITNGFSIRPAVSDTLSDFSDHPMTDYSSTYTIDPPILLSEEPPITQRQNVVTEDMDMDLLYYTDEENEWDDSDDQGAPTPATKLRLIQEVSPKGGKHRTSQSDHVIGTHLVAPRL

SEQ ID NO: 29989 - DNA, 3309 bp, Muscodor strobelii
  misc_feature: SGI EST ID NO. CUFF.70909.0
  misc_feature: Variant of the nucleotide sequence at SEQ ID NO 29987
tttctttccagcgaacaacaaagtacatgtgtatattgcgagttgtcaattcagtagcttgtagcttataaatacaaggccatgacagagaacactgtgaagcttcgacttgttgggccaatagccagtcatataacttattcagagcccccttgacctcagcctcagacctagtcactctagatcactattaagtaccagcactgaaagcactaaatgttgtctggtgggcgtcaaactattggttgctgtagccatcaagaccccaaagtggagtcctcatcttgttgtcgcctaatgcaccaagttgatgttttgacacgaggcgcacaaggctcatcctatctacactctgttctcgtcttcattttcgcatgatcagtctcattctcatcgccgcacaagacactccccacccaccagcaggaaagcattggtactgatttaagggctcaattctgaaagtaacttgccctcctggctgacgcccctcgtgccttccaacactgccgaaggtacaagcccataatggcgtctcagcagctcaacgccgctggaaacccgcccatcatcacctttggcatgccgtctctgaccgtgccaaccaccacgctcaatgagacattcatccaaagaactcctcaccaggctgatccattccggggattactagcagaagacaggtttttgagagaagtcaagggatgcgaccaaaaagaactctatcggtttgactgtctcaacacggttgacacagctggcgacacactcgtcatagttcggtttcccaacagcacacataagtatgtcaactgttgtaacgaacggtggactacaagagaattctttttcgaatctcacaaactattagcaacaggatccaccgtgttcaagaaacttctctcacctaaggctcaagctcaagcccgacgcaacaatgacagccaccctgatctggtagccaaagtcaagttcatattagatctgacgccgaaatctgaggaaattgaagcggcccagctggtcattgatttatcgctctcgcagggtgttagggattggtggctatcccatgatatcgccggcgcacctgactggcttgtgtctggacacgacgatgactgccccagccatgacacgatccccaccgcttgccctcacttggtagaggattttaatgggaaactcagtgctcgcaacgccgtcgacgaatttgaccctcctctgtcccgtacaatctcggattattgcccgattcgccaccgagctgcgattctgcgtctgcttcttgtcattaaagacggagaactagtactgaactccgctccgcgagtggctactatggcagtgatcgcaaaacactttgactgtatcaatgttgtgcaaaatcaagttctccaatggttcttggcagaaggaaatcccaactacaacaatgttgactttattgatgtcaatgctgaggataccttgaatattgggtggctcttggaaataccatccctgactcggactgcctttcgtctacttgtagccgaaaaggctgtcaatattctcgccaagggcgtgaaaggagagttcagcgaaaggccgccaatcaagctgagatgtccccgaggcactcttacagaggaacagcagacctgtatcgaacatgccggtcgcaagcttgcagaaagaactgcatctctgtggagcgatcttacatctacatcttctgatactcataagatattctgccctgcggggcctgcggggtgggaagcaaatctaatggatcctaatgaaaacatacttcgcgggcgtattagggattctattgcaaagatggtattcacggctttgagtgcacccacggcagatcaatttgccgccaaggacacaataacacaactctataccacctactcgcaatttgtgtcgtcgagcacaatagacgcccaactgcttccggtccaacgtgttctgacgaaatcattttgggatacgctccgcgactggaatctgccgactttatttaatgagagactgatcgcagactcgggccttccaggagtagcgctgcatgaatggcccgacgtacattggaggtccgcaatgctggcgctcccagaccaattcggaaaagaaatccgtactttggcaagatcttgggctgttccggatatcgaattgccacttcggggcaatcgtctatttgtacttggtcttagtgacgaggagtttaatttccttcccccatgggctggaggtttgaatgacgactctgctcacatattcaaccccgaggtaccacctgcggaattcgactttcttacctcaccgggcccgagtatctacattgggcagccattggagggttacgacgatgacggacaaagtaccatcggaccagataccgctgtaacaggaactgggacaattactaatgggttttccattcgcccagctgtttcagacaccttatccgattttagcgatcatccaatgaccgattatagctcaacttatactatcgatccgcccattcttctatcggaagaacctccaattactcagagacagaatgttgtgacagaggatatggatatggatctgctctattataccgacgaggagaacgaatgggatgattcagatgaccagggggcgcctaccccagcaacgaagcttcgattgattcaggaagtgtcgcccaaggggggcaaacatcggacctcccaatccgatcacgtcattggcactcacttggttgcgcctaggctatgagctgcacctagtgctctcttcgcatgcctttggttactacccaagcccttgcgaaaagggactttaggtatatgtcgtatttcaacccttcacgactttggcctcgcctttaaataccccatgaaaatctacttatgttctgagctggctcctttgtcttgtcactcactatatgaagtggtttctacattggcacatccatatgagacacggaaatggagaaaaggctctaattgattgtcactggtcgatggtacattgcgatatacggaggaaaaggtggtaatgacagttaaaaggcaaacaaatatcccggttggcaactgtaacagtgcatgcagatgttggttgctaagccgatttcgcggtgcctctcaggaatgtccatagtgataccgagactagtaggggagtctcatcaagctcttaccaaaactcataagagttagacttgttgactgtcaacctcatgtacttctatcagttgtttgattccagtaaaggtgcaactttgtgtgaagtagccgaatactcctgccg

SEQ ID NO: 29990 - DNA, 204 bp, Muscodor strobelii
  misc_feature: SGI cDNA ID NO. 570308
  misc_feature: Reduced expression when VOC is produced
  misc_feature: Encodes the peptide sequence at SEQ ID NO 29991
atgaacaacactagaacgactgggctttcctctacccgcccaactatgctacgttcccgccccctcctcctagcctccgtcctcgcaacaggcatcgcgatcgccggcatacgatacaatcgagcgcagaacgagcgagcccagcgagacggtgcgacgggcaactactacgtcagcgttgagcgaagcggtggcggaatttga

SEQ ID NO: 29991 - protein, 67 aa, Muscodor strobelii
  misc_feature: SGI Peptide ID NO. 570308
  misc_feature: Useful for introducing or modulating the production of volatile compounds
MNNTRTTGLSSTRPTMLRSRPLLLASVLATGIAIAGIRYNRAQNERAQRDGATGNYYVSVERSGGGI

SEQ ID NO: 29992 - DNA, 1167 bp, Muscodor strobelii
  misc_feature: SGI EST ID NO. CUFF.70917.0
  misc_feature: Variant of the nucleotide sequence at SEQ ID NO 29990
cggggagatgggaaagagacgggagtctagatcccagacaccgctagcgcaaacacattaaactggagaagaggtcgaataacaggatcatggtgtatgggatttggtaaaccaatgccatccattaccaaatcctggacatccgacctagctagggtttcctagcctatccgtgtgctcccgatatatcttcgcctcttccctccctcactcgatctgatcttgatcttgtttgatttttatcttgatctctattcgcttttgcctcttgaggtcatcctgctgctcgctgcttcacagcttctccaaaccttattattacacattcaacgtcagcttatagtctcttcgcaccacctatatagtcaatcaaatattgtctctatactgccgtctatccgcctttcgagtctcaaaactagttgttgccgtccgcttagtgctagccagacaccagaagcaacaaatcacaaaatttaaagggaatccggcacatttgcgcattcaggaaagaaagaaaaggccacaatgaacaacactagaacgactgggctttcctctacccgcccaactatgctacgttcccgccccctcctcctagcctccgtcctcgcaacaggcatcgcgatcgccggcatacgatacaatcgagcgcagaacgagcgagcccagcgagacggtgcgacgggcaactactacgtcagcgttgagcgaagcggtggcggaatttgagcccctctaaccacgacaaacccctaattatttacaagaaagaaaacgacgactatagcaaatgagggcagaataagcaggaggcctaaggtatagagggacatgggggaaataacgaggaagattgatacccagggtcttcaagacgaagtattgatgccgacttaatcagtcggatagattgcaccagtatacaaggcattacaaaggggcgcacatgagattatatttatggtactcgagtctggtaggttataagcaagatcgtttgcttatcccagacagcaaaagcagcgtctgtactcgacttccggaggtcggtcgctgatctgggtttatcaagctccattgagcatcgcgtaattacggtaatagaaatggtttcggcagacttgcggcaatcaaaacataataatagcctggtttactaccacg

SEQ ID NO: 29993 - DNA, 3519 bp, Muscodor strobelii
  misc_feature: SGI cDNA ID NO. 570309
  misc_feature: Encodes the peptide sequence at SEQ ID NO 29994
atgattcccacagccaaggacacgctctcctcgctgctgcggatcgacaagcatgcccctcgccgcatcgactcgcgactcttcaaccactccaacccgcagacgccctctcccggcgctgtcacgcagactgaatatcggcagcagcgacatgccaccgccgacttcaccgagaacgacgacgacgatgacgacgacgaagatgaggaacagcggttcgatcccaaccagccctcggtgcgttttgccgaccagggcgaggggcgcaggaactcgggcagcctcttgcctctattttctgccagtcatctagactctttgcccgtgtacaacgtcgtccacgcgatccgaatcatagtccagacgagaacggagacatcgctctcgtgggaacagctgcgctccccgcaggtctcgcagttcctcgtcaagcccatgcagcagcagatccgcacgcagcagttcaaccgcgtcactctctacgcattgatggccaactgtctgcagttcggcaaggaggggcagctcaatcctggtaacataggggtcagcggcacgagggcaaaggtctgtgagttgctggcgctcaagctactgaaagagtacaacaccagggagctcatcgacgccctctcgtacgatttcaatcctctccagggcgcccctggcacgccatccaccctgaccggcagtcgcacacccgacagtcgcagggctcctccacctgctcgttcgtcaactctcgaagtcgctatccgagcttctgccaagcactttattgcccatcccctcgtcgtccagcagctcgaggctatctggaatggtgctatcagcttttactcttcccacgacaatcttcaccgtgctgcatctccgcaacacaatcggacgggcagccctgacgaccgaactcccctactgggcagccaggccttcaaagaacaagcggaacaacttcctctgcatgccattccagtacgtcgaacagtggctctgtatgacccgcgcaatacgtcgccgttgaagctatctcgccttcgtgttccacgctaccgccagttcttgtcaactctgtcgctgctcatcatgatcggcttgtttctcgcggttctcatccagcgttcgaaccgcatcacctcgctcgagcttgttttctggttctggagtgctggcttcatgttggacgaggtggtagggttcaacgagcagggcttctcattgtacatcatgagctactggaatatcattgaccttggcatcttgatgctgctcatcgtgtattactgcatgcgattgtacggagtgttccttgtcaactctgcccattggaatgacatggcctacgaagtgctggctgcgaatgctatccttctgttgcctcgcattttcagcgttctggaccattacccctacttctcccagctcttgattgcttttcgcttcatggctgaagatctcatggccgtctttgtcttgattctcatcagctgctcaggcttcttcgtcttttttacgctgtctaaaaacgaagacaatgctgtcgacgtggcgtacaaaatcttccagatcctcatgggtttcacgccagccgcctgggatgtctgggcagaatacacttttatgggcagggtacttctggtcatctttctcatcatctgccacttcctcgtcgtgacgattctgatcaccgtcctcaccaacgccttcatggcgattgcgtccaatgccaaagaggagcaccagtttctgttcgccattaacacaatctcgatggtgaagaacgactcgcttttctcgtatgttgcgcccgcaaacatccttgcctggcttctgattccactgcgatacttcatgccgattagacagttcatcctcctcaaccggtgggtcatcaagctgacacactggccgctcctgttctgcatattcttctacgaaaaattcttcctcgcatcggccctgtatgagccaaccgacctggtcgaaggttctggacgtggccttggccgtgaactgtctgcagcgctgtacagccccaacctgcgaacgcgcgaagagtcgattgctggatttcagaaggacaaagcactagacgaagtgtttaggcgccaacctgatcctggtaccttgcgtacccaaaggcgacaggaaagaaggaagacccaaaccgcgattcgtaattggatggaccagagcgacgagatcggggagtcgctaagtcactggcctaccatcgatagtcgaccaagccactcgcttcgccgcatgagcatgacccgggatcttccgcgtcgtttccggaccatgtctgacattcgctctgccgcatctgatcccgctgatctcatgtccaacaacggcttccctatgaggaatattagcggattcgatggacagacccccgaccaacagactaaggacatgacggatgcggatggtgatgatgagttagttacgaacgatgaggacgaagatgatgagacggccggcggaagccgccatggcaaccatcaagaagctgaagaacccgaggattatttcactactcctatgacatctcgaaaagagacaacaatgccctcgtcgatcagctccgcgaattcttctcgcattatggccaacgcatcaccgcggcctgtcaatgccacccgtcggcaggcacttcataatcgcacgctatctacaaatacgatactctacaacccgcaggcgcaagaagcagctcgcctcggcctcagtccctcgtcggtatccgatcgcccaggtatggcacaatctcggcctaagacaagccgactcattacaaccgtcgagcaatcggcttcaagtggtgtacgctcaccccgacgcacacaatatacgacgacaccgacacgtcctcgcccaattccgatgaaatccgccccgaaccggttggcgctccataccatggaccctagacgccagaagctatctgcttctgtagacatgatggacgcgaactcggatatcgcggcgcccaacttcaacgatcccaatattgacttgggcgcagtacctgcctccttcgcgacgcagatggcgatggcgactggacagttccgagcacggactggatcagcggaacgacatagggaggacgcggatcgcatgtcgaggcttgtactagctcgtatgaagacgctggaggaaggatttgcagacgtcgtgagagaagtccagctcatgcgctccgcggtgccgagcgtagtggccacagcccagaattcggccgatgacgcgagttggcggggtggtgtgtcaccggtcacgagtgccaacggtaggaacaaggcacggagggctgccgttccaaaaccaaagaggagcagacctcccagtgtggcagaggagaagcctaccggagtgaacatgcagagtagcgcgatgacgccgaggaagagtaaggggaagggcaaggagaaagaggtcagaatggcggagagcagtgatagcgacggccctggcaacaaacttgcgagaaggggaagctctttctga

SEQ ID NO: 29994 - protein, 1172 aa, Muscodor strobelii
  misc_feature: SGI Peptide ID NO. 570309
  misc_feature (89)..(1172): NCBI GI: 256726974 Blast Desc: NECHADRAFT_99254 [Nectria haematococca mpVI 77-13-4]
  misc_feature (45)..(1082): NCBI GI: 171690366 Blast Desc: protein product [Podospora anserina] gi|170945131|emb|CAP71242.1| protein product [Podospora anserina]
  misc_feature (11)..(1172): NCBI GI: 46136565 Blast Desc: FG09798.1 [Gibberella zeae PH-1]
  misc_feature (120)..(1107): NCBI GI: 145613556 Blast Desc: MGG_01538 [Magnaporthe grisea 70-15] gi|145020619|gb|EDK04748.1| MGG_01538 [Magnaporthe grisea 70-15]
  misc_feature (84)..(849): NCBI GI: 261352328 Blast Desc: conserved [Verticillium albo-atrum VaMs.102]
  misc_feature (9)..(1072): NCBI GI: 116196262 Blast Desc: CHGG_04729 [Chaetomium globosum CBS 148.51] gi|88180642|gb|EAQ88110.1| CHGG_04729 [Chaetomium globosum CBS 148.51]
  misc_feature (31)..(1070): NCBI GI: 169610800 Blast Desc: SNOG_08507 [Phaeosphaeria nodorum SN15] gi|111062555|gb|EAT83675.1| SNOG_08507 [Phaeosphaeria nodorum SN15]
  misc_feature (58)..(1072): NCBI GI: 189205805 Blast Desc: conserved [Pyrenophora tritici-repentis Pt-1C-BFP] gi|187975330|gb|EDU41956.1| conserved [Pyrenophora tritici-repentis Pt-1C-BFP]
  misc_feature (66)..(1070): NCBI GI: 119471938 Blast Desc: cation channel family transporter, [Neosartorya fischeri NRRL 181] gi|119406400|gb|EAW16351.1| cation channel family transporter, [Neosartorya fischeri NRRL 181]
  misc_feature (92)..(1070): NCBI GI: 121699926 Blast Desc: cation channel family transporter, [Aspergillus clavatus NRRL 1] gi|119396370|gb|EAW06802.1| cation channel family transporter, [Aspergillus clavatus NRRL 1]
MIPTAKDTLSSLLRIDKHAPRRIDSRLFNHSNPQTPSPGAVTQTEYRQQRHATADFTENDDDDDDDEDEEQRFDPNQPSVRFADQGEGRRNSGSLLPLFSASHLDSLPVYNVVHAIRIIVQTRTETSLSWEQLRSPQVSQFLVKPMQQQIRTQQFNRVTLYALMANCLQFGKEGQLNPGNIGVSGTRAKVCELLALKLLKEYNTRELIDALSYDFNPLQGAPGTPSTLTGSRTPDSRRAPPPARSSTLEVAIRASAKHFIAHPLVVQQLEAIWNGAISFYSSHDNLHRAASPQHNRTGSPDDRTPLLGSQAFKEQAEQLPLHAIPVRRTVALYDPRNTSPLKLSRLRVPRYRQFLSTLSLLIMIGLFLAVLIQRSNRITSLELVFWFWSAGFMLDEVVGFNEQGFSLYIMSYWNIIDLGILMLLIVYYCMRLYGVFLVNSAHWNDMAYEVLAANAILLLPRIFSVLDHYPYFSQLLIAFRFMAEDLMAVFVLILISCSGFFVFFTLSKNEDNAVDVAYKIFQILMGFTPAAWDVWAEYTFMGRVLLVIFLIICHFLVVTILITVLTNAFMAIASNAKEEHQFLFAINTISMVKNDSLFSYVAPANILAWLLIPLRYFMPIRQFILLNRWVIKLTHWPLLFCIFFYEKFFLASALYEPTDLVEGSGRGLGRELSAALYSPNLRTREESIAGFQKDKALDEVFRRQPDPGTLRTQRRQERRKTQTAIRNWMDQSDEIGESLSHWPTIDSRPSHSLRRMSMTRDLPRRFRTMSDIRSAASDPADLMSNNGFPMRNISGFDGQTPDQQTKDMTDADGDDELVTNDEDEDDETAGGSRHGNHQEAEEPEDYFTTPMTSRKETTMPSSISSANSSRIMANASPRPVNATRRQALHNRTLSTNTILYNPQAQEAARLGLSPSSVSDRPGMAQSRPKTSRLITTVEQSASSGVRSPRRTQYTTTPTRPRPIPMKSAPNRLALHTMDPRRQKLSASVDMMDANSDIAAPNFNDPNIDLGAVPASFATQMAMATGQFRARTGSAERHREDADRMSRLVLARMKTLEEGFADVVREVQLMRSAVPSVVATAQNSADDASWRGGVSPVTSANGRNKARRAAVPKPKRSRPPSVAEEKPTGVNMQSSAMTPRKSKGKGKEKEVRMAESSDSDGPGNKLARRGSSF

SEQ ID NO: 29995 - DNA, 4574 bp, Muscodor strobelii
  misc_feature: SGI EST ID NO. CUFF.71227.0
  misc_feature: Variant of the nucleotide sequence at SEQ ID NO 29993
tggtaacctgaccaagcccagccttttagtgccaagtcgtttcttgctgaggctcggactaatacaccgtacaattaattgtctgcttcgagtagcacacctgagcacgctatgtacagcgtcacattgtgcttatgtgccggttgtcactcgtacctacctccttccactgatgatagaaatctgataacagcagcctcactcccttttctattcctgtgattaccttagttcgagttacttcctttccgaacatcgtttgtctggcgtgtcttttccgactttatttccacagccctactgcacagtagcagcccactggcgcgggtcgcggtcaacttatttcgaagttggaccccatgaccttgtcgatgccaatggcaatgtcctgatggtccatgtcgttttgccgcgtcccacatcctctctgtctcccctttccgtcgtctctttttttgagtttgaccagccgtctgctagagccagactttctcttacctgcttgatgcttcgtgcatacaaatctagcattgcgaggtggaaggggcaaggactggcctgatctggcccacgacgcgaactgactcgacagcaagctggttcgagcccgtcgccgccatgattcccacagccaaggacacgctctcctcgctgctgcggatcgacaagcatgcccctcgccgcatcgactcgcgactcttcaaccactccaacccgcagacgccctctcccggcgctgtcacgcagactgaatatcggcagcagcgacatgccaccgccgacttcaccgagaacgacgacgacgatgacgacgacgaagatgaggaacagcggttcgatcccaaccagccctcggtgcgttttgccgaccagggcgaggggcgcaggaactcgggcagcctcttgcctctattttctgccagtcatctagactctttgcccgtgtacaacgtcgtccacgcgatccgaatcatagtccagacgagaacggagacatcgctctcgtgggaacagctgcgctccccgcaggtctcgcagttcctcgtcaagcccatgcagcagcagatccgcacgcagcagttcaaccgcgtcactctctacgcattgatggccaactgtctgcagttcggcaaggaggggcagctcaatcctggtaacataggggtcagcggcacgagggcaaaggtctgtgagttgctggcgctcaagctactgaaagagtacaacaccagggagctcatcgacgccctctcgtacgatttcaatcctctccagggcgcccctggcacgccatccaccctgaccggcagtcgcacacccgacagtcgcagggctcctccacctgctcgttcgtcaactctcgaagtcgctatccgagcttctgccaagcactttattgcccatcccctcgtcgtccagcagctcgaggctatctggaatggtgctatcagcttttactcttcccacgacaatcttcaccgtgctgcatctccgcaacacaatcggacgggcagccctgacgaccgaactcccctactgggcagccaggccttcaaagaacaagcggaacaacttcctctgcatgccattccagtacgtcgaacagtggctctgtatgacccgcgcaatacgtcgccgttgaagctatctcgccttcgtgttccacgctaccgccagttcttgtcaactctgtcgctgctcatcatgatcggcttgtttctcgcggttctcatccagcgttcgaaccgcatcacctcgctcgagcttgttttctggttctggagtgctggcttcatgttggacgaggtggtagggttcaacgagcagggcttctcattgtacatcatgagctactggaatatcattgaccttggcatcttgatgctgctcatcgtgtattactgcatgcgattgtacggagtgttccttgtcaactctgcccattggaatgacatggcctacgaagtgctggctgcgaatgctatccttctgttgcctcgcattttcagcgttctggaccattacccctacttctcccagctcttgattgcttttcgcttcatggctgaagatctcatggccgtctttgtcttgattctcatcagctgctcaggcttcttcgtcttttttacgctgtctaaaaacgaagacaatgctgtcgacgtggcgtacaaaatcttccagatcctcatgggtttcacgccagccgcctgggatgtctgggcagaatacacttttatgggcagggtacttctggtcatctttctcatcatctgccacttcctcgtcgtgacgattctgatcaccgtcctcaccaacgccttcatggcgattgcgtccaatgccaaagaggagcaccagtttctgttcgccattaacacaatctcgatggtgaagaacgactcgcttttctcgtatgttgcgcccgcaaacatccttgcctggcttctgattccactgcgatacttcatgccgattagacagttcatcctcctcaaccggtgggtcatcaagctgacacactggccgctcctgttctgcatattcttctacgaaaaattcttcctcgcatcggccctgtatgagccaaccgacctggtcgaaggttctggacgtggccttggccgtgaactgtctgcagcgctgtacagccccaacctgcgaacgcgcgaagagtcgattgctggatttcagaaggacaaagcactagacgaagtgtttaggcgccaacctgatcctggtaccttgcgtacccaaaggcgacaggaaagaaggaagacccaaaccgcgattcgtaattggatggaccagagcgacgagatcggggagtcgctaagtcactggcctaccatcgatagtcgaccaagccactcgcttcgccgcatgagcatgacccgggatcttccgcgtcgtttccggaccatgtctgacattcgctctgccgcatctgatcccgctgatctcatgtccaacaacggcttccctatgaggaatattagcggattcgatggacagacccccgaccaacagactaaggacatgacggatgcggatggtgatgatgagttagttacgaacgatgaggacgaagatgatgagacggccggcggaagccgccatggcaaccatcaagaagctgaagaacccgaggattatttcactactcctatgacatctcgaaaagagacaacaatgccctcgtcgatcagctccgcgaattcttctcgcattatggccaacgcatcaccgcggcctgtcaatgccacccgtcggcaggcacttcataatcgcacgctatctacaaatacgatactctacaacccgcaggcgcaagaagcagctcgcctcggcctcagtccctcgtcggtatccgatcgcccaggtatggcacaatctcggcctaagacaagccgactcattacaaccgtcgagcaatcggcttcaagtggtgtacgctcaccccgacgcacacaatatacgacgacaccgacacgtcctcgcccaattccgatgaaatccgccccgaaccggttggcgctccataccatggaccctagacgccagaagctatctgcttctgtagacatgatggacgcgaactcggatatcgcggcgcccaacttcaacgatcccaatattgacttgggcgcagtacctgcctccttcgcgacgcagatggcgatggcgactggacagttccgagcacggactggatcagcggaacgacatagggaggacgcggatcgcatgtcgaggcttgtactagctcgtatgaagacgctggaggaaggatttgcagacgtcgtgagagaagtccagctcatgcgctccgcggtgccgagcgtagtggccacagcccagaattcggccgatgacgcgagttggcggggtggtgtgtcaccggtcacgagtgccaacggtaggaacaaggcacggagggctgccgttccaaaaccaaagaggagcagacctcccagtgtggcagaggagaagcctaccggagtgaacatgcagagtagcgcgatgacgccgaggaagagtaaggggaagggcaaggagaaagaggtcagaatggcggagagcagtgatagcgacggccctggcaacaaacttgcgagaaggggaagctctttctgaggagattgatataggagaagccgagagtgttgagtatatacctgtggagattgcatcactggcgtatgggctttgcatggatggcgttttactggttagctttcggtccggctgggcattattggtacatggcatcacagtacatgatgtttgatcaagggggtgagaatgtggcagtggaaaggttctggcgtcgatatgaaacgtgaatatggatggtagtttggacgcgataccataattgtacgactactttgcgagatgcattacggaaaaagaaaaggactggggaggaaaggggggcctacgcgtccagaaataggactgcggatgatgggcctgaatacacgatttgtgaatctcctctgacttatgtcacttgttgccttctgagctgtcattgatgtatatgtctgtaatcttagagatgactgcac

SEQ ID NO: 29996 - DNA, 6708 bp, Muscodor strobelii
  misc_feature: SGI cDNA ID NO. 570310
  misc_feature: Reduced expression when VOC is produced
  misc_feature: Encodes the peptide sequence at SEQ ID NO 29997
atggagtcggtacactacccgccttcgacggcgcggctaggcgatggccaagatgagggcctgatgtgccttgacctgcaagactcttcctcctaccggggctacagcttcggtgcgaagaagagcatcgcaggcgaactggttttccagaccggtatggtcggctacccggaatctatcacggacccttcttatcggggccagatactcgtcatcacttttcccctcgtgggaaactatggtgttccctctcgggagaccatggacgaactcctgcgcgatcgccccgcccactttgagtcttccgagatacacattgccggcttagtcgtggcctcgtatgcaggcgaagactactcacacttcctcgctgcctcttcgctcggcgcctggttaaaagaacaaggcgttcccgccatgtacggagtggacacgaggtccttgacggaacgaatccgccaggagggcagcatgctcggtcgtatgctcctccagaagaccaacgtccctaatggcacctccaatggagaagtgtccagccaactgaccagaaaagactggcggccatacttcgagtctctggattgggtcaatccgaataccaagaacctggttgccgaagtctcaatcaagcaggttcaagtctaccagcccagccccgaaacggctctcaaacatccatcggggagaacactccgtgtgctctgcttggatgttggtatgaagaacaaccaactccgctgcttcttgaagagaggagttgaagtcaaagtttgcccctgggactacgacttctcagcagagaaagattacgatggtctttttatctcgaacggccctggagatccggcggtattgcgcgacacaactgtgaagaacatcaccgaagtcctaaaactcagccgggtaccggtgtttggtatctgccttggtcaccaacttcttgcacaagctgctggagccagcacagagaagatgaagtttggtaaccgtggtcacaacattccctgcacgagtatggtgactggtaaatgtcacatcacctctcaaaaccacggtttcgccgtcagcgcacagagcctccccgcgaatgagtggaaagaactattcgtaaacgctaacgatggtagcaacgagggcattatgcacaccagcaagccctatttcagtgtgcaattccatccagagagcactcctggccctcgtgacacggaattccttttcgatgtcttcattagcactatgtccagctgtgcaggcgatgcaaaatttctcaatgcccctgtcaacttccctggcggtactatcgaggagaatgagagactccacccgcgcgtccatgtaaagaagatactcgttcttgggagtggtggtctgagtatcggccaggctggagagttcgactactctggtagtcaagctatcaaggctctgaaggaggaaggcatttacactgttctcatcaaccctaatattgccacaatccagacgtctaagggtcttgccgacaaggtttacttcttgcctgtcactgccgagttcgttcgcaaggtgatcattcacgagcgacccgatgccatttacgttactttcggtggccaaaccgcgctccaagtcggtattcaattgaaagatgaattcgaagagcttggtgtcaaagtccttggtaccccgatcgacactatcattactactgaggaccgtgagctttttgctcggagcatggactcgatcggcgagaagtgcgctaagtctgcctctgctagtagtgtcgaagaagccatgcgtgtcgtgaaagacattggtttccctgttatcgtccgagctgcctatgccttgggcggtttgggcagtggttttgcctacaacgatgctgagcttctggatctctgcaacaaagctcttgctgccagtcctcaagtcctcatcgagaggagtatgaaaggctggaaagaaatcgaatacgaagtcgttcgagacgcacaagacaattgtatcactgtctgtaacatggagaatttcgaccccctgggtattcacacaggtgattccattgtcgtagctccatctcaaacactttccgatgaggattacaacatgctacgaaccacagcagtgaacgtcattcgtcaccttggagttgtcggagagtgcaatatacaatatgcgctcaatcctttctctaaggagtattgcattatcgaggtcaacgcgagattgtcacgttcatctgcacttgcatccaaggccacaggttaccccttggccttcattgcagctaaactaggacttggcatcccactgaaggagatcaagaacacagttactaaagtgacatgtgcctgctttgagccttctttggattacgtcgttgtgaaaatgccccggtgggatttgaaaaagttcaccagagtctcgacccagcttggttcatccatgaaatccgttggtgaggtaatgagcatcggaagaagctttgaggaagccattcaaaaggccatccgatcgatagacttccacaatcttggctttggcgcgaccaaagcccttatgtctatcgacgatgaactgcagactccatctgatcaacgtcttttcgccatcgcaaatgccatgcatactgggtactccgttgacagaatctgggaactaactaagatcgacaaatggttcctgcacaaactaatgggtcttaataacttcgcaaaggaaatgaccaaatacaatactagtatgatcacaagccgtccagacctcctacttcagggcaaacgattgggtttcagcgatcgtcaactcgccaaattttgggactctaatgaactcgccgtcaggaggatgagacgcgatgctggcattactccatttgtcaagcaaattgataccgtcgctgcagaatttccggcgtatactaactacctctacctcacatacaatgcgtctgaacatgacatcgcttttaacgatcacggtgtcatggttttgggttccggagtctatcgtatcggttcgtcagtcgagttcgattggtgttcggttcgggccattcgcacactgcgcgcttctggcttcaagaccatcatggttaactacaaccccgaaaccgtcagtacggattacgatgaagccgatcgtctatactttgaaaacatcaaccaggaaactgtcctcgatatctatcaaatggaatcatccagtggtgtactcggtgccatgggtggtcaaacgcctaacaacatcgcactacctcttctacgtgccggggttaaggtcctcggaacgtctccagaaatgattgaccgagctgagaatcgttacaagttctctcgcatgcttgacgagatcgatgttgaccagcctacttggaaagagttgacaagcttcgaagatgctaaggaattttgccagaaggtgtcataccctgtactggtccggccttcatacgtcttgtcgggcgcggccatgaataccgtctactccgaggcggatctggaactctttttacagcaagctgccgaggtctctcgagaatatcctgtcgtcattacgaagtatatcgaaaatgcgaaggaaattgaaatggatgcagttgcaaaagatggcaaggtcgtcggtcacttcatctcagagcacgttgaaaatgccggtgttcactctggtgacgccaccctcattcttcctccccaggatcttgaacaaactaccatcaggcgtattgaagaagccaccaggaagatcggtgctaagttgaacgtcacgggcccgttcaatattcagttcatcgccaaagacaacgatatcaaagtcattgaatgcaacgttcgggcatctcgatcattccccttcgtttcaaaggtcatgggcgtagatctcattgagatggctactaaagctatcatgggtgttccgttcaacgagtacccagctactagcatcgccgccgactgtgtcggtgttaaggtcccccaattctccttctcgcgactctctggcgcagaccctgttctcggtgtcgaaatggcttccacaggtgaggttgcctgttttggaaaggataaatatgaagcatatctcaaagccttggtatctaccggtttcaagattcctaagagcaacattcttctatctataggttcctacaaggataagaaggagatgcttccttcgatcgagaagcttcagaaaatggggtacaaattgtttgcgacagcgggtacagccgatttccttcaagaacacggcattcctgtccagtttctggaggtgctcggaaacgaggaggatgaccagaggtctgaattctcgcttacccagcatcttgctaagaacatgattaacctctacatcaatcttccatcaaacaacaaatatcgcagaccagccaactatatgagcaaagggtatcagactcggcgaatggctgttgactaccaaattcccttagtgaccaatgtcaagaacgcaaagatcctcgtcgaggctattgcgagacatttcgatcttgaagtcagccttcgtgattaccagaccagccaccgttcaatcgtcctcccaggtctgattaacatcgctgctttcgtcccaggcattgtgtctcctggtagctccgatctgcaagccgtcacaaaggcatcaattgcttctgggtttagtatgatacgagtcatgcctttgggcgtcgacggttcaattacagatgcacgaacactcaagcttgcccagcagggtagtaagcatgggggatactgcgactacaatttctccatctctgcaacgtccgaaaatgcgaaccagatcagccaagtcacaggcgatgttgggtcgttgtttatcccattcaaccaccttgccgacaatattagtaaggtggctgcggttaccgctcatttcgaatcctggcctacacacaagccaattgtcactgacgctaaaacaacggatcttgcctcaattctgcttctggctagtcttcataatcgcagaatacatgttaccagtgttacaaccaaggatgatattcgcttgattgctctcagcaaggagaaaggtctgagcgttacttgcgacgtatcaatctactctctctacttgtcccgcaaggactatcctgactgtcagttcttgcccgaggctaaagatcaggatgctctgtgggcttaccttagcactattgatgtcttctccatcggcagtgtgccattccagctggctcacgccatgcaacagtccaagccggacgctgcagttggaatagccgatgctctgcctttacttcttacctcagttgttgagggtagattgaccattgatgacatcagggaacgtctgtatgacaatcctaagcagatcttcgaactgcatgaacaaattggaacttcagtggaggtcgagatagaccgtacatacacagtggcgcagtctgcttcttggtctcccttcgttggcaaggtgatgcgcggagcagtgcagagagtcactttcgatgagaagacagtatgtctcgatggcgacgtccttcctatcgcgccactcggcaaggatatgtctacacatggtagcatgcctgcgccaatgtcacctgctatcaaggctgctcctcaggatgcccttattgcccgacgaccatcccttcttggcaagcctgctggtgctccgcacacgatcgacggacaattggacggcttgcgagtggcacccaggttcacttctacagaggaattgcgccttccgggaccattgcggacaccctctgttgatgctctacatgacttgttatcgcagccatcggcgttcaagagctcgcatgtcctatctgtgcgagactactcgcgatcagatctccaccttcttttcacggtcgctgcagagatgcgtctaggagtggacagagaaggcgttctcaacactttgcgtggccgtgtgctgtgcaccatgttctacgagccttctactcgcacttccgcctcgttcgatgcggcgatgcagcgccttggcggcagaactatcgcgatcagcacatctcactcttcagttcaaaagggagagtcattgcaggacactcttagaactcttgagtgctacggagatgcgatcgttctacgccaccctgacgaagagtgcgtagatgtcgctaagaagtatagcaaggttcctatcatcaatggtggtaatggaagtcgggaacaccccacccaggcattccttgatctcttcacgatccgagaagagcttggtacagttcaaggtctgaccatcacatttgttggagatctattatacggacgaaccgtccactcactgctctacctgctccagcactaccaggtccaagtacagctcgtatcgcccaagtcattgtcgctgcctaaggagcttcgaagcctgctccagcagtccggtcaactgatctgcgagtccgaggacctaacaccggagatcctctccaagagcgacgtcctctactgtacgcgggtccagaaagagcgcttccctagcgtggaggagtatgagaaggtgaagaacacctatcgcattgccaacgctacactcaagcacgccaagcagcatacgagagtgttgcatcctctacctcggaacgaggaggttgccgaggaggttgactacgaccacagagctgcgtactttagacagatgcgatacggactttactgccgcatggctttattggcattagttatgtccaactag

SEQ ID NO: 29997 - protein, 2235 aa, Muscodor strobelii
  misc_feature: SGI Peptide ID NO. 570310
  misc_feature (447)..(565): Pfam Id: PF00289 Pfam Desc: Carbamoyl-phosphate synthase L chain, N-terminal domain
  misc_feature (988)..(1102): Pfam Id: PF00289 Pfam Desc: Carbamoyl-phosphate synthase L chain, N-terminal domain
  misc_feature (567)..(799): Pfam Id: PF02786 Pfam Desc: Carbamoyl-phosphate synthase L chain, ATP binding domain
  misc_feature (1104)..(1326): Pfam Id: PF02786 Pfam Desc: Carbamoyl-phosphate synthase L chain, ATP binding domain
  misc_feature (853)..(978): Pfam Id: PF02787 Pfam Desc: Carbamoyl-phosphate synthetase large chain, oligomerisation domain
  misc_feature (20)..(172): Pfam Id: PF00988 Pfam Desc: Carbamoyl-phosphate synthase small chain, CPSase domain
  misc_feature (235)..(414): Pfam Id: PF00117 Pfam Desc: Glutamine amidotransferase class-I
  misc_feature (1385)..(1483): Pfam Id: PF02142 Pfam Desc: MGS-like domain
  misc_feature (2080)..(2232): Pfam Id: PF00185 Pfam Desc: Aspartate/ornithine carbamoyltransferase, Asp/Orn binding domain
  misc_feature (1934)..(2076): Pfam Id: PF02729 Pfam Desc: Aspartate/ornithine carbamoyltransferase, carbamoyl-P binding domain
  misc_feature (992)..(1102): Pfam Id: PF00289 Pfam Desc: Carbamoyl-phosphate synthase L chain, N-terminal domain
  misc_feature (1935)..(2076): Pfam Id: PF02729 Pfam Desc: Aspartate/ornithine carbamoyltransferase, carbamoyl-P binding domain
  misc_feature (6)..(2234): NCBI GI: 145613560 Blast Desc: conserved [Magnaporthe grisea 70-15] gi|145020621|gb|EDK04750.1| conserved [Magnaporthe grisea 70-15]
  misc_feature (1)..(2235): NCBI GI: 46136245 Blast Desc: FG09638.1 [Gibberella zeae PH-1]
  misc_feature (1)..(2234): NCBI GI: 154309129 Blast Desc: BC1G_07459 [Botryotinia fuckeliana B05.10] gi|150852502|gb|EDN27694.1| BC1G_07459 [Botryotinia fuckeliana B05.10]
  misc_feature (1)..(2234): NCBI GI: 261352329 Blast Desc: pyrABCN [Verticillium albo-atrum VaMs.102]
  misc_feature (1)..(2234): NCBI GI: 156049693 Blast Desc: SS1G_08553 [Sclerotinia sclerotiorum 1980] gi|154692952|gb|EDN92690.1| SS1G_08553 [Sclerotinia sclerotiorum 1980]
  misc_feature (7)..(2234): NCBI GI: 115397253 Blast Desc: protein ura1 [Aspergillus terreus NIH2624] gi|114192409|gb|EAU34109.1| protein ura1 [Aspergillus terreus NIH2624]
  misc_feature (7)..(2234): NCBI GI: 212539870 Blast Desc: bifunctional pyrimidine biosynthesis protein (PyrABCN), [Penicillium marneffei ATCC 18224] gi|210067389|gb|EEA21481.1| bifunctional pyrimidine biosynthesis
  misc_feature (16)..(2234): NCBI GI: 242803474 Blast Desc: bifunctional pyrimidine biosynthesis protein (PyrABCN), [Talaromyces stipitatus ATCC 10500] gi|218717526|gb|EED16947.1| bifunctional pyrimidine biosynthesis
  misc_feature (7)..(2234): NCBI GI: 119471940 Blast Desc: bifunctional pyrimidine biosynthesis protein (PyrABCN), [Neosartorya fischeri NRRL 181] gi|119406401|gb|EAW16352.1| bifunctional pyrimidine biosynthesis
  misc_feature (7)..(2234): NCBI GI: 67516567 Blast Desc: AN0565.2 [Aspergillus nidulans FGSC A4] gi|238054311|sp|O93937.2|PYR1_EMENI RecName: Full=Protein pyrABCN; Includes: RecName: Full=Glutamine-dependent Includes:
  misc_feature (7)..(2234): SWISSPROT Homolog: EC 2.1.3.2 Aspartate carbamoyltransferase
  misc_feature (7)..(2234): SWISSPROT Homolog: EC 6.3.5.5 Carbamoyl-phosphate synthase (glutamine-hydrolyzing)
  misc_feature: Useful for introducing or modulating the production of volatile compounds
MESVHYPPSTARLGDGQDEGLMCLDLQDSSSYRGYSFGAKKSIAGELVFQTGMVGYPESITDPSYRGQILVITFPLVGNYGVPSRETMDELLRDRPAHFESSEIHIAGLVVASYAGEDYSHFLAASSLGAWLKEQGVPAMYGVDTRSLTERIRQEGSMLGRMLLQKTNVPNGTSNGEVSSQLTRKDWRPYFESLDWVNPNTKNLVAEVSIKQVQVYQPSPETALKHPSGRTLRVLCLDVGMKNNQLRCFLKRGVEVKVCPWDYDFSAEKDYDGLFISNGPGDPAVLRDTTVKNITEVLKLSRVPVFGICLGHQLLAQAAGASTEKMKFGNRGHNIPCTSMVTGKCHITSQNHGFAVSAQSLPANEWKELFVNANDGSNEGIMHTSKPYFSVQFHPESTPGPRDTEFLFDVFISTMSSCAGDAKFLNAPVNFPGGTIEENERLHPRVHVKKILVLGSGGLSIGQAGEFDYSGSQAIKALKEEGIYTVLINPNIATIQTSKGLADKVYFLPVTAEFVRKVIIHERPDAIYVTFGGQTALQVGIQLKDEFEELGVKVLGTPIDTIITTEDRELFARSMDSIGEKCAKSASASSVEEAMRVVKDIGFPVIVRAAYALGGLGSGFAYNDAELLDLCNKALAASPQVLIERSMKGWKEIEYEVVRDAQDNCITVCNMENFDPLGIHTGDSIVVAPSQTLSDEDYNMLRTTAVNVIRHLGVVGECNIQYALNPFSKEYCIIEVNARLSRSSALASKATGYPLAFIAAKLGLGIPLKEIKNTVTKVTCACFEPSLDYVVVKMPRWDLKKFTRVSTQLGSSMKSVGEVMSIGRSFEEAIQKAIRSIDFHNLGFGATKALMSIDDELQTPSDQRLFAIANAMHTGYSVDRIWELTKIDKWFLHKLMGLNNFAKEMTKYNTSMITSRPDLLLQGKRLGFSDRQLAKFWDSNELAVRRMRRDAGITPFVKQIDTVAAEFPAYTNYLYLTYNASEHDIAFNDHGVMVLGSGVYRIGSSVEFDWCSVRAIRTLRASGFKTIMVNYNPETVSTDYDEADRLYFENINQETVLDIYQMESSSGVLGAMGGQTPNNIALPLLRAGVKVLGTSPEMIDRAENRYKFSRMLDEIDVDQPTWKELTSFEDAKEFCQKVSYPVLVRPSYVLSGAAMNTVYSEADLELFLQQAAEVSREYPVVITKYIENAKEIEMDAVAKDGKVVGHFISEHVENAGVHSGDATLILPPQDLEQTTIRRIEEATRKIGAKLNVTGPFNIQFIAKDNDIKVIECNVRASRSFPFVSKVMGVDLIEMATKAIMGVPFNEYPATSIAADCVGVKVPQFSFSRLSGADPVLGVEMASTGEVACFGKDKYEAYLKALVSTGFKIPKSNILLSIGSYKDKKEMLPSIEKLQKMGYKLFATAGTADFLQEHGIPVQFLEVLGNEEDDQRSEFSLTQHLAKNMINLYINLPSNNKYRRPANYMSKGYQTRRMAVDYQIPLVTNVKNAKILVEAIARHFDLEVSLRDYQTSHRSIVLPGLINIAAFVPGIVSPGSSDLQAVTKASIASGFSMIRVMPLGVDGSITDARTLKLAQQGSKHGGYCDYNFSISATSENANQISQVTGDVGSLFIPFNHLADNISKVAAVTAHFESWPTHKPIVTDAKTTDLASILLLASLHNRRIHVTSVTTKDDIRLIALSKEKGLSVTCDVSIYSLYLSRKDYPDCQFLPEAKDQDALWAYLSTIDVFSIGSVPFQLAHAMQQSKPDAAVGIADALPLLLTSVVEGRLTIDDIRERLYDNPKQIFELHEQIGTSVEVEIDRTYTVAQSASWSPFVGKVMRGAVQRVTFDEKTVCLDGDVLPIAPLGKDMSTHGSMPAPMSPAIKAAPQDALIARRPSLLGKPAGAPHTIDGQLDGLRVAPRFTSTEELRLPGPLRTPSVDALHDLLSQPSAFKSSHVLSVRDYSRSDLHLLFTVAAEMRLGVDREGVLNTLRGRVLCTMFYEPSTRTSASFDAAMQRLGGRTIAISTSHSSVQKGESLQDTLRTLECYGDAIVLRHPDEECVDVAKKYSKVPIINGGNGSREHPTQAFLDLFTIREELGTVQGLTITFVGDLLYGRTVHSLLYLLQHYQVQVQLVSPKSLSLPKELRSLLQQSGQLICESEDLTPEILSKSDVLYCTRVQKERFPSVEEYEKVKNTYRIANATLKHAKQHTRVLHPLPRNEEVAEEVDYDHRAAYFRQMRYGLYCRMALLALVMSN

SEQ ID NO: 29998 - DNA, 7508 bp, Muscodor strobelii
  misc_feature: SGI EST ID NO. CUFF.70963.0
  misc_feature: Variant of the nucleotide sequence at SEQ ID NO 29996
aggcatttgactctcatctttaccaattcctgttgaggatcttttgctgtaccgaggagtgctcttcagcccatcgcgcctcactcggtatgatcaattgatctgctgaatctatacagagcttcgctgctgtagaagagggctctgcggtcgagctgtcttctctgtcgccttgcttttcactcgttgtttataaaatcttactgttgtgcttttcttgatttaatctgcacaacgagtccgttgagacaagggaaacaccactcggcgtaagacataatggagtcggtacactacccgccttcgacggcgcggctaggcgatggccaagatgagggcctgatgtgccttgacctgcaagactcttcctcctaccggggctacagcttcggtgcgaagaagagcatcgcaggcgaactggttttccagaccggtatggtcggctacccggaatctatcacggacccttcttatcggggccagatactcgtcatcacttttcccctcgtgggaaactatggtgttccctctcgggagaccatggacgaactcctgcgcgatcgccccgcccactttgagtcttccgagatacacattgccggcttagtcgtggcctcgtatgcaggcgaagactactcacacttcctcgctgcctcttcgctcggcgcctggttaaaagaacaaggcgttcccgccatgtacggagtggacacgaggtccttgacggaacgaatccgccaggagggcagcatgctcggtcgtatgctcctccagaagaccaacgtccctaatggcacctccaatggagaagtgtccagccaactgaccagaaaagactggcggccatacttcgagtctctggattgggtcaatccgaataccaagaacctggttgccgaagtctcaatcaagcaggttcaagtctaccagcccagccccgaaacggctctcaaacatccatcggggagaacactccgtgtgctctgcttggatgttggtatgaagaacaaccaactccgctgcttcttgaagagaggagttgaagtcaaagtttgcccctgggactacgacttctcagcagagaaagattacgatggtctttttatctcgaacggccctggagatccggcggtattgcgcgacacaactgtgaagaacatcaccgaagtcctaaaactcagccgggtaccggtgtttggtatctgccttggtcaccaacttcttgcacaagctgctggagccagcacagagaagatgaagtttggtaaccgtggtcacaacattccctgcacgagtatggtgactggtaaatgtcacatcacctctcaaaaccacggtttcgccgtcagcgcacagagcctccccgcgaatgagtggaaagaactattcgtaaacgctaacgatggtagcaacgagggcattatgcacaccagcaagccctatttcagtgtgcaattccatccagagagcactcctggccctcgtgacacggaattccttttcgatgtcttcattagcactatgtccagctgtgcaggcgatgcaaaatttctcaatgcccctgtcaacttccctggcggtactatcgaggagaatgagagactccacccgcgcgtccatgtaaagaagatactcgttcttgggagtggtggtctgagtatcggccaggctggagagttcgactactctggtagtcaagctatcaaggctctgaaggaggaaggcatttacactgttctcatcaaccctaatattgccacaatccagacgtctaagggtcttgccgacaaggtttacttcttgcctgtcactgccgagttcgttcgcaaggtgatcattcacgagcgacccgatgccatttacgttactttcggtggccaaaccgcgctccaagtcggtattcaattgaaagatgaattcgaagagcttggtgtcaaagtccttggtaccccgatcgacactatcattactactgaggaccgtgagctttttgctcggagcatggactcgatcggcgagaagtgcgctaagtctgcctctgctagtagtgtcgaagaagccatgcgtgtcgtgaaagacattggtttccctgttatcgtccgagctgcctatgccttgggcggtttgggcagtggttttgcctacaacgatgctgagcttctggatctctgcaacaaagctcttgctgccagtcctcaagtcctcatcgagaggagtatgaaaggctggaaagaaatcgaatacgaagtcgttcgagacgcacaagacaattgtatcactgtctgtaacatggagaatttcgaccccctgggtattcacacaggtgattccattgtcgtagctccatctcaaacactttccgatgaggattacaacatgctacgaaccacagcagtgaacgtcattcgtcaccttggagttgtcggagagtgcaatatacaatatgcgctcaatcctttctctaaggagtattgcattatcgaggtcaacgcgagattgtcacgttcatctgcacttgcatccaaggccacaggttaccccttggccttcattgcagctaaactaggacttggcatcccactgaaggagatcaagaacacagttactaaagtgacatgtgcctgctttgagccttctttggattacgtcgttgtgaaaatgccccggtgggatttgaaaaagttcaccagagtctcgacccagcttggttcatccatgaaatccgttggtgaggtaatgagcatcggaagaagctttgaggaagccattcaaaaggccatccgatcgatagacttccacaatcttggctttggcgcgaccaaagcccttatgtctatcgacgatgaactgcagactccatctgatcaacgtcttttcgccatcgcaaatgccatgcatactgggtactccgttgacagaatctgggaactaactaagatcgacaaatggttcctgcacaaactaatgggtcttaataacttcgcaaaggaaatgaccaaatacaatactagtatgatcacaagccgtccagacctcctacttcagggcaaacgattgggtttcagcgatcgtcaactcgccaaattttgggactctaatgaactcgccgtcaggaggatgagacgcgatgctggcattactccatttgtcaagcaaattgataccgtcgctgcagaatttccggcgtatactaactacctctacctcacatacaatgcgtctgaacatgacatcgcttttaacgatcacggtgtcatggttttgggttccggagtctatcgtatcggttcgtcagtcgagttcgattggtgttcggttcgggccattcgcacactgcgcgcttctggcttcaagaccatcatggttaactacaaccccgaaaccgtcagtacggattacgatgaagccgatcgtctatactttgaaaacatcaaccaggaaactgtcctcgatatctatcaaatggaatcatccagtggtgtactcggtgccatgggtggtcaaacgcctaacaacatcgcactacctcttctacgtgccggggttaaggtcctcggaacgtctccagaaatgattgaccgagctgagaatcgttacaagttctctcgcatgcttgacgagatcgatgttgaccagcctacttggaaagagttgacaagcttcgaagatgctaaggaattttgccagaaggtgtcataccctgtactggtccggccttcatacgtcttgtcgggcgcggccatgaataccgtctactccgaggcggatctggaactctttttacagcaagctgccgaggtctctcgagaatatcctgtcgtcattacgaagtatatcgaaaatgcgaaggaaattgaaatggatgcagttgcaaaagatggcaaggtcgtcggtcacttcatctcagagcacgttgaaaatgccggtgttcactctggtgacgccaccctcattcttcctccccaggatcttgaacaaactaccatcaggcgtattgaagaagccaccaggaagatcggtgctaagttgaacgtcacgggcccgttcaatattcagttcatcgccaaagacaacgatatcaaagtcattgaatgcaacgttcgggcatctcgatcattccccttcgtttcaaaggtcatgggcgtagatctcattgagatggctactaaagctatcatgggtgttccgttcaacgagtacccagctactagcatcgccgccgactgtgtcggtgttaaggtcccccaattctccttctcgcgactctctggcgcagaccctgttctcggtgtcgaaatggcttccacaggtgaggttgcctgttttggaaaggataaatatgaagcatatctcaaagccttggtatctaccggtttcaagattcctaagagcaacattcttctatctataggttcctacaaggataagaaggagatgcttccttcgatcgagaagcttcagaaaatggggtacaaattgtttgcgacagcgggtacagccgatttccttcaagaacacggcattcctgtccagtttctggaggtgctcggaaacgaggaggatgaccagaggtctgaattctcgcttacccagcatcttgctaagaacatgattaacctctacatcaatcttccatcaaacaacaaatatcgcagaccagccaactatatgagcaaagggtatcagactcggcgaatggctgttgactaccaaattcccttagtgaccaatgtcaagaacgcaaagatcctcgtcgaggctattgcgagacatttcgatcttgaagtcagccttcgtgattaccagaccagccaccgttcaatcgtcctcccaggtctgattaacatcgctgctttcgtcccaggcattgtgtctcctggtagctccgatctgcaagccgtcacaaaggcatcaattgcttctgggtttagtatgatacgagtcatgcctttgggcgtcgacggttcaattacagatgcacgaacactcaagcttgcccagcagggtagtaagcatgggggatactgcgactacaatttctccatctctgcaacgtccgaaaatgcgaaccagatcagccaagtcacaggcgatgttgggtcgttgtttatcccattcaaccaccttgccgacaatattagtaaggtggctgcggttaccgctcatttcgaatcctggcctacacacaagccaattgtcactgacgctaaaacaacggatcttgcctcaattctgcttctggctagtcttcataatcgcagaatacatgttaccagtgttacaaccaaggatgatattcgcttgattgctctcagcaaggagaaaggtctgagcgttacttgcgacgtatcaatctactctctctacttgtcccgcaaggactatcctgactgtcagttcttgcccgaggctaaagatcaggatgctctgtgggcttaccttagcactattgatgtcttctccatcggcagtgtgccattccagctggctcacgccatgcaacagtccaagccggacgctgcagttggaatagccgatgctctgcctttacttcttacctcagttgttgagggtagattgaccattgatgacatcagggaacgtctgtatgacaatcctaagcagatcttcgaactgcatgaacaaattggaacttcagtggaggtcgagatagaccgtacatacacagtggcgcagtctgcttcttggtctcccttcgttggcaaggtgatgcgcggagcagtgcagagagtcactttcgatgagaagacagtatgtctcgatggcgacgtccttcctatcgcgccactcggcaaggatatgtctacacatggtagcatgcctgcgccaatgtcacctgctatcaaggctgctcctcaggatgcccttattgcccgacgaccatcccttcttggcaagcctgctggtgctccgcacacgatcgacggacaattggacggcttgcgagtggcacccaggttcacttctacagaggaattgcgccttccgggaccattgcggacaccctctgttgatgctctacatgacttgttatcgcagccatcggcgttcaagagctcgcatgtcctatctgtgcgagactactcgcgatcagatctccaccttcttttcacggtcgctgcagagatgcgtctaggagtggacagagaaggcgttctcaacactttgcgtggccgtgtgctgtgcaccatgttctacgagccttctactcgcacttccgcctcgttcgatgcggcgatgcagcgccttggcggcagaactatcgcgatcagcacatctcactcttcagttcaaaagggagagtcattgcaggacactcttagaactcttgagtgctacggagatgcgatcgttctacgccaccctgacgaagagtgcgtagatgtcgctaagaagtatagcaaggttcctatcatcaatggtggtaatggaagtcgggaacaccccacccaggcattccttgatctcttcacgatccgagaagagcttggtacagttcaaggtctgaccatcacatttgttggagatctattatacggacgaaccgtccactcactgctctacctgctccagcactaccaggtccaagtacagctcgtatcgcccaagtcattgtcgctgcctaaggagcttcgaagcctgctccagcagtccggtcaactgatctgcgagtccgaggacctaacaccggagatcctctccaagagcgacgtcctctactgtacgcgggtccagaaagagcgcttccctagcgtggaggagtatgagaaggtgaagaacacctatcgcattgccaacgctacactcaagcacgccaagcagcatacgagagtgttgcatcctctacctcggaacgaggaggttgccgaggaggttgactacgaccacagagctgcgtactttagacagatgcgatacggactttactgccgcatggctttattggcattagttatgtccaactaggccagtccggttagaaaaagtagtccttattacaagcgttgaattctagatggtgttcaaaatcgtagagttcggggttattggatttcaaatacatagataggaacatcttgcatcagattttatgaggctcaggccgcttatgagtgaatgactttggcacttaagtgctcgcattgggaatcacctgtggcgttgcgtgggatttcgttcctggtcgaacgacgttcactatgttggtatatacatgtactgatacattgttggtggcgttttgtatactctatgtatatatatgcatctatatagggcgacatattttattttaattctctcggatcctatgataatatccattcgcgatttgagaacagggtgaatgtcagtattgacttttcagacattgtcggcggagatccgtctaccccgtattctgagcctgagatacttgagcaaactgccagcgcaaacttgcaattccttaatttcaatcagtcttaacaagtaataatgcgtcttga

SEQ ID NO: 29999 - DNA, 999 bp, Muscodor strobelii
  misc_feature: SGI cDNA ID NO. 570311
  misc_feature: Reduced expression when VOC is produced
  misc_feature: Encodes the peptide sequence at SEQ ID NO 30000
atgacatccacgtcttcagcggccgcgccatggcgcgaagccttcctcactcacgtgtctacgatggactcacccgaattcgtactcagcaccatccgacgcgtcacctccccaccggcgcctcaacggtcaggttcgcgctcaggttccatcccacatctcttcagtaatctctatgcaccccgcgcaaggacgtgtatataccgtggtttatgggcagatctacaacgtaatcctaagaacaccgcgccggagaacccgaaaacttggacgagcgattgcttgacgttcactacggatgtgcggatggataaaatggaagaactatttgaggggagcctagtgggtgaggagtttggagggagaggtggaccgcagagcccgactacgacaaaggttggtgaggaactgtgggaggaggaactccgacatgagcgtggtaagagcacggagaagaaaacgaagagtaaggaggagaagctgaaaggtagtgggggtggcgcaccggtcgaggcatgtttctggatgcaggagccgggaacgcagtggagggtgcgagggagagcttatgtggttgcgccggacattgagtcgaatgttgagggcagggaggttatgagcatactgaaggataggatgaggagggtcggagaggatgggaattggagcttcaagacggaactcacggcgcattttgggaatttgagtccggcgatgaggggcacgtttcggcatccgcctccgggcaggaatgtaaaagagccggctggggagggattaggattggggcagaaggtggatgataataaggacgagatcgcgaggaagaactttagggttgtggttattctacctgaggagattgatatggcggatttgagcgaccctgagcatcctagacgatgggtctatacctttgtcggctctggtgagggacatagcggcaaggatggcgtggttagggaaggcgagtgggagaaagttgaggtttggccttga

SEQ ID NO: 30000 - protein, 332 aa, Muscodor strobelii
  misc_feature: SGI Peptide ID NO. 570311
  misc_feature (2)..(332): NCBI GI: 256720926 Blast Desc: NECHADRAFT_49987 [Nectria haematococca mpVI 77-13-4]
  misc_feature (3)..(332): NCBI GI: 46121861 Blast Desc: FG05308.1 [Gibberella zeae PH-1]
  misc_feature (11)..(332): NCBI GI: 189206453 Blast Desc: conserved [Pyrenophora tritici-repentis Pt-1C-BFP] gi|187975654|gb|EDU42280.1| conserved [Pyrenophora tritici-repentis Pt-1C-BFP]
  misc_feature (6)..(332): NCBI GI: 85105983 Blast Desc: NCU05306 [Neurospora crassa OR74A] gi|28923671|gb|EAA32841.1| [Neurospora crassa OR74A]
  misc_feature (1)..(332): NCBI GI: 169611716 Blast Desc: SNOG_08973 [Phaeosphaeria nodorum SN15] gi|160702355|gb|EAT84141.2| SNOG_08973 [Phaeosphaeria nodorum SN15]
  misc_feature (9)..(332): NCBI GI: 226293963 Blast Desc: conserved [Paracoccidioides brasiliensis Pb18]
  misc_feature (9)..(332): NCBI GI: 225684329 Blast Desc: conserved [Paracoccidioides brasiliensis Pb03]
  misc_feature (71)..(332): NCBI GI: 156049851 Blast Desc: SS1G_08633 [Sclerotinia sclerotiorum 1980] gi|154693031|gb|EDN92769.1| SS1G_08633 [Sclerotinia sclerotiorum 1980]
  misc_feature (9)..(332): NCBI GI: 261352712 Blast Desc: conserved [Verticillium albo-atrum VaMs.102]
  misc_feature (19)..(332): NCBI GI: 226284702 Blast Desc: conserved [Paracoccidioides brasiliensis Pb01]
  misc_feature: Useful for introducing or modulating the production of volatile compounds
MTSTSSAAAPWREAFLTHVSTMDSPEFVLSTIRRVTSPPAPQRSGSRSGSIPHLFSNLYAPRARTCIYRGLWADLQRNPKNTAPENPKTWTSDCLTFTTDVRMDKMEELFEGSLVGEEFGGRGGPQSPTTTKVGEELWEEELRHERGKSTEKKTKSKEEKLKGSGGGAPVEACFWMQEPGTQWRVRGRAYVVAPDIESNVEGREVMSILKDRMRRVGEDGNWSFKTELTAHFGNLSPAMRGTFRHPPPGRNVKEPAGEGLGLGQKVDDNKDEIARKNFRVVVILPEEIDMADLSDPEHPRRWVYTFVGSGEGHSGKDGVVREGEWEKVEVWP

SEQ ID NO: 30001 - DNA, 1432 bp, Muscodor strobelii
  misc_feature: SGI EST ID NO. CUFF.70936.0
  misc_feature: Variant of the nucleotide sequence at SEQ ID NO 29999
cgagctatcgcatgtttgatgaggccattatgcggggtgttgaatcaccacataacacaaacttaacatcttaataaaactcatgcttgggactcttagcaactctgagtcttccacttaacttcggctacaaggatagagcctggatgcaccgcgtcccgagagtggtcttcgcatcgccactttcactgcctgcagtacggcacatacgaatgaacaccacaaactcatcacgaatagcacaactcactacacatcttcacaccatgacatccacgtcttcagcggccgcgccatggcgcgaagccttcctcactcacgtgtctacgatggactcacccgaattcgtactcagcaccatccgacgcgtcacctccccaccggcgcctcaacggtcaggttcgcgctcaggttccatcccacatctcttcagtaatctctatgcaccccgcgcaaggacgtgtatataccgtggtttatgggcagatctacaacgtaatcctaagaacaccgcgccggagaacccgaaaacttggacgagcgattgcttgacgttcactacggatgtgcggatggataaaatggaagaactatttgaggggagcctagtgggtgaggagtttggagggagaggtggaccgcagagcccgactacgacaaaggttggtgaggaactgtgggaggaggaactccgacatgagcgtggtaagagcacggagaagaaaacgaagagtaaggaggagaagctgaaaggtagtgggggtggcgcaccggtcgaggcatgtttctggatgcaggagccgggaacgcagtggagggtgcgagggagagcttatgtggttgcgccggacattgagtcgaatgttgagggcagggaggttatgagcatactgaaggataggatgaggagggtcggagaggatgggaattggagcttcaagacggaactcacggcgcattttgggaatttgagtccggcgatgaggggcacgtttcggcatccgcctccgggcaggaatgtaaaagagccggctggggagggattaggattggggcagaaggtggatgataataaggacgagatcgcgaggaagaactttagggttgtggttattctacctgaggagattgatatggcggatttgagcgaccctgagcatcctagacgatgggtctatacctttgtcggctctggtgagggacatagcggcaaggatggcgtggttagggaaggcgagtgggagaaagttgaggtttggccttgagtgagagaaaatgtgctgttcgtgctgtctgaggcttttgacgcttgcctgctgcgtcaagccgccccagagctaaagggtgcatatttgacatgttgcagtgacgggacggtccgtattctgaccaatgacaaatactacgagatagtgattaagaataagaccca

SEQ ID NO: 30002 - DNA, 1206 bp, Muscodor strobelii
  misc_feature: SGI cDNA ID NO. 570312
  misc_feature: Reduced expression when VOC is produced
  misc_feature: Encodes the peptide sequence at SEQ ID NO 30003
atggcgttgccgaataatatggaccccctggacagcgtggtctcgaactgtccagattggctgaagcgactcgaggagctgagcgggcagattcagcagcggcaaatggacctcgccaagttctctgagccacagtcgtctgctcgctccatccgcaaccgaggttcgacggaatcattgaagccgaaggacgacggtgcagcctttctccatgccgacccgaccttagatgctcctctcccgcccattgtgaccgatttcacagccccgccaaatgcgcagtctcatggccgtgagccgcctcccactccagccagtgacccgcggtcgacgaacacgaacgaaatcgtggcagcggcccagaggcgcgcccgtgcggcagtgcgaaagccaaggaagacggactccatgatcagcgccgaggggagtcggccgaaataccgaagtcggaggatggtactagtctattacgacagttttgtgcagtcattctttgaggaactggtcaagttcgtttcggcgcagcggaatatgatgcgcaaggcgaaaatggctgccaaggttgcccatatcagacgacttgccgagatggagatgccagaagacgaatctgatgacgctggtgatacgagtccggcaggcttgccttccgccggccctgttagtttcggcgcaggaaacaggccagacggcttagctccattggccctgggtactcgcccactaaggagtcaaaactttatgccaacgcgtggtatcagaaataatgcctttaacggcaggcttggatatttcaacgagaagggtgatatctgggataagctggacaaaggccttgaattcgtccagggaatgtgcgagcatgccgcgcaccagttccttcgtgatggagactgcgacgaagagattgtgagaatcaaggctcgactcgtggaggttcaggaggcagccgcaaaagagaaagagcgtgtatcccttgagaagagcggcgacgatagatataagcccgacgatcagcttgatgagcctgtcatgaaggcccgaacttaccgcccgatgacactgcggagggatactgcatctcatgcttccaagacatcagctcgagaggacgtgctggagatagacgaaggcattcaaatcgaagacatggatgatttcaagcccgtctatagatcgacaagactgatgaggaatgccgcatag

SEQ ID NO: 30003 - protein, 401 aa, Muscodor strobelii
  misc_feature: SGI Peptide ID NO. 570312
  misc_feature (7)..(365): NCBI GI: 145613710 Blast Desc: MGG_01421 [Magnaporthe grisea 70-15] gi|145020746|gb|EDK04875.1| MGG_01421 [Magnaporthe grisea 70-15]
  misc_feature (7)..(398): NCBI GI: 85108766 Blast Desc: NCU07003 [Neurospora crassa OR74A] gi|28924253|gb|EAA33407.1| [Neurospora crassa OR74A]
  misc_feature (7)..(401): NCBI GI: 261352710 Blast Desc: conserved [Verticillium albo-atrum VaMs.102]
  misc_feature (7)..(399): NCBI GI: 171683505 Blast Desc: protein product [Podospora anserina] gi|170941712|emb|CAP67366.1| protein product [Podospora anserina]
  misc_feature (7)..(399): NCBI GI: 46121859 Blast Desc: FG05307.1 [Gibberella zeae PH-1]
  misc_feature (7)..(379): NCBI GI: 116194490 Blast Desc: CHGG_03843 [Chaetomium globosum CBS 148.51] gi|88179756|gb|EAQ87224.1| CHGG_03843 [Chaetomium globosum CBS 148.51]
  misc_feature (7)..(399): NCBI GI: 256720925 Blast Desc: NECHADRAFT_101828 [Nectria haematococca mpVI 77-13-4]
  misc_feature (1)..(329): NCBI GI: 154309197 Blast Desc: BC1G_07493 [Botryotinia fuckeliana B05.10] gi|150852536|gb|EDN27728.1| BC1G_07493 [Botryotinia fuckeliana B05.10]
  misc_feature (1)..(328): NCBI GI: 156049849 Blast Desc: SS1G_08632 [Sclerotinia sclerotiorum 1980] gi|154693030|gb|EDN92768.1| SS1G_08632 [Sclerotinia sclerotiorum 1980]
  misc_feature (4)..(321): NCBI GI: 258573971 Blast Desc: [Uncinocarpus reesii 1704] gi|237901433|gb|EEP75834.1| [Uncinocarpus reesii 1704]
  misc_feature: Useful for introducing or modulating the production of volatile compounds
MALPNNMDPLDSVVSNCPDWLKRLEELSGQIQQRQMDLAKFSEPQSSARSIRNRGSTESLKPKDDGAAFLHADPTLDAPLPPIVTDFTAPPNAQSHGREPPPTPASDPRSTNTNEIVAAAQRRARAAVRKPRKTDSMISAEGSRPKYRSRRMVLVYYDSFVQSFFEELVKFVSAQRNMMRKAKMAAKVAHIRRLAEMEMPEDESDDAGDTSPAGLPSAGPVSFGAGNRPDGLAPLALGTRPLRSQNFMPTRGIRNNAFNGRLGYFNEKGDIWDKLDKGLEFVQGMCEHAAHQFLRDGDCDEEIVRIKARLVEVQEAAAKEKERVSLEKSGDDRYKPDDQLDEPVMKARTYRPMTLRRDTASHASKTSAREDVLEIDEGIQIEDMDDFKPVYRSTRLMRNAA

SEQ ID NO: 30004 - DNA, 2537 bp, Muscodor strobelii
  misc_feature: SGI EST ID NO. CUFF.70966.0
  misc_feature: Variant of the nucleotide sequence at SEQ ID NO 30002
cacaggcccagcacaggcggccgacagcagaagaaacaccattccatatgcccaccccacccatgtcgtctgccatggagcacaatcctattcattacacccgtcacccacacactgtagtctaattcgttttcttttcatccccatttctggtcccgttgctaccgcttgtttttggctctttgcttttgctctcgaccggccatcctcactcgcctgctcgatctcatattttgccacaaaagatcacgtcacgccacactagctcccgctatattgacagctgcacgtccatgcgtctcgttgctcctcgttcttatatcatcctcacggtcaaagcgagtcgctggctcttgatctagtggcagagacaacgtatgaaagaggtgccatccaacaccaacgtgcttgtctacaatcctcggtgaactctcccaattatccagccatgcggaattcagctgcactgtgacctcgacacgtctatcccgagcctcatccgcaattgacttggaggcactatccgatgccattgaggggctccgccctctttgaactcttgtcatagacgatcgatatttctcactatttctatatcaagatggcgttgccgaataatatggaccccctggacagcgtggtctcgaactgtccagattggctgaagcgactcgaggagctgagcgggcagattcagcagcggcaaatggacctcgccaagttctctgagccacagtcgtctgctcgctccatccgcaaccgaggttcgacggaatcattgaagccgaaggacgacggtgcagcctttctccatgccgacccgaccttagatgctcctctcccgcccattgtgaccgatttcacagccccgccaaatgcgcagtctcatggccgtgagccgcctcccactccagccagtgacccgcggtcgacgaacacgaacgaaatcgtggcagcggcccagaggcgcgcccgtgcggcagtgcgaaagccaaggaagacggactccatgatcagcgccgaggggagtcggccgaaataccgaagtcggaggatggtactagtctattacgacagttttgtgcagtcattctttgaggaactggtcaagttcgtttcggcgcagcggaatatgatgcgcaaggcgaaaatggctgccaaggttgcccatatcagacgacttgccgagatggagatgccagaagacgaatctgatgacgctggtgatacgagtccggcaggcttgccttccgccggccctgttagtttcggcgcaggaaacaggccagacggcttagctccattggccctgggtactcgcccactaaggagtcaaaactttatgccaacgcgtggtatcagaaataatgcctttaacggcaggcttggatatttcaacgagaagggtgatatctgggataagctggacaaaggccttgaattcgtccagggaatgtgcgagcatgccgcgcaccagttccttcgtgatggagactgcgacgaagagattgtgagaatcaaggctcgactcgtggaggttcaggaggcagccgcaaaagagaaagagcgtgtatcccttgagaagagcggcgacgatagatataagcccgacgatcagcttgatgagcctgtcatgaaggcccgaacttaccgcccgatgacactgcggagggatactgcatctcatgcttccaagacatcagctcgagaggacgtgctggagatagacgaaggcattcaaatcgaagacatggatgatttcaagcccgtctatagatcgacaagactgatgaggaatgccgcataggggagaaagtctagtcatgcttacacaattgcccatcactgtcagacttcgagcgatctcatcctaatccactacgcggcttcacttgtcataccaccatagtctacaccaccactgcagatctcgaatatctgcacttataatcaacaagaccggtcataacactcttgagacccatctacatatatcacatcttcctcgcatggttctgtcaaacccgaataactcgactccaaatcatttaactccctttttcgctcaacgtccgaagccgggtaacttgaacacgggaaaagttttattagaaacatttgcattttccggcgcccctaaacactaccatattaaagaacagcagcattgtcgattgcggtcattaccatcatcacgaggcgtttcgggaacctttcaaaattggacatttagctacgacggtatgaaacaggatttctgacggcctcaaacatagtgaaccaccatacacgtacataaaactagatctctgtgagatcacatactataatcaatgtgttgtaaggatgtcaacgataataagacgcatttcatacaacagaccaacaaaaatttgataggacatgcggggcactcaacatttcagagagtgcccaagtctgtgaggggagaaacgtgatggatgataccattagctcaaattaataaactaagttcatacaactctcgtcaattattacgatttagacacccccgg

SEQ ID NO: 30005 - DNA, 1893 bp, Muscodor strobelii
  misc_feature: SGI cDNA ID NO. 570313
  misc_feature: Reduced expression when VOC is produced
  misc_feature: Encodes the peptide sequence at SEQ ID NO 30006
atgtcggcgccacaattcccgccgccgttgtcgtacagcagcggccaaagcgtgtcccatcagcccaatattcggtctcctacgaccatcttaagtcctggctcaaccagctcaatctacgcttctccggactctgctcaccagccttactatttgaccaagtcggaacccgttgacgatgacggcagtacgggcagcagcgtcactagaggttcatccttgaccgaacccctgaaaaagaaacaaaagcgcaataagccaacactttcttgttacgagtgtgtcgaacgcaaaactaagtgtgatagaggcagaccgcattgtttagcatgtatcaaacgacagacggattgccgctacgctcacgtggcgaatcttcttgaggagacaacacgatccgctacaaacggccggagaatgactcggccacctaagaaaagatcatccacaagtgggatcaaaccgcacttaccgatcatagcggatagaggtacacatatcgaggagacggcttcgcgtgcgtttgtagcatcatctactggtctttactctaacacacctctgtcacacccagcaccatactccaatgtctttggaataggctctgagcacccctttgccaactactggacgtgcgagggcggattacctgaggtcatcggcgttcttccggagaaattgcaagctgatattctcctaagccaatactttgagtgtgtagatccaatttatcccatggtccacaaccaaagcttccatatggaatacgaacgcttctggatgatcaaggatacaggacagatagacgcttctttcttagctttgatattcgtcatgctagctcttggtacacagttcgtgtctacaaccaatcctagagaccgtaaacaatccgctgagttctacgcatcagccggcaaccaatccttacgcatgagttcatacctgagtactgcatctatatactctctgcaggcaatggttttacttggttactttctcataaacgataatcatgcctcagacggttgggcattcgcagggatactcatgcgacaggcttatgctatgggtcttcatagagacccgaacctagtgacaccggatgccacaccgtttgaaaaacagcagcgccgcaaattatggcaagcagtgctccttcaggacacttttctcactgttctgctctcactgcctccaagcgcaactcacaccgatgtcaagatcgacgactttgcagagtatgcagtcctagacgagacgacagtgccaacagacacagcgtacatcaaagggtcctggcaactcgcaaatttagtccaagagacaatatgcagcccacaatctctagacctcccaatctgttccacacagcgccagaaatccaagctcgtcgcggatttcaggagtgtgtatcgttcattcccagatatcttccgatcatgggaccaggattctatcgcacagctcgcaagcagcaacaagcgcgtagtcagacaaactctcttcctgtcgtcaaattactaccacaacctaatgctcgttcactcgtccgagagcgcagacgtaccagtgaacgttcgtgcgacgctcgaggctgcgcacgaagctatatccgcattttttgtgctttttacgctcttcgacaccgaggcgagagtgtggtgggtcttcaaccatcgcgcatttttagaggcgctgtgcattggtggtgtgttaagggaggcgagcaaggacccggcgatgattgacctcatgacgcgtgatccgttgttttcgaaggcgaaggcggatatcacgcgcatgatacaaatcatgaagataatgtcagaaggcgaccaagggtctgagattgcgcggacgagggtcaatgcgctgagtgactacctatga

SEQ ID NO: 30006 - protein, 630 aa, Muscodor strobelii
  misc_feature: SGI Peptide ID NO. 570313
  misc_feature (89)..(128): Pfam Id: PF00172 Pfam Desc: Fungal Zn(2)-Cys(6) binuclear cluster domain
  misc_feature (320)..(412): Pfam Id: PF04082 Pfam Desc: Fungal specific transcription factor domain
  misc_feature (320)..(401): Pfam Id: PF04082 Pfam Desc: Fungal specific transcription factor domain
  misc_feature (89)..(120): Pfam Id: PF00172 Pfam Desc: Fungal Zn(2)-Cys(6) binuclear cluster domain
  misc_feature (11)..(630): NCBI GI: 189339124 Blast Desc: Zn(II)2Cys6 transcription factor [Fusarium oxysporum]
  misc_feature (77)..(630): NCBI GI: 261352716 Blast Desc: Zn(II)2Cys6 transcription factor [Verticillium albo-atrum VaMs.102]
  misc_feature (11)..(630): NCBI GI: 46121863 Blast Desc: FG05309.1 [Gibberella zeae PH-1]
  misc_feature (54)..(630): NCBI GI: 156063574 Blast Desc: SS1G_01905 [Sclerotinia sclerotiorum 1980] gi|154697239|gb|EDN96977.1| SS1G_01905 [Sclerotinia sclerotiorum 1980]
  misc_feature (55)..(630): NCBI GI: 164429263 Blast Desc: NCU05308 [Neurospora crassa OR74A] gi|157073004|gb|EAA32843.2| conserved [Neurospora crassa OR74A]
  misc_feature (54)..(567): NCBI GI: 171688492 Blast Desc: protein product [Podospora anserina] gi|170944208|emb|CAP70318.1| protein product [Podospora anserina]
  misc_feature (66)..(630): NCBI GI: 154296997 Blast Desc: BC1G_12587 [Botryotinia fuckeliana B05.10] gi|150843114|gb|EDN18307.1| BC1G_12587 [Botryotinia fuckeliana B05.10]
  misc_feature (54)..(630): NCBI GI: 145603384 Blast Desc: MGG_06086 [Magnaporthe grisea 70-15] gi|145011623|gb|EDJ96279.1| MGG_06086 [Magnaporthe grisea 70-15]
  misc_feature (79)..(630): NCBI GI: 116196508 Blast Desc: CHGG_04852 [Chaetomium globosum CBS 148.51] gi|88180765|gb|EAQ88233.1| CHGG_04852 [Chaetomium globosum CBS 148.51]
  misc_feature (77)..(609): NCBI GI: 189198273 Blast Desc: Zn(II)2Cys6 transcription factor [Pyrenophora tritici-repentis Pt-1C-BFP] gi|187981422|gb|EDU48048.1| Zn(II)2Cys6 transcription factor [Pyrenophora tritici-repentis
  misc_feature: Useful for introducing or modulating the production of volatile compounds
MSAPQFPPPLSYSSGQSVSHQPNIRSPTTILSPGSTSSIYASPDSAHQPYYLTKSEPVDDDGSTGSSVTRGSSLTEPLKKKQKRNKPTLSCYECVERKTKCDRGRPHCLACIKRQTDCRYAHVANLLEETTRSATNGRRMTRPPKKRSSTSGIKPHLPIIADRGTHIEETASRAFVASSTGLYSNTPLSHPAPYSNVFGIGSEHPFANYWTCEGGLPEVIGVLPEKLQADILLSQYFECVDPIYPMVHNQSFHMEYERFWMIKDTGQIDASFLALIFVMLALGTQFVSTTNPRDRKQSAEFYASAGNQSLRMSSYLSTASIYSLQAMVLLGYFLINDNHASDGWAFAGILMRQAYAMGLHRDPNLVTPDATPFEKQQRRKLWQAVLLQDTFLTVLLSLPPSATHTDVKIDDFAEYAVLDETTVPTDTAYIKGSWQLANLVQETICSPQSLDLPICSTQRQKSKLVADFRSVYRSFPDIFRSWDQDSIAQLASSNKRVVRQTLFLSSNYYHNLMLVHSSESADVPVNVRATLEAAHEAISAFFVLFTLFDTEARVWWVFNHRAFLEALCIGGVLREASKDPAMIDLMTRDPLFSKAKADITRMIQIMKIMSEGDQGSEIARTRVNALSDYL

SEQ ID NO: 30007 - DNA, 4287 bp, Muscodor strobelii
  misc_feature: SGI EST ID NO. CUFF.71292.1
  misc_feature: Variant of the nucleotide sequence at SEQ ID NO 30005
agcacctgcttcagccattgaaaatcggcgttttggtatcgaacgacggcgggagaaccattgtattgcatcctttggaatcacggtatcttaacacggatggaacacgaaaccagtgatattgttctggactctaccaaattctatgaacgcccttcattcaacaggcttttgcagaagctaatcacttccgagttgagataatgagccacggctcaacccggcgcattgcggcaaacacttgtggatgtccagctcgccagtgtcgcggtttccatgtgtatgctctggcacacctcgagttgtttccttgtttttaagcaggtttggcttatggttatgatcatcatggcaaacagcgtacaaactgttcgcaacttcacagcaagacgattgcgctgcacgaatgagaagtcttcgaatgctccgggttgcactccgaatattctggttcgccacggcccacactgatgatccctgcaggtgacgccagacacaagagcggacagaaagcggactagcagcgcgattctgcacgtacacccaaatacgatcaaggcaacaaggttcgcagcctggtagcctttgaaggttagattcgcgacagcataattcgagaatgctggagctgaaaacgcaattaccaagcagctgcaagttgcgataagcgtgctcggagctgcgccatggaacaaccgtcttcaccggttcgaccagagccaacaaagcagttgaagtgtcgttggtgacgatgattatagtagatcgagttaatagcgtcgattggtgatgatgctatctgaggcgcttacatgcacacacgccttttgctccatgcggagtagcaacccataccccggtcggctcttggcttcaattaccttcagcccatgatgcttcttgctctcctgctcgccgcgtgctgatgaaggatgacttcggcatccagtccgcctaggaccaaacgtatggagcagcaaaggacactccatcttttgggagtccgagatcgttggatcccgtacgtagagaaggtggaaggtcgaggtcttgtggctgtctagaaaaactcaagtatattatatcattcatcagtctatagtccgccctgtggtatctccagttttctcaagagcgcgaaagaccgaagacgcagtctgagttccttctagctctcacagttgcattgccacaatccaatccaatccagttcaagcaccccgtcccatcttcctctccaggacccttcttgttattatatccatcctccccatttccaggtgttgattcgtacgagtctccatctatccctcaccatattgcccaccccgtggtattcccggtcagccaagcgcatttgagcctcactgcacgatccatccatcctaccctcggcagagcccttgccgctaatttacctagcgagacgcagcgttgtctccggagaagtactgctgtcggccgtgcctggtcgtgcgcgaccggatcgtcaggtcctgatctgacccacgacgacatccgctgcccgcatgtcggcgccacaattcccgccgccgttgtcgtacagcagcggccaaagcgtgtcccatcagcccaatattcggtctcctacgaccatcttaagtcctggctcaaccagctcaatctacgcttctccggactctgctcaccagccttactatttgaccaagtcggaacccgttgacgatgacggcagtacgggcagcagcgtcactagaggttcatccttgaccgaacccctgaaaaagaaacaaaagcgcaataagccaacactttcttgttacgagtgtgtcgaacgcaaaactaaggtaaggggaatcttttgagcacgcgcggctccccatcttaatttcatttagacttgcccatgctacactgtgtctgccgacgggaaggctcgggcagttaacctcaacatcacttaaaaaggggaagatacactcacaccgcgttagtacgacgtagtactggtgcaaggacctaagtattccgctaattggccacaattgctcatcatcgctcaaggcaacttcgtttatggctaattggggtctcgtccgacgtggggctgattaccgaaaagtgttgatatgacgacccaaattcatgaccaagcctatacattgccaattgcgttatttacttatgttttgtcgctttctatgacaagagcccgggggaaaatgcacacgaatcctggaaacataagcaatctgactattatctagtgtgatagaggcagaccgcattgtttagcatgtatcaaacgacagacggattgccgctacgctcacgtggcgaatcttcttgaggagacaacacgatccgctacaaacggccggagaatgactcggccacctaagaaaagatcatccacaagtgggatcaaaccgcacttaccgatcatagcggatagaggtacacatatcgaggagacggcttcgcgtgcgtttgtagcatcatctactggtctttactctaacacacctctgtcacacccagcaccatactccaatgtctttggaataggctctgagcacccctttgccaactactggacgtgcgagggcggattacctgaggtcatcggcgttcttccggagaaattgcaagctgatattctcctaagccaatactttgagtgtgtagatccaatttatcccatggtccacaaccaaagcttccatatggaatacgaacgcttctggatgatcaaggatacaggacagatagacgcttctttcttagctttgatattcgtcatgctagctcttggtacacagttcgtgtctacaaccaatcctagagaccgtaaacaatccgctgagttctacgcatcagccggcaaccaatccttacgcatgagttcatacctgagtactgcatctatatactctctgcaggcaatggttttacttggttactttctcataaacgataatcatgcctcagacggttgggcattcgcagggatactcatgcgacaggcttatgctatgggtcttcatagagacccgaacctagtgacaccggatgccacaccgtttgaaaaacagcagcgccgcaaattatggcaagcagtgctccttcaggacacttttctcactgttctgctctcactgcctccaagcgcaactcacaccgatgtcaagatcgacgactttgcagagtatgcagtcctagacgagacgacagtgccaacagacacagcgtacatcaaagggtcctggcaactcgcaaatttagtccaagagacaatatgcagcccacaatctctagacctcccaatctgttccacacagcgccagaaatccaagctcgtcgcggatttcaggagtgtgtatcgttcattcccagatatcttccgatcatgggaccaggattctatcgcacagctcgcaagcagcaacaagcgcgtagtcagacaaactctcttcctgtcgtcaaattactaccacaacctaatgctcgttcactcgtccgagagcgcagacgtaccagtgaacgttcgtgcgacgctcgaggctgcgcacgaagctatatccgcattttttgtgctttttacgctcttcgacaccgaggcgagagtgtggtgggtcttcaaccatcgcgcatttttagaggcgctgtgcattggtggtgtgttaagggaggcgagcaaggacccggcgatgattgacctcatgacgcgtgatccgttgttttcgaaggcgaaggcggatatcacgcgcatgatacaaatcatgaagataatgtcagaaggcgaccaagggtctgagattgcgcggacgagggtcaatgcgctgagtgactacctatgacgttcctagtagaagacgacaacaatgacgaaaacgagagatgattcatgtcttgcctagaagatgttctgttacctcaaagtagtcatcatcttgatccatgcatgcgattacgttagctgtcccatccttgatggcagcatgagtacaacagccgctgagagcgagaagaggaagatgataagagaggcatgaagtggagtagatatgggacggagaggaatctgagtgaacgaatagatgaagtaatgaaaagtccataaactctagtactatatatgtcattgtaaatcaccagctaacaccaacgggcgcatggtctagtggtatgattttcccttagcatgggagaggtccagggttcaattccctgtgcgtccagcactttggctctagtcaaaatttcacttcgaatttttattctcgtatgagtgtcactttcgat

SEQ ID NO: 30008 - DNA, 657 bp, Muscodor strobelii
  misc_feature: SGI cDNA ID NO. 570314
  misc_feature: Reduced expression when VOC is produced
  misc_feature: Encodes the peptide sequence at SEQ ID NO 30009
atgcgctgcaatgtgggcgcatcgtcaggtctcaaaaatcaaacggaaacagcaaccgtgcaggcaggcgatactgtaggctttgggatcgatgaaactttcggtcacccgggtatccaacaagtctatctttctcgcgcccccgatctatcaaatcagagcaattcatcaatttcagcagcagcagtgtatgacgggtctggcgactgggtgcgcatatactctttgacaaccacacccacattgccgaatgggacgggaactgctggcaagaacagctttgctgaagcgcaaccgggagctgttgactgggcgacacacaagctgacgaattttacgttcaatttgtcagacaagacccccgcgggtgaatatctaatgcgcgctgagggaatggcggtacacgctgcgcacaagccgggtggcgcacaattctacgtgagctgtgcgcaaatcaaagtagtcaacaagggaggatcatcaggaagaaatggctccgacttgaccccttcgctgagaataccaggtgcgtatagagggaacgaacctggtattctcattcctcagttttggtcctcgttgacaaggtatacgacgcctggtcctgcgttatggccacagggtacggaagaacagcatattgcccaacatctatga

SEQ ID NO: 30009 - protein, 218 aa, Muscodor strobelii
  misc_feature: SGI Peptide ID NO. 570314
  misc_feature (1)..(212): NCBI GI: 261356327 Blast Desc: cellulose-growth-specific protein [Verticillium albo-atrum VaMs.102]
  misc_feature (1)..(218): NCBI GI: 115402903 Blast Desc: conserved [Aspergillus terreus NIH2624] gi|114189374|gb|EAU31074.1| conserved [Aspergillus terreus NIH2624]
  misc_feature (1)..(212): NCBI GI: 256723479 Blast Desc: NECHADRAFT_42146 [Nectria haematococca mpVI 77-13-4]
  misc_feature (3)..(212): NCBI GI: 46116252 Blast Desc: FG03968.1 [Gibberella zeae PH-1]
  misc_feature (15)..(205): NCBI GI: 189202962 Blast Desc: fungal cellulose binding domain containing protein [Pyrenophora tritici-repentis Pt-1C-BFP] gi|187984916|gb|EDU50404.1| fungal cellulose binding domain
  misc_feature (15)..(205): NCBI GI: 169596128 Blast Desc: SNOG_00815 [Phaeosphaeria nodorum SN15] gi|160701235|gb|EAT92310.2| SNOG_00815 [Phaeosphaeria nodorum SN15]
  misc_feature (1)..(205): NCBI GI: 67540516 Blast Desc: AN6428.2 [Aspergillus nidulans FGSC A4] gi|40739260|gb|EAA58450.1| AN6428.2 [Aspergillus nidulans FGSC A4] gi|259479347|tpe|CBF69492.1| TPA: conserved [Aspergillus FGSC
  misc_feature (1)..(205): NCBI GI: 39946206 Blast Desc: MGG_08409 [Magnaporthe grisea 70-15] gi|145019929|gb|EDK04157.1| MGG_08409 [Magnaporthe grisea 70-15]
  misc_feature (1)..(205): NCBI GI: 256722491 Blast Desc: NECHADRAFT_7634 [Nectria haematococca mpVI 77-13-4]
  misc_feature (1)..(205): NCBI GI: 171683706 Blast Desc: protein product [Podospora anserina] gi|170941813|emb|CAP67466.1| protein product [Podospora anserina]
  misc_feature: Useful for introducing or modulating the production of volatile compounds
MRCNVGASSGLKNQTETATVQAGDTVGFGIDETFGHPGIQQVYLSRAPDLSNQSNSSISAAAVYDGSGDWVRIYSLTTTPTLPNGTGTAGKNSFAEAQPGAVDWATHKLTNFTFNLSDKTPAGEYLMRAEGMAVHAAHKPGGAQFYVSCAQIKVVNKGGSSGRNGSDLTPSLRIPGAYRGNEPGILIPQFWSSLTRYTTPGPALWPQGTEEQHIAQHL

SEQ ID NO: 30010 - DNA, 964 bp, Muscodor strobelii
  misc_feature: SGI EST ID NO. CUFF.71372.0
  misc_feature: Variant of the nucleotide sequence at SEQ ID NO 30008
ctgatatttcctgctctacaattaaagctcttgaggacacaatctgatacagctcgtgatgatatatgggctactacctacctttctaatatggattacggtaatacagtcagttagcgcccattgggtctacaatcgactgattgtcaacggttcgtatatcggagagccataccaatacatccgaccatcctctgatggaaacaacttcatttcaaatgttaactcaaccgatatgcgctgcaatgtgggcgcatcgtcaggtctcaaaaatcaaacggaaacagcaaccgtgcaggcaggcgatactgtaggctttgggatcgatgaaactttcggtcacccgggtatccaacaagtctatctttctcgcgcccccgatctatcaaatcagagcaattcatcaatttcagcagcagcagtgtatgacgggtctggcgactgggtgcgcatatactctttgacaaccacacccacattgccgaatgggacgggaactgctggcaagaacagctttgctgaagcgcaaccgggagctgttgactgggcgacacacaagctgacgaattttacgttcaatttgtcagacaagacccccgcgggtgaatatctaatgcgcgctgagggaatggcggtacacgctgcgcacaagccgggtggcgcacaattctacgtgagctgtgcgcaaatcaaagtagtcaacaagggaggatcatcaggaagaaatggctccgacttgaccccttcgctgagaataccaggtgcgtatagagggaacgaacctggtattctcattcctcagttttggtcctcgttgacaaggtatacgacgcctggtcctgcgttatggccacagggtacggaagaacagcatattgcccaacatctatgatatgctgatagtctctgcggtagtcaagttttataaatcgtagtgcgataataaaatgcgcttgcaatgctg

SEQ ID NO: 30011 - DNA, 441 bp, Muscodor strobelii
  misc_feature: SGI cDNA ID NO. 570315
  misc_feature: Encodes the peptide sequence at SEQ ID NO 30012
atgcgttatctcaccgctctctttgacggcttcgtcgctctcgctgtcggagctatcttgattgctgccaaagcaatcccgactaccgctgagatcactgagcgtgttgatggcatcgcgccccccacctatcagtacgaactcattctttacgagggtagtgctgtcaacggcgactgcaccggcaactatgttggatataaaagcggcatcgaccactgcttcaacttccatgatgtcaacggcatcctctgcatcgatatggaaaccttcaatggtcttcccaacgttgccttctgcgaatgggagtacatggctggcaacgattgcgatggtgacagtgtcgacaagacataccttgagcttggcggcaagaaggcaggccacgatcttcatgaagctatcaagagcatcaaggtcgtctgcggcgctacgcactag

SEQ ID NO: 30012 - protein, 146 aa, Muscodor strobelii
  misc_feature: SGI Peptide ID NO. 570315
MRYLTALFDGFVALAVGAILIAAKAIPTTAEITERVDGIAPPTYQYELILYEGSAVNGDCTGNYVGYKSGIDHCFNFHDVNGILCIDMETFNGLPNVAFCEWEYMAGNDCDGDSVDKTYLELGGKKAGHDLHEAIKSIKVVCGATH

SEQ ID NO: 30013 - DNA, 1014 bp, Muscodor strobelii
  misc_feature: SGI cDNA ID NO. 570316
  misc_feature: Reduced expression when VOC is produced
  misc_feature: Encodes the peptide sequence at SEQ ID NO 30014
atggctgaagaagacgtggttctgatcacccagctgcccgcagactcgtggttcgaggggtttgcggtccgtcccgacggtaccattattgccgcgagaatcgacaaggctgagatatacaccgtcattcccgacgaagagataccgcatctcctgtactcgttctcagatgagcacaactgcgtcaccaacattggaccgatcccaggctttgacgatgagtacatcatcctcgtcagcaccgccaatctggagatagtgtcgcagaagaatctttggctctacagactgaccgtgagcggcaccggcagggatgcggtgccaaccctaaaacgactggtcgaggtgacggtggaaggctattgtctaggtgttgttcccatatcagagcgtatcgtcctgataccggacgccggaaatgcctgcatctggcgggtagacacagtgaccgggaagaaggacgtatttgccgccgatgaatcgatgaaagtggttggcgacggggccttttttggaatcaatcgcataaaggtggtcgacaactacctgtattacactaacactagctctggtgccatcggccggatcccaatcgctacggagacagagccacatgaattaggcatccgaatcagcgggccggtagagattgtcatttcggatctgccgaggcatctcgagggcctcgccgtgagctcggatcagacacacgcgtatgtcgccagtcaccttgacggacacctgcataaggtgacgatcgatccagcgacaggaaaaggcacatcgcaaatgatcatgtccagccttgacaagccaacgggattgaatctcgtaccgacacccggaagcccggataaatcgacgctgtatatcatctgctgcggtgagatcgaagttgcatggatgattgccgacaaggaagacccctggaaagctttccgcgacctcaataatgagacgacgcagtatacggtcacgcaagaggttaccgagaccgagcagaggctcatctga

SEQ ID NO: 30014 - protein, 337 aa, Muscodor strobelii
  misc_feature: SGI Peptide ID NO. 570316
  misc_feature (16)..(295): NCBI GI: 119482818 Blast Desc: NFIA_026140 [Neosartorya fischeri NRRL 181] gi|119409592|gb|EAW19540.1| conserved [Neosartorya fischeri NRRL 181]
  misc_feature (15)..(304): NCBI GI: 115397413 Blast Desc: [Aspergillus terreus NIH2624] gi|114192489|gb|EAU34189.1| [Aspergillus terreus NIH2624]
  misc_feature (16)..(254): NCBI GI: 242792079 Blast Desc: conserved [Talaromyces stipitatus ATCC 10500] gi|218718468|gb|EED17888.1| conserved [Talaromyces stipitatus ATCC 10500]
  misc_feature (2)..(251): NCBI GI: 212535108 Blast Desc: conserved [Penicillium marneffei ATCC 18224] gi|210070109|gb|EEA24199.1| conserved [Penicillium marneffei ATCC 18224]
  misc_feature (9)..(296): NCBI GI: 256722322 Blast Desc: NECHADRAFT_54333 [Nectria haematococca mpVI 77-13-4]
  misc_feature (14)..(297): NCBI GI: 256721057 Blast Desc: NECHADRAFT_55444 [Nectria haematococca mpVI 77-13-4]
  misc_feature (9)..(295): NCBI GI: 259480636 Blast Desc: TPA: conserved [Aspergillus nidulans FGSC A4]
  misc_feature (16)..(222): NCBI GI: 119500840 Blast Desc: NFIA_107720 [Neosartorya fischeri NRRL 181] gi|119415342|gb|EAW25280.1| conserved [Neosartorya fischeri NRRL 181]
  misc_feature (9)..(295): NCBI GI: 67901802 Blast Desc: AN7888.2 [Aspergillus nidulans FGSC A4] gi|40740352|gb|EAA59542.1| AN7888.2 [Aspergillus nidulans FGSC A4]
  misc_feature (17)..(222): NCBI GI: 70994304 Blast Desc: conserved [Aspergillus fumigatus Af293] gi|66849615|gb|EAL89943.1| conserved [Aspergillus fumigatus Af293]
  misc_feature: Useful for introducing or modulating the production of volatile compounds
MAEEDVVLITQLPADSWFEGFAVRPDGTIIAARIDKAEIYTVIPDEEIPHLLYSFSDEHNCVTNIGPIPGFDDEYIILVSTANLEIVSQKNLWLYRLTVSGTGRDAVPTLKRLVEVTVEGYCLGVVPISERIVLIPDAGNACIWRVDTVTGKKDVFAADESMKVVGDGAFFGINRIKVVDNYLYYTNTSSGAIGRIPIATETEPHELGIRISGPVEIVISDLPRHLEGLAVSSDQTHAYVASHLDGHLHKVTIDPATGKGTSQMIMSSLDKPTGLNLVPTPGSPDKSTLYIICCGEIEVAWMIADKEDPWKAFRDLNNETTQYTVTQEVTETEQRLI

SEQ ID NO: 30015 - DNA, 2278 bp, Muscodor strobelii
  misc_feature: SGI EST ID NO. CUFF.71002.0
  misc_feature: Variant of the nucleotide sequence at SEQ ID NO 30013
gaaagcggggtcagcgtcacatcgaatccgaaaacgggtacagtcccgtgggatcctgcgtagggacaatgccttgcagtagcgctcggcgctcacccgagtctcgtctgacatattcgtctgacatacgatatgccgctttgctccttttgatccttttacgcgcatacctgggataggacctccgttctctccctatcatcccttcagtcccggcttgttgtcgacctagcgcgcgagagagtgtgtgttccctgttgtccgcagaagaagtagaacgatggctgaagaagacgtggttctgatcacccagctgcccgcagactcgtggttcgaggggtttgcggtccgtcccgacggtaccattattgccgcgagaatcgacaaggctgagatatacaccgtcattcccgacgaagagataccgcatctcctgtactcgttctcagatgagcacaactgcgtcaccaacattggaccgatcccaggctttgacgatgagtacatcatcctcgtcagcaccgccaatctggagatagtgtcgcagaagaatctttggctctacagactgaccgtgagcggcaccggcagggatgcggtgccaaccctaaaacgactggtcgaggtgacggtggaaggctattgtctaggtgttgttcccatatcagagcgtatcgtcctgataccggacgccggaaatgcctgcatctggcgggtagacacagtgaccgggaagaaggacgtatttgccgccgatgaatcgatgaaagtggttggcgacggggccttttttggaatcaatcgcataaaggtggtcgacaactacctgtattacactaacactagctctggtgccatcggccggatcccaatcgctacggagacagagccacatgaattaggcatccgaatcagcgggccggtagagattgtcatttcggatctgccgaggcatctcgagggcctcgccgtgagctcggatcagacacacgcgtatgtcgccagtcaccttgacggacacctgcataaggtgacgatcgatccagcgacaggaaaaggcacatcgcaaatgatcatgtccagccttgacaagccaacgggattgaatctcgtaccgacacccggaagcccggataaatcgacgctgtatatcatctgctgcggtgagatcgaagttgcatggatgattgccgacaaggaagacccctggaaagctttccgcgacctcaataatgagacgacgcagtatacggtcacgcaagaggttaccgagaccgagcagaggctcatctgacatgggcactgcaccccggcttaacgtatgttgatgctatcttcatcagccttaggccacacagcaaagcgaataagacgttgagagtcgcttcaacatctattaggatttttagggtatatatggtgcattgtgatggcgtttactccaccgatatgtaacggttacatcgacctggtgcataacgccaccaaaccaacaactgatggccgatcagcaatgttactcgatcgacatcgaggtggtattgcagtgtatctctttcatccaatcacggacgtccgcgaggtgatgcgactctaggaagtcgagggaagtatcaagcgcatagacaacgaagactaggaggatctggggggatgatgtacgaacaaagcgattcaaaattcaagcgacggattgcatcatgaggtacgaagggatgcttgcgttttgatagaacctgggaaacggcgtctgtatcaatgttcactcactcataatcgttcctccgaggcgaacttgtgaagcttacagtgacaatcaggtgtaaacagagttgactgattcatctagggacacgacttgagcttacaagactgatagtcaatagcgaaaatgcctcgagtctgttctaccaacgtaggaatcttcgattcggtatgcgttcaaggaaaatctttctcaccgccgatgccggacaaaacagggaatatgcacttgccaattgtgacacgcgcaaacagagcaacatcaaccttcagagcccactatttcctatcgagactatgacacttgagtagcgagggccgaatcacgatgccggcggttccatttgcgcacttactctgttacggccgatttgacaacatcatgccaatatctctaggtttacaactacatcttgatatgggggtaacacatgcgtaacactcgatgtcgcacagtcatttcaggaatcaatagcaatcgaactttcgacgcaaacggccccagcctcctctc

SEQ ID NO: 30016 - DNA, 1791 bp, Muscodor strobelii
  misc_feature: SGI cDNA ID NO. 570317
  misc_feature: Encodes the peptide sequence at SEQ ID NO 30017
atggaacaaactcaggaaccacgagatgagccgtctgatccaatatttgaactcaaccacagccgcgtagtggctaagaaaccttcatcgaccacggttggcctaacaatggcatcactttgcttgtctgcctttctttcgtcgctggatctcaccatagtaactacggctgtgcctgctatcgtggccggtttgcaatcaagctcagggtacatatggattggctctgcgttcatcctcggatttacagcagttacgccaatctggggatcagttgcggacttatggggacggaagccaattattctgactgcactatctatcttccttgctagcagtcttctatgcgccttgtcgccggatataaatactctcatagctggtcgggttattcagggtatcggcgcatcgggcatgggtgtaatggtgaacactatcatttgtgatatgttttccttgcgtgagcgtggactatatctcgccgttacatctggcgtctgggctgtcggaagcgcggtcggcccaataattggcggagtcttcaccacgcgcttgagttggagatggtgcttctggatcaacctgcctatcggtgctatagtctttcttgttcttctcgtctttctcaacgtcccctctccaaacacatctttctggaaaggacttaaagccatcgattggactggcagcgccttatgtctaggtggaactctcggtatgtatggaagtatcccacgcgaggttttttttgaccgtgctttcagacatcatactgatttatttataatggtcctcctggggcttgattttggtgatgcggtccatccctggtcatctgcaacagtcatcaacctagtcgtattcggcgcattgacaatcggcatcttccttgtgaatgaatggaaattcgcacagaatccgataatgccgcttcgtctcctgtccagctggtcgaaatctgccgcgtacggcgtgtttgcttttaatgcgtatgttttcatcggcatcacgtactacctgccattatactgtcagtccgtcctagggacgaatgcgctaacgtctgggatctacatgttaccattgattgtctcttgctcgttgtcagcagcctgtgcaggtatctttatacaacagactgggagataccgagctctcatgtatacagcccaagtactcctggtacttggtatcggcctgttcatctatctcaagttcgagagagacttgacacaactttttgtgttccagatcctcattggcgtcggtgtaggacttaatattgaagcacccattattgcagcacaagcctcaactacgatcaaggacacggctgcagtcatctctaccatgagctttcttcgctccatagcgactgcggtttctgtcgtagttggcggtgttattttccaaaacgagatgaacaccaacaacccagctctcgtggttcaactcgggtttgagctagccagccagtttgacggcggcaatgccactacaaacattgcaacgatcagctaccttccaaaataccagcagaacatcgtcagacagacgtattatcagtcaatcaaggtcatttggatcacgtatattgccttcgctggccttgcttctttcttcaacatctttgtaagacaacatcatctaagcaaagaacacgaagagactgttttgggcgtagaacgggggcagccatccagcacgccacttcgtacccagacgatcgagttaaacaatctggcagagagtggaaacacgcgaaattctttgagaaatcgtcgcacgtag

SEQ ID NO: 30017 - protein, 596 aa, Muscodor strobelii
  misc_feature: SGI Peptide ID NO. 570317
  misc_feature (40)..(463): Pfam Id: PF07690 Pfam Desc: Major Facilitator Superfamily
  misc_feature (67)..(138): Pfam Id: PF00083 Pfam Desc: Sugar (and other) transporter
  misc_feature (20)..(586): NCBI GI: 119497561 Blast Desc: MFS transporter, [Neosartorya fischeri NRRL 181] gi|119413701|gb|EAW23642.1| MFS transporter, [Neosartorya fischeri NRRL 181]
  misc_feature (1)..(586): NCBI GI: 121719130 Blast Desc: MFS transporter, [Aspergillus clavatus NRRL 1] gi|119404495|gb|EAW14871.1| MFS transporter, [Aspergillus clavatus NRRL 1]
  misc_feature (29)..(580): NCBI GI: 255941218 Blast Desc: Pc16g10710 [Penicillium chrysogenum Wisconsin 54-1255] gi|211586001|emb|CAP93741.1| Pc16g10710 [Penicillium chrysogenum Wisconsin 54-1255]
  misc_feature (50)..(591): NCBI GI: 145228623 Blast Desc: An01g01810 [Aspergillus niger] gi|134054711|emb|CAK43552.1| protein product [Aspergillus niger]
  misc_feature (3)..(529): NCBI GI: 159124826 Blast Desc: MFS multidrug transporter, [Aspergillus fumigatus A1163]
  misc_feature (52)..(595): NCBI GI: 171691552 Blast Desc: protein product [Podospora anserina] gi|170945724|emb|CAP71837.1| protein product [Podospora anserina]
  misc_feature (2)..(569): NCBI GI: 256728769 Blast Desc: NECHADRAFT_50663 [Nectria haematococca mpVI 77-13-4]
  misc_feature (70)..(595): NCBI GI: 171677029 Blast Desc: protein product [Podospora anserina] gi|170936582|emb|CAP61241.1| protein product [Podospora anserina]
  misc_feature (9)..(585): NCBI GI: 169774435 Blast Desc: [Aspergillus oryzae RIB40] gi|83769548|dbj|BAE59683.1| protein product [Aspergillus oryzae]
  misc_feature (13)..(562): NCBI GI: 255939984 Blast Desc: Pc16g04060 [Penicillium chrysogenum Wisconsin 54-1255] gi|211585384|emb|CAP93076.1| Pc16g04060 [Penicillium chrysogenum Wisconsin 54-1255]
MEQTQEPRDEPSDPIFELNHSRVVAKKPSSTTVGLTMASLCLSAFLSSLDLTIVTTAVPAIVAGLQSSSGYIWIGSAFILGFTAVTPIWGSVADLWGRKPIILTALSIFLASSLLCALSPDINTLIAGRVIQGIGASGMGVMVNTIICDMFSLRERGLYLAVTSGVWAVGSAVGPIIGGVFTTRLSWRWCFWINLPIGAIVFLVLLVFLNVPSPNTSFWKGLKAIDWTGSALCLGGTLGMYGSIPREVFFDRAFRHHTDLFIMVLLGLDFGDAVHPWSSATVINLVVFGALTIGIFLVNEWKFAQNPIMPLRLLSSWSKSAAYGVFAFNAYVFIGITYYLPLYCQSVLGTNALTSGIYMLPLIVSCSLSAACAGIFIQQTGRYRALMYTAQVLLVLGIGLFIYLKFERDLTQLFVFQILIGVGVGLNIEAPIIAAQASTTIKDTAAVISTMSFLRSIATAVSVVVGGVIFQNEMNTNNPALVVQLGFELASQFDGGNATTNIATISYLPKYQQNIVRQTYYQSIKVIWITYIAFAGLASFFNIFVRQHHLSKEHEETVLGVERGQPSSTPLRTQTIELNNLAESGNTRNSLRNRRT

SEQ ID NO: 30018 - DNA, 972 bp, Muscodor strobelii
  misc_feature: SGI cDNA ID NO. 570318
  misc_feature: Reduced expression when VOC is produced
  misc_feature: Encodes the peptide sequence at SEQ ID NO 30019
atgtctgcccaacccacggccaacggcggaagctcggccgacactctcaaaggcaatgcccaggctgcctacgaccagattgccaacgggcccctcgccgccaacgtcaaggaccagactgcgaagacgggcgccgagttctccaacctcgccaactctcgccagacgcctgcaaacccagctgccaccggccagcccctcacccactaccactccttcttctccgagctgctctcgtggaacaaccctcgtgcctccgccattgcttacgccagcatcgccaccttgatcttcgcgactagatatctcgacatcatccgatactcgttcaagctcacatacctgaccctcggcatcaccgtgctagccgaggccgccggcaagctcgtccttggcaacggcctcgcctcccagctacgaccccgcaagtactacaccgtctcccgcgagaccctcgactccatgatcggtgacgtccacgagctcgtcaacttcttcgccatcgaggcccagcgcatagtattcgctgagaacatcggtgcctctgtcgttgctgccgtcggcgctttcctctcatactatctggtcaagattgtgccttactggggccttgcgttgattgctaccacccttgccttcatcgtgcctctcatctacaccaccaaccaggagctcatcgacaaccaactgcagcatgcctccgacttgctcaacaagcagaccgagcagctgcgcgaggtcgccagcaagcacacttcccaggccaccgagatcaccaagcagtacatgggcgactacaccgccaaggcccagcagatgatccgtggaggttccgcctctcccgagcccgtctccaagcctgctcctcagtctggtcttaaggagaccgacttccccaaggctcccaaggaggtcttccccgatgcccctaagaacgacatcaagaccgagaaggagcccctgatctcctaa

SEQ ID NO: 30019 - protein, 323 aa, Muscodor strobelii
  misc_feature: SGI Peptide ID NO. 570318
  misc_feature (74)..(250): Pfam Id: PF02453 Pfam Desc: Reticulon
  misc_feature (5)..(323): NCBI GI: 39944372 Blast Desc: conserved [Magnaporthe grisea 70-15] gi|145014935|gb|EDJ99503.1| conserved [Magnaporthe grisea 70-15]
  misc_feature (2)..(322): NCBI GI: 261352454 Blast Desc: cwl1 [Verticillium albo-atrum VaMs.102]
  misc_feature (5)..(323): NCBI GI: 59802823 Blast Desc: cell lysis protein-like protein [Magnaporthe grisea]
  misc_feature (7)..(323): NCBI GI: 171683261 Blast Desc: protein product [Podospora anserina] gi|170941590|emb|CAP67244.1| protein product [Podospora anserina]
  misc_feature (5)..(322): NCBI GI: 256727544 Blast Desc: [Nectria haematococca mpVI 77-13-4]
  misc_feature (7)..(322): NCBI GI: 164425138 Blast Desc: NCU06361 [Neurospora crassa OR74A] gi|157070806|gb|EAA33159.2| conserved [Neurospora crassa OR74A]
  misc_feature (5)..(304): NCBI GI: 46136561 Blast Desc: FG09796.1 [Gibberella zeae PH-1]
  misc_feature (19)..(323): NCBI GI: 156063698 Blast Desc: SS1G_01967 [Sclerotinia sclerotiorum 1980] gi|154697301|gb|EDN97039.1| SS1G_01967 [Sclerotinia sclerotiorum 1980]
  misc_feature (11)..(304): NCBI GI: 116194664 Blast Desc: CHGG_03930 [Chaetomium globosum CBS 148.51] gi|88179843|gb|EAQ87311.1| CHGG_03930 [Chaetomium globosum CBS 148.51]
  misc_feature (27)..(323): NCBI GI: 154318564 Blast Desc: BC1G_02671 [Botryotinia fuckeliana B05.10] gi|150857801|gb|EDN32993.1| BC1G_02671 [Botryotinia fuckeliana B05.10]
  misc_feature: Useful for introducing or modulating the production of volatile compounds
MSAQPTANGGSSADTLKGNAQAAYDQIANGPLAANVKDQTAKTGAEFSNLANSRQTPANPAATGQPLTHYHSFFSELLSWNNPRASAIAYASIATLIFATRYLDIIRYSFKLTYLTLGITVLAEAAGKLVLGNGLASQLRPRKYYTVSRETLDSMIGDVHELVNFFAIEAQRIVFAENIGASVVAAVGAFLSYYLVKIVPYWGLALIATTLAFIVPLIYTTNQELIDNQLQHASDLLNKQTEQLREVASKHTSQATEITKQYMGDYTAKAQQMIRGGSASPEPVSKPAPQSGLKETDFPKAPKEVFPDAPKNDIKTEKEPLIS

SEQ ID NO: 30020 - DNA, 1563 bp, Muscodor strobelii
  misc_feature: SGI EST ID NO. CUFF.71436.1
  misc_feature: Variant of the nucleotide sequence at SEQ ID NO 30018
gctacgcagaacagcccactattgtgacgctgtgggcggacccgtcgtatttgctccgtcaacacttccaacttttccctccctcccgacaggacaacaaagccatcaatctcttctccgaccaacctcaaccacctcgcatcggcctctcaaatcctccttgaccacaaccacgccatctgtctaccttatctcaccagcatatctgccacagcccttcgtcgccatgtctgcccaacccacggccaacggcggaagctcggccgacactctcaaaggcaatgcccaggctgcctacgaccagattgccaacgggcccctcgccgccaacgtcaaggaccagactgcgaagacgggcgccgagttctccaacctcgccaactctcgccagacgcctgcaaacccagctgccaccggccagcccctcacccactaccactccttcttctccgagctgctctcgtggaacaaccctcgtgcctccgccattgcttacgccagcatcgccaccttgatcttcgcgactagatatctcgacatcatccgatactcgttcaagctcacatacctgaccctcggcatcaccgtgctagccgaggccgccggcaagctcgtccttggcaacggcctcgcctcccagctacgaccccgcaagtactacaccgtctcccgcgagaccctcgactccatgatcggtgacgtccacgagctcgtcaacttcttcgccatcgaggcccagcgcatagtattcgctgagaacatcggtgcctctgtcgttgctgccgtcggcgctttcctctcatactatctggtcaagattgtgccttactggggccttgcgttgattgctaccacccttgccttcatcgtgcctctcatctacaccaccaaccaggagctcatcgacaaccaactgcagcatgcctccgacttgctcaacaagcagaccgagcagctgcgcgaggtcgccagcaagcacacttcccaggccaccgagatcaccaagcagtacatgggcgactacaccgccaaggcccagcagatgatccgtggaggttccgcctctcccgagcccgtctccaagcctgctcctcagtctggtcttaaggagaccgacttccccaaggctcccaaggaggtcttccccgatgcccctaagaacgacatcaagaccgagaaggagcccctgatctcctaagctggttatttgaccagacggcaaattcaagcccttggcccttgagcaaacacatgatacctaacacagcttcacgcaacatgagaatatgatgaggaaaagggagattgggatgagagggttagggcaggctttcggcagtggtaatatgataccgtctcctgtactgtattatgaatgttttatgtcttttttgccttcctgcaggtgacggcatggtataaattgtgatacgagcggggtgacttttttactaactatcggataggccggcgaataacgctggtatgaatacacatctaaaaatcgacgacgaactgcctaagcgtagataatcatactaccagatttgaactagtctagtg

SEQ ID NO: 30021 - DNA, 3777 bp, Muscodor strobelii
  misc_feature: SGI cDNA ID NO. 570319
  misc_feature: Encodes the peptide sequence at SEQ ID NO 30022
atgtctattacgagattcttcaatcgtatcggacgcttgtttcttcatcccgcgatcaaggaagatccaggcccgccgccagatggtggtactcgcgcttggctccaaatcgttgccgggcatctcataaactcgctcacatggggttatcctgcctctttcggggtatatcagctttattacacaaccaatctcgcccttccggaatcccaagtggcctggataggttctgtacaagtttttctaacattcttcgtgggcactttttccggccgctccgccgacgccggatatgcccgccacacggttttcttgggttccgtgctcattgtagtagggacttttacgactagtcttgccactaagtattgggagattttcctcgctcaaggactatgtactggacttggtatgggcatcctctatatgcccgctgtagctgtcatcggttcgtattggaaaacgaacaaggccatggctctgggcatggctgctgccggcagtggcactggtagcatcatcttcctcctagtggtccaaaacctcgaacctaaagtcgggtttgcaaaagccgttcagacccagggttatatcgtgttagcttttgcagtcatcattaatctactccttcgaccgcgattgcctcctcggaaaaccggttccttagtagaatggcatgcgtttcttgagccaacctatgccctattcaccattggcgtgtttctcgtattctgggctttgtacttctgttttttctacataaatacctacgccacttcagttatcggcctgtctcccgaggctgctgtgtatcttcttgtcgttatcagcgctgtcggtatcccactacggccggttctagggtttgttgcagaccgatacttcggtgcgttgcctaccctcatcgtttcggcagcaatccttgggatactgctgtatgtgtggattcctgtctacaatatcagcgggctatatgtatggtcggtcttctacggattggcaacaggcgctacgcaaggaatttttgtcggtgggcttgcctcgttaacgacggatccaagtaagatgggtacgcgctttggaatggtttgctctgtgctagcatttgcaacactagctgggccacctttcgctggtgccctcctccaattgggacacggtgacttcactagagcacaagtttgggctggaacggtcaatgttgctggcagtcttttcatatgtgcagcgaaatggaggcagataaaggcagaaaggcagccaaaatctgacgtgaagtccgaggaagatcagccaagacatgttttagaatcgaacaacgcatataaggacgacactggtctcgtggcatcgtggctcgctactaccgcaaaagaatgcgggtaccatgcgcagcaacaaaagcaacccggccggccaaagggcaaggcgcggaaacaaatgaagcaatcacagaaggccgtgcctgaagatccagcccgagattcccctgacacgccgccgaaatacgttctcgcgattcgagattttgttccaatggctgagcatattgctaaaactatactcaatgattcatcaagaaagattcctagcgtcttctctgttgctcttgagcgtgtcatcttggtgcgtaagggtttctcagaaaaactgaaagagtaccggaagataaccaatgagctgagcgatgatcgacatacgtattttgtggagatactggaacaagtccgcaatacattgaaacctctcatggaatccgatactctgaaagtggccgacttaaaggaagcaattaccgaggtcggcaaatcaaagacaccttctaagatacaaaacatgtttgaacatctggatgtgtacgagccatctgctgcgtttcttgaagccccgaatgttgagagacctcaacccgtcagactcgagtatactactgaacgcgagcaaacaatggaagaagatgtgttcacagctcttctcctgcttcgagacctagctcaaatgcgagacgccgttaagaacctttgggatcagtacaaagtgggcgatcttgaccttgcggcggtctcggtcgcaatcaatacgactatcgagctcgctcgtagcttagaagaagatatggaggagctgattgaacgtcttggcggtagtcaagtaccccttcaaactgtttggaacgcttcaagcctagctataggactccatccacacgacaaacagcgatctggcgacgcgttcaacttggctacgtttgatctgggttgtgactctttcgctgttactggtatacttcttgacgcctatcaacgggcgaacccgaaaggctcgttgccatcttacaacggtaagtacggatggtatgatgaagacattactggacctgggctttccaacaggcaaaagtggtcgcagttacaaacggccgtcctggagatacttcctgacgtcgatttcatgggttctacgttgaaaatagcccctgtcgaagacgagttgatacgcggtatcagacaaatgcaaaatacaggcaaggtgcccatttgggtatgcttcgctgcacaactctattatgatacccttacgatcctaggtcctcggagcaaggatggcaacatcgaactgagaaagacacgcatacggatacagaagacattggtaaatgtcacagcgaaatcaaaagagcggcagcagttgctcagggaccttacgttctgggagaatgatgtgctttacttttgccgtaacagaatgaaacacaattcagaaatgaacggctatcacccattcaaatttctagaacgtcatccggtatattgcggcctttggattcatcaccttagaacgagcttccatacattcggagccacttatgcagcagtcccgggcggggtcatgtgtaccgcgcagctctatcatgcgttgaagctagagggacatgttgcatcacactgggaggatctggagaaattcatgagcatgcaagggaattcaaccttcttcgttggtgagccgccaacaacactcgaagcacatttcaaaaatttctgtctttgccttggcatgtcgacaacaaattgggcgccgaataaacgaaagggccagttgcgacagacacaggcaactgttcggaacttgaagttcaaaggctgggcctcgttaattatcagggacagattcgtcacctttgtggaaagaaggccaatatcatccgagaaaatcgagcaaatactcgaagccgggagaaagagtcaacgggtaggtcgtaaggaagtcgaaactaatgagcaaataaaggctacggattccagtgcaacgatcaccccagcaggtcttatcatgcagcttgcgcgaacaataacttcagaggtgccagacttactttttgacacttggacacttcacaaccaatgctggcagttgttgcttgacatgaaacgacaatttggccagcgcctcggtctcacagacacgcttaacaaagcaataccacgagaagaacagctgccatctgtcgtagggtatgtgttttcaaccgcggccgggaaaatggacatcacaaagactactacaccacgtatggacctgatgatggttgcttctgagatgatgatcacctacctatcagaaggtaaaggccacattattagagatgaagcgaatgcagctatagaccctgatgagaaggtggcgattgatactgagcacaccacagaagacttgtggaggacagaacaggcgctccaaaaagtggcacaaactggtgactgcgctccgcagtaa

SEQ ID NO: 30022 - protein, 1258 aa, Muscodor strobelii
  misc_feature: SGI Peptide ID NO. 570319
  misc_feature (37)..(375): Pfam Id: PF07690 Pfam Desc: Major Facilitator Superfamily
  misc_feature (19)..(430): NCBI GI: 256728141 Blast Desc: NECHADRAFT_53888 [Nectria haematococca mpVI 77-13-4]
  misc_feature (17)..(399): NCBI GI: 46125513 Blast Desc: FG07134.1 [Gibberella zeae PH-1]
  misc_feature (442)..(1230): NCBI GI: 256735610 Blast Desc: NECHADRAFT_75637 [Nectria haematococca mpVI 77-13-4]
  misc_feature (17)..(411): NCBI GI: 256730939 Blast Desc: [Nectria haematococca mpVI 77-13-4]
  misc_feature (25)..(422): NCBI GI: 169772557 Blast Desc: [Aspergillus oryzae RIB40] gi|83768608|dbj|BAE58745.1| protein product [Aspergillus oryzae]
  misc_feature (25)..(422): NCBI GI: 238490472 Blast Desc: monocarboxylate permease, [Aspergillus flavus NRRL3357] gi|220696886|gb|EED53227.1| monocarboxylate permease, [Aspergillus flavus NRRL3357]
  misc_feature (26)..(411): NCBI GI: 171692291 Blast Desc: protein product [Podospora anserina] gi|170946094|emb|CAP72895.1| protein product [Podospora anserina]
  misc_feature (25)..(440): NCBI GI: 242778089 Blast Desc: monocarboxylate permease, [Talaromyces stipitatus ATCC 10500] gi|218722787|gb|EED22205.1| monocarboxylate permease, [Talaromyces stipitatus ATCC 10500]
  misc_feature (18)..(418): NCBI GI: 238842446 Blast Desc: conserved [Microsporum canis CBS 113480]
  misc_feature (25)..(411): NCBI GI: 145258840 Blast Desc: An04g08320 [Aspergillus niger] gi|134074803|emb|CAK44798.1| protein product [Aspergillus niger]
MSITRFFNRIGRLFLHPAIKEDPGPPPDGGTRAWLQIVAGHLINSLTWGYPASFGVYQLYYTTNLALPESQVAWIGSVQVFLTFFVGTFSGRSADAGYARHTVFLGSVLIVVGTFTTSLATKYWEIFLAQGLCTGLGMGILYMPAVAVIGSYWKTNKAMALGMAAAGSGTGSIIFLLVVQNLEPKVGFAKAVQTQGYIVLAFAVIINLLLRPRLPPRKTGSLVEWHAFLEPTYALFTIGVFLVFWALYFCFFYINTYATSVIGLSPEAAVYLLVVISAVGIPLRPVLGFVADRYFGALPTLIVSAAILGILLYVWIPVYNISGLYVWSVFYGLATGATQGIFVGGLASLTTDPSKMGTRFGMVCSVLAFATLAGPPFAGALLQLGHGDFTRAQVWAGTVNVAGSLFICAAKWRQIKAERQPKSDVKSEEDQPRHVLESNNAYKDDTGLVASWLATTAKECGYHAQQQKQPGRPKGKARKQMKQSQKAVPEDPARDSPDTPPKYVLAIRDFVPMAEHIAKTILNDSSRKIPSVFSVALERVILVRKGFSEKLKEYRKITNELSDDRHTYFVEILEQVRNTLKPLMESDTLKVADLKEAITEVGKSKTPSKIQNMFEHLDVYEPSAAFLEAPNVERPQPVRLEYTTEREQTMEEDVFTALLLLRDLAQMRDAVKNLWDQYKVGDLDLAAVSVAINTTIELARSLEEDMEELIERLGGSQVPLQTVWNASSLAIGLHPHDKQRSGDAFNLATFDLGCDSFAVTGILLDAYQRANPKGSLPSYNGKYGWYDEDITGPGLSNRQKWSQLQTAVLEILPDVDFMGSTLKIAPVEDELIRGIRQMQNTGKVPIWVCFAAQLYYDTLTILGPRSKDGNIELRKTRIRIQKTLVNVTAKSKERQQLLRDLTFWENDVLYFCRNRMKHNSEMNGYHPFKFLERHPVYCGLWIHHLRTSFHTFGATYAAVPGGVMCTAQLYHALKLEGHVASHWEDLEKFMSMQGNSTFFVGEPPTTLEAHFKNFCLCLGMSTTNWAPNKRKGQLRQTQATVRNLKFKGWASLIIRDRFVTFVERRPISSEKIEQILEAGRKSQRVGRKEVETNEQIKATDSSATITPAGLIMQLARTITSEVPDLLFDTWTLHNQCWQLLLDMKRQFGQRLGLTDTLNKAIPREEQLPSVVGYVFSTAAGKMDITKTTTPRMDLMMVASEMMITYLSEGKGHIIRDEANAAIDPDEKVAIDTEHTTEDLWRTEQALQKVAQTGDCAPQ

SEQ ID NO: 30023 - DNA, 2898 bp, Muscodor strobelii
  misc_feature: SGI EST ID NO. CUFF.71078.1
  misc_feature: Variant of the nucleotide sequence at SEQ ID NO 30021
ttcgtacgtcgcttgatcaaggactgaggggtattcagagcttcgtgggcatggatgtgatgcgtcaaataagcacgggccgcagtaatgccctcaccgcctgatttctacaaatgcgctgagactttcggaatcgaaaccccgagatacaaggagtgttcaaagacgactcagttccgtaacaagatcctataatcattatgtttccgatagctttgaagggtctatattaacagtataaggacgacactggtctcgtggcatcgtggctcgctactaccgcaaaagaatgcgggtaccatgcgcagcaacaaaagcaacccggccggccaaagggcaaggcgcggaaacaaatgaagcaatcacagaaggccgtgcctgaagatccagcccgagattcccctgacacgccgccgaaatacgttctcgcgattcgagattttgttccaatggctgagcatattgctaaaactatactcaatgattcatcaagaaagattcctagcgtcttctctgttgctcttgagcgtgtcatcttggtgcgtaagggtttctcagaaaaactgaaagagtaccggaagataaccaatgagctgagcgatgatcgacatacgtattttgtggagatactggaacaagtccgcaatacattgaaacctctcatggaatccgatactctgaaagtggccgacttaaaggaagcaattaccgaggtcggcaaatcaaagacaccttctaagatacaaaacatgtttgaacatctggatgtgtacgagccatctgctgcgtttcttgaagccccgaatgttgagagacctcaacccgtcagactcgagtatactactgaacgcgagcaaacaatggaagaagatgtgttcacagctcttctcctgcttcgagacctagctcaaatgcgagacgccgttaagaacctttgggatcagtacaaagtgggcgatcttgaccttgcggcggtctcggtcgcaatcaatacgactatcgagctcgctcgtagcttagaagaagatatggaggagctgattgaacgtcttggcggtagtcaagtaccccttcaaactgtttggaacgcttcaagcctagctataggactccatccacacgacaaacagcgatctggcgacgcgttcaacttggctacgtttgatctgggttgtgactctttcgctgttactggtatacttcttgacgcctatcaacgggcgaacccgaaaggctcgttgccatcttacaacggtaagtacggatggtatgatgaagacattactggacctgggctttccaacaggcaaaagtggtcgcagttacaaacggccgtcctggagatacttcctgacgtcgatttcatgggttctacgttgaaaatagcccctgtcgaagacgagttgatacgcggtatcagacaaatgcaaaatacaggcaaggtgcccatttgggtatgcttcgctgcacaactctattatgatacccttacgatcctaggtcctcggagcaaggatggcaacatcgaactgagaaagacacgcatacggatacagaagacattggtaaatgtcacagcgaaatcaaaagagcggcagcagttgctcagggaccttacgttctgggagaatgatgtgctttacttttgccgtaacagaatgaaacacaattcagaaatgaacggctatcacccattcaaatttctagaacgtcatccggtatattgcggcctttggattcatcaccttagaacgagcttccatacattcggagccacttatgcagcagtcccgggcggggtcatgtgtaccgcgcagctctatcatgcgttgaagctagagggacatgttgcatcacactgggaggatctggagaaattcatgagcatgcaagggaattcaaccttcttcgttggtgagccgccaacaacactcgaagcacatttcaaaaatttctgtctttgccttggcatgtcgacaacaaattgggcgccgaataaacgaaagggccagttgcgacagacacaggcaactgttcggaacttgaagttcaaaggctgggcctcgttaattatcagggacagattcgtcacctttgtggaaagaaggccaatatcatccgagaaaatcgagcaaatactcgaagccgggagaaagagtcaacgggtaggtcgtaaggaagtcgaaactaatgagcaaataaaggctacggattccagtgcaacgatcaccccagcaggtcttatcatgcagcttgcgcgaacaataacttcagaggtgccagacttactttttgacacttggacacttcacaaccaatgctggcagttgttgcttgacatgaaacgacaatttggccagcgcctcggtctcacagacacgcttaacaaagcaataccacgagaagaacagctgccatctgtcgtagggtatgtgttttcaaccgcggccgggaaaatggacatcacaaagactactacaccacgtatggacctgatgatggttgcttctgagatgatgatcacctacctatcagaaggtaaaggccacattattagagatgaagcgaatgcagctatagaccctgatgagaaggtggcgattgatactgagcacaccacagaagacttgtggaggacagaacaggcgctccaaaaagtggcacaaactggtgactgcgctccgcagtaactcgactacaaaatacaacttagtctatttgaaatactgctacttattgacgaaagtcaactttccttccttgctggtattgtcttcccctatgattgcctgacagcatacataagagatagccatccaggcgagagtcaaaataaacggcaccgtcgaatactgcaatgtataataaactgtatagagttccgaatccaacagcgac

SEQ ID NO: 30024 - DNA, 2415 bp, Muscodor strobelii
  misc_feature: SGI cDNA ID NO. 570320
  misc_feature: Encodes the peptide sequence at SEQ ID NO 30025
atgtctctccgcaatgaggtcctcaaagacctagctacccgaaaattcggcaataaggtccttccttaccaagttggtctttcgggaggcggccctgcctctacacaaattgtcatcgctctagttatagcctacatagccgaccaggagcgtatcgcgaaagtatctggacaccctagcatccccatcgaaataacgatctttgagcagaaatcctgtgccttattcagcactggaaattctctgcctgtcaacgacaatgcgtctcttaacacagctatctgggatcctcaccgtgttcgaaaccccaaaggcattcctgatgaatatcgcgagacgttggaagtgctcactgacttccgcaaagtcgtcaagaaatacgctttagagcacccggaacacgcagaattcttggaaaagaagaatctcgcagctcgtgctttgttcaaactggcatccagagatcctgattttgatacgactcgtgcttgttttgatagaggatcgcttgggaagttgcatcacgattgttttttccagctcatggacttcgttgagcagcatgttcctgggataaagatcgaaattaagtgcgataccactgttgtcgacactgacttctccgataggttaaggcctgtcctctgcgcccgtaaaaatgacggtaagaacgtggactgctataccttcgacttcgttgttttgtgcaatggcctcacagcacaatctcttctggttgaggaagtaaagccatttacattctcatccacgccaaatacggatgacattggtgagtatctcaagaaacaagacgtcttagatatcaatggcttaatcaaaccaggaacacagatcggcattacgggtatgagcctctcggcatacgactacatgaccctcctgactcgcttcaccgatctgctctctcctaccgacgatggttacaagatcaatgagcgtaatgtaagtaaatacaaaaatctctttacattcatcagccgctcaaatcgtcttgcaccaccccgactagtcattgatggcatctggcctggatcgacgagtttcttcgatacattacacgtctatgctatacgcctgcagcccgactttgattggctttccttcatccaccccattctcatcgccaatgtcgcttacgagttgggcgtccatcctagcgaggtcgaggttgatgaacccgtcgtcgacaaaatggtagattacctcaaccagattcagaatcacgcagataactccatacaggaggtcgccttgctccgcgccggctatcaatccttgttagacggtttcgggatcgagtcaagcttcgcccacgtcgacaccttgatgtctaacctggcaccattagggtggacgggccgcggattctggcctatgcaacgggcaggttgctaccaacctaccaagttctccgtcgcttccaaagcctcgaacagccagttcatgaagctctggagcgaccacctccagtctaccgtggccgcctcgcctccgccagtattcagcatgatcgcattgatgttcaaacacggcatcgcccgccactttcacagctccatcgaagccatcggaccccgatccaataaaaacggcggcgccaacaatcaaagcggtgtcggtcgtctcatcttcgacgcattattctctcctaatctcttctctgcccgcgcggacgtcgttctccagtctctcatcggcaacgttctcgaggtcgtgcctggttccccatcatacgcgcgtgggcgcttcctacaaaatctctctgggcagcgaatcaacgccatcgacgtcgggatcggcggccacggcgcccccatggctacaccctcgggcgagaggtctcaagtcaacgtccgctggacagacatcaacacgcaccactccgccgtgaatcgcggggacataatcagcgatatgattctcctcctcgcttctatccaagctagcggtaagttagacccggcgtccgtcctcctctcgcactacaatcgcacgctcccaacaccatcatctttcaaagccgagacgtctcgcttcgcaacgaagtgggatgagatctgggcccgccgcatctttctctcgctatgcgctcgtcttagcaccacgggtgcggagtttcgcggcctcgcgggaaacatcgagtcggtgagttgccacgacggcgtcatttccgccgatgggcccccagaactgcaagatgcgcttctttcagccagtgctgagatcccggagtttacgcccttggagctggatgagtatctagagcaattccctgattttacacatgaggagctggatgatatgtggaaagtggctttgcataggaactcggatggtccgctggagttccactgccggtctgtgaatagagttggtggggatggggaagcgtga

SEQ ID NO: 30025 - protein, 804 aa, Muscodor strobelii
  misc_feature: SGI Peptide ID NO. 570320
MSLRNEVLKDLATRKFGNKVLPYQVGLSGGGPASTQIVIALVIAYIADQERIAKVSGHPSIPIEITIFEQKSCALFSTGNSLPVNDNASLNTAIWDPHRVRNPKGIPDEYRETLEVLTDFRKVVKKYALEHPEHAEFLEKKNLAARALFKLASRDPDFDTTRACFDRGSLGKLHHDCFFQLMDFVEQHVPGIKIEIKCDTTVVDTDFSDRLRPVLCARKNDGKNVDCYTFDFVVLCNGLTAQSLLVEEVKPFTFSSTPNTDDIGEYLKKQDVLDINGLIKPGTQIGITGMSLSAYDYMTLLTRFTDLLSPTDDGYKINERNVSKYKNLFTFISRSNRLAPPRLVIDGIWPGSTSFFDTLHVYAIRLQPDFDWLSFIHPILIANVAYELGVHPSEVEVDEPVVDKMVDYLNQIQNHADNSIQEVALLRAGYQSLLDGFGIESSFAHVDTLMSNLAPLGWTGRGFWPMQRAGCYQPTKFSVASKASNSQFMKLWSDHLQSTVAASPPPVFSMIALMFKHGIARHFHSSIEAIGPRSNKNGGANNQSGVGRLIFDALFSPNLFSARADVVLQSLIGNVLEVVPGSPSYARGRFLQNLSGQRINAIDVGIGGHGAPMATPSGERSQVNVRWTDINTHHSAVNRGDIISDMILLLASIQASGKLDPASVLLSHYNRTLPTPSSFKAETSRFATKWDEIWARRIFLSLCARLSTTGAEFRGLAGNIESVSCHDGVISADGPPELQDALLSASAEIPEFTPLELDEYLEQFPDFTHEELDDMWKVALHRNSDGPLEFHCRSVNRVGGDGEA

SEQ ID NO: 30026 - DNA, 862 bp, Muscodor strobelii
  misc_feature: SGI EST ID NO. CUFF.71038.0
  misc_feature: Variant of the nucleotide sequence at SEQ ID NO 30024
cggtcgtctcatcttcgacgcattattctctcctaatctcttctctgcccgcgcggacgtcgttctccagtctctcatcggcaacgttctcgaggtcgtgcctggttccccatcatacgcgcgtgggcgcttcctacaaaatctctctgggcagcgaatcaacgccatcgacgtcgggatcggcggccacggcgcccccatggctacaccctcgggcgagaggtctcaagtcaacgtccgctggacagacatcaacacgcaccactccgccgtgaatcgcggggacataatcagcgatatgattctcctcctcgcttctatccaagctagcggtaagttagacccggcgtccgtcctcctctcgcactacaatcgcacgctcccaacaccatcatctttcaaagccgagacgtctcgcttcgcaacgaagtgggatgagatctgggcccgccgcatctttctctcgctatgcgctcgtcttagcaccacgggtgcggagtttcgcggcctcgcgggaaacatcgagtcggtgagttgccacgacggcgtcatttccgccgatgggcccccagaactgcaagatgcgcttctttcagccagtgctgagatcccggagtttacgcccttggagctggatgagtatctagagcaattccctgattttacacatgaggagctggatgatatgtggaaagtggctttgcataggaactcggatggtccgctggagttccactgccggtctgtgaatagagttggtggggatggggaagcgtgactgcagggtcgagatgcgcctttggagtttcattgctgttctattgggttgacttagtgattgtgtgggatgtgtatatagtcg

SEQ ID NO: 30027 - DNA, 1143 bp, Muscodor strobelii
  misc_feature: SGI cDNA ID NO. 570322
  misc_feature: Reduced expression when VOC is produced
  misc_feature: Encodes the peptide sequence at SEQ ID NO 30028
atgcttgataaacaaacagtgcccaactatcagcctccgtactcgggttctccctacggcgccggcgtcccgagctccgtgccacctcagatgaatatgcctcccaattacggtatgggaggcggcatgcctatggctggatatcctatgcagcagggcatgaacccgcagcagaacccgcagcagccacaaatgatgcagcgaatgcaagcgtctcagacaaatccaaatcccaacatgcaacggaactttcccaatcaaccgccccaaggcacgccgacgccgagcaatgggcagactccccagcatccccaggtctctggtcctcagaccacacaaccgtcacaggccagccagctaggcacgagcacgccacagcagcacacaccagtgcaggcaccgtcgtcgtcgaacaatatacagacaccccagactcccacatttccctcgggtacgcaaggcacgactacaaatggcacatcatccggatcaacaccgatgagccccggggcggagtcgaaagagaaagatagggtgaacgttctactggatatcaacaatgagctactgtgtgaatcgatacaaattcaggcgacccaggacattctgaagaaagagcgtgaagccagcaatgggaccgacggtaatatgaatgacggagataagaggtcggcagacgaggagcaacttgcccaggattatgtgcaatgtatgcgcagattgcagtcaaatctgacgtacctagctgcacttgtagagaagaagcccaatgtgcaggtgccgccatgtccagcttatctcaaggcaccaccgttgagtacccacatcaagatgaggcaagctccgactccagacggcgtggaaaacaaaatagagcctacggatcgcgaagagacggtgaaatacttggaggggctatatacacagctgcaggctctgtatccaggcactgacccaaataaggaaccggcgttccgaatgccaggcggacccgggcggccgggggctcaggccggagccaattcaacgcctggtacgcagacgcccggacataccagtccgacgccagggaagcagccaacgccaactatggccaattctgccccgcctacttccggggcacccagcatgatgactgcttag

SEQ ID NO: 30028 - protein, 380 aa, Muscodor strobelii
  misc_feature: SGI Peptide ID NO. 570322
  misc_feature (10)..(353): NCBI GI: 256727050 Blast Desc: NECHADRAFT_76643 [Nectria haematococca mpVI 77-13-4]
  misc_feature (140)..(370): NCBI GI: 46136243 Blast Desc: FG09637.1 [Gibberella zeae PH-1]
  misc_feature (124)..(323): NCBI GI: 116194660 Blast Desc: CHGG_03928 [Chaetomium globosum CBS 148.51] gi|88179841|gb|EAQ87309.1| CHGG_03928 [Chaetomium globosum CBS 148.51]
  misc_feature (10)..(341): NCBI GI: 85107543 Blast Desc: NCU06363 [Neurospora crassa OR74A] gi|28924002|gb|EAA33161.1| [Neurospora crassa OR74A]
  misc_feature (142)..(329): NCBI GI: 261352452 Blast Desc: conserved [Verticillium albo-atrum VaMs.102]
  misc_feature (142)..(336): NCBI GI: 171683265 Blast Desc: protein product [Podospora anserina] gi|170941592|emb|CAP67246.1| protein product [Podospora anserina]
  misc_feature (7)..(338): NCBI GI: 154318536 Blast Desc: BC1G_02657 [Botryotinia fuckeliana B05.10] gi|150857787|gb|EDN32979.1| BC1G_02657 [Botryotinia fuckeliana B05.10]
  misc_feature (7)..(322): NCBI GI: 156063672 Blast Desc: [Sclerotinia sclerotiorum 1980] gi|154697288|gb|EDN97026.1| [Sclerotinia sclerotiorum 1980]
  misc_feature (168)..(271): NCBI GI: 259485116 Blast Desc: TPA: conserved [Aspergillus nidulans FGSC A4]
  misc_feature (168)..(271): NCBI GI: 119473111 Blast Desc: NFIA_059590 [Neosartorya fischeri NRRL 181] gi|119406654|gb|EAW16605.1| conserved [Neosartorya fischeri NRRL 181]
  misc_feature: Useful for introducing or modulating the production of volatile compounds
MLDKQTVPNYQPPYSGSPYGAGVPSSVPPQMNMPPNYGMGGGMPMAGYPMQQGMNPQQNPQQPQMMQRMQASQTNPNPNMQRNFPNQPPQGTPTPSNGQTPQHPQVSGPQTTQPSQASQLGTSTPQQHTPVQAPSSSNNIQTPQTPTFPSGTQGTTTNGTSSGSTPMSPGAESKEKDRVNVLLDINNELLCESIQIQATQDILKKEREASNGTDGNMNDGDKRSADEEQLAQDYVQCMRRLQSNLTYLAALVEKKPNVQVPPCPAYLKAPPLSTHIKMRQAPTPDGVENKIEPTDREETVKYLEGLYTQLQALYPGTDPNKEPAFRMPGGPGRPGAQAGANSTPGTQTPGHTSPTPGKQPTPTMANSAPPTSGAPSMMTA

SEQ ID NO: 30029 - DNA, 2006 bp, Muscodor strobelii
  misc_feature: SGI EST ID NO. CUFF.71055.0
  misc_feature: Variant of the nucleotide sequence at SEQ ID NO 30027
cggctttataccctgctcctatcctccgtgtgtaatgtggcctgttgctgcccacacgcaaaagggcttttggcatccgtagccaagtgttccagctgcagtaacagactggtggtagagtcgacatgtcgtgttttcgacggtctgtgtcgaatcgacgtcatcttccatatatatcatagacaagacgtctacattaaactcaagtccatattctgcatagttattaatgcttgataaacaaacagtgcccaactatcagcctccgtactcgggttctccctacggcgccggcgtcccgagctccgtgccacctcagatgaatatgcctcccaattacggtatgggaggcggcatgcctatggctggatatcctatgcagcagggcatgaacccgcagcagaacccgcagcagccacaaatgatgcagcgaatgcaagcgtctcagacaaatccaaatcccaacatgcaacggaactttcccaatcaaccgccccaaggcacgccgacgccgagcaatgggcagactccccagcatccccaggtctctggtcctcagaccacacaaccgtcacaggccagccagctaggcacgagcacgccacagcagcacacaccagtgcaggcaccgtcgtcgtcgaacaatatacagacaccccagactcccacatttccctcgggtacgcaaggcacgactacaaatggcacatcatccggatcaacaccgatgagccccggggcggagtcgaaagagaaagatagggtgaacgttctactggatatcaacaatgagctactgtgtgaatcgatacaaattcaggcgacccaggacattctgaagaaagagcgtgaagccagcaatgggaccgacggtaatatgaatgacggagataagaggtcggcagacgaggagcaacttgcccaggattatgtgcaatgtatgcgcagattgcagtcaaatctgacgtacctagctgcacttgtagagaagaagcccaatgtgcaggtgccgccatgtccagcttatctcaaggcaccaccgttgagtacccacatcaagatgaggcaagctccgactccagacggcgtggaaaacaaaatagagcctacggatcgcgaagagacggtgaaatacttggaggggctatatacacagctgcaggctctgtatccaggcactgacccaaataaggaaccggcgttccgaatgccaggcggacccgggcggccgggggctcaggccggagccaattcaacgcctggtacgcagacgcccggacataccagtccgacgccagggaagcagccaacgccaactatggccaattctgccccgcctacttccggggcacccagcatgatgactgcttaggatctctgttacatcatctggcctacagaagccagaccccagcgccgctttctctcttcacgggatcagcgattgtcttatcatgcttgtatataaaggtggcaaaattcaagcggaggttcggaatacgagttcgtttctgttcacagcggcactccggcgtttgtcggagttgttataggatctggcgggcacagttgaattccttctggcatatttacggtacgcacagctagtatatatcgtgtttgactattgtatagctcaggtaatacccaaaaacttatatatagtacatgctagattgaagaagcgcaacgatgagatttcgatcattgatgaccggacagtgatgttccggcagctggcgttcattcccgtcgcggtggtacagacaccgataaaaggagacgcactgattactatttcctagtgtctccattttggggcgtcttcaggactagcttgatggcttacatgagcgatcgacggcgggttttctagagccgttctagaaatgccactcatttcagaacgctcgcattactacatggtgatactcgcaaaactacatgacaataatggcaattatgaattcatacttgtgatatatcagacagtaatcagcttcaag

SEQ ID NO: 30030 - DNA, 1137 bp, Muscodor strobelii
  misc_feature: SGI cDNA ID NO. 570323
  misc_feature: Elevated expression when VOC is produced
  misc_feature: Encodes the peptide sequence at SEQ ID NO 30031
aagcgcgcgggagccgtccctatgaaaggcattaggttcttaattgcacagcaagaaggacagggcgagattatcgacgaagtcgatattgacgatgagaagtcagtgaagagactttctagcattgtgcatcgggccgattatttgaagcagctgcttgcagatgtgccgggggaaagaatgcatgcctccaagaagctaagcaccattgaaaacaatgccgatgattcgatcacaatcaaatttgaggatggctcggagcacgcgtgtgatatcgtcattggtgccgatggtatacgcagtacggtgaggaaactcattttaggaccagacgatccggccgccaccccgaggaatactggaacctggtgtatcatggtgctcgtcccgtacaagaacggtcttcgagccttgggaccagacctaatcgatgtcaacgatgctcgcgaacatgggtggatgggtaacgatagtttcgtcatgcataacgttttgagtggtggaaaactagtgcagtttgtgatttgttcaactgacaaggacgcagagggatcagaccgctgggttcggactgtgacagcgactgagattaggaagttatatgcagagtggccagagaaactgaagactgcaagtgaagagctgctgtgtcgacccgagaaagacagtgaaagtaaaacgcttgaaggtagtgcggtcgaagagcgcgagcataaggccatgtacttgtgggaacacctgcccgcatcgacctatgcctctggcgcattgtgcgtcatgggcgacgcagctcacgcaacaacaccctggcagtcttcggggggtggaatggctatagaagatagcatgattctctcagccttgattgggatggcgaagaacccggctgaggccagactcgccctaaaggtgtacgacgaggtacgaaggcctcgcacgcagcgaattgtagaatcgagccgtggcacaggaactattatgctcggaaatactgggaaaaccggacttgatttgaaaagagacggagactttgtgagtagatgggatttcattctggatatcgacatgcaggggcatcgggatgaagctgtcgagaaaatgaagacgatgctgtcgggagatgcagtagccgcctga

SEQ ID NO: 30031 - protein, 378 aa, Muscodor strobelii
  misc_feature: SGI Peptide ID NO. 570323
  misc_feature (1)..(372): NCBI GI: 225557710 Blast Desc: salicylate hydroxylase [Ajellomyces capsulatus G186AR]
  misc_feature (1)..(372): NCBI GI: 240274173 Blast Desc: salicylate hydroxylase [Ajellomyces capsulatus H143]
  misc_feature (1)..(372): NCBI GI: 171682930 Blast Desc: protein product [Podospora anserina] gi|170941424|emb|CAP67075.1| protein product [Podospora anserina]
  misc_feature (1)..(372): NCBI GI: 154288340 Blast Desc: [Ajellomyces capsulatus NAm1] gi|150408606|gb|EDN04147.1| [Ajellomyces capsulatus NAm1]
  misc_feature (19)..(336): NCBI GI: 239609275 Blast Desc: FAD binding domain-containing protein [Ajellomyces dermatitidis ER-3]
  misc_feature (55)..(336): NCBI GI: 261187340 Blast Desc: mannitol 1-phosphate dehydrogenase [Ajellomyces dermatitidis SLH14081] gi|239594716|gb|EEQ77297.1| mannitol 1-phosphate dehydrogenase [Ajellomyces dermatitidis SLH14081]
  misc_feature (1)..(370): NCBI GI: 169610297 Blast Desc: SNOG_08247 [Phaeosphaeria nodorum SN15] gi|160702028|gb|EAT84523.2| SNOG_08247 [Phaeosphaeria nodorum SN15]
  misc_feature (43)..(321): NCBI GI: 156061635 Blast Desc: SS1G_02963 [Sclerotinia sclerotiorum 1980] gi|154700364|gb|EDO00103.1| SS1G_02963 [Sclerotinia sclerotiorum 1980]
  misc_feature (43)..(321): NCBI GI: 154319498 Blast Desc: BC1G_02230 [Botryotinia fuckeliana B05.10] gi|150855888|gb|EDN31080.1| BC1G_02230 [Botryotinia fuckeliana B05.10]
  misc_feature (44)..(372): NCBI GI: 212539233 Blast Desc: salicylate hydroxylase, [Penicillium marneffei ATCC 18224] gi|210069514|gb|EEA23605.1| salicylate hydroxylase, [Penicillium marneffei ATCC 18224]
  misc_feature (40)..(367): SWISSPROT Homolog: EC 1.14.13.1 Salicylate 1-monooxygenase
  misc_feature: Useful for introducing or modulating the production of volatile compounds
KRAGAVPMKGIRFLIAQQEGQGEIIDEVDIDDEKSVKRLSSIVHRADYLKQLLADVPGERMHASKKLSTIENNADDSITIKFEDGSEHACDIVIGADGIRSTVRKLILGPDDPAATPRNTGTWCIMVLVPYKNGLRALGPDLIDVNDAREHGWMGNDSFVMHNVLSGGKLVQFVICSTDKDAEGSDRWVRTVTATEIRKLYAEWPEKLKTASEELLCRPEKDSESKTLEGSAVEEREHKAMYLWEHLPASTYASGALCVMGDAAHATTPWQSSGGGMAIEDSMILSALIGMAKNPAEARLALKVYDEVRRPRTQRIVESSRGTGTIMLGNTGKTGLDLKRDGDFVSRWDFILDIDMQGHRDEAVEKMKTMLSGDAVAA

SEQ ID NO: 30032 - DNA, 6365 bp, Muscodor strobelii
  misc_feature: SGI EST ID NO. CUFF.71239.0
  misc_feature: Variant of the nucleotide sequence at SEQ ID NO 30030
cgcgcgggagccgtccctatgaaaggcattaggttcttaattgcacagcaagaaggacagggcgagattatcgacgaagtcgatattgacgatgagaagtcagtgaagagactttctagcattgtgcatcgggccgattatttgaagcagctgcttgcagatgtgccgggggaaagaatgcatgcctccaagaagctaagcaccattgaaaacaatgccgatgattcgatcacaatcaaatttgaggatggctcggagcacgcgtgtgatatcgtcattggtgccgatggtatacgcagtacggtgaggaaactcattttaggaccagacgatccggccgccaccccgaggaatactggaacctggtgtatcatggtgctcgtcccgtacaagaacggtcttcgagccttgggaccagacctaatcgatgtcaacgatgctcgcgaacatgggtggatgggtaacgatagtttcgtcatgcataacgttttgagtggtggaaaactagtgcagtttgtgatttgttcaactgacaaggacgcagagggatcagaccgctgggttcggactgtgacagcgactgagattaggaagttatatgcagagtggccagagaaactgaagactgcaagtgaagagctgctgtgtcgacccgagaaagacagtgaaagtaaaacgcttgaaggtagtgcggtcgaagagcgcgagcataaggccatgtacttgtgggaacacctgcccgcatcgacctatgcctctggcgcattgtgcgtcatgggcgacgcagctcacgcaacaacaccctggcagtcttcggggggtggaatggctatagaagatagcatgattctctcagccttgattgggatggcgaagaacccggctgaggccagactcgccctaaaggtgtacgacgaggtacgaaggcctcgcacgcagcgaattgtagaatcgagccgtggcacaggaactattatgctcggaaatactgggaaaaccggacttgatttgaaaagagacggagactttgtgagtagatgggatttcattctggatatcgacatgcaggggcatcgggatgaagctgtcgagaaaatgaagacgatgctgtcgggagatgcagtagccgcctgatcttctagacgcatagtcatgttgagtaggacttgatttaattgtcgcagtgtttatccaatttaacagtcggtgactttgcagcaacttgtcctgcctagatcgtgccgtgttctctcgtgaccatgaaggcgccagtctatttcgagcgggagcaacgcttctataacataatgtctagaactggtttgctcgttcgttacatgcatcatgcctagtgccttgaatgacgaaaacctcacaggaccattcgaatgagttctatatccacggccgctagtgcttcatttgactcatccactgtccgttagtgtcagtagtccttcgttagatgagccggtcctcgttagatattgaaatgcccatagcaatacgaaaaccgatgaacagttgcgaataatttcgatattaaccaacgcttcactctactaactcttgatgagggtttccggtcatacgtataaacaaaaaagggcttgccaggtgtggacaatatgatcgtcttcgaattctctcctgtttatcatcgatttgacttgggacttcttcctctcaaacatgatggcttctaaatgttgcgttgggtcgaattggtactgggcattcgagagcataagtctgaatcgtaaagccgaagctacgagccgagccgaacggatgcgcaggttgcaaggagcagattttgagtcacccaccatttgcttcctccatcatgatactgatgatctccgcaccgtggtttatctatttgatcaattcatgccagtctaacccataaacgtatgaacgcagtggtggtaatcatttgaggtcaagattttgcagacttggcatttcaaaatgttcggatcagataacttgtcttggcgatcttgaaccttttaattggcctgcttgcctcgggactaccagacttagtcggcatctggttcttcagctacttgtatctcgtattgtgcctgttcgtctctcatacaattgcttcacggatcaacccattcgtacttcaagtcttgtctctcaagcaactcgagtacaactgaataggcccatttaggcttacctgttgagattctagtgccttcgctgtcattgatgtaatcatagagcgggttgggctatcagagcctgcctgttatatgagaaaaaatgccattcccgctttattgtggcctgtcaaacctgacacgtcataccatcgtatccgacccgaatacccgctgctaaggtgacaagaacctcagaatcctcgcttggcgacttcagatttacgaacatggctagcgcatgcagattgataagatgatctgattagatcgccaagacaatcgcatcatcgcaaccgcttcacaagccgatgacggcagtttggagaacggggtcatgtcttggctgtgtaatgacatgcctgttttagttgactggccccgaggcttgacactggtcaaacctgggcaaaatgtaaaatcttcacgcaaggaggagacttttttctacgcgcctatttaacttgttgactcctctgcgaccttgtcttgcgttctatttgggcttgaagaacgtttcacagacagtctcgaagacatcatatttcgttacatcaacaatttctgggttacaatggcagaatctcagctccgcgccctggcggcggaaatcacaaaacttgccgatacattcgcctcctcactagaagagaataagatgcctgaagcaagcttcacccctgacggcccaataaagcacgcgggtttgacaggagaaatgttcatgacgagacaatcattatgtgataagctacaagatatgtggtatttggtgcagggccccagtgagagtatctataattacgttcacaatgtaagagggacgtgttcgaagaatgtaacagtcctctaatatgtctaggtcattcctgatgcagcctgcctcaatatactcaaccacttcaacttctggacggctgtaccaattgatggttcggcttcttacgaggaaatagcgacgaaactgtccctaccgaaagatgtagtcgagcgagttttacagcatgctttcactctccgtctcttcgatcagatcgagtccgatccaactcaagtcgcgcacaccgcccgatcagcagcactagccaaacaatccgggttgcgagctctagtctcatcagtactcgacatcaccggtgcgccgatgatgacgttgcatacagcattggagaaatactcacaggggaaatctgccttgacacaagagatgagcgagactgcttttgctctattccatagctctggggtgttgggggcaaaatatgctaattcgtgggattacctggaaaatgacggagaaggcgaaagacgaggatggcgacagaaagagttcgttgagttcatgcattatcttaaagatatcttccagcttgagggtgtcattcttaatgcatacgactgggagtcggcggggtcatcaaccgtcgttgacgtgagcttgccccgtccttgtgaagtagaattgactgacaccgtttcgatagatcggaggatctgcaggtgttgacgcattcatgctcgcacagaaattccctaatctcaagattgttgtacaggatctccccatggtagaaccagtcttccatgcagatatacctgaagaactcaaaggtcgagtgtcgtttgtcgcgcacgacatgtacaaaccccagcaaactcaagccgatatctatatgatgaagatgattctccacgactacccagaagcagaatgtatcaagcttctgcgagctctgatacccgctctcaagcctggcagtcgtgttatcatcattgagtatattggaaaggttgacgaaggcgatgcgaagaaagagccgatgccgaggtctattcagcagatgggaacagcgacggatttgagaatgatggcgctgttcaacaataaggaacgtcctgctgaggcatacaaaggtatcttcaaagcagcagatgagcgatttgaggttgtggggcaaaagggcgaagcgatcagcttctttactgcgattgaggctatctggcgtggctagaaccagcgagctcacttccatagacactagaactgtgaagttagcagacattattgcgctgaataatttgaggctgcaatgagattagaagtactagaaaagctcccgtcaaccgccagtccgctcattggggatcatgtgtcgcgaaaatcgataatgttaacgatggttcatcagagtactattgtctgcgcttcccatgtcttcgggaaccgtggctaccatgccggtcttgtcgaaaattcaaatggaacgctacataatgctaactccgtaaaattttaaagcatggctgaaacttctttcgcacccagtcgacgtagtatccttgcctcctgtttcgtcaggattccatcgtcgggagtgacaccaacatcagcaggttttcgtgtattgacgaatccagggttaggactactccagctgtaatctctccacgtacccaaaacagcccacatcttctctacgacctgctgaactttttcgcgtcgctcatgactccattttcgccggctcatcaagtcggtatctgcattttctggttcaagaccctccatcacgctgttgaatacacgacatgtctcttccaattctggaacattcgatattcccatgacgctcacaccgacacgtgttcctttcggcagtcgcgagttggcactccctcttgcagcaccatctctagaccagttgtccagggcccaccggatcgcgacgacttcgagtttctcaccggcttccgtggcaatgggtacaagatcatgacaaacctgtcgcaagccctcgggactaggatgccatgacgcaaatgtcccagaatcagcacctcgcgttgtgagcaggcccataccaagcatactggcgttcaggattacatcaacaccggctttttcgaaccgccgcatcgcatccctgcctaacgtggtgttctggatagtgaaatggctgtagctcagcacagcatcgagtggctcgccagtctcgcgaactatcatctcagcaagagcacagagcttctcaacaggatatccactgatcccaacatagcgaatcacgccctcgtcgcgcagccgacgtagctctcctacggcggctagtacctcagcaggggagacaaactcgacatcgtgcatatatacaaggtctagatatgatgtatgcaagcgttcgagactgcggcagacggagtagcgaatccacgcggggctgtaatcgaattcgtcacctgcgatgcgcccggctttggtgaccaggaaatacgaagagcgggcatgtcgtgatgttacagcagggtgcgccagcgcagagccaagtattatctcagacgggccatagtaaggcgacgtgtcgaaggcgttgacgccaaggtcaagagcgcgtgatactatggacgcggcaggaaggtcgaagggatctggaacgtattgggtgttgaatgtcgcggtgcccattaccaatggggggattacctcgtataacggccggcgaggcactgcggaagtaggtgtaagagagtccataatggggttgtgtttgtatacagaggcgtgaaaatgagagaatattaagagctattttagattcgaatagctatcacgtatattttccagtttcacgtgtaagcttaagatcttcagggtcctctatgtagcatatggtggggtgccagggagataggacaagataaaaagctgcgacgttggtctatgaggtaatgacaactcagggacaggtgaattgcgccattttggtagacattgtagtcacatcattagagacaaacatgttgtgctacaccgcaagaagttttgcagattaagctgctagaaaaagccggtgtcagcaacaagacaggctatggtcatgaatcatcgcaacgcgacgcttgtatgggatgataaatcagatatcagtggagtgagacagcagcaatcccagccgaacatagcttgatgagccactcatggtgggcagtagtgggcagtagcatccaagataccctggtatgggtgggcacaggatccgaaagggccgagagaagtaatgggtttggcaaaattcgatcttgggtgtggattgtggtgtttgatatcgcgaccgctatttacttttgctgtttgtttcttccgttgcaaatgtacccctccagagctcttagctcagtcaatcataa

SEQ ID NO: 30033 - DNA, 1338 bp, Muscodor strobelii
  misc_feature: SGI cDNA ID NO. 570324
  misc_feature: Reduced expression when VOC is produced
  misc_feature: Encodes the peptide sequence at SEQ ID NO 30034
atggcagaatctcagctccgcgccctggcggcggaaatcacaaaacttgccgatacattcgcctcctcactagaagagaataagatgcctgaagcaagcttcacccctgacggcccaataaagcacgcgggtttgacaggagaaatgttcatgacgagacaatcattatgtgataagctacaagatatgtggtatttggtgcagggccccagtgagagtatctataattacgttcacaatgtcattcctgatgcagcctgcctcaatatactcaaccacttcaacttctggacggctgtaccaattgatggttcggcttcttacgaggaaatagcgacgaaactgtccctaccgaaagatgtagtcgagcgagttttacagcatgctttcactctccgtctcttcgatcagatcgagtccgatccaactcaagtcgcgcacaccgcccgatcagcagcactagccaaacaatccgggttgcgagctctagtctcatcagtactcgacatcaccggtgcgccgatgatgacgttgcatacagcattggagaaatactcacaggggaaatctgccttgacacaagagatgagcgagactgcttttgctctattccatagctctggggtgttgggggcaaaatatgctaattcgtgggattacctggaaaatgacggagaaggcgaaagacgaggatggcgacagaaagagttcgttgagttcatgcattatcttaaagatatcttccagcttgagggtgtcattcttaatgcatacgactgggagtcggcggggtcatcaaccgtcgttgacatcggaggatctgcaggtgttgacgcattcatgctcgcacagaaattccctaatctcaagattgttgtacaggatctccccatggtagaaccagtcttccatgcagatatacctgaagaactcaaaggtcgagtgtcgtttgtcgcgcacgacatgtacaaaccccagcaaactcaagccgatatctatatgatgaagatgattctccacgactacccagaagcagaatgtatcaagcttctgcgagctctgatacccgctctcaagcctggcagtcgtgttatcatcattgagtatattggaaaggttgacgaaggcgatgcgaagaaagagccgatgccgaggtctattcagcagatgggaacagcgacggatttgagaatgatggcgctgttcaacaataaggaacgtcctgctgaggcatacaaaggtatcttcaaagcagcagatgagcgatttgaggttgtggggcaaaagggcgaagcgatcagcttctttactgcgattgaggctatctggcgtggctag

SEQ ID NO: 30034 - protein, 445 aa, Muscodor strobelii
  misc_feature: SGI Peptide ID NO. 570324
  misc_feature (155)..(417): Pfam Id: PF00891 Pfam Desc: O-methyltransferase
  misc_feature (253)..(417): Pfam Id: PF00891 Pfam Desc: O-methyltransferase
  misc_feature (1)..(445): NCBI GI: 261192404 Blast Desc: sterigmatocystin 8-O-methyltransferase [Ajellomyces dermatitidis SLH14081] gi|239589484|gb|EEQ72127.1| sterigmatocystin 8-O-methyltransferase [Ajellomyces dermatitidis
  misc_feature (1)..(445): NCBI GI: 239615200 Blast Desc: sterigmatocystin 8-O-methyltransferase [Ajellomyces dermatitidis ER-3]
  misc_feature (1)..(444): NCBI GI: 258565713 Blast Desc: conserved [Uncinocarpus reesii 1704] gi|237907302|gb|EEP81703.1| conserved [Uncinocarpus reesii 1704]
  misc_feature (1)..(445): NCBI GI: 225556215 Blast Desc: sterigmatocystin 8-O-methyltransferase [Ajellomyces capsulatus G186AR]
  misc_feature (1)..(445): NCBI GI: 154272183 Blast Desc: conserved [Ajellomyces capsulatus NAm1] gi|150408931|gb|EDN04387.1| conserved [Ajellomyces capsulatus NAm1]
  misc_feature (1)..(444): NCBI GI: 240111067 Blast Desc: O-methyltransferase family protein [Coccidioides posadasii C735 delta SOWgp]
  misc_feature (1)..(444): NCBI GI: 119189869 Blast Desc: CIMG_04982 [Coccidioides immitis RS]
  misc_feature (1)..(444): NCBI GI: 226279691 Blast Desc: conserved [Paracoccidioides brasiliensis Pb01]
  misc_feature (2)..(445): NCBI GI: 39968055 Blast Desc: MGG_02120 [Magnaporthe grisea 70-15] gi|145013004|gb|EDJ97645.1| MGG_02120 [Magnaporthe grisea 70-15]
  misc_feature (4)..(445): NCBI GI: 189199654 Blast Desc: conserved [Pyrenophora tritici-repentis Pt-1C-BFP] gi|187983263|gb|EDU48751.1| conserved [Pyrenophora tritici-repentis Pt-1C-BFP]
  misc_feature (57)..(436): SWISSPROT Homolog: EC 2.1.1.110 Sterigmatocystin 8-O-methyltransferase
  misc_feature: Useful for introducing or modulating the production of volatile compounds
MAESQLRALAAEITKLADTFASSLEENKMPEASFTPDGPIKHAGLTGEMFMTRQSLCDKLQDMWYLVQGPSESIYNYVHNVIPDAACLNILNHFNFWTAVPIDGSASYEEIATKLSLPKDVVERVLQHAFTLRLFDQIESDPTQVAHTARSAALAKQSGLRALVSSVLDITGAPMMTLHTALEKYSQGKSALTQEMSETAFALFHSSGVLGAKYANSWDYLENDGEGERRGWRQKEFVEFMHYLKDIFQLEGVILNAYDWESAGSSTVVDIGGSAGVDAFMLAQKFPNLKIVVQDLPMVEPVFHADIPEELKGRVSFVAHDMYKPQQTQADIYMMKMILHDYPEAECIKLLRALIPALKPGSRVIIIEYIGKVDEGDAKKEPMPRSIQQMGTATDLRMMALFNNKERPAEAYKGIFKAADERFEVVGQKGEAISFFTAIEAIWRG

SEQ ID NO: 30035 - DNA, 6265 bp, Muscodor strobelii
  misc_feature: SGI EST ID NO. CUFF.71239.1
  misc_feature: Variant of the nucleotide sequence at SEQ ID NO 30033
cgcgcgggagccgtccctatgaaaggcattaggttcttaattgcacagcaagaaggacagggcgagattatcgacgaagtcgatattgacgatgagaagtcagtgaagagactttctagcattgtgcatcgggccgattatttgaagcagctgcttgcagatgtgccgggggaaagaatgcatgcctccaagaagctaagcaccattgaaaacaatgccgatgattcgatcacaatcaaatttgaggatggctcggagcacgcgtgtgatatcgtcattggtgccgatggtatacgcagtacggtgaggaaactcattttaggaccagacgatccggccgccaccccgaggaatactggaacctggtgtatcatggtgctcgtcccgtacaagaacggtcttcgagccttgggaccagacctaatcgatgtcaacgatgctcgcgaacatgggtggatgggtaacgatagtttcgtcatgcataacgttttgagtggtggaaaactagtgcagtttgtgatttgttcaactgacaaggacgcagagggatcagaccgctgggttcggactgtgacagcgactgagattaggaagttatatgcagagtggccagagaaactgaagactgcaagtgaagagctgctgtgtcgacccgagaaagacagtgaaagtaaaacgcttgaaggtagtgcggtcgaagagcgcgagcataaggccatgtacttgtgggaacacctgcccgcatcgacctatgcctctggcgcattgtgcgtcatgggcgacgcagctcacgcaacaacaccctggcagtcttcggggggtggaatggctatagaagatagcatgattctctcagccttgattgggatggcgaagaacccggctgaggccagactcgccctaaaggtgtacgacgaggtacgaaggcctcgcacgcagcgaattgtagaatcgagccgtggcacaggaactattatgctcggaaatactgggaaaaccggacttgatttgaaaagagacggagactttgtgagtagatgggatttcattctggatatcgacatgcaggggcatcgggatgaagctgtcgagaaaatgaagacgatgctgtcgggagatgcagtagccgcctgatcttctagacgcatagtcatgttgagtaggacttgatttaattgtcgcagtgtttatccaatttaacagtcggtgactttgcagcaacttgtcctgcctagatcgtgccgtgttctctcgtgaccatgaaggcgccagtctatttcgagcgggagcaacgcttctataacataatgtctagaactggtttgctcgttcgttacatgcatcatgcctagtgccttgaatgacgaaaacctcacaggaccattcgaatgagttctatatccacggccgctagtgcttcatttgactcatccactgtccgttagtgtcagtagtccttcgttagatgagccggtcctcgttagatattgaaatgcccatagcaatacgaaaaccgatgaacagttgcgaataatttcgatattaaccaacgcttcactctactaactcttgatgagggtttccggtcatacgtataaacaaaaaagggcttgccaggtgtggacaatatgatcgtcttcgaattctctcctgtttatcatcgatttgacttgggacttcttcctctcaaacatgatggcttctaaatgttgcgttgggtcgaattggtactgggcattcgagagcataagtctgaatcgtaaagccgaagctacgagccgagccgaacggatgcgcaggttgcaaggagcagattttgagtcacccaccatttgcttcctccatcatgatactgatgatctccgcaccgtggtttatctatttgatcaattcatgccagtctaacccataaacgtatgaacgcagtggtggtaatcatttgaggtcaagattttgcagacttggcatttcaaaatgttcggatcagataacttgtcttggcgatcttgaaccttttaattggcctgcttgcctcgggactaccagacttagtcggcatctggttcttcagctacttgtatctcgtattgtgcctgttcgtctctcatacaattgcttcacggatcaacccattcgtacttcaagtcttgtctctcaagcaactcgagtacaactgaataggcccatttaggcttacctgttgagattctagtgccttcgctgtcattgatgtaatcatagagcgggttgggctatcagagcctgcctgttatatgagaaaaaatgccattcccgctttattgtggcctgtcaaacctgacacgtcataccatcgtatccgacccgaatacccgctgctaaggtgacaagaacctcagaatcctcgcttggcgacttcagatttacgaacatggctagcgcatgcagattgataagatgatctgattagatcgccaagacaatcgcatcatcgcaaccgcttcacaagccgatgacggcagtttggagaacggggtcatgtcttggctgtgtaatgacatgcctgttttagttgactggccccgaggcttgacactggtcaaacctgggcaaaatgtaaaatcttcacgcaaggaggagacttttttctacgcgcctatttaacttgttgactcctctgcgaccttgtcttgcgttctatttgggcttgaagaacgtttcacagacagtctcgaagacatcatatttcgttacatcaacaatttctgggttacaatggcagaatctcagctccgcgccctggcggcggaaatcacaaaacttgccgatacattcgcctcctcactagaagagaataagatgcctgaagcaagcttcacccctgacggcccaataaagcacgcgggtttgacaggagaaatgttcatgacgagacaatcattatgtgataagctacaagatatgtggtatttggtgcagggccccagtgagagtatctataattacgttcacaatgtcattcctgatgcagcctgcctcaatatactcaaccacttcaacttctggacggctgtaccaattgatggttcggcttcttacgaggaaatagcgacgaaactgtccctaccgaaagatgtagtcgagcgagttttacagcatgctttcactctccgtctcttcgatcagatcgagtccgatccaactcaagtcgcgcacaccgcccgatcagcagcactagccaaacaatccgggttgcgagctctagtctcatcagtactcgacatcaccggtgcgccgatgatgacgttgcatacagcattggagaaatactcacaggggaaatctgccttgacacaagagatgagcgagactgcttttgctctattccatagctctggggtgttgggggcaaaatatgctaattcgtgggattacctggaaaatgacggagaaggcgaaagacgaggatggcgacagaaagagttcgttgagttcatgcattatcttaaagatatcttccagcttgagggtgtcattcttaatgcatacgactgggagtcggcggggtcatcaaccgtcgttgacatcggaggatctgcaggtgttgacgcattcatgctcgcacagaaattccctaatctcaagattgttgtacaggatctccccatggtagaaccagtcttccatgcagatatacctgaagaactcaaaggtcgagtgtcgtttgtcgcgcacgacatgtacaaaccccagcaaactcaagccgatatctatatgatgaagatgattctccacgactacccagaagcagaatgtatcaagcttctgcgagctctgatacccgctctcaagcctggcagtcgtgttatcatcattgagtatattggaaaggttgacgaaggcgatgcgaagaaagagccgatgccgaggtctattcagcagatgggaacagcgacggatttgagaatgatggcgctgttcaacaataaggaacgtcctgctgaggcatacaaaggtatcttcaaagcagcagatgagcgatttgaggttgtggggcaaaagggcgaagcgatcagcttctttactgcgattgaggctatctggcgtggctagaaccagcgagctcacttccatagacactagaactgtgaagttagcagacattattgcgctgaataatttgaggctgcaatgagattagaagtactagaaaagctcccgtcaaccgccagtccgctcattggggatcatgtgtcgcgaaaatcgataatgttaacgatggttcatcagagtactattgtctgcgcttcccatgtcttcgggaaccgtggctaccatgccggtcttgtcgaaaattcaaatggaacgctacataatgctaactccgtaaaattttaaagcatggctgaaacttctttcgcacccagtcgacgtagtatccttgcctcctgtttcgtcaggattccatcgtcgggagtgacaccaacatcagcaggttttcgtgtattgacgaatccagggttaggactactccagctgtaatctctccacgtacccaaaacagcccacatcttctctacgacctgctgaactttttcgcgtcgctcatgactccattttcgccggctcatcaagtcggtatctgcattttctggttcaagaccctccatcacgctgttgaatacacgacatgtctcttccaattctggaacattcgatattcccatgacgctcacaccgacacgtgttcctttcggcagtcgcgagttggcactccctcttgcagcaccatctctagaccagttgtccagggcccaccggatcgcgacgacttcgagtttctcaccggcttccgtggcaatgggtacaagatcatgacaaacctgtcgcaagccctcgggactaggatgccatgacgcaaatgtcccagaatcagcacctcgcgttgtgagcaggcccataccaagcatactggcgttcaggattacatcaacaccggctttttcgaaccgccgcatcgcatccctgcctaacgtggtgttctggatagtgaaatggctgtagctcagcacagcatcgagtggctcgccagtctcgcgaactatcatctcagcaagagcacagagcttctcaacaggatatccactgatcccaacatagcgaatcacgccctcgtcgcgcagccgacgtagctctcctacggcggctagtacctcagcaggggagacaaactcgacatcgtgcatatatacaaggtctagatatgatgtatgcaagcgttcgagactgcggcagacggagtagcgaatccacgcggggctgtaatcgaattcgtcacctgcgatgcgcccggctttggtgaccaggaaatacgaagagcgggcatgtcgtgatgttacagcagggtgcgccagcgcagagccaagtattatctcagacgggccatagtaaggcgacgtgtcgaaggcgttgacgccaaggtcaagagcgcgtgatactatggacgcggcaggaaggtcgaagggatctggaacgtattgggtgttgaatgtcgcggtgcccattaccaatggggggattacctcgtataacggccggcgaggcactgcggaagtaggtgtaagagagtccataatggggttgtgtttgtatacagaggcgtgaaaatgagagaatattaagagctattttagattcgaatagctatcacgtatattttccagtttcacgtgtaagcttaagatcttcagggtcctctatgtagcatatggtggggtgccagggagataggacaagataaaaagctgcgacgttggtctatgaggtaatgacaactcagggacaggtgaattgcgccattttggtagacattgtagtcacatcattagagacaaacatgttgtgctacaccgcaagaagttttgcagattaagctgctagaaaaagccggtgtcagcaacaagacaggctatggtcatgaatcatcgcaacgcgacgcttgtatgggatgataaatcagatatcagtggagtgagacagcagcaatcccagccgaacatagcttgatgagccactcatggtgggcagtagtgggcagtagcatccaagataccctggtatgggtgggcacaggatccgaaagggccgagagaagtaatgggtttggcaaaattcgatcttgggtgtggattgtggtgtttgatatcgcgaccgctatttacttttgctgtttgtttcttccgttgcaaatgtacccctccagagctcttagctcagtcaatcataa

SEQ ID NO: 30036 - DNA, 1239 bp, Muscodor strobelii
  misc_feature: SGI cDNA ID NO. 570325
  misc_feature: Encodes the peptide sequence at SEQ ID NO 30037
atggactctcttacacctacttccgcagtgcctcgccggccgttatacgaggtaatccccccattggtaatgggcaccgcgacattcaacacccaatacgttccagatcccttcgaccttcctgccgcgtccatagtatcacgcgctcttgaccttggcgtcaacgccttcgacacgtcgccttactatggcccgtctgagataatacttggctctgcgctggcgcaccctgctgtaacatcacgacatgcccgctcttcgtatttcctggtcaccaaagccgggcgcatcgcaggtgacgaattcgattacagccccgcgtggattcgctactccgtctgccgcagtctcgaacgcttgcatacatcatatctagaccttgtatatatgcacgatgtcgagtttgtctcccctgctgaggtactagccgccgtaggagagctacgtcggctgcgcgacgagggcgtgattcgctatgttgggatcagtggatatcctgttgagaagctctgtgctcttgctgagatgatagttcgcgagactggcgagccactcgatgctgtgctgagctacagccatttcactatccagaacaccacgttaggcagggatgcgatgcggcggttcgaaaaagccggtgttgatgtaatcctgaacgccagtatgcttggtatgggcctgctcacaacgcgaggtgctgattctgggacatttgcgtcatggcatcctagtcccgagggcttgcgacaggtttgtcatgatcttgtacccattgccacggaagccggtgagaaactcgaagtcgtcgcgatccggtgggccctggacaactggtctagagatggtgctgcaagagggagtgccaactcgcgactgccgaaaggaacacgtgtcggtgtgagcgtcatgggaatatcgaatgttccagaattggaagagacatgtcgtgtattcaacagcgtgatggagggtcttgaaccagaaaatgcagataccgacttgatgagccggcgaaaatggagtcatgagcgacgcgaaaaagttcagcaggtcgtagagaagatgtgggctgttttgggtacgtggagagattacagctggagtagtcctaaccctggattcgtcaatacacgaaaacctgctgatgttggtgtcactcccgacgatggaatcctgacgaaacaggaggcaaggatactacgtcgactgggtgcgaaagaagtttcagccatgctttaa

SEQ ID NO: 30037 - protein, 412 aa, Muscodor strobelii
  misc_feature: SGI Peptide ID NO. 570325
  misc_feature (15)..(323): Pfam Id: PF00248 Pfam Desc: Aldo/keto reductase family
  misc_feature (42)..(170): Pfam Id: PF00248 Pfam Desc: Aldo/keto reductase family
  misc_feature (4)..(402): NCBI GI: 85098010 Blast Desc: NCU05594 [Neurospora crassa OR74A] gi|28922049|gb|EAA31320.1| conserved [Neurospora crassa OR74A]
  misc_feature (12)..(389): NCBI GI: 46127507 Blast Desc: FG08131.1 [Gibberella zeae PH-1]
  misc_feature (9)..(390): NCBI GI: 256722451 Blast Desc: [Nectria haematococca mpVI 77-13-4]
  misc_feature (11)..(402): NCBI GI: 171678066 Blast Desc: protein product [Podospora anserina] gi|170937102|emb|CAP61760.1| protein product [Podospora anserina]
  misc_feature (23)..(378): NCBI GI: 154323258 Blast Desc: BC1G_00028 [Botryotinia fuckeliana B05.10] gi|150842257|gb|EDN17450.1| BC1G_00028 [Botryotinia fuckeliana B05.10]
  misc_feature (11)..(382): NCBI GI: 67901268 Blast Desc: AN7621.2 [Aspergillus nidulans FGSC A4] gi|40742617|gb|EAA61807.1| AN7621.2 [Aspergillus nidulans FGSC A4] gi|259483951|tpe|CBF79760.1| TPA: L-galactose dehydrogenase
  misc_feature (11)..(377): NCBI GI: 169765488 Blast Desc: [Aspergillus oryzae RIB40] gi|238482041|ref|XP_002372259.1| L-galactose dehydrogenase (L-GalDH), [Aspergillus flavus NRRL3357] protein product oryzae]
  misc_feature (11)..(377): NCBI GI: 255953509 Blast Desc: Pc21g04610 [Penicillium chrysogenum Wisconsin 54-1255] gi|211589218|emb|CAP95358.1| Pc21g04610 [Penicillium chrysogenum Wisconsin 54-1255]
  misc_feature (11)..(376): NCBI GI: 121711277 Blast Desc: L-galactose dehydrogenase (L-GalDH), [Aspergillus clavatus NRRL 1] gi|119401405|gb|EAW11828.1| L-galactose dehydrogenase (L-GalDH), [Aspergillus clavatus NRRL 1]
  misc_feature (11)..(377): NCBI GI: 119482618 Blast Desc: L-galactose dehydrogenase (L-GalDH), [Neosartorya fischeri NRRL 181] gi|119409492|gb|EAW19440.1| L-galactose dehydrogenase (L-GalDH), [Neosartorya fischeri NRRL 181]
  misc_feature (19)..(282): SWISSPROT Homolog: EC 1.1.1.116 D-arabinose 1-dehydrogenase
MDSLTPTSAVPRRPLYEVIPPLVMGTATFNTQYVPDPFDLPAASIVSRALDLGVNAFDTSPYYGPSEIILGSALAHPAVTSRHARSSYFLVTKAGRIAGDEFDYSPAWIRYSVCRSLERLHTSYLDLVYMHDVEFVSPAEVLAAVGELRRLRDEGVIRYVGISGYPVEKLCALAEMIVRETGEPLDAVLSYSHFTIQNTTLGRDAMRRFEKAGVDVILNASMLGMGLLTTRGADSGTFASWHPSPEGLRQVCHDLVPIATEAGEKLEVVAIRWALDNWSRDGAARGSANSRLPKGTRVGVSVMGISNVPELEETCRVFNSVMEGLEPENADTDLMSRRKWSHERREKVQQVVEKMWAVLGTWRDYSWSSPNPGFVNTRKPADVGVTPDDGILTKQEARILRRLGAKEVSAML

SEQ ID NO: 30038 - DNA, 6352 bp, Muscodor strobelii
  misc_feature: SGI EST ID NO. CUFF.71240.2
  misc_feature: Variant of the nucleotide sequence at SEQ ID NO 30036
ttatgattgactgagctaagagctctggaggggtacatttgcaacggaagaaacaaacagcaaaagtaaatagcggtcgcgatatcaaacaccacaatccacacccaagatcgaattttgccaaacccattacttctctcggccctttcggatcctgtgcccacccataccagggtatcttggatgctactgcccactactgcccaccatgagtggctcatcaagctatgttcggctgggattgctgctgtctcactccactgatatctgatttatcatcccatacaagcgtcgcgttgcgatgattcatgaccatagcctgtcttgttgctgacaccggctttttctagcagcttaatctgcaaaacttcttgcggtgtagcacaacatgtttgtctctaatgatgtgactacaatgtctaccaaaatggcgcaattcacctgtccctgagttgtcattacctcatagaccaacgtcgcagctttttatcttgtcctatctccctggcaccccaccatatgctacatagaggaccctgaagatcttaagcttacacgtgaaactggaaaatatacgtgatagctattcgaatctaaaatagctcttaatattctctcattttcacgcctctgtatacaaacacaaccccattatggactctcttacacctacttccgcagtgcctcgccggccgttatacgaggtaatccccccattggtaatgggcaccgcgacattcaacacccaatacgttccagatcccttcgaccttcctgccgcgtccatagtatcacgcgctcttgaccttggcgtcaacgccttcgacacgtcgccttactatggcccgtctgagataatacttggctctgcgctggcgcaccctgctgtaacatcacgacatgcccgctcttcgtatttcctggtcaccaaagccgggcgcatcgcaggtgacgaattcgattacagccccgcgtggattcgctactccgtctgccgcagtctcgaacgcttgcatacatcatatctagaccttgtatatatgcacgatgtcgagtttgtctcccctgctgaggtactagccgccgtaggagagctacgtcggctgcgcgacgagggcgtgattcgctatgttgggatcagtggatatcctgttgagaagctctgtgctcttgctgagatgatagttcgcgagactggcgagccactcgatgctgtgctgagctacagccatttcactatccagaacaccacgttaggcagggatgcgatgcggcggttcgaaaaagccggtgttgatgtaatcctgaacgccagtatgcttggtatgggcctgctcacaacgcgaggtgctgattctgggacatttgcgtcatggcatcctagtcccgagggcttgcgacaggtttgtcatgatcttgtacccattgccacggaagccggtgagaaactcgaagtcgtcgcgatccggtgggccctggacaactggtctagagatggtgctgcaagagggagtgccaactcgcgactgccgaaaggaacacgtgtcggtgtgagcgtcatgggaatatcgaatgttccagaattggaagagacatgtcgtgtattcaacagcgtgatggagggtcttgaaccagaaaatgcagataccgacttgatgagccggcgaaaatggagtcatgagcgacgcgaaaaagttcagcaggtcgtagagaagatgtgggctgttttgggtacgtggagagattacagctggagtagtcctaaccctggattcgtcaatacacgaaaacctgctgatgttggtgtcactcccgacgatggaatcctgacgaaacaggaggcaaggatactacgtcgactgggtgcgaaagaagtttcagccatgctttaaaattttacggagttagcattatgtagcgttccatttgaattttcgacaagaccggcatggtagccacggttcccgaagacatgggaagcgcagacaatagtactctgatgaaccatcgttaacattatcgattttcgcgacacatgatccccaatgagcggactggcggttgacgggagcttttctagtacttctaatctcattgcagcctcaaattattcagcgcaataatgtctgctaacttcacagttctagtgtctatggaagtgagctcgctggttctagccacgccagatagcctcaatcgcagtaaagaagctgatcgcttcgcccttttgccccacaacctcaaatcgctcatctgctgctttgaagatacctttgtatgcctcagcaggacgttccttattgttgaacagcgccatcattctcaaatccgtcgctgttcccatctgctgaatagacctcggcatcggctctttcttcgcatcgccttcgtcaacctttccaatatactcaatgatgataacacgactgccaggcttgagagcgggtatcagagctcgcagaagcttgatacattctgcttctgggtagtcgtggagaatcatcttcatcatatagatatcggcttgagtttgctggggtttgtacatgtcgtgcgcgacaaacgacactcgacctttgagttcttcaggtatatctgcatggaagactggttctaccatggggagatcctgtacaacaatcttgagattagggaatttctgtgcgagcatgaatgcgtcaacacctgcagatcctccgatctatcgaaacggtgtcagtcaattctacttcacaaggacggggcaagctcacgtcaacgacggttgatgaccccgccgactcccagtcgtatgcattaagaatgacaccctcaagctggaagatatctttaagataatgcatgaactcaacgaactctttctgtcgccatcctcgtctttcgccttctccgtcattttccaggtaatcccacgaattagcatattttgcccccaacaccccagagctatggaatagagcaaaagcagtctcgctcatctcttgtgtcaaggcagatttcccctagctcgcaacccggattgtttggctagtgctgctgatcgggcggtgtgcgcgacttgagttggatcggactcgatctgatcgaagagacggagagtgaaagcatgctgtaaaactcgctcgactacatctttcggtagggacagtttcgtcgctatttcctcgtaagaagccgaaccatcaattggtacagccgtccagaagttgaagtggttgagtatattgaggcaggctgcatcaggaatgacctagacatattagaggactgttacattcttcgaacacgtccctcttacattgtgaacgtaattatagatactctcactggggccctgcaccaaataccacatatcttgtagcttatcacataatgattgtctcgtcatgaacatttctcctgtcaaacccgcgtgctttattgggccgtcaggggtgaagcttgcttcaggcatcttattctcttctagtgaggaggcgaatgtatcggcaagttttgtgatttccgccgccagggcgcggagctgagattctgccattgtaacccagaaattgttgatgtaacgaaatatgatgtcttcgagactgtctgtgaaacgttcttcaagcccaaatagaacgcaagacaaggtcgcagaggagtcaacaagttaaataggcgcgtagaaaaaagtctcctccttgcgtgaagattttacattttgcccaggtttgaccagtgtcaagcctcggggccagtcaactaaaacaggcatgtcattacacagccaagacatgaccccgttctccaaactgccgtcatcggcttgtgaagcggttgcgatgatgcgattgtcttggcgatctaatcagatcatcttatcaatctgcatgcgctagccatgttcgtaaatctgaagtcgccaagcgaggattctgaggttcttgtcaccttagcagcgggtattcgggtcggatacgatggtatgacgtgtcaggtttgacaggccacaataaagcgggaatggcattttttctcatataacaggcaggctctgatagcccaacccgctctatgattacatcaatgacagcgaaggcactagaatctcaacaggtaagcctaaatgggcctattcagttgtactcgagttgcttgagagacaagacttgaagtacgaatgggttgatccgtgaagcaattgtatgagagacgaacaggcacaatacgagatacaagtagctgaagaaccagatgccgactaagtctggtagtcccgaggcaagcaggccaattaaaaggttcaagatcgccaagacaagttatctgatccgaacattttgaaatgccaagtctgcaaaatcttgacctcaaatgattaccaccactgcgttcatacgtttatgggttagactggcatgaattgatcaaatagataaaccacggtgcggagatcatcagtatcatgatggaggaagcaaatggtgggtgactcaaaatctgctccttgcaacctgcgcatccgttcggctcggctcgtagcttcggctttacgattcagacttatgctctcgaatgcccagtaccaattcgacccaacgcaacatttagaagccatcatgtttgagaggaagaagtcccaagtcaaatcgatgataaacaggagagaattcgaagacgatcatattgtccacacctggcaagcccttttttgtttatacgtatgaccggaaaccctcatcaagagttagtagagtgaagcgttggttaatatcgaaattattcgcaactgttcatcggttttcgtattgctatgggcatttcaatatctaacgaggaccggctcatctaacgaaggactactgacactaacggacagtggatgagtcaaatgaagcactagcggccgtggatatagaactcattcgaatggtcctgtgaggttttcgtcattcaaggcactaggcatgatgcatgtaacgaacgagcaaaccagttctagacattatgttatagaagcgttgctcccgctcgaaatagactggcgccttcatggtcacgagagaacacggcacgatctaggcaggacaagttgctgcaaagtcaccgactgttaaattggataaacactgcgacaattaaatcaagtcctactcaacatgactatgcgtctagaagatcaggcggctactgcatctcccgacagcatcgtcttcattttctcgacagcttcatcccgatgcccctgcatgtcgatatccagaatgaaatcccatctactcacaaagtctccgtctcttttcaaatcaagtccggttttcccagtatttccgagcataatagttcctgtgccacggctcgattctacaattcgctgcgtgcgaggccttcgtacctcgtcgtacacctttagggcgagtctggcctcagccgggttcttcgccatcccaatcaaggctgagagaatcatgctatcttctatagccattccaccccccgaagactgccagggtgttgttgcgtgagctgcgtcgcccatgacgcacaatgcgccagaggcataggtcgatgcgggcaggtgttcccacaagtacatggccttatgctcgcgctcttcgaccgcactaccttcaagcgttttactttcactgtctttctcgggtcgacacagcagctacgatgaatgaatcagcctggtttccgcatgaaagctatggtagaaaaaccatcgtacctcttcacttgcagtcttcagtttctctggccactctgcatataacttcctaatctcagtcgctgtcacagtccgaacccagcggtctgatccctctgcgtccttgtcagttgaacaaatcacaaactgcactagttttccaccactcaaaacgttatgcatgacgaaactatcgttacccatccacccatgttcgcgagcatcgttgacatcgattaggtctggtcccaaggctcgaagaccgttcttgtacgggacgagcaccatgatacaccaggttccagtattcctcggggtggcggccggatcgtctggtcctaaaatgagtttcctcaccgtactgcgtataccatcggcaccaatgacgatatcacacgcgtgctccgagccatcctcaaatttgattgtgatcgaatcatcggcattgttttcaatggtgcttagcttcttggaggcatgcattctttcccccggcacatctgcaagcagctgcttcaaataatcggcccgatgcacaatgctagaaagtctcttcactgacttctcatcgtcaatatcgacttcgtcgataatctcgccctgtccttcttgctgtgcaattaagaacctaatgcctttcatagggacggctcccgcgcg

SEQ ID NO: 30039 - DNA, 912 bp, Muscodor strobelii
  misc_feature: SGI cDNA ID NO. 570326
  misc_feature: Encodes the peptide sequence at SEQ ID NO 30040
atgaagaacgccatcttcccgtcagcagtcgtcgcgactctagttacaactaccagtgcttcgaggggagcaggggaattccactacggcgctgcctttggctcaccttacgatgtctcgacggtatcaatgactccgaagacaaacccagaactcctcatgaattggggacccgacaaccgccacgatgccaccatcaacgtctgcggaaatgccaacatccgcttccttcccaccctctggggtcgtgacttcgacgacccagaactctcggcgctacccaattctcctccagccttcggtgtacttctcgagaacgagccaaactggttcggaccgcaaagcacaaatgatcatggggtgggtgctaacctaacagcccaacaatgttccgaccggtattacaccgaaacaaacataatcaactccaaattcggagtaggagtcgtgaaactattcaccccgagccccgtcaatcccgcctacccagcatgcacaggacccggccaatacggctgcacctttgagaatcaaatctcgtggttcaaggattatttcaacgattgcccgaactgcctccgggacgtctgggcaatcaacacgcacgagtacagctgcaacctggccacaacgcaagcgaacatccaacgtctgtgggataacttcggcaacaagaacgtcttcctcggcgagatcggctgcgatggcccgtcgcccgacgtccaggcgcagtacctccgcgacttcgtagcttgggcttacactcaacagtatgttgtgggcttcatctgggccggcttgaactatgttggttcgtctggggcgcagctggtgctcaatgggcaattgacgtctgtcggccgagcattcaaggatattcagcagcagtaccctcccaaaaacaacgcgtag

SEQ ID NO: 30040 - protein, 303 aa, Muscodor strobelii
  misc_feature: SGI Peptide ID NO. 570326
MKNAIFPSAVVATLVTTTSASRGAGEFHYGAAFGSPYDVSTVSMTPKTNPELLMNWGPDNRHDATINVCGNANIRFLPTLWGRDFDDPELSALPNSPPAFGVLLENEPNWFGPQSTNDHGVGANLTAQQCSDRYYTETNIINSKFGVGVVKLFTPSPVNPAYPACTGPGQYGCTFENQISWFKDYFNDCPNCLRDVWAINTHEYSCNLATTQANIQRLWDNFGNKNVFLGEIGCDGPSPDVQAQYLRDFVAWAYTQQYVVGFIWAGLNYVGSSGAQLVLNGQLTSVGRAFKDIQQQYPPKNNA

SEQ ID NO: 30041 - DNA, 480 bp, Muscodor strobelii
  misc_feature: SGI EST ID NO. CUFF.71064.0
  misc_feature: Variant of the nucleotide sequence at SEQ ID NO 30039
agcatgcacaggacccggccaatacggctgcacctttgagaatcaaatctcgtggttcaaggattatttcaacgattgcccgaactgcctccgggacgtctgggcaatcaacacgcacgagtacagctgcaacctggccacaacgcaagcgaacatccaacgtctgtgggataacttcggcaacaagaacgtcttcctcggcgagatcggctgcgatggcccgtcgcccgacgtccaggcgcagtacctccgcgacttcgtagcttgggcttacactcaacagtatgttgtgggcttcatctgggccggcttgaactatgttggttcgtctggggcgcagctggtgctcaatgggcaattgacgtctgtcggccgagcattcaaggatattcagcagcagtaccctcccaaaaacaacgcgtagagctatctattcagtaacggttacgtatagtttcgcgttatagcacatacctattt

SEQ ID NO: 30042 - DNA, 1824 bp, Muscodor strobelii
  misc_feature: SGI cDNA ID NO. 570327
  misc_feature: Elevated expression when VOC is produced
  misc_feature: Encodes the peptide sequence at SEQ ID NO 30043
atggaggcgatcgctgttatcggctttataatctctgcggtcgacctcggcgggaagattatctccaaaacatggcagttatacaaatcttctgatgaagcgaactcccggaatgtcggtttcgagcaacatgcggcaaccctgagtctatatatcgacttccttaaagcacagcaatgtctcctacctggagccactgataaatcaattgtagctttgagcgaccgcatcgcggctacctacgacgagttacgtgagctccttcgtagctgtgccatcccacaaggcggaaaacaccgaggtcgtcatataaaagccgcattcaagaacgtcactcagaaagacaagtttcgcaggatcggtggggacttgaaagctctcgcttcagaagctcaatggtatgagagcaaactcaagagcgaacaaaatcaacggcagattgagtctcagcagaagaatcacgaggaaatactacagcacatggaagatgtcaaaaccttagttgctcaaatccaccgtaagccaaaggattacggctatgaatgggaacaagacgaattcatcgtagttgatgatggcctgggaccgtgtttcaaattacctatgtgtctgtgcttagacaaaacttcctttcttagagtcatattagtcaactttgactctcacaatttacctggtctaagccaagtacgtcaaggccatgtcgagattctagactcgacagcaacaagagcaatcactaaggcgacttgggccaaggaatttgttcctggagcgaagataaaactggcatttgtcatgtgtagagagtttggtttgcccaagatgaaatgtcctcggtgttacaaaccgtatagtacagcatcgagaagtaataggtggagaaaatgttgttcatgcaatctcagcttacaactagtccaccctgatgcatacgcatatgaaccagaggacatagtcgtagctcatggggcaaaagtctaccgcgattataaaataggcaatcgtaccaaatgccgaaagcatatcgacgacaaggaaactacccgtaattctactaacgttcatggccaaaaggatgaaataccaggcaaacccgaaaacagtattgaagaacctgtcgccattgaccttgtttgtcggcggatgatactgaagtgggaacccatattcaacatcgcctacagatatatgaattgcagatgtgttatttggtcgtcgaccccgtctactttcataccttcgcggaccaacgaatccactgttccaatttctgcggtctgccccaggcacaacaaccaaggcatcgcgttcagagattttggtgccttcgtgaacaatcatgcagatccttactttgaccgctttggaggctacgattgctttcgcgcactggtatcagtatctagtcatcaaacagatcatctcggggagagttggatatctcttgaagaacaggaaagcgttctggcaaccctaaagcagcaaccaatggggcatattctggctatccgcagcgcctgggcggaatatgcatttgaagtaactcagagagcaatacaggacgggacccctatccccgaggaccaggccgcagacgtccaggagatagaagacgaatatagaatgttcaaggagatgcagaaggcagatcatccgaatgtgttggacgaattgggtatcaaagaggaggatataatgccggatgatttagaaatgctctgtcgcacaatctatcaggagagtactgtggcgaaacacgttcaagagatccttaatgggaactgggacggaagacctcattggtcgctttatgaaagttga

SEQ ID NO: 30043 - protein, 607 aa, Muscodor strobelii
  misc_feature: SGI Peptide ID NO. 570327
  misc_feature (408)..(529): NCBI GI: 238506629 Blast Desc: conserved [Aspergillus flavus NRRL3357] gi|220689229|gb|EED45580.1| conserved [Aspergillus flavus NRRL3357]
  misc_feature: Useful for introducing or modulating the production of volatile compounds
MEAIAVIGFIISAVDLGGKIISKTWQLYKSSDEANSRNVGFEQHAATLSLYIDFLKAQQCLLPGATDKSIVALSDRIAATYDELRELLRSCAIPQGGKHRGRHIKAAFKNVTQKDKFRRIGGDLKALASEAQWYESKLKSEQNQRQIESQQKNHEEILQHMEDVKTLVAQIHRKPKDYGYEWEQDEFIVVDDGLGPCFKLPMCLCLDKTSFLRVILVNFDSHNLPGLSQVRQGHVEILDSTATRAITKATWAKEFVPGAKIKLAFVMCREFGLPKMKCPRCYKPYSTASRSNRWRKCCSCNLSLQLVHPDAYAYEPEDIVVAHGAKVYRDYKIGNRTKCRKHIDDKETTRNSTNVHGQKDEIPGKPENSIEEPVAIDLVCRRMILKWEPIFNIAYRYMNCRCVIWSSTPSTFIPSRTNESTVPISAVCPRHNNQGIAFRDFGAFVNNHADPYFDRFGGYDCFRALVSVSSHQTDHLGESWISLEEQESVLATLKQQPMGHILAIRSAWAEYAFEVTQRAIQDGTPIPEDQAADVQEIEDEYRMFKEMQKADHPNVLDELGIKEEDIMPDDLEMLCRTIYQESTVAKHVQEILNGNWDGRPHWSLYES

SEQ ID NO: 30044 - DNA, 2440 bp, Muscodor strobelii
  misc_feature: SGI EST ID NO. CUFF.71121.0
  misc_feature: Variant of the nucleotide sequence at SEQ ID NO 30042
cgtctgcagcactcccgtaagctacctccgtgagaatacctaatagatacttaggtagcatgcagtgtcctataggcttccattgtgtctgcggatatggcacgtctccttggcgcctaaggctctccggcgggctgacagattcgcagtcctgcactaatgaatgaggctctgcctcgataagtacgattcaatctggacattctttttgcaaagagaagtgttatttagacagaaaattcttgatcataagataatggaggcgatcgctgttatcggctttataatctctgcggtcgacctcggcgggaagattatctccaaaacatggcagttatacaaatcttctgatgaagcgaactcccggaatgtcggtttcgagcaacatgcggcaaccctgagtctatatatcgacttccttaaagcacagcaatgtctcctacctggagccactgataaatcaattgtagctttgagcgaccgcatcgcggctacctacgacgagttacgtgagctccttcgtagctgtgccatcccacaaggcggaaaacaccgaggtcgtcatataaaagccgcattcaagaacgtcactcagaaagacaagtttcgcaggatcggtggggacttgaaagctctcgcttcagaagctcaatggtatgagagcaaactcaagagcgaacaaaatcaacggcagattgagtctcagcagaagaatcacgaggaaatactacagcacatggaagatgtcaaaaccttagttgctcaaatccaccgtaagccaaaggattacggctatgaatgggaacaagacgaattcatcgtagttgatgatggcctgggaccgtgtttcaaattacctatgtgtctgtgcttagacaaaacttcctttcttagagtcatattagtcaactttgactctcacaatttacctggtctaagccaagtacgtcaaggccatgtcgagattctagactcgacagcaacaagagcaatcactaaggcgacttgggccaaggaatttgttcctggagcgaagataaaactggcatttgtcatgtgtagagagtttggtttgcccaagatgaaatgtcctcggtgttacaaaccgtatagtacagcatcgagaagtaataggtggagaaaatggtaagaatatcccgggcgagtgccacaatgcgatcaccggcttaactcgaaacagttgttcatgcaatctcagcttacaactagtccaccctgatgcatacgcatatgaaccagaggacatagtcgtagctcatggggcaaaagtctaccgcgattataaaataggcaatcgtaccaaatgccgaaagcatatcgacgacaaggaaactacccgtaattctactaacgttcatggccaaaaggatgaaataccaggcaaacccgaaaacagtattgaagaacctgtcgccattgaccttgtttgtcggcggatgatactgaagtgggaacccatattcaacatcgcctacagatatatgaattgcagatgtgttatttggtcgtcgaccccgtctactttcataccttcgcggaccaacgaatccactgttccaatttctgcggtctgccccaggcacaacaaccaaggcatcgcgttcagagattttggtgccttcgtgaacaatcatgcagatccttactttgaccgctttggaggctacgattgctttcgcgcactggtatcagtatctagtcatcaaacagatcatctcggggagagttggatatctcttgaagaacaggaaagcgttctggcaaccctaaagcagcaaccaatggggcatattctggctatccgcagcgcctgggcggaatatgcatttgaagtaactcagagagcaatacaggacgggacccctatccccgaggaccaggccgcagacgtccaggagatagaagacgaatatagaatgttcaaggagatgcagaaggcagatcatccgaatgtgttggacgaattgggtatcaaagaggaggatataatgccggatgatttagaaatgctctgtcgcacaatctatcaggagagtactgtggcgaaacacgttcaagagatccttaatgggaactgggacggaagacctcattggtcgctttatgaaagttgaagcatataaagactgtctttacatgcagatggggttaatatttcgcagccaacttttcaggaaaacatttcctcttactttgagtagataaagactcatgacttgcgagttatcgatatcagacgacgtcaacagcgaggttcttggcgatttcacccaaatctacaatcactagtcctccggactttcggcgttgcgtagggtgtttgggatattatcgctgcctgggaaatgacagcttctctcttatagaaatagattcaatatcgatttagtttgttgccatgtcagagtttcgctcctcg

SEQ ID NO: 30045 - DNA, 1806 bp, Muscodor strobelii
  misc_feature: SGI cDNA ID NO. 570328
  misc_feature: Encodes the peptide sequence at SEQ ID NO 30046
atggaggcgatcgctgttatcggctttataatctctgcggtcgacctcggcgggaagattatctccaaaacatggcagttatacaaatcttctgatgaagcgaactcccggaatgtcggtttcgagcaacatgcggcaaccctgagtctatatatcgacttccttaaagcacagcaatgtctcctacctggagccactgataaatcaattgtagctttgagcgaccgcatcgcggctacctacgacgagttacgtgagctccttcgtagctgtgccatcccacaaggcggaaaacaccgaggtcgtcatataaaagccgcattcaagaacgtcactcagaaagacaagtttcgcaggatcggtggggacttgaaagctctcgcttcagaagctcaatggtatgagagcaaactcaagagcgaacaaaatcaacggcagattgagtctcagcagaagaatcacgaggaaatactacagcacatggaagatgtcaaaaccttagttgctcaaatccaccgtaagccaaaggattacggctatgaatgggaacaagacgaattcatcgtagttgatgatggcctgggaccgtgtttcaaattacctatgtgtctgtgcttagacaaaacttcctttcttagagtcatattagtcaactttgactctcacaatttacctggtctaagccaagtacgtcaaggccatgtcgagattctagactcgacagcaacaagagcaatcactaaggcgacttgggccaaggaatttgttcctggagcgaagataaaactggcatttgtcatgtgtagagagtttggtttgcccaagatgaaatgtcctcggtgttacaaaccgtatagtacagcatcgagaagtaataggtggagaaaatgcttacaactagtccaccctgatgcatacgcatatgaaccagaggacatagtcgtagctcatggggcaaaagtctaccgcgattataaaataggcaatcgtaccaaatgccgaaagcatatcgacgacaaggaaactacccgtaattctactaacgttcatggccaaaaggatgaaataccaggcaaacccgaaaacagtattgaagaacctgtcgccattgaccttgtttgtcggcggatgatactgaagtgggaacccatattcaacatcgcctacagatatatgaattgcagatgtgttatttggtcgtcgaccccgtctactttcataccttcgcggaccaacgaatccactgttccaatttctgcggtctgccccaggcacaacaaccaaggcatcgcgttcagagattttggtgccttcgtgaacaatcatgcagatccttactttgaccgctttggaggctacgattgctttcgcgcactggtatcagtatctagtcatcaaacagatcatctcggggagagttggatatctcttgaagaacaggaaagcgttctggcaaccctaaagcagcaaccaatggggcatattctggctatccgcagcgcctgggcggaatatgcatttgaagtaactcagagagcaatacaggacgggacccctatccccgaggaccaggccgcagacgtccaggagatagaagacgaatatagaatgttcaaggagatgcagaaggcagatcatccgaatgtgttggacgaattgggtatcaaagaggaggatataatgccggatgatttagaaatgctctgtcgcacaatctatcaggagagtactgtggcgaaacacgttcaagagatccttaatgggaactgggacggaagacctcattggtcgctttatgaaagttga

SEQ ID NO: 30046 - protein, 601 aa, Muscodor strobelii
  misc_feature: SGI Peptide ID NO. 570328
  misc_feature (402)..(523): NCBI GI: 238506629 Blast Desc: conserved [Aspergillus flavus NRRL3357] gi|220689229|gb|EED45580.1| conserved [Aspergillus flavus NRRL3357]
MEAIAVIGFIISAVDLGGKIISKTWQLYKSSDEANSRNVGFEQHAATLSLYIDFLKAQQCLLPGATDKSIVALSDRIAATYDELRELLRSCAIPQGGKHRGRHIKAAFKNVTQKDKFRRIGGDLKALASEAQWYESKLKSEQNQRQIESQQKNHEEILQHMEDVKTLVAQIHRKPKDYGYEWEQDEFIVVDDGLGPCFKLPMCLCLDKTSFLRVILVNFDSHNLPGLSQVRQGHVEILDSTATRAITKATWAKEFVPGAKIKLAFVMCREFGLPKMKCPRCYKPYSTASRSNRWRKCLQLVHPDAYAYEPEDIVVAHGAKVYRDYKIGNRTKCRKHIDDKETTRNSTNVHGQKDEIPGKPENSIEEPVAIDLVCRRMILKWEPIFNIAYRYMNCRCVIWSSTPSTFIPSRTNESTVPISAVCPRHNNQGIAFRDFGAFVNNHADPYFDRFGGYDCFRALVSVSSHQTDHLGESWISLEEQESVLATLKQQPMGHILAIRSAWAEYAFEVTQRAIQDGTPIPEDQAADVQEIEDEYRMFKEMQKADHPNVLDELGIKEEDIMPDDLEMLCRTIYQESTVAKHVQEILNGNWDGRPHWSLYES

SEQ ID NO: 30047 - DNA, 2440 bp, Muscodor strobelii; identical to SEQ ID NO: 30044
  misc_feature: SGI EST ID NO. CUFF.71121.0
  misc_feature: Variant of the nucleotide sequence at SEQ ID NO 30045

SEQ ID NO: 30048 - DNA, 480 bp, Muscodor strobelii
  misc_feature: SGI cDNA ID NO. 570329
  misc_feature: Encodes the peptide sequence at SEQ ID NO 30049
atgacaccaacccaacccctcaaagcaagcatcacccacaccacatggcttagctaccgcataggccgaggcgaacaaggcgtcctaaccttcgagccgtacaaatcctcccttctcccactctggcgcttccgcactctacagatcgcacaaaaaagcgcagcgggcctctgggagcgattcaaggaattcgatgaacaggatgacttcgtaggcatggacatgacgcggaaattcatccagatgggcatgacgcgcgccaaaagatacgcaaatcacgctggcggcaggaagtataagaaaggcaccagggaggaattacccaggagtgatgtgcatagggataagaaggagaaggaggaggcgagtgatgtgtttagggcgtattgggaacggtgtaagagccatgagggatatcaacaaaagaagactgcatttttgaaggagcagactgaggcaaagaaggcaggcgctgtgtaa

SEQ ID NO: 30049 - protein, 159 aa, Muscodor strobelii
  misc_feature: SGI Peptide ID NO. 570329
  misc_feature (2)..(152): NCBI GI: 46126639 Blast Desc: FG07697.1 [Gibberella zeae PH-1]
  misc_feature (5)..(152): NCBI GI: 170674486 Blast Desc: [Epichloe festucae]
  misc_feature (3)..(152): NCBI GI: 189206263 Blast Desc: conserved [Pyrenophora tritici-repentis Pt-1C-BFP] gi|187975559|gb|EDU42185.1| conserved [Pyrenophora tritici-repentis Pt-1C-BFP]
  misc_feature (2)..(152): NCBI GI: 169621558 Blast Desc: SNOG_13989 [Phaeosphaeria nodorum SN15] gi|160704282|gb|EAT78614.2| SNOG_13989 [Phaeosphaeria nodorum SN15]
  misc_feature (19)..(149): NCBI GI: 229917247 Blast Desc: EAT1b_1522 [Exiguobacterium sp. AT1b] gi|229468676|gb|ACQ70448.1| conserved [Exiguobacterium sp. AT1b]
  misc_feature (19)..(143): NCBI GI: 188533850 Blast Desc: ETA_17090 [Erwinia tasmaniensis Et1/99] gi|188028892|emb|CAO96755.1| Conserved [Erwinia tasmaniensis Et1/99]
  misc_feature (19)..(141): NCBI GI: 186686411 Blast Desc: Npun_F6392 [Nostoc punctiforme PCC 73102] gi|186468863|gb|ACC84664.1| conserved [Nostoc punctiforme PCC 73102]
  misc_feature (19)..(145): NCBI GI: 148651875 Blast Desc: PsycPRwf_0058 [Psychrobacter sp. PRwf-1] gi|148570959|gb|ABQ93018.1| PsycPRwf_0058 [Psychrobacter sp. PRwf-1]
  misc_feature (19)..(145): NCBI GI: 261340887 Blast Desc: EcanA3_10483 [Enterobacter cancerogenus ATCC 35316]
  misc_feature (19)..(144): NCBI GI: 71066677 Blast Desc: Psyc_2123 [Psychrobacter arcticus 273-4] gi|71039662|gb|AAZ19970.1| conserved [Psychrobacter arcticus 273-4]
MTPTQPLKASITHTTWLSYRIGRGEQGVLTFEPYKSSLLPLWRFRTLQIAQKSAAGLWERFKEFDEQDDFVGMDMTRKFIQMGMTRAKRYANHAGGRKYKKGTREELPRSDVHRDKKEKEEASDVFRAYWERCKSHEGYQQKKTAFLKEQTEAKKAGAV

SEQ ID NO: 30050 - DNA, 426 bp, Muscodor strobelii
  misc_feature: SGI cDNA ID NO. 570330
  misc_feature: Encodes the peptide sequence at SEQ ID NO 30051
atggcgcatcgaataataacgcagatcgtcgtaaccggctcccgtgtcttcggtcgcgccctcaccgaagcctacaagcaagcccaagcttcctccaactatgcccgcgctcaagccaaagcgaatcctaacggtgcgggcgcacgcggcggtctcaccggaggcatgactctcgacgaagcctgcaagattctcaacgttaagccaccgaagaaaggcgaggcaaatcttgacgaggtaatggagcgctttaagaaactcttcgacaccaatgatccacagaagggcggaagcttctatctccagagcaaagtcttgagagcgcgagaacggttagaggccgagatacggcctgccatggagaaagccgcccaagaagccgaaatcaaagaagggttcaagcccaaggtgtacaaggacaagtag

SEQ ID NO: 30051 - protein, 141 aa, Muscodor strobelii
  misc_feature: SGI Peptide ID NO. 570330
  misc_feature (1)..(137): Pfam Id: PF03656 Pfam Desc: Pam16
  misc_feature (1)..(117): Pfam Id: PF03656 Pfam Desc: Pam16
  misc_feature (1)..(141): NCBI GI: 171681780 Blast Desc: protein product [Podospora anserina] gi|170940849|emb|CAP66499.1| protein product [Podospora anserina]
  misc_feature (1)..(141): NCBI GI: 116201937 Blast Desc: CHGG_08853 [Chaetomium globosum CBS 148.51] gi|88177371|gb|EAQ84839.1| CHGG_08853 [Chaetomium globosum CBS 148.51]
  misc_feature (1)..(141): NCBI GI: 145247917 Blast Desc: An13g00670 [Aspergillus niger] gi|134080953|emb|CAK41468.1| protein product [Aspergillus niger]
  misc_feature (1)..(141): NCBI GI: 154272279 Blast Desc: mitochondrial import inner membrane translocase subunit tim-16 [Ajellomyces capsulatus NAm1] gi|150408979|gb|EDN04435.1| mitochondrial import inner membrane
  misc_feature (2)..(141): NCBI GI: 121711279 Blast Desc: cochaperone Pam16 [Aspergillus clavatus NRRL 1] gi|119401406|gb|EAW11829.1| cochaperone Pam16 [Aspergillus clavatus NRRL 1]
  misc_feature (1)..(141): NCBI GI: 119482620 Blast Desc: cochaperone Pam16 [Neosartorya fischeri NRRL 181] gi|119409493|gb|EAW19441.1| cochaperone Pam16 [Neosartorya fischeri NRRL 181]
  misc_feature (1)..(141): NCBI GI: 85097602 Blast Desc: mitochondrial import inner membrane translocase subunit tim16 [Neurospora crassa OR74A] gi|74696456|sp|Q7S6S4.1|TIM16_NEUCR RecName: Full=Mitochondrial
  misc_feature (1)..(141): NCBI GI: 115395048 Blast Desc: mitochondrial import inner membrane translocase subunit tim-16 [Aspergillus terreus NIH2624] gi|114193042|gb|EAU34742.1| mitochondrial import inner membrane
  misc_feature (1)..(141): NCBI GI: 258575837 Blast Desc: mitochondrial import inner membrane translocase subunit tim-16 [Uncinocarpus reesii 1704] gi|237902366|gb|EEP76767.1| mitochondrial import inner membrane
  misc_feature (1)..(141): NCBI GI: 242808210 Blast Desc: cochaperone Pam16 [Talaromyces stipitatus ATCC 10500] gi|218715741|gb|EED15163.1| cochaperone Pam16 [Talaromyces stipitatus ATCC 10500]
MAHRIITQIVVTGSRVFGRALTEAYKQAQASSNYARAQAKANPNGAGARGGLTGGMTLDEACKILNVKPPKKGEANLDEVMERFKKLFDTNDPQKGGSFYLQSKVLRARERLEAEIRPAMEKAAQEAEIKEGFKPKVYKDK

SEQ ID NO: 30052 - DNA, 2588 bp, Muscodor strobelii
  misc_feature: SGI EST ID NO. CUFF.71097.0
  misc_feature: Variant of the nucleotide sequence at SEQ ID NO 30050
gtaaagtcatgcaatcgataactgcttgtagaccattgaatcacatggtcgtccgtccatacaatttttagccgcgaatgaaactatcaccactttctacccgtccagccaacatccatcgcgccacctggtactgcgccgtagctgagattccgccttcatatctgccatctcagactaattcttcacagccatggcgcatcgaataataacgcagatcgtcgtaaccggctcccgtgtcttcggtcgcgccctcaccgaagcctacaagcaagcccaagcttcctccaactatgcccgcgctcaagccaaagcgaatcctaacggtgcgggcgcacgcggcggtctcaccggaggcatgactctcgacgaagcctgcaagattctcaacgttaagccaccgaagaaaggcgaggcaaatcttgacgaggtaatggagcgctttaagaaactcttcgacaccaatgatccacagaagggcggaagcttctatctccagagcaaagtcttgagagcgcgagaacggttagaggccgagatacggcctgccatggagaaagccgcccaagaagccgaaatcaaagaagggttcaagcccaaggtgtacaaggacaagtagtccgaaaacgatatgagagagacgactggacgcgagatgactctcagctaagagcacagtgacctttgcgctacgttgcttgcttctttcgagagatcgggcgtcccctgagatgtacgaaatttcaaccgatgggagagagaacatcttcgctcgaatgctgcatggccccggcgttctatggtgtttgatttgcaaatggctggtgtattgcatgggaatatacacaaaacgcatcatctgacggcagcatattagacggctgaaattgccctattgtaccactatagactcacttgtaccatacaccttgccgacttaggagatcacccgttcacataatgtacattgtcaccaaatacccaataaaccaaactcctgaccatcatactatagctttacacagcgcctgccttctttgcctcagtctgctccttcaaaaatgcagtcttcttttgttgatatccctcatggctcttacaccgttcccaatacgccctaaacacatcactcgcctcctccttctccttcttatccctatgcacatcactcctgggtaattcctccctggtgcctttcttatacttcctgccgccagcgtgatttgcgtatcttttggcgcgcgtcatgcccatctggatgaatttccgcgtcatgtccatgcctacgaagtcatcctgttcatcgaattccttgaatcgctcccagaggcccgctgcgcttttttgtgcgatctgtagagtgcggaagcgccagagtgggagaagggaggatttgtacggctcgaaggttaggacgccttgttcgcctcggcctatgcggtagctaagccatgtggtgtgggtgatgcttgctttgaggggttgggttggtgtcatgggtgctgttcatggtgtgaggagcatgggatgtttgttatacgagatagtatgtgttgacaatgagaaccagttgtttcgtatggtcatttgttcttagactttgaatgatgagctgggctagcgtgaatgagttccatgatgtcatgctgtttctaatccacgaattgagcaatgaaagttgtttctatactcataaatttaaaatttcttctttgttctccctcatcatttttgtccgtgtttaatcccaacttgttcattgctcgaatgtgtatctaccaaaaaaagtcatattgttgtttggttatcgcccttgtcgcttcaactgtaaatacatgggttcgaaggtcatgcatgatgcggcctgagaaactaggcagatcatctcgtaaagaggttcataaacgcgtcgcgtcgcctagagcaataatgagggggttggtaggaagtgatagtatggttcggtcagccgttacaagcgagcaaggaagccactggcgcttcatgtaggacatcagattgcccaatagagtggctcagcgcgttgctgcgagtcccttggatatgcacacagccctcgcatcttctggcttcaatgcaaaggattcaatgcagatatatatcatggacgaattttataagatggattggaatggatagacggctttctgccggtttcttcgtcgccacttcctatcgttggacactcatttgaaaagctatacaatttatacgcctctgttatcgaactccctgagatatcaccgatcttgtacgagtatgcgactactcaactgcaagactctgcgttgcgaaacttttgtcggacgtgagaattgtccaaaatatgcaatattgtcacatacttggggcaacgaggagatcaccttcgaagatcttttagatgtcagaatatatgctagatctaagaaaggatggaacaagatcaagaaatcttgttccatcgccaggagcaatggatatagctacatctggattgacacatgttgcatcgacaagacaagcagcagtgagcttgccgaggccatcaactcaatgttcgaatggtatgcttcagcagatgtctg

SEQ ID NO: 30053 - DNA, 909 bp, Muscodor strobelii
  misc_feature: SGI cDNA ID NO. 570331
  misc_feature: Encodes the peptide sequence at SEQ ID NO 30054
atgtcgcaatattacggagcacccccaaaccagtatggaggcggtggtgctcccgcgcaaaacctccagttctaccaatccacttactcaccgggcgtcccccagcagcaacagaactatggatatggtgcaccaccctccgagcccgctagttacggcgccttcggtggtgcacccggtgtgagcggtcgcatgggagagcagggtgggttaagaacaggttggctcgctgccttttcgactgagggttacgacaccgagcccccgttactagaagagcttggtgtcaacttcggccacattcagatgaagactctggccgtcttaaatcccttcgcccgcatcgatcagcacattatggacgactccgatcttgctggtcctatccttttcttcctcctcttcggcacattcttattgctcagcggcaaggtgcacttcggctacatctatggcttagcattgatggggtctatagcattgcacaccatcctgtcgctcatgacgcccgacggcccagatccagcaccagcatattcgccagcccaaggctatcccggtgaccccaatgccgcggttggtcacgacggcaaagaccctcttagcagcacattgacgttcgcgagaagcgccagcgtgcttggatactgtttgttaccgctggtgttggtcagcttgataggcatcgtcatacccatggatggaccattaggctatattctaacgagtgctgccatcctgtggtgcacgactagcgccagtgggttattctgtgctgtagggagaatgagacagatgcgagtgcttgtggcataccccctcgcgctgttttacgtcggattcggtatcatgagcattttcagcagccgggggtcgggtagcttagccaaggctgcaaacctttcatag

SEQ ID NO: 30054 - protein, 302 aa, Muscodor strobelii
  misc_feature: SGI Peptide ID NO. 570331
  misc_feature (94)..(270): Pfam Id: PF04893 Pfam Desc: Yip1 domain
  misc_feature (1)..(297): NCBI GI: 116201939 Blast Desc: CHGG_08854 [Chaetomium globosum CBS 148.51] gi|88177372|gb|EAQ84840.1| CHGG_08854 [Chaetomium globosum CBS 148.51]
  misc_feature (1)..(302): NCBI GI: 85097598 Blast Desc: NCU05514 [Neurospora crassa OR74A] gi|28921968|gb|EAA31240.1| NCU05514 [Neurospora crassa OR74A]
  misc_feature (1)..(302): NCBI GI: 39974893 Blast Desc: MGG_00407 [Magnaporthe grisea 70-15] gi|145018701|gb|EDK02980.1| MGG_00407 [Magnaporthe grisea 70-15]
  misc_feature (1)..(299): NCBI GI: 189204826 Blast Desc: protein transport protein yip1 [Pyrenophora tritici-repentis Pt-1C-BFP] gi|187985847|gb|EDU51335.1| protein transport protein yip1 [Pyrenophora tritici-repentis Pt-1C-BFP]
  misc_feature (1)..(296): NCBI GI: 145248622 Blast Desc: An14g00210 [Aspergillus niger] gi|134081317|emb|CAK41820.1| protein product [Aspergillus niger]
  misc_feature (1)..(296): NCBI GI: 259483703 Blast Desc: TPA: Golgi membrane protein, (AFU_orthologue; AFUA_4G04630) [Aspergillus nidulans FGSC A4]
  misc_feature (1)..(300): NCBI GI: 46127593 Blast Desc: FG08174.1 [Gibberella zeae PH-1]
  misc_feature (9)..(296): NCBI GI: 67541651 Blast Desc: AN6989.2 [Aspergillus nidulans FGSC A4] gi|40742445|gb|EAA61635.1| AN6989.2 [Aspergillus nidulans FGSC A4]
  misc_feature (1)..(299): NCBI GI: 169610387 Blast Desc: SNOG_08295 [Phaeosphaeria nodorum SN15] gi|111063451|gb|EAT84571.1| SNOG_08295 [Phaeosphaeria nodorum SN15]
  misc_feature (1)..(296): NCBI GI: 119486704 Blast Desc: Golgi membrane protein, [Neosartorya fischeri NRRL 181] gi|119410495|gb|EAW20441.1| Golgi membrane protein, [Neosartorya fischeri NRRL 181]
MSQYYGAPPNQYGGGGAPAQNLQFYQSTYSPGVPQQQQNYGYGAPPSEPASYGAFGGAPGVSGRMGEQGGLRTGWLAAFSTEGYDTEPPLLEELGVNFGHIQMKTLAVLNPFARIDQHIMDDSDLAGPILFFLLFGTFLLLSGKVHFGYIYGLALMGSIALHTILSLMTPDGPDPAPAYSPAQGYPGDPNAAVGHDGKDPLSSTLTFARSASVLGYCLLPLVLVSLIGIVIPMDGPLGYILTSAAILWCTTSASGLFCAVGRMRQMRVLVAYPLALFYVGFGIMSIFSSRGSGSLAKAANLS

SEQ ID NO: 30055 - DNA, 1758 bp, Muscodor strobelii
  misc_feature: SGI EST ID NO. CUFF.71126.1
  misc_feature: Variant of the nucleotide sequence at SEQ ID NO 30053
cgggaatgaaaaacacgcacatggagttgtgcaccaaacgcaccagctgagacgtgccgctgggtgcagcgagagagccacgtattctagccaccacacctgaggacttgacatccgattcaaaggtcttggcctgctcagcttccagggttacagtggggagctctgctattgcaggtgcctaagaaaccgcccgcacacaacatcattccgctgggcgccacagacggtgaggacacactcgctccacgccaaacctagctacattcttttgacaatacctaacttgatatccgacccttctcatcctttccgctcgatcaactaggcttcttgttgctcgtcattctcaaccctctcctcttacgactcgattggcgcatcacactcgcctaagggccagacaccctctccccgccatcgctgtttcgtcattctgcgaacattccatcctgggagttactgtcaagggctcctccatcttcaaccccaaccttgacctgttaggcccctaagcaagatcatcgtatacctcaggttcttcttagaacatgtcgcaatattacggagcacccccaaaccagtatggaggcggtggtgctcccgcgcaaaacctccagttctaccaatccacttactcaccgggcgtcccccagcagcaacagaactatggatatggtgcaccaccctccgagcccgctagttacggcgccttcggtggtgcacccggtgtgagcggtcgcatgggagagcagggtgggttaagaacaggttggctcgctgccttttcgactgagggttacgacaccgagcccccgttactagaagagcttggtgtcaacttcggccacattcagatgaagactctggccgtcttaaatcccttcgcccgcatcgatcagcacattatggacgactccgatcttgctggtcctatccttttcttcctcctcttcggcacattcttattgctcagcggcaaggtgcacttcggctacatctatggcttagcattgatggggtctatagcattgcacaccatcctgtcgctcatgacgcccgacggcccagatccagcaccagcatattcgccagcccaaggctatcccggtgaccccaatgccgcggttggtcacgacggcaaagaccctcttagcagcacattgacgttcgcgagaagcgccagcgtgcttggatactgtttgttaccgctggtgttggtcagcttgataggcatcgtcatacccatggatggaccattaggctatattctaacgagtgctgccatcctgtggtgcacgactagcgccagtgggttattctgtgctgtagggagaatgagacagatgcgagtgcttgtggcataccccctcgcgctgttttacgtcggattcggtatcatgagcattttcagcagccgggggtcgggtagcttagccaaggctgcaaacctttcatagagaatcagttcctgcgtacagtggcatttggatccggtagcattgcaggtgatgacattactgcatccaatcatctttctcgggacggcagctttgacattacgaggatatcaaaacgagggtatggagtttcacagccgttaccactgcgctgtggagagcataggaagatgaaatcaaaacaaatgaagaaaaatattataaacctcgtgtgcttcgtaattcagggatgagatatacgtaatgatgtgctccgacctacagatcgtatggaatggacagacagggagcccctgag

SEQ ID NO: 30056 - DNA, 1530 bp, Muscodor strobelii
  misc_feature: SGI cDNA ID NO. 570333
  misc_feature: Encodes the peptide sequence at SEQ ID NO 30057
atggagtcgatacaaacagcaattgccgagcgtagctcaatactactcccgttctttgttgtcgtagtcggtgtttattttttcaataacgtttttgcgagcaccaaggagactctgccatggctaggcaaggaattcgggaatgcgctccaacggcaggaggcatatcgtgcccaaagccatgatctctacaaaaagggttacgccctgtttaaagataaggctttcagattaacgacatctgaaggagagcgcgtagttgtgccccgaggcttcgtcaacgaattaagagaactcccggataagatactggatctcagagaggccttgaatcagttcacgttggctcccctcttaggtttgggtgaccccaaactaactgggttcgtggcgaagctcgttcgtgctgatctcacccgcgcgataccgcgtctacatcatggtctaacaggcgagaccaaacgtactattgcagacgagctaccccaaagtgaagattggaagcaagtgaagatgcatcgagtcctgctgcgcataatcgccaccgtttccggatcggttttcattggccccgaatattgccgtgacgagacataccttgatgccagcatcatgtatacggtacacttttccaacgctatgataggattgaagaaatggcatcctaagttacgctggttcggaagacttatcaatcctgcagtcaagaatttgtaccaggagcggaaaaaggcctgcgccttcctcattccggttgttcagaaacgacgagccgctatcgctgctggtgatgatgttccggacaatgtgttgacatggatgtgcaaaaaagccgacagccacaatctaacagacgaaaatcttgccaatctccagcttaacttgagcatggcggcaattcactctactgccattacattgttgaatatcctattcgacctcgttgcttgtccagaaggccttgttgaaattcgggaggaaatcaagcgagttcttgccgaacataacggggacatgtcttcgaaaactctttttcatatgaagcttcttgatagcgcgatgaaagaatcaacacgcctgaatcctggccatgctgtccgtttcgaacgctatctccaacagtccgtgacactcaaggacggcacgatcctccctggcggtgtcgtacttgaggtacctcacgaggtctcactcctagatccagagcgattccaagatccggagaccttcgatcctcaccgattcttcgatctccgcaatggcacggcaccaaacctgcttggatacgacaatcttgagcgataccagtttatcaccacaacgaaagactttatgcatttcggatatggacgacacgcatgcccgggacgctttttcgctgcgaacgagatcaaactgattatggccaatattttgatcgggtacgatgtacgcatgcccgatggactgacaggacgttatccaaatcagagaagggggatcgatgcactgccagacttctcaaaagacttactagtgaggaagctttag

SEQ ID NO: 30057 - protein, 509 aa, Muscodor strobelii
  misc_feature: SGI Peptide ID NO. 570333
  misc_feature (40)..(506): Pfam Id: PF00067 Pfam Desc: Cytochrome P450
  misc_feature (274)..(472): Pfam Id: PF00067 Pfam Desc: Cytochrome P450
  misc_feature (1)..(507): NCBI GI: 145604252 Blast Desc: MGG_08459 [Magnaporthe grisea 70-15] gi|145012286|gb|EDJ96942.1| MGG_08459 [Magnaporthe grisea 70-15]
  misc_feature (1)..(489): NCBI GI: 116178810 Blast Desc: CHGG_00033 [Chaetomium globosum CBS 148.51] gi|88184330|gb|EAQ91798.1| CHGG_00033 [Chaetomium globosum CBS 148.51]
  misc_feature (38)..(509): NCBI GI: 46140043 Blast Desc: FG11536.1 [Gibberella zeae PH-1]
  misc_feature (38)..(509): NCBI GI: 256724873 Blast Desc: NECHADRAFT_77014 [Nectria haematococca mpVI 77-13-4]
  misc_feature (22)..(508): NCBI GI: 145613752 Blast Desc: conserved [Magnaporthe grisea 70-15] gi|145020779|gb|EDK04908.1| conserved [Magnaporthe grisea 70-15]
  misc_feature (22)..(508): NCBI GI: 58257423 Blast Desc: cytochrome P450-like protein [Magnaporthe grisea]
  misc_feature (51)..(500): NCBI GI: 171679136 Blast Desc: protein product [Podospora anserina] gi|170937639|emb|CAP62298.1| protein product [Podospora anserina]
  misc_feature (51)..(509): NCBI GI: 189211769 Blast Desc: ent-kaurene oxidase [Pyrenophora tritici-repentis Pt-1C-BFP] gi|187979412|gb|EDU46038.1| ent-kaurene oxidase [Pyrenophora tritici-repentis Pt-1C-BFP]
  misc_feature (129)..(508): NCBI GI: 145604905 Blast Desc: MGG_01950 [Magnaporthe grisea 70-15] gi|145012821|gb|EDJ97462.1| MGG_01950 [Magnaporthe grisea 70-15]
  misc_feature (134)..(509): NCBI GI: 164428375 Blast Desc: NCU05001 [Neurospora crassa OR74A] gi|157072121|gb|EAA26529.2| conserved [Neurospora crassa OR74A]
  misc_feature (66)..(508): SWISSPROT Homolog: EC 1.14.13.78 Ent-kaurene oxidase
MESIQTAIAERSSILLPFFVVVVGVYFFNNVFASTKETLPWLGKEFGNALQRQEAYRAQSHDLYKKGYALFKDKAFRLTTSEGERVVVPRGFVNELRELPDKILDLREALNQFTLAPLLGLGDPKLTGFVAKLVRADLTRAIPRLHHGLTGETKRTIADELPQSEDWKQVKMHRVLLRIIATVSGSVFIGPEYCRDETYLDASIMYTVHFSNAMIGLKKWHPKLRWFGRLINPAVKNLYQERKKACAFLIPVVQKRRAAIAAGDDVPDNVLTWMCKKADSHNLTDENLANLQLNLSMAAIHSTAITLLNILFDLVACPEGLVEIREEIKRVLAEHNGDMSSKTLFHMKLLDSAMKESTRLNPGHAVRFERYLQQSVTLKDGTILPGGVVLEVPHEVSLLDPERFQDPETFDPHRFFDLRNGTAPNLLGYDNLERYQFITTTKDFMHFGYGRHACPGRFFAANEIKLIMANILIGYDVRMPDGLTGRYPNQRRGIDALPDFSKDLLVRKL

SEQ ID NO: 30058 - DNA, 2733 bp, Muscodor strobelii
  misc_feature: SGI EST ID NO. CUFF.71109.0
  misc_feature: Variant of the nucleotide sequence at SEQ ID NO 30056
gacgaataatctacttctttactaaaaccacgggaatatcccatgttcaaatcccaggcccaataaggccagcttcatatatgatgtgacggatagtagagagcatggcaatggagaaaaatgcagcaactttcgaaccattggcaaaaagacggcaccgggacggccctcatttccaagacgtttgccaagggctgatgcggtttggctaactctttgggggaattgtaataatagaactactcaaatgccgtctctcgggatgcagcactaacaaagcttccgcgccctcaggacttggcccgatcattactgccggcaagacatttctggccgtcctcgattccaacatcactcgagttgtctctattgtgtatgctatcggattgtagtaagttcgctatggtctatacgatcagcacaaggcgtgctagtcgcgtgtcgttgggttggtgatcgacgattactggctctgcactaatgctggctgacattgtttgcctatcaacttatcatctagactacagtatgctactgctgcgccgtcttcgtgcggaccagaaggattctaagaaatacagtacttctaatcatcacacggggatttgatgcgtccagcttgcagcagtggcttgaaagatgcactgtgacattaatcgcgctatgtcagctcaaatcatattctcgtgaaccctggcttcgactgtaatatcaacaccccctcagcattatagaccaatctgatattataagatgggcagcagctgcatattagctgatcgtcaggcacgttcgagcgattcgcgactcaagtccacgcgcgatggagtcgatacaaacagcaattgccgagcgtagctcaatactactcccgttctttgttgtcgtagtcggtgtttattttttcaataacgtttttgcgagcaccaaggagactctgccatggctaggcaaggaattcgggaatgcgctccaacggcaggaggcatatcgtgcccaaagccatgatctctacaaaaagggttacgccctgtttaaagataaggctttcagattaacgacatctgaaggagagcgcgtagttgtgccccgaggcttcgtcaacgaattaagagaactcccggataagatactggatctcagagaggccttgaatcagttcacgttggctcccctcttaggtttgggtgaccccaaactaactgggttcgtggcgaagctcgttcgtgctgatctcacccgcgcgataccgcgtctacatcatggtctaacaggcgagaccaaacgtactattgcagacgagctaccccaaagtgaagattggaagcaagtgaagatgcatcgagtcctgctgcgcataatcgccaccgtttccggatcggttttcattggccccgaatattgccgtgacgagacataccttgatgccagcatcatgtatacggtacacttttccaacgctatgataggattgaagaaatggcatcctaagttacgctggttcggaagacttatcaatcctgcagtcaagaatttgtaccaggagcggaaaaaggcctgcgccttcctcattccggttgttcagaaacgacgagccgctatcgctgctggtgatgatgttccggacaatgtgttgacatggatgtgcaaaaaagccgacagccacaatctaacagacgaaaatcttgccaatctccagcttaacttgagcatggcggcaattcactctactgccattacattgttgaatatcctattcgacctcgttgcttgtccagaaggccttgttgaaattcgggaggaaatcaagcgagttcttgccgaacataacggggacatgtcttcgaaaactctttttcatatgaagcttcttgatagcgcgatgaaagaatcaacacgcctgaatcctggccatgctgtccgtttcgaacgctatctccaacagtccgtgacactcaaggacggcacgatcctccctggcggtgtcgtacttgaggtacctcacgaggtctcactcctagatccagagcgattccaagatccggagaccttcgatcctcaccgattcttcgatctccgcaatggcacggcaccaaacctgcttggatacgacaatcttgagcgataccagtttatcaccacaacgaaagactttatgcatttcggatatggacgacacgcatgcccgggacgctttttcgctgcgaacgagatcaaactgattatggccaatattttgatcgggtacgatgtacgcatgcccgatggactgacaggacgttatccaaatcagagaagggggatcgatgcactgccagacttctcaaaagacttactagtgaggaagctttaggttcatttggcatagcgatacaggcttagaaaggctgtttcgaggtgaaaggagttcggttggtgggctgtcatagattcggtagtgaacaacacacatagatgcggcgttgaggagggcgctttagaccaacatttcgtcacagaaatacgctaagacagcatacgacatacaacaaatgattgcttttcatagtacttgataccaaacagacatttatactttcaaaaactcatatcatgaattgatgtcgtctaggtcaggtttgttatgaggatagtcgtacaacaaactgctttaagatacgtatcgtcttcatgcgggtaaattgcctagttgtctcaagtcattactgcgcaaacctctaggacttgcaattg

SEQ ID NO: 30059 - DNA, 744 bp, Muscodor strobelii
  misc_feature: SGI cDNA ID NO. 570334
  misc_feature: Encodes the peptide sequence at SEQ ID NO 30060
atgaagttctccatcgttgcggctctggcctttgccagctcgatcgaagctcattgtattttccaagaggtcacagtcaacaatcagaaacaaggctcgcttgtcggtttgcgtgctccaaacgacaataatcctgtgtacgatgtgacctctcaagatatcatttgtcagaagcaaggtcgcacctctagccagatcatcaatgttgctcctggtgataacatcggggcttacttcggacatgtcattggcggcgcgcagtttgcaaacgatcccgacaacccaatcgccaagtcccacaagggaccgatcacggcttggttggcgaaggtcgataacgctgcgacatctagcaagacagggcttaagtggttcaagatttgggaagaaacgttcaatccctcgagcaaacaatggggcgttgacaccatgattgcaaatggtggcaacgtgaagtttcagatgcctcaatgtattgcaccaggcgactacttgatgcgtgtcgagattctagctcttcattctgccaagtcaagcatgggcgctcaattttacatgtcctgcgcccagctgaagattagtggcagtggcacattcacaccgtcacagacgttcagtttccccggggcctatcagcagaatgatccatctattctaatcaacatctacggtgccacagggcagccagacaacggcggcaaggcgtactcggctcccggtaatgcgccggtcattaagtgctag

SEQ ID NO: 30060 - protein, 247 aa, Muscodor strobelii
  misc_feature: SGI Peptide ID NO. 570334
  misc_feature (1)..(238): Pfam Id: PF03443 Pfam Desc: Glycosyl hydrolase family 61
  misc_feature (100)..(223): Pfam Id: PF03443 Pfam Desc: Glycosyl hydrolase family 61
  misc_feature (1)..(244): NCBI GI: 116180110 Blast Desc: CHGG_00683 [Chaetomium globosum CBS 148.51] gi|88184980|gb|EAQ92448.1| CHGG_00683 [Chaetomium globosum CBS 148.51]
  misc_feature (1)..(244): NCBI GI: 171691981 Blast Desc: protein product [Podospora anserina] gi|170945939|emb|CAP72740.1| protein product [Podospora anserina]
  misc_feature (1)..(247): NCBI GI: 39971969 Blast Desc: MGG_07300 [Magnaporthe grisea 70-15] gi|145019805|gb|EDK04033.1| MGG_07300 [Magnaporthe grisea 70-15]
  misc_feature (1)..(247): NCBI GI: 169855573 Blast Desc: CC1G_02189 [Coprinopsis cinerea okayama7#130] gi|116504535|gb|EAU87430.1| CC1G_02189 [Coprinopsis cinerea okayama7#130]
  misc_feature (18)..(242): NCBI GI: 85119231 Blast Desc: NCU02916 [Neurospora crassa OR74A] gi|28927409|gb|EAA36362.1| NCU02916 [Neurospora crassa OR74A]
  misc_feature (1)..(240): NCBI GI: 169869008 Blast Desc: CC1G_04917 [Coprinopsis cinerea okayama7#130] gi|116497912|gb|EAU80807.1| CC1G_04917 [Coprinopsis cinerea okayama7#130]
  misc_feature (23)..(244): NCBI GI: 171679757 Blast Desc: protein product [Podospora anserina] gi|170939504|emb|CAP64732.1| protein product [Podospora anserina]
  misc_feature (17)..(244): NCBI GI: 261361024 Blast Desc: cellulose-growth-specific protein [Verticillium albo-atrum VaMs.102]
  misc_feature (9)..(247): NCBI GI: 116199025 Blast Desc: CHGG_07668 [Chaetomium globosum CBS 148.51] gi|88178947|gb|EAQ86415.1| CHGG_07668 [Chaetomium globosum CBS 148.51]
  misc_feature (1)..(242): NCBI GI: 189200631 Blast Desc: endoglucanase II [Pyrenophora tritici-repentis Pt-1C-BFP] gi|187983751|gb|EDU49239.1| endoglucanase II [Pyrenophora tritici-repentis Pt-1C-BFP]
  misc_feature (5)..(223): SWISSPROT Homolog: EC 3.2.1.4 Cellulase
MKFSIVAALAFASSIEAHCIFQEVTVNNQKQGSLVGLRAPNDNNPVYDVTSQDIICQKQGRTSSQIINVAPGDNIGAYFGHVIGGAQFANDPDNPIAKSHKGPITAWLAKVDNAATSSKTGLKWFKIWEETFNPSSKQWGVDTMIANGGNVKFQMPQCIAPGDYLMRVEILALHSAKSSMGAQFYMSCAQLKISGSGTFTPSQTFSFPGAYQQNDPSILINIYGATGQPDNGGKAYSAPGNAPVIKC

SEQ ID NO: 30061 - DNA, 2677 bp, Muscodor strobelii
  misc_feature: SGI EST ID NO. CUFF.71111.0
  misc_feature: Variant of the nucleotide sequence at SEQ ID NO 30059
cttggaagaagcttacggatcttttgaggcccgtctattcctttgacatcggattctagacaatgcggttgagtttagacatccgactatctccgtatcctacaccttgtaaagtcgtttacaaattctgcatacacctccccctattctagctagtgtcgcgacgatcactcaccggactggcatttttgtcaagatgctgggcacaagccattccagcgtggttttctgacatcagcatggtgcgcagctattcttcaatcatgattcgaggcactttgaatttgacaacgcttcaacgatgatgtgtacgtctacgcgctctcagcatctacctatcgcggatgatatcaaaaggcacaacataacatcgaaagtcatggacattgctggctgccggtctcgtctccgatgaacttcaaggtagactctaagcttgttgcataaacgtgagccattatcgggaaaatggcctcatctctgtttcgcttcacggaatcgaacttcggtgaagacttaaagtttatagtaagcttaaaaagagattgagatgaagctttgggataagcattgtagaatatgtacgtgccgcaaagaatcacatcgcgcgacaccctttaaggaaggtttatttgtattaccctagcaggcgaagagagcgattgcgcctgcaggtacactttgctttcacagattagaccatgttcaacatttttagaaactcagctcgacgatgaaaagttcagtgcatgccttatctctgtgtctgatttttgttcatggattgtcatctagatatctgaagtcttgaccattataatttcttggtccttattcgaaacgcgtgcgcatccgactctcttctcatacgcatgttagggttaaattacctttgcagtgaatgcgatgaagtgatatttgatgcagtctcaactacatgggatgctacagatcactagctgaacttttgaagtttatgtctagccttgccactatgctcgatacgaccttgatgttctatgtaagatatgcaaagcttccgctcatgtcttgcagatcgctaccgggtgcgtcatgctttcctaagttcgctcgcttgactcggagctgtctgatgatgaacagatggaggtaaatgaatttcgttgccgtgtccccagcaatgcccaatcgcgtgcattccagcaacctgacggggcggcttccccaggtttattgtatcacctggcattggcaataaataaaaaacgcgctacccaggtgcattggatatagccggataaattgccctcctttcacggcccgatttccaacttttgcacctaaagctcgcgttagcaaatattttgtgcgacggaaagcatcaagaagaagagaactcggacttataccaatttggaatctcttattatgtaacattggcactcggcatttctgactgacggtcatgcgtagtcgataggcggatgatgcgcgagatgggttcttcggcgcgatgaatcgccttgacgtgctatataaatgggcgccatggtttccaaatcccaatggtatcgaggtggtatcggataacctaagcattagctgttcagcatcatgaagttctccatcgttgcggctctggcctttgccagctcgatcgaagctcattgtattttccaagaggtcacagtcaacaatcagaaacaaggctcgcttgtcggtttgcgtgctccaaacgacaataatcctgtgtacgatgtgacctctcaagatatcatttgtcagaagcaaggtcgcacctctagccagatcatcaatgttgctcctggtgataacatcggggcttacttcggacatgtcattggcggcgcgcagtttgcaaacgatcccgacaacccaatcgccaagtcccacaagggaccgatcacggcttggttggcgaaggtcgataacgctgcgacatctagcaagacagggcttaagtggttcaagatttgggaagaaacgttcaatccctcgagcaaacaatggggcgttgacaccatgattgcaaatggtggcaacgtgaagtttcagatgcctcaatgtattgcaccaggcgactacttgatgcgtgtcgagattctagctcttcattctgccaagtcaagcatgggcgctcaattttacgtaggtcctcggttttctagtacgctgagttgaagccacataaaatgatcccggtggctcacaaaaagcgatgccgatttctcgggaacaccatttgtttacttcaagccctttgatatcataagacttcaccaacttgatgctgactttgaatgacgtttagatgtcctgcgcccagctgaagattagtggcagtggcacattcacaccgtcacagacgttcagtttccccggggcctatcagcagaatgatccatctattctaatcaacatctacggtgccacagggcagccagacaacggcggcaaggcgtactcggctcccggtaatgcgccggtcattaagtgctagagagactgaataatttggttggctcgagagcagaatgcatgacactaaaaggctgttgttagtcatagagagctgttagaggcgggcgttcttgtaaaggccaacttatagttgcgtgtcgctgaacggtaccgtagcgccttcaattttgtcaaatttaagcgccgacaaaaa

SEQ ID NO: 30062 - DNA, 4809 bp, Muscodor strobelii
  misc_feature: SGI cDNA ID NO. 570335
  misc_feature: Encodes the peptide sequence at SEQ ID NO 30063
atgccgccaagtctcctacaatccacaactagtgggttaagctcaagctctagcaatgaatcggcaaaattggacttggccgaccagagagaaatcgaagccctttggaaagaggtaaccgcgaaggtcgtgaaattagcaaatgatgattcgaaaggtatccagcaagtatctagcatcgatgacgttttaagaaagatcgaatctgcgcaaaagaccgaggacaaaaagtctgcggaatggggggttttcaagaacatactgggaaagacattgcaatgtatccaaacggttggtggcatagttgcgagtggcgtctcaaccgtattccagccagcagatatggcatacaatgcgctaactttcgtcatctcggcatggcaagactacgaggggacgttcgtcaatcttggcgagttgttagagaaatgtgtagagttctttgaacgcttgcagtcttaccaagggaaaatggattctagattaactcgccttgcgtcgcagaatctaagactgtttatcgaaatatgcgatcgactgatcaagctgaggaagaagcacaccagattcttacgattcactaaacagctctttctcaaagatgatggcgttcaggacctcttgagcatgatggacaggctaaactccaaagaggcgctgctggtcagtgcacaaacgtaccgacttgtcagtgacagtgctggagatatcaaattggtcctcgaagcgcaaagggagatgaggcgcgaggatgatgcgaagaagtggcgacggactatcgcaaaatctctaggttttccaggcacaaccctggattcagatggagaaccgatacctgcttggcagcgggcattcgatactcgcattaactcagtagtagatgggactggcttatggtggaagtcagataatcagttttatagatgggctacttccgcagatcccgaggaacctcttctcttgctgagtggtccaggaggcacaggaaagacatcgatggtggccaacacaatcaaatcgataaggaagcttggctcagaggcacccgcaggtactacaagagtggttgccgcatactatttcgccgatgcggacaagagaaaagcagacgacgaagacgaaagtggtttccttgagcgcgtatcgagaacattgctttggcagattgcaacatcatatgaggctatgactaagtctgtcaattcggtgttagagagggcaccacagttcgacgggtctcttgaccgctgggatcggctgtttttcaacaacaaggagagtcagaaccctagtacttcattctacatatttatcgacgccatcgacccggagttattgcccttgttgcagcggttctccaaattagctgatcgtactaagacaagagttcttctggccggccgacccgagctgattgcgcagcatttgggtcaaccagaaactgttaggttcacggatattccgattgcagaacgaaacggtccagatgttgaaaagtatatagtagctcagatggacaccatgccaatcttgagggacgtcagccgctcgggtatatctgcatggcggcagatcatccagaaggaattaaaggacaagtgctccggggattttctcaagctcagcactagtctgacggccctttcaaaggtcgacttgatcgaggatatcagagacgtattagaagaggctggcagaactcgattggaccagattgatgatgaactccgccgtctaaatagcactcgtactctaaaagagatccgggagatcaacgaaatcattacatggatcaacactggccgtcgatacttcaaaattgagacaatggaagcgctgttatctgtcaagcaccgtgcgcctttattcacacttcaaaatactcgacctgtcattcttgaccagcgacagctgtcctccgcgcgtaatatctctactagcgaatctgactcgcaaaatgtgttgacaactatctccctgcttcctctagcacagaaactccgagagaaatatccgattttctctatcacagactctggcttgatagattggcggtcatccgagattcccgagcgaattccaaccctgggacatcaacaagaggcaagaattgaaggcatcgatctgccacaacgagcaaaagtgattcaggagtcagagattaacattgttcgccactttttaagcaacgtgtgccctggagagctctatgagcgtttcgagtttgaagagttcttcaacggaaaacttggcgccagacttaaggaatacataagcttggacccggacaatgcaaacgtgaaaatagtattcacttgcttggtgatactcacggacgaggaacttcggaaaaacgaaaagttacgccaatatgcgatgtactggctcctggatcacttagaggacgttgatctatccgctgcagatcgagaactcaaagcgcaagtcgggccgcttctgatacgactcttcacagaagactgtggcattgactcgttgttctggtcattcgatctaaatgttagccagaaaacgtgggatcaaggcgaggctctgttgctgcgtgagtctcgcaacgagtgggtgtattctacggctggcgtgcgtgaaattactaggtggctttcagactcctctgtcacgaagtacatcaccagtgagactggcagaaaaatcattgaggcaatcaaagcacccggctcgaatctccaccaggtcgtcctatgctacgcagcgagacgaatggcttttcacatgtttttccgcatagagttcctgaaacgccaatttctagcaggtgcctgttttctcagagggtatctagcaagactcaacggtgtggaaatgccagacgatccagctgtttatcgtagtgatggagacgatgctttccagacttgggagaatgtcgaatttccgttgaataaattagatgaaatcgagaaatgggcctctactgagttggcactagaagatactcctcagcagcaatctctttgggaaatccatggtgcccttcttgccttccagctttgcgataacgaggatgagaaaaaagatgtttctcagaagcgagctcagaaggcccttgacctcaatccagagaactggcacgcttgccattttgtatctggtcgaccgagtacaagcaaagaacgcggtgtcgaactcctttctcgcgctaagactgctgttgacaatattcgtgccaaggattctgcttggatgaaagactctgccaactctgcacttattgctaggatcacattggatttaggtaataagctctgggaagttggagattttgctactgctgcggttaggcatcgcgagagcttaggatatgactacgttcacttcacggcttacgcgaaggttctcggtcgctaccgagacagtcaaaaatgggacgagctcattgcttttatcgacactatgaatcagacaagcactatctgggacgcctacttcgacgagcttgtgcatgacttcattgctgtattggctgaagaaaactctgacatgttagctatggccgcggacgcaactcgtcgttgggatgtcattcagtcattctttacgattgccatggacatcggcaatcaagagaaagcatacgaccttatgtttcttcttcgagacggctttgcgaagacgctggagctaacaaatgggactgttgacgaaaacatggtggtctctattcgtagtgcagctttggagttgatccagcaacatccaagtgatgttcttccccgaactaaaatatgggacgtgacagattctttagctagggtctatgtggatcaagcctttcgaccaaacacctcggaggaaaaggtcgaaagtctaggctccttactttcagcattggcgcctgattctgccgatgccatcgatagcgcagagattgttacagtttgctatctgatacgctatcaccacaagcgtaacagtggttctgaggtagcgcaacgatggattaggcggattgtgagcaccggactggagcttttgtcagactcggatgaagacaatgacgactatgcctattggctcttggcaagactctttactaccatcgaggatgacgaaaacaaccaaatcgcctggactatgcggaatgcgtttcaagacgccgccttagcaaaatggagcgaatgggtcacgacacccattgattctcccgtccgaaaaaggacttttccacctgaacaaaaaaatagtcgagacagtctaagtattcgtcgaagggactctagccaatcagtgagctcgcaggccggagggagatcgcgatcgcaaggaagcgcgcactcgccttcgagcgagacgccaaagaacatcgaaaagcccgttcagacatctacggcacgtcctttaaatggcacagcccaagccaccgacgagcaaccacatccctcaagaatctcaactgatattgtggaagtaactcccccaaacgcgccagcaaaaccgacatggtttgttggatgtgatggatgtgataaagagtggacgttgatggacgaaccccttcatacctgtgcggacaccgttggcgttgaacagttatgccgggactgttacgcgttgctcatgaacgaccaacatcccaagaagagcatcaagagtaagaaggagcacaagttcctcgacatccctgtatgggatgacgaacggtatagggatatgccacataattacttgcctttgccacagagtaaggatggaagtaaaagatggatttcactagaggagtggaggaagaacttgaagcggctttatcttcccgagaccaaggtatga

SEQ ID NO: 30063 - protein, 1602 aa, Muscodor strobelii
  misc_feature: SGI Peptide ID NO. 570335
  misc_feature (1)..(1402): NCBI GI: 46115130 Blast Desc: FG03407.1 [Gibberella zeae PH-1]
  misc_feature (31)..(1597): NCBI GI: 67536878 Blast Desc: AN4609.2 [Aspergillus nidulans FGSC A4] gi|40741221|gb|EAA60411.1| AN4609.2 [Aspergillus nidulans FGSC A4] gi|259482559|tpe|CBF77156.1| TPA: NACHT and TPR domain FGSC
  misc_feature (123)..(1373): NCBI GI: 259487833 Blast Desc: TPA: [Aspergillus nidulans FGSC A4]
  misc_feature (14)..(1366): NCBI GI: 145257614 Blast Desc: An04g04320 [Aspergillus niger] gi|134058712|emb|CAK38696.1| protein product [Aspergillus niger]
  misc_feature (26)..(1366): NCBI GI: 255940720 Blast Desc: Pc16g08070 [Penicillium chrysogenum Wisconsin 54-1255] gi|211585752|emb|CAP93477.1| Pc16g08070 [Penicillium chrysogenum Wisconsin 54-1255]
  misc_feature (30)..(1373): NCBI GI: 115389028 Blast Desc: [Aspergillus terreus NIH2624] gi|114194415|gb|EAU36115.1| [Aspergillus terreus NIH2624]
  misc_feature (28)..(1596): NCBI GI: 154287794 Blast Desc: conserved [Ajellomyces capsulatus NAm1] gi|150408333|gb|EDN03874.1| conserved [Ajellomyces capsulatus NAm1]
  misc_feature (28)..(1596): NCBI GI: 240276123 Blast Desc: neutral amino acid permease [Ajellomyces capsulatus H143]
  misc_feature (28)..(1039): NCBI GI: 258569000 Blast Desc: [Uncinocarpus reesii 1704] gi|237906690|gb|EEP81091.1| [Uncinocarpus reesii 1704]
  misc_feature (27)..(828): NCBI GI: 238839104 Blast Desc: conserved [Microsporum canis CBS 113480]
MPPSLLQSTTSGLSSSSSNESAKLDLADQREIEALWKEVTAKVVKLANDDSKGIQQVSSIDDVLRKIESAQKTEDKKSAEWGVFKNILGKTLQCIQTVGGIVASGVSTVFQPADMAYNALTFVISAWQDYEGTFVNLGELLEKCVEFFERLQSYQGKMDSRLTRLASQNLRLFIEICDRLIKLRKKHTRFLRFTKQLFLKDDGVQDLLSMMDRLNSKEALLVSAQTYRLVSDSAGDIKLVLEAQREMRREDDAKKWRRTIAKSLGFPGTTLDSDGEPIPAWQRAFDTRINSVVDGTGLWWKSDNQFYRWATSADPEEPLLLLSGPGGTGKTSMVANTIKSIRKLGSEAPAGTTRVVAAYYFADADKRKADDEDESGFLERVSRTLLWQIATSYEAMTKSVNSVLERAPQFDGSLDRWDRLFFNNKESQNPSTSFYIFIDAIDPELLPLLQRFSKLADRTKTRVLLAGRPELIAQHLGQPETVRFTDIPIAERNGPDVEKYIVAQMDTMPILRDVSRSGISAWRQIIQKELKDKCSGDFLKLSTSLTALSKVDLIEDIRDVLEEAGRTRLDQIDDELRRLNSTRTLKEIREINEIITWINTGRRYFKIETMEALLSVKHRAPLFTLQNTRPVILDQRQLSSARNISTSESDSQNVLTTISLLPLAQKLREKYPIFSITDSGLIDWRSSEIPERIPTLGHQQEARIEGIDLPQRAKVIQESEINIVRHFLSNVCPGELYERFEFEEFFNGKLGARLKEYISLDPDNANVKIVFTCLVILTDEELRKNEKLRQYAMYWLLDHLEDVDLSAADRELKAQVGPLLIRLFTEDCGIDSLFWSFDLNVSQKTWDQGEALLLRESRNEWVYSTAGVREITRWLSDSSVTKYITSETGRKIIEAIKAPGSNLHQVVLCYAARRMAFHMFFRIEFLKRQFLAGACFLRGYLARLNGVEMPDDPAVYRSDGDDAFQTWENVEFPLNKLDEIEKWASTELALEDTPQQQSLWEIHGALLAFQLCDNEDEKKDVSQKRAQKALDLNPENWHACHFVSGRPSTSKERGVELLSRAKTAVDNIRAKDSAWMKDSANSALIARITLDLGNKLWEVGDFATAAVRHRESLGYDYVHFTAYAKVLGRYRDSQKWDELIAFIDTMNQTSTIWDAYFDELVHDFIAVLAEENSDMLAMAADATRRWDVIQSFFTIAMDIGNQEKAYDLMFLLRDGFAKTLELTNGTVDENMVVSIRSAALELIQQHPSDVLPRTKIWDVTDSLARVYVDQAFRPNTSEEKVESLGSLLSALAPDSADAIDSAEIVTVCYLIRYHHKRNSGSEVAQRWIRRIVSTGLELLSDSDEDNDDYAYWLLARLFTTIEDDENNQIAWTMRNAFQDAALAKWSEWVTTPIDSPVRKRTFPPEQKNSRDSLSIRRRDSSQSVSSQAGGRSRSQGSAHSPSSETPKNIEKPVQTSTARPLNGTAQATDEQPHPSRISTDIVEVTPPNAPAKPTWFVGCDGCDKEWTLMDEPLHTCADTVGVEQLCRDCYALLMNDQHPKKSIKSKKEHKFLDIPVWDDERYRDMPHNYLPLPQSKDGSKRWISLEEWRKNLKRLYLPETKV

SEQ ID NO: 30064 - DNA, 3069 bp, Muscodor strobelii
  misc_feature: SGI EST ID NO. CUFF.71117.0
  misc_feature: Variant of the nucleotide sequence at SEQ ID NO 30062
atcaacaagaggcaagaattgaaggcatcgatctgccacaacgagcaaaagtgattcaggagtcagagattaacattgttcgccactttttaagcaacgtgtgccctggagagctctatgagcgtttcgagtttgaagagttcttcaacggaaaacttggcgccagacttaaggaatacataagcttggacccggacaatgcaaacgtgaaaatagtattcacttgcttggtgatactcacggacgaggaacttcggaaaaacgaaaagttacgccaatatgcgatgtactggctcctggatcacttagaggacgttgatctatccgctgcagatcgagaactcaaagcgcaagtcgggccgcttctgatacgactcttcacagaagactgtggcattgactcgttgttctggtcattcgatctaaatgttagccagaaaacgtgggatcaaggcgaggctctgttgctgcgtgagtctcgcaacgagtgggtgtattctacggctggcgtgcgtgaaattactaggtggctttcagactcctctgtcacgaagtacatcaccagtgagactggcagaaaaatcattgaggcaatcaaagcacccggctcgaatctccaccaggtcgtcctatgctacgcagcgagacgaatggcttttcacatgtttttccgcatagagttcctgaaacgccaatttctagcaggtgcctgttttctcagagggtatctagcaagactcaacggtgtggaaatgccagacgatccagctgtttatcgtagtgatggagacgatgctttccagacttgggagaatgtcgaatttccgttgaataaattagatgaaatcgagaaatgggcctctactgagttggcactagaagatactcctcagcagcaatctctttgggaaatccatggtgcccttcttgccttccagctttgcgataacgaggatgagaaaaaagatgtttctcagaagcgagctcagaaggcccttgacctcaatccagagaactggcacgcttgccattttgtatctggtcgaccgagtacaagcaaagaacgcggtgtcgaactcctttctcgcgctaagactgctgttgacaatattcgtgccaaggattctgcttggatgaaagactctgccaactctgcacttattgctaggatcacattggatttaggtaataagctctgggaagttggagattttgctactgctgcggttaggcatcgcgagagcttaggatatgactacgttcacttcacggcttacgcgaaggttctcggtcgctaccgagacagtcaaaaatgggacgagctcattgcttttatcgacactatgaatcagacaagcactatctgggacgcctacttcgacgagcttgtgcatgacttcattgctgtattggctgaagaaaactctgacatgttagctatggccgcggacgcaactcgtcgttgggatgtcattcagtcattctttacgattgccatggacatcggcaatcaagagaaagcatacgaccttatgtttcttcttcgagacggctttgcgaagacgctggagctaacaaatgggactgttgacgaaaacatggtggtctctattcgtagtgcagctttggagttgatccagcaacatccaagtgatgttcttccccgaactaaaatatgggacgtgacagattctttagctagggtctatgtggatcaagcctttcgaccaaacacctcggaggaaaaggtcgaaagtctaggctccttactttcagcattggcgcctgattctgccgatgccatcgatagcgcagagattgttacagtttgctatctgatacgctatcaccacaagcgtaacagtggttctgaggtagcgcaacgatggattaggcggattgtgagcaccggactggagcttttgtcagactcggatgaagacaatgacgactatgcctattggctcttggcaagactctttactaccatcgaggatgacgaaaacaaccaaatcgcctggactatgcggaatgcgtttcaagacgccgccttagcaaaatggagcgaatgggtcacgacacccattgattctcccgtccgaaaaaggacttttccacctgaacaaaaaaatagtcgagacagtctaagtattcgtcgaagggactctagccaatcagtgagctcgcaggccggagggagatcgcgatcgcaaggaagcgcgcactcgccttcgagcgagacgccaaagaacatcgaaaagcccgttcagacatctacggcacgtcctttaaatggcacagcccaagccaccgacgagcaaccacatccctcaagaatctcaactgatattgtggaagtaactcccccaaacgcgccagcaaaaccgacatggtttgttggatgtgatggatgtgataaagagtggacgttgatggacgaaccccttcatacctgtgcggacaccgttggcgttgaacagttatgccgggactgttacgcgttgctcatgaacgaccaacatcccaagaagagcatcaagagtaagaaggagcacaagttcctcgacatccctgtatgggatgacgaacggtatagggatatgccacataattacttgcctttgccacagagtaaggatggaagtaaaagatggatttcactagaggagtggaggaagaacttgaagcggctttatcttcccgagaccaaggtatgaacttcttagtctgagagtaaccaaagttcacatatatacatcttgccagtgatttatgccgatttgcgcgtgagcaactcattgtagacgaccttcattgaaacgccgatagctcctattgtgactgtaataagtaaaggcagcaaaacgctgtgtcaagcagatcacgaaccctttcctgttttagcgaacactgtgtgggatgagcaacgacgtggtcccctactagtcgatggtgatggcgcagttacctgttttcgtgatcgacagtcacataatgatctagtaatgctatcattagtttgcccatcaacactatctgccaccgggttttcttcgcggtatagcaagc

SEQ ID NO: 30065 - DNA, 579 bp, Muscodor strobelii
  misc_feature: SGI cDNA ID NO. 570336
  misc_feature: Encodes the peptide sequence at SEQ ID NO 30066
atggtaccctcaagtcactacgaaattctcggcgtggcccagaatgccagtcaagacgagataaagatagcctttaagcgacttagtcttgctaatcacccggataagcatcgagataacgtagaatgtgcaaccgcaaaacaggccgagattaatcacgcttatgaggttttatgctctgacaagcgtcgtgctcagtacaatgccacattggctaggaacaatacggacgcggtggacgaagaagaagatgactatgaggacgacgtcgaagagaattacgcagactacgatgatgacgacgaagaggaagagagcgatgacgaggattactcggaggactattcggcagctgaggccgagtatctcgagagcgtaagggagttgcgtgtcgtggaggagaaacaccatgttgctgggaaaagtaactgcactgccaaaaaggctcaccatgctgccgagaagaagtttaaagctgcacgagcgagattccaggcggtccgagagacctttgaccaggaatatcgcgagcgatacgaagccgaagttgccgcagaggaagagaagaacggtgtctaa

SEQ ID NO: 30066 - protein, 192 aa, Muscodor strobelii
  misc_feature: SGI Peptide ID NO. 570336
  misc_feature (5)..(68): Pfam Id: PF00226 Pfam Desc: DnaJ domain
  misc_feature (2)..(147): NCBI GI: 260798939 Blast Desc: BRAFLDRAFT_277565 [Branchiostoma floridae] gi|229279691|gb|EEN50468.1| BRAFLDRAFT_277565 [Branchiostoma floridae]
  misc_feature (6)..(69): NCBI GI: 169864297 Blast Desc: CC1G_13535 [Coprinopsis cinerea okayama7#130] gi|116500164|gb|EAU83059.1| CC1G_13535 [Coprinopsis cinerea okayama7#130]
  misc_feature (1)..(90): NCBI GI: 154300264 Blast Desc: BC1G_11321 [Botryotinia fuckeliana B05.10] gi|150856644|gb|EDN31836.1| BC1G_11321 [Botryotinia fuckeliana B05.10]
  misc_feature (3)..(69): NCBI GI: 170099523 Blast Desc: [Laccaria bicolor S238N-H82] gi|164644505|gb|EDR08755.1| [Laccaria bicolor S238N-H82]
  misc_feature (2)..(96): NCBI GI: 189194479 Blast Desc: DnaJ domain containing protein [Pyrenophora tritici-repentis Pt-1C-BFP] gi|187979142|gb|EDU45768.1| DnaJ domain containing protein [Pyrenophora tritici-repentis
  misc_feature (7)..(70): NCBI GI: 123501779 Blast Desc: DnaJ domain containing protein [Trichomonas vaginalis G3] gi|121911092|gb|EAY15930.1| DnaJ domain containing protein [Trichomonas vaginalis G3]
  misc_feature (1)..(120): NCBI GI: 32491047 Blast Desc: WGLp298 [Wigglesworthia glossinidia endosymbiont of Glossina brevipalpis] gi|62900287|sp|Q8D2Q6.1|DNAJ_WIGBR RecName: Full=Chaperone protein dnaJ gi|25166254|dbj|BAC24444.1| dnaJ of
  misc_feature (6)..(67): NCBI GI: 189241035 Blast Desc: : similar to mrj CG8448-PA [Tribolium castaneum]
  misc_feature (1)..(90): NCBI GI: 156042332 Blast Desc: SS1G_10963 [Sclerotinia sclerotiorum 1980] gi|154695350|gb|EDN95088.1| SS1G_10963 [Sclerotinia sclerotiorum 1980]
  misc_feature (6)..(94): NCBI GI: 145505063 Blast Desc: [Paramecium tetraurelia strain d4-2] gi|124405670|emb|CAK71101.1| protein product [Paramecium tetraurelia]
MVPSSHYEILGVAQNASQDEIKIAFKRLSLANHPDKHRDNVECATAKQAEINHAYEVLCSDKRRAQYNATLARNNTDAVDEEEDDYEDDVEENYADYDDDDEEEESDDEDYSEDYSAAEAEYLESVRELRVVEEKHHVAGKSNCTAKKAHHAAEKKFKAARARFQAVRETFDQEYRERYEAEVAAEEEKNGV

SEQ ID NO: 30067 - DNA, 1074 bp, Muscodor strobelii
  misc_feature: SGI cDNA ID NO. 570337
  misc_feature: Encodes the peptide sequence at SEQ ID NO 30068
atggcgctattttggaccattggcataatttctctggttgcaacattcactcgtgtccaagcagtttatgtagaggacacttcgggtctcccgttcgtcattaatacatggggaggggacttcactgcagctactgatgctgcgtatctctcgctgctagactcaaagacctcagcattagatgctgttgagctaggatgcactacttgtgaggaaaatcaatgtgatggaagtgtgggatatggcggctcaccagatgagaactgcgagacaaccctcgatgcaatgataatggatggtacgactatgaagtccggtagtgtagctgccattaggcgagtcaaatatgccattggcgtggctcgtgctgtgctcgaacacacgatgcataccatgatcgctggtgatttcgctaccgattttgccatgtcaaatggatttacagtcgagaatctcactaccgcctcctcagaagcttcgtgtcaggattggaaagccggtggttgtcagccaaactatcgtatcaacgtgacgccggatccatcgacctcatgcgggccgtattctcccttgccactaaactcaagtgatgaatcttatgcctcaaccttacaagcccgcaatgctcccgaaggccatgacaccatttctatgattgttattcacagctcgggcactatggctgccggtacttcgaccaacggcgcaagtcgaaagatacctggtcgtgtgggagacggtccgatcacgggaagcggatcatacgtggacggagatgttggtggttgtggtgcgacaggtgatggagatatcatgatgcgcttcttaccttgttatcaagctgttgagaatctgcgtcttggtatggaccccactgctgccgctgaagatgctgttactcggatgttgaagaagtatcccgaagtacagagcggtattgtagtggtcaataataagggggagcatggtggtgctggatctggctggacctttacctactcatatcgcggaggtaccatgaatgaaaccgtggtcgtgagcgttccgcctcttaatgactctgctgagctttaa

SEQ ID NO: 30068 - protein, 357 aa, Muscodor strobelii
  misc_feature: SGI Peptide ID NO. 570337
  misc_feature (9)..(352): Pfam Id: PF01112 Pfam Desc: Asparaginase
  misc_feature (27)..(321): Pfam Id: PF01112 Pfam Desc: Asparaginase
  misc_feature (9)..(348): NCBI GI: 171678643 Blast Desc: protein product [Podospora anserina] gi|170937391|emb|CAP62049.1| protein product [Podospora anserina]
  misc_feature (29)..(357): NCBI GI: 256724985 Blast Desc: NECHADRAFT_34757 [Nectria haematococca mpVI 77-13-4]
  misc_feature (26)..(338): NCBI GI: 46110615 Blast Desc: FG02189.1 [Gibberella zeae PH-1]
  misc_feature (29)..(328): NCBI GI: 145608144 Blast Desc: MGG_03346 [Magnaporthe grisea 70-15] gi|145015643|gb|EDK00133.1| MGG_03346 [Magnaporthe grisea 70-15]
  misc_feature (30)..(357): NCBI GI: 116204209 Blast Desc: CHGG_09988 [Chaetomium globosum CBS 148.51] gi|88176116|gb|EAQ83584.1| CHGG_09988 [Chaetomium globosum CBS 148.51]
  misc_feature (30)..(323): NCBI GI: 156408255 Blast Desc: [Nematostella vectensis] gi|156228912|gb|EDO49709.1| [Nematostella vectensis]
  misc_feature (9)..(346): NCBI GI: 157123124 Blast Desc: n(4)-(beta-n-acetylglucosaminyl)-l-asparaginase [Aedes aegypti] gi|108874512|gb|EAT38737.1| n(4)-(beta-n-acetylglucosaminyl)-l-asparaginase [Aedes aegypti]
  misc_feature (30)..(348): NCBI GI: 198415564 Blast Desc: : similar to LOC496249 protein [Ciona intestinalis]
  misc_feature (25)..(327): NCBI GI: 148230092 Blast Desc: LOC496249 [Xenopus laevis] gi|56788951|gb|AAH88723.1| LOC496249 protein [Xenopus laevis]
  misc_feature (12)..(350): NCBI GI: 255539857 Blast Desc: n(4)-(beta-n-acetylglucosaminyl)-l-asparaginase, [Ricinus communis] gi|223550108|gb|EEF51595.1| n(4)-(beta-n-acetylglucosaminyl)-l-asparaginase, [Ricinus
  misc_feature (24)..(325): SWISSPROT Homolog: EC 3.5.1.26 N(4)-(beta-N-acetylglucosaminyl)-L-asparaginase
MALFWTIGIISLVATFTRVQAVYVEDTSGLPFVINTWGGDFTAATDAAYLSLLDSKTSALDAVELGCTTCEENQCDGSVGYGGSPDENCETTLDAMIMDGTTMKSGSVAAIRRVKYAIGVARAVLEHTMHTMIAGDFATDFAMSNGFTVENLTTASSEASCQDWKAGGCQPNYRINVTPDPSTSCGPYSPLPLNSSDESYASTLQARNAPEGHDTISMIVIHSSGTMAAGTSTNGASRKIPGRVGDGPITGSGSYVDGDVGGCGATGDGDIMMRFLPCYQAVENLRLGMDPTAAAEDAVTRMLKKYPEVQSGIVVVNNKGEHGGAGSGWTFTYSYRGGTMNETVVVSVPPLNDSAEL

SEQ ID NO: 30069 - DNA, 1162 bp, Muscodor strobelii
  misc_feature: SGI EST ID NO. CUFF.71124.0
  misc_feature: Variant of the nucleotide sequence at SEQ ID NO 30067
ttttggaccattggcataatttctctggttgcaacattcactcgtgtccaagcagtttatgtagaggacacttcgggtctcccgttcgtcattaatacatggggaggggacttcactgcagctactgatgctgcgtatctctcgctgctagactcaaagacctcagcattagatgctgttgagctaggatgcactacttgtgaggaaaatcaatgtgatggaagtgtgggatatggcggctcaccagatgagaactgcgagacaaccctcgatgcaatgataatggatggtacgactatgaagtccggtagtgtagctgccattaggcgagtcaaatatgccattggcgtggctcgtgctgtgctcgaacacacgatgcataccatgatcgctggtgatttcgctaccgattttgccatgtcaaatggatttacagtcgagaatctcactaccgcctcctcagaagcttcgtgtcaggattggaaagccggtggttgtcagccaaactatcgtatcaacgtgacgccggatccatcgacctcatgcgggccgtattctcccttgccactaaactcaagtgatgaatcttatgcctcaaccttacaagcccgcaatgctcccgaaggccatgacaccatttctatgattgttattcacagctcgggcactatggctgccggtacttcgaccaacggcgcaagtcgaaagatacctggtcgtgtgggagacggtccgatcacgggaagcggatcatacgtggacggagatgttggtggttgtggtgcgacaggtgatggagatatcatgatgcgcttcttaccttgttatcaagctgttgagaatctgcgtcttggtatggaccccactgctgccgctgaagatgctgttactcggatgttgaagaagtatcccgaagtacagagcggtattgtagtggtcaataataagggggagcatggtggtgctggatctggctggacctttacctactcatatcgcggaggtaccatgaatgaaaccgtggtcgtgagcgttccgcctcttaatgactctgctgagctttaatattatagggaaactctcaattcgcacaatataagcagatgtgtagatagtttttacgaatcctagcactgcggaaagactacaagcccaagaaacg

SEQ ID NO: 30070 - DNA, 1107 bp, Muscodor strobelii
  misc_feature: SGI cDNA ID NO. 570338
  misc_feature: Elevated expression when VOC is produced
  misc_feature: Encodes the peptide sequence at SEQ ID NO 30071
atgttttcatcacataactcatcgctatcgcagcgattattactactattatcaatcataatacctgcgctagcatacacaaagctctcagataactttttgaagcttgtgccatcaggcggcgatgacttcaatatcgacaacgggaaattgctagcgcctatcctcattccgagggtacctggaacaccgggccaaaccgcggcgcagaagcatttcgtcaattattttcacaacgagctgccgaaatggagcatcgaatggtttaattcaacgggcaagacgcccgcgacgggagatcgcgatatcccctttcagaacttattattcaagcgtgaaccgccatgggtgaaggaggggcagagtaacttgcttacgctcgtcgcgcattacgatagcaagatgacgcctgagggttttattggcgccacggatagcgcggtgccgtgcgcgatcttgatgcatgttgctcggagtcttgatgcgtacttaacgcagatgcacgatgagatgaatgcgctgggcgagggtggtgaggtgcctatggatatgggtgttcagattctcttgttggatggagaagaggctttcttgcaatggtcggctacagactcgctttacggcgccagagcgctggctgagcagtgggaaatgtcacgtcatccagtcggttcgttttacacgaacccactggatcagatcagtttgttcgtgttgctagatcttttaggttccgccgagccaaagatctcatcacctttcttgtcaacgcactgggcatatcaagcgctcgccgatattgagcagcggatgcgcggtcttggattgctcgagacgaagccgaaaacgccgtttctaccagattcggagaagtctgttgcgacgtttggacgaggaaatgtgcaagacgaccatttgccgttcatgttccgcggtgtacctattttgcatatgattgctacaccgttccctacagtatggcatacgatggacgatgatggggcgcatctggatctaccgactgtgagggattggtcaaagattttcacggcatttgcgctagagtggttggatatgatggaagttgcgccgaaggatgggaggtag

SEQ ID NO: 30071 - protein, 368 aa, Muscodor strobelii
  misc_feature: SGI Peptide ID NO. 570338
  misc_feature (123)..(343): Pfam Id: PF04389 Pfam Desc: Peptidase family M28
  misc_feature (13)..(368): NCBI GI: 261357843 Blast Desc: glutaminyl-peptide cyclotransferase [Verticillium albo-atrum VaMs.102]
  misc_feature (25)..(365): NCBI GI: 39946384 Blast Desc: MGG_08319 [Magnaporthe grisea 70-15] gi|145020033|gb|EDK04261.1| MGG_08319 [Magnaporthe grisea 70-15]
  misc_feature (7)..(358): NCBI GI: 85089878 Blast Desc: NCU09018 [Neurospora crassa OR74A] gi|28919482|gb|EAA28916.1| NCU09018 [Neurospora crassa OR74A]
  misc_feature (20)..(364): NCBI GI: 256735556 Blast Desc: [Nectria haematococca mpVI 77-13-4]
  misc_feature (6)..(365): NCBI GI: 46135771 Blast Desc: FG09401.1 [Gibberella zeae PH-1]
  misc_feature (22)..(362): NCBI GI: 169610707 Blast Desc: SNOG_08461 [Phaeosphaeria nodorum SN15] gi|111063617|gb|EAT84737.1| SNOG_08461 [Phaeosphaeria nodorum SN15]
  misc_feature (22)..(365): NCBI GI: 261355287 Blast Desc: glutaminyl-peptide cyclotransferase [Verticillium albo-atrum VaMs.102]
  misc_feature (15)..(365): NCBI GI: 116207810 Blast Desc: CHGG_03198 [Chaetomium globosum CBS 148.51] gi|88183795|gb|EAQ91263.1| CHGG_03198 [Chaetomium globosum CBS 148.51]
  misc_feature (25)..(364): NCBI GI: 39943224 Blast Desc: MGG_03692 [Magnaporthe grisea 70-15] gi|145009713|gb|EDJ94369.1| MGG_03692 [Magnaporthe grisea 70-15]
  misc_feature (22)..(362): NCBI GI: 189204324 Blast Desc: glutaminyl-peptide cyclotransferase precursor [Pyrenophora tritici-repentis Pt-1C-BFP] gi|187985596|gb|EDU51084.1| glutaminyl-peptide cyclotransferase
  misc_feature (52)..(359): SWISSPROT Homolog: EC 2.3.2.5 Glutaminyl-peptide cyclotransferase
  misc_feature: Useful for introducing or modulating the production of volatile compounds
MFSSHNSSLSQRLLLLLSIIIPALAYTKLSDNFLKLVPSGGDDFNIDNGKLLAPILIPRVPGTPGQTAAQKHFVNYFHNELPKWSIEWFNSTGKTPATGDRDIPFQNLLFKREPPWVKEGQSNLLTLVAHYDSKMTPEGFIGATDSAVPCAILMHVARSLDAYLTQMHDEMNALGEGGEVPMDMGVQILLLDGEEAFLQWSATDSLYGARALAEQWEMSRHPVGSFYTNPLDQISLFVLLDLLGSAEPKISSPFLSTHWAYQALADIEQRMRGLGLLETKPKTPFLPDSEKSVATFGRGNVQDDHLPFMFRGVPILHMIATPFPTVWHTMDDDGAHLDLPTVRDWSKIFTAFALEWLDMMEVAPKDGR

SEQ ID NO: 30072 - DNA, 1793 bp, Muscodor strobelii
  misc_feature: SGI EST ID NO. CUFF.71184.0
  misc_feature: Variant of the nucleotide sequence at SEQ ID NO 30070
ggcaaaactccgagcgtgtccttttcaccatatcattcacgttcactcattgaaagggaagcaggttgtcatctgattatcgcgataactcccattgcgcattgcttgtttcgcttctcgaaacttattccgccatcggtcgattatgagctacctcgctggctcgaggtagaaggctcgcaactgggcattgaagtgcgctatctggcctagactttctttcccctatcgctcaaccagaggccagagacgccatgttttcatcacataactcatcgctatcgcagcgattattactactattatcaatcataatacctgcgctagcatacacaaagctctcagataactttttgaagcttgtgccatcaggcggcgatgacttcaatatcgacaacgggaaattgctagcgcctatcctcattccgagggtacctggaacaccgggccaaaccgcggcgcagaagcatttcgtcaattattttcacaacgagctgccgaaatggagcatcgaatggtttaattcaacgggcaagacgcccgcgacgggagatcgcgatatcccctttcagaacttattattcaagcgtgaaccgccatgggtgaaggaggggcagagtaacttgcttacgctcgtcgcgcattacgatagcaagatgacgcctgagggttttattggcgccacggatagcgcggtgccgtgcgcgatcttgatgcatgttgctcggagtcttgatgcgtacttaacgcagatgcacgatgagatgaatgcgctgggcgagggtggtgaggtgcctatggatatgggtgttcagattctcttgttggatggagaagaggctttcttgcaatggtcggctacagactcgctttacggcgccagagcgctggctgagcagtgggaaatgtcacgtcatccagtcggttcgttttacacgaacccactggatcagatcagtttgttcgtgttgctagatcttttaggttccgccgagccaaagatctcatcacctttcttgtcaacgcactgggcatatcaagcgctcgccgatattgagcagcggatgcgcggtcttggattgctcgagacgaagccgaaaacgccgtttctaccagattcggagaagtctgttgcgacgtttggacgaggaaatgtgcaagacgaccatttgccgttcatgttccgcggtgtacctattttgcatatgattgctacaccgttccctacagtatggcatacgatggacgatgatggggcgcatctggatctaccgactgtgagggattggtcaaagattttcacggcatttgcgctagagtggttggatatgatggaagttgcgccgaaggatgggaggtagcctggctggagacgttttcttctgagcttatatctggtttcgagcgccatgtccgttattctgtatatttgagcaattggagttctgggtaaaatgagatccttgctgtcaatttatggtagtcgttgtactatatctactcctgtctctggtcttttctctatgagtgattaagtcgaccgacagtagtgtcgcaggaatgccagttctgttgtaagtactcttctgatatcgacttttaggaagacttactagcctcgttggatgataatgaggttgtcaggagagtcatgggtctcccatcattttggcccctttcgttgtacagagaaaaaacagtgcaggaaaacttaaatttcggtggtgtctctttttatctgctcatgtcgggatttcggtaagaccttgtcgaattaaaaaaaaacccccaaa

SEQ ID NO: 30073 - DNA, 1716 bp, Muscodor strobelii
  misc_feature: SGI cDNA ID NO. 570339
  misc_feature: Reduced expression when VOC is produced
  misc_feature: Encodes the peptide sequence at SEQ ID NO 30074
atgtcgaaggtaatgagaagcgtcaaaaatgtgaccaagggttactccagtgtccaggtcaaagtccgcgaagccacaagcaacgatccatggggcccaacaggcacacagatgagcgaaattgctcaattgacctacaactcatcaaccgagttctacgacattgtagatatgcttgacaagcgcctgaatgacaagggcaagaactggaggcacgtcctcaaagctctgaaggttctcgactactgtttacacgaaggctccgagcttattgtgacctgggcccgcaagaacatctacatcatcaagacactgcgcgagttcgtctacattgatgaggagggtcgggacgtcgggcagaatgtccgagtggcagcgaaagaactcacctccctgattctcgacgaggagcgattacgggccgagcgaagcgaccgaaagacatggaagtctcgagtcaccggtatcgaggagttcgccccatccgtggcctccggctctggaagccagcgacgcgagcggccccatcgatctcagtacaacgacgaggaagatgccgagtacaagctggccctggaggcaagcaagtatcaagaggaggaggacaggagaaagcgcgaaagccgacagggtggtgctggagaggatgacgacgatctcgcaaaagccattaaacttagcagagaggaggatgagcgccggaagcgggagctggaagaaaacaacgccagctctctgttcgacttcaacgaccctgcgccgacctctcaacctcagccgaccggcatgaatatgggttatcagcagggcagtggcgtggattggttaggaaatccgatcgaccagaaccagtttatgcaacagcagccgcagcagaccggctttgtcaacaacaactatacaggatatcctaacaataacggtttccagaatggcttcggacagcaaccaaccggcgtatacgacccttacggtcagcagaaccagcaacaccaacaacccttccagatgcaacctacaggcttcaactccaatccctacgcgcaaaaccaattcaaccctcaacaagctgtctctcctatcgagcagcagcctactcagcaacccggaagcaacaacccctgggctaccaacaacaacaactcacatctcggcgttcagtcgccaatgcagcccatgcagaccggctccaacaatccattcgcctcgaatatggcccgacctcagaccgccaaggctccatccatgccgaccctcaacactcttcagagtcttccggaacagaagacgctccaaacttacacacctcccccgcaaccgacgttccaagtccctccgcaacaacagcagcagcaggcgaacaagccgatgaatgcacacgaggcgagactcaatgccctcctcgctagtggcgacggtatggacacttttggcaacaccggcgacctgcgtattcctgcgcagcacacggccccgggccatttcgtgaactcggctggtgcccacgcgcagcagcttaccgccgaggccacgggcaataaccctttcttacggtctcagttcacgggtatgccgcagcccacataccagcagcagatgcctgcggctacgggcccggcgaacatgggcatgaacggctttggaggcgcgagcaacccgtttgcggcgaggcagcagcagggccagcagcaggggcaggacttgatccagttttag

SEQ ID NO: 30074 - protein, 571 aa, Muscodor strobelii
  misc_feature: SGI Peptide ID NO. 570339
  misc_feature (15)..(139): Pfam Id: PF01417 Pfam Desc: ENTH domain
  misc_feature (1)..(571): NCBI GI: 39945268 Blast Desc: MGG_04616 [Magnaporthe grisea 70-15] gi|145021447|gb|EDK05576.1| MGG_04616 [Magnaporthe grisea 70-15]
  misc_feature (1)..(571): NCBI GI: 46128215 Blast Desc: FG08485.1 [Gibberella zeae PH-1]
  misc_feature (1)..(571): NCBI GI: 154322895 Blast Desc: BC1G_00790 [Botryotinia fuckeliana B05.10] gi|150848124|gb|EDN23317.1| BC1G_00790 [Botryotinia fuckeliana B05.10]
  misc_feature (1)..(571): NCBI GI: 256733948 Blast Desc: NECHADRAFT_103688 [Nectria haematococca mpVI 77-13-4]
  misc_feature (1)..(571): NCBI GI: 156064671 Blast Desc: SS1G_00343 [Sclerotinia sclerotiorum 1980] gi|154691205|gb|EDN90943.1| SS1G_00343 [Sclerotinia sclerotiorum 1980]
  misc_feature (1)..(571): NCBI GI: 171681954 Blast Desc: protein product [Podospora anserina] gi|170940936|emb|CAP66586.1| protein product [Podospora anserina]
  misc_feature (1)..(556): NCBI GI: 164426029 Blast Desc: Epsin-like protein ent1/2 [Neurospora crassa OR74A] gi|25466177|pir||T51889 related to clathrin binding protein ENT2 [imported] - Neurospora crassa gi|157071171|gb|EAA30996.2| ent1/2
  misc_feature (1)..(556): NCBI GI: 39979198 Blast Desc: related to clathrin binding protein ENT2 [Neurospora crassa]
  misc_feature (1)..(571): NCBI GI: 116202127 Blast Desc: CHGG_08948 [Chaetomium globosum CBS 148.51] gi|88177466|gb|EAQ84934.1| CHGG_08948 [Chaetomium globosum CBS 148.51]
  misc_feature (1)..(571): NCBI GI: 240105229 Blast Desc: ENTH domain containing protein [Coccidioides posadasii C735 delta SOWgp]
  misc_feature: Useful for introducing or modulating the production of volatile compounds
MSKVMRSVKNVTKGYSSVQVKVREATSNDPWGPTGTQMSEIAQLTYNSSTEFYDIVDMLDKRLNDKGKNWRHVLKALKVLDYCLHEGSELIVTWARKNIYIIKTLREFVYIDEEGRDVGQNVRVAAKELTSLILDEERLRAERSDRKTWKSRVTGIEEFAPSVASGSGSQRRERPHRSQYNDEEDAEYKLALEASKYQEEEDRRKRESRQGGAGEDDDDLAKAIKLSREEDERRKRELEENNASSLFDFNDPAPTSQPQPTGMNMGYQQGSGVDWLGNPIDQNQFMQQQPQQTGFVNNNYTGYPNNNGFQNGFGQQPTGVYDPYGQQNQQHQQPFQMQPTGFNSNPYAQNQFNPQQAVSPIEQQPTQQPGSNNPWATNNNNSHLGVQSPMQPMQTGSNNPFASNMARPQTAKAPSMPTLNTLQSLPEQKTLQTYTPPPQPTFQVPPQQQQQQANKPMNAHEARLNALLASGDGMDTFGNTGDLRIPAQHTAPGHFVNSAGAHAQQLTAEATGNNPFLRSQFTGMPQPTYQQQMPAATGPANMGMNGFGGASNPFAARQQQGQQQGQDLIQF

SEQ ID NO: 30075 - DNA, 2966 bp, Muscodor strobelii
  misc_feature: SGI EST ID NO. CUFF.71138.0
  misc_feature: Variant of the nucleotide sequence at SEQ ID NO 30073
acgcaattggcagggcgccaagggtgcattacgttgttcggttgtgctctgcaaaggctgcgaagggccgctagcaaggtgcgcaggcctgtagcttgtggccgtcgggcgctgtggtgtccactgtccctcccctcccaacctccacatccaaccattgatcttccatcatccacacctcgtcaccaccatccattatcccaatccccgtccattcattcaccccttcaccactcagcgacactcccatcgcgacgaccagcgactgtgtctctctctcgctctttgtcgccctgtcgcacttacacaacgccgctcctcacctgtttactgaacttgtgagcgaccgtcatttcccctccacattacctgtctatcctcgcgcgcatctggctttgctccgaccacattatccctctgtgcggtggattgcgcatttccagcgccggagtctctagccgactgagctgggccagtccgatccacgcgaatccttaggtccaaccaactggtgttgacaaccttgcgtctttcgctgattcacattccaaaactggtcggcagttcccagcaataccgacacgatgtcgaaggtaatgagaagcgtcaaaaatgtgaccaagggttactccagtgtccaggtcaaagtccgcgaagccacaagcaacgatccatggggcccaacaggcacacagatgagcgaaattgctcaattgacctacaactcatcaaccgagttctacgacattgtagatatgcttgacaagcgcctgaatgacaagggcaagaactggaggcacgtcctcaaagctctgaaggttctcgactactgtttacacgaaggctccgagcttattgtgacctgggcccgcaagaacatctacatcatcaagacactgcgcgagttcgtctacattgatgaggagggtcgggacgtcgggcagaatgtccgagtggcagcgaaagaactcacctccctgattctcgacgaggagcgattacgggccgagcgaagcgaccgaaagacatggaagtctcgagtcaccggtatcgaggagttcgccccatccgtggcctccggctctggaagccagcgacgcgagcggccccatcgatctcagtacaacgacgaggaagatgccgagtacaagctggccctggaggcaagcaagtatcaagaggaggaggacaggagaaagcgcgaaagccgacagggtggtgctggagaggatgacgacgatctcgcaaaagccattaaacttagcagagaggaggatgagcgccggaagcgggagctggaagaaaacaacgccagctctctgttcgacttcaacgaccctgcgccgacctctcaacctcagccgaccggcatgaatatgggttatcagcagggcagtggcgtggattggttaggaaatccgatcgaccagaaccagtttatgcaacagcagccgcagcagaccggctttgtcaacaacaactatacaggatatcctaacaataacggtttccagaatggcttcggacagcaaccaaccggcgtatacgacccttacggtcagcagaaccagcaacaccaacaacccttccagatgcaacctacaggcttcaactccaatccctacgcgcaaaaccaattcaaccctcaacaagctgtctctcctatcgagcagcagcctactcagcaacccggaagcaacaacccctgggctaccaacaacaacaactcacatctcggcgttcagtcgccaatgcagcccatgcagaccggctccaacaatccattcgcctcgaatatggcccgacctcagaccgccaaggctccatccatgccgaccctcaacactcttcagagtcttccggaacagaagacgctccaaacttacacacctcccccgcaaccgacgttccaagtccctccgcaacaacagcagcagcaggcgaacaagccgatgaatgcacacgaggcgagactcaatgccctcctcgctagtggcgacggtatggacacttttggcaacaccggcgacctgcgtattcctgcgcagcacacggccccgggccatttcgtgaactcggctggtgcccacgcgcagcagcttaccgccgaggccacgggcaataaccctttcttacggtctcagttcacgggtatgccgcagcccacataccagcagcagatgcctgcggctacgggcccggcgaacatgggcatgaacggctttggaggcgcgagcaacccgtttgcggcgaggcagcagcagggccagcagcaggggcaggacttgatccagttttagagatgttcggtctctttgtgctagagtgtcggttgcttgatatttgcgagaggtggctgaagagagtgcccaaatggagactacggcagacagcggtgcctcgctcctgctcgacgaggacaaccgcacccgtagagtctttgtacatcttgaagctacgtgtatgacacccgaagcgagagaaagtctgcacgcttggcagcaagtttatgctcgacgcatgggcaaggagtacttgcttcccgaggaaggggaggcaaaaaagatacttgatgaaaatgggagttttagacctagccagacctagctgctgaactttggttcattggctctgcttgatgtcattttagggtaggagggtagttctcttttcgggcgcggcgtggctatcgttttttgtgccttctagccttgccccagccgttccccgttgttctattcaatgatacctacctttactttttgttgctacttctggcaaaatgactgggaatcttatgtgtctttaagtaatgaagtgactgcgacggaaaacgtgaggtgtgtggagaaaggcgcatgccatatatagctgctgctggagatgtaaagcatgggctctgtgtactgtatggcgacacacggctcttccaaataccaacttacttgcaaactgttagtgtgctg

SEQ ID NO: 30076 - DNA, 669 bp, Muscodor strobelii
  misc_feature: SGI cDNA ID NO. 570340
  misc_feature: Encodes the peptide sequence at SEQ ID NO 30077
atgatggcatcggggatgaacaattacccaagcagtatgaacgagtatgctggcgccggcatgcacaacctctccttaagggcaggctcttcctcggtgcgcccagcttcgcggttcgcgccacctagacagaatctcgagcacgtcgagccctgggaccagatcggcgacgagcagaagggcgagatcaacgactgtttccagctcttcgacatgaacaaagacgaacaactcgacttctccgaattccgctacgcgctgcaagccctcggcttctcccacatatcgcggccagaactagtatcttccttcaagaacgccgcgcacgcaaaacctgactggacgccattaccgcatataccggggcagcccgcgccagcgaccacgcccggcgtcgtagatatgcggttatcgcgcgagggattccagagcatagcagcaagatacatcacatcgcaagatcctagggaacagttactgaaaacgttcgcgctcttcgacaagggcgcaaagggcatcataaccgttgatgacctgcggactgttgtcaaggagctgaatgaggatgtgcctgaaaacgagatacacactatgatcgagcaattcgatattgaagggaaagggggtgtgaatcgtgaggagtttgttggaatattccttgataggtga

SEQ ID NO: 30077 - protein, 222 aa, Muscodor strobelii
  misc_feature: SGI Peptide ID NO. 570340
  misc_feature (62)..(90): Pfam Id: PF00036 Pfam Desc: EF hand
  misc_feature (51)..(220): NCBI GI: 226285104 Blast Desc: centrin-3 [Paracoccidioides brasiliensis Pb01]
  misc_feature (51)..(220): NCBI GI: 238843926 Blast Desc: cell division control protein 31 [Microsporum canis CBS 113480]
  misc_feature (51)..(216): NCBI GI: 225682616 Blast Desc: caltractin [Paracoccidioides brasiliensis Pb03]
  misc_feature (40)..(220): NCBI GI: 261199854 Blast Desc: cell division control protein Cdc31 [Ajellomyces dermatitidis SLH14081] gi|239594536|gb|EEQ77117.1| cell division control protein Cdc31 [Ajellomyces dermatitidis SLH14081] cell
  misc_feature (55)..(220): NCBI GI: 154322897 Blast Desc: BC1G_00791 [Botryotinia fuckeliana B05.10] gi|150848125|gb|EDN23318.1| BC1G_00791 [Botryotinia fuckeliana B05.10]
  misc_feature (51)..(220): NCBI GI: 156064669 Blast Desc: SS1G_00342 [Sclerotinia sclerotiorum 1980] gi|154691204|gb|EDN90942.1| SS1G_00342 [Sclerotinia sclerotiorum 1980]
  misc_feature (29)..(222): NCBI GI: 39974791 Blast Desc: MGG_00458 [Magnaporthe grisea 70-15] gi|145018649|gb|EDK02928.1| MGG_00458 [Magnaporthe grisea 70-15]
  misc_feature (51)..(220): NCBI GI: 240105380 Blast Desc: EF hand domain containing protein [Coccidioides posadasii C735 delta SOWgp]
  misc_feature (67)..(220): NCBI GI: 226290034 Blast Desc: centrin-3 [Paracoccidioides brasiliensis Pb18]
  misc_feature (36)..(222): NCBI GI: 171681830 Blast Desc: protein product [Podospora anserina] gi|170940874|emb|CAP66524.1| protein product [Podospora anserina]
MMASGMNNYPSSMNEYAGAGMHNLSLRAGSSSVRPASRFAPPRQNLEHVEPWDQIGDEQKGEINDCFQLFDMNKDEQLDFSEFRYALQALGFSHISRPELVSSFKNAAHAKPDWTPLPHIPGQPAPATTPGVVDMRLSREGFQSIAARYITSQDPREQLLKTFALFDKGAKGIITVDDLRTVVKELNEDVPENEIHTMIEQFDIEGKGGVNREEFVGIFLDR

SEQ ID NO: 30078 - DNA, 2053 bp, Muscodor strobelii
  misc_feature: SGI EST ID NO. CUFF.71142.1
  misc_feature: Variant of the nucleotide sequence at SEQ ID NO 30076
tgccaattgaaattctatcaacaatacagatcaaatcgcagagattctcgcatgggagttggtgattcccttcgtatttgtgactttcacgcttaggttggcttggcgaacatggatcgatcacccaacaggccagggtgtgatggatagactatagtgcagggtagcgtatgcgggacttgagagcgatggaattgggacgcgcgcaatagctgcccctcggtcgcccataaacgcgaccaaagctcaccagctcacccctggcacgcgcgacctgcagcgtggaaaatgcatctcagccactcatcaccgctcacgtcgtggtgttggcttcaaagaaaacagtcgcgctggagtcgattggagacccgctcacgatagcttcatctttttgaacatctcttcgaacctgtcacaacaccgcgatccataccctgctgcattcgatttcttcttgcatcaacaattcctcctggcgtgttcttcagctttgcccgaatagtagtagtagtcttgtctctgcatacttgctctctaccgacgaccgtcttgtatatcgccctagttttgaccccagcttcgagtcgcatcgcgtcgcattgcaccgcatcgtcaccatcttgccgtctccctcgaccatatcccacgaaaccacgcccgcgagcatggaattggctagttaccagctttaggtcgaccaattctactcaattcctaattccctacctacctatatacctacgcttttgcgacctccctctccctatctcgcattgcgctccaatccctctcaagaacacgaatgcaaacccctcgcttttcgccacgttaccaagggatgatggcatcggggatgaacaattacccaagcagtatgaacgagtatgctggcgccggcatgcacaacctctccttaagggcaggctcttcctcggtgcgcccagcttcgcggttcgcgccacctagacagaatctcgagcacgtcgagccctgggaccagatcggcgacgagcagaagggcgagatcaacgactgtttccagctcttcgacatgaacaaagacgaacaactcgacttctccgaattccgctacgcgctgcaagccctcggcttctcccacatatcgcggccagaactagtatcttccttcaagaacgccgcgcacgcaaaacctgactggacgccattaccgcatataccggggcagcccgcgccagcgaccacgcccggcgtcgtagatatgcggttatcgcgcgagggattccagagcatagcagcaagatacatcacatcgcaagatcctagggaacagttactgaaaacgttcgcgctcttcgacaagggcgcaaagggcatcataaccgttgatgacctgcggactgttgtcaaggagctgaatgaggatgtgcctgaaaacgagatacacactatgatcgagcaattcgatattgaagggaaagggggtgtgaatcgtgaggagtttgttggaatattccttgataggtgatactcgattcgcagaatcagagatgaaacgacacaaatctgctgttgagcatacaatcctgcgcgtcctgaaacgatcgaaaggaagctcactaccgtaatccggcaaccactcaagctttcaacaacagtctcgagaccaaggaagcaaagaggcaagaggcaagccaagaatgcaggtcgcagtcaaaatagttcacagccgcccttgtcacaaattaccacgatactcgaggcaattgaacagaagacaaacgacctagttcgatctctgaagatctcataacagcccacctcgaacatcacttcgcggttcaagctaagactcaggatcagccagcagccttcaaaggttgggtagcacaagcgtcaagagacgcagcgcgagaaggcggaggaaagaaaggaggaaggaatgaataaggattgtatataaccacaataccccttgtgtataattgttcatacccatgaattctaatgaagagagcagttgggctctccaaaatccaaactccaagccctcagatattgctgcacgtccgta

SEQ ID NO: 30079 - DNA, 5805 bp, Muscodor strobelii
  misc_feature: SGI cDNA ID NO. 570341
  misc_feature: Encodes the peptide sequence at SEQ ID NO 30080
atgtcgttcggcggcagcggcttcagcggcttcggcagcaacaataacaccactggtggatttggtggcttcggctccaacaacaccagttccggcacaggattcggtgccaacaacacaaacaccaccggtgccttcggttccaccagcactacgggtggtgggctgttcggttcggggagcacctccacaggcttcggctctaatacaaccgcattcgggtctgcaaacaataccagcagcgccttcggggccaaacctggaggcttcggatctacctctaccgctggaggcggtctcttcggcaactctggctctactcccgcagtcgcctcgaacaccggcttcggtgggtttggttcgaacaatgcaaacacctcgacgcctgccttcggctccagctccaactctctcttcggcagtaccgccaacaagcccgccttcggaagcactaccggcacgaccggtggtctctttggtagtggcaacaacactgctaccaatccaggaagctccttcggtgcatttggctcttcggccaacgcccccgccagcaccgcattaggagctgtgggtgatccaccaggaactgccaatatccagactttctctccgcttgtcgagaaggagagtgccaccagtgccgcgcagaattctttccagaatatcttgttccaagatccgtataagaagtggtcagcagaagagctcaggctggctgattatgctgctggccgtcgctatggcggcgctggaggcagcagcacttttggcacaggaagcggcttcggcgcctttgggtctaatactcaacccacttctacaggctttggcggtacgactacaggtactacgggcggtctcttcggagctagcaacaacaatccctctacaaccggaggatttggccagaataaccagactagcggcttcggttcgagcaacaccactggcggtggactgtttggagccaagcccgtgactactggaggtggccttttcggcagcactgcaaccacacaaccagctcctgcctccggtggtctcttcggcgcctctggcacgaccggcggctttgggagcaacactggcacctctggtttcggtgcatctaataccaatactagtacaggtggcggattatttggcagcgccaataccaatacagccaacaagacacccttcagtggctttggaaccggcacaaccaccactggtggattcggttccggtgccaacactagcttcggcagcagcaacaacactggcggcggaatttttggttccaacaatacaagcactccgcaagctggcggagggctattcggcaacactgcacaacaaaatacgggtgcttttggctcgagtgggttcggccagcagcagacgcaacaaacagccggtggtctcttcggtggtaattcccaagtacaaaagccggctggtggtggcctgtttgggaatcccagtgcaacgaacactggaacgggcggcggtctgttcggcggtggcactggtgcgtttggtggccagcagaaccaacccgcatccagtggattgtttgggaatgctaataataagcccgcaggatccactggtggacttttcgggaatactggaaccgcacaaaacactagcggtggactgttcgggtcgggacaaaacaatcaaattcaacagcaacaaccacagcaaggcggaggtctatttggacagagtcaacagaagcccggtgggctgttcggcgcgagcaccgggtcgacaggtggcatgtttggaaatcagaatcagcagaattccatgtttggttcttctcaacaacagccacaaaacaataccatgggcagctctctgtttggagcttcgcagagcactcaatccaatgccccctctttaactgctagtatcaatgacccctcggcatacggatccctttttgccaatctgggcagcaatgaagctgcaagtccaggacctctggccacgccaaccaacaggcgatcctcccgacgaccctcgatcctaccgtactacaaactcaatcctgcctcagcttcgcgcttcgtgactcctcagaaacgaggttatggcttttcatacagcacctatggcacacccaacagtccatctagtgtagctagtacgcctggtactatgtcgcagagtttattgggaggaagtctctctcgcaaccttggcaagagcgtgtccacaagcaatttgcgccgtagcttcaatgttgaggacagcgtgcttgtccctggtgccttctcagccagctcgggcccaagagggtatcataacggtagcgtcaagaagctggtcatcaataaagagcttcgaagcgatctgttttctacacccaccaaagataaacccacgcccgagacccctaacactgcgcgcaagctaagcaaacgggtcagtttcgatacgagcaatgtagaagcgattgaaaatggaagtgccggtaatggatcaattgcttccgcccccaatgctgaacagttaggctacatgagacctaagagcacgaacggcacaaatggtacggaaacccagtcttcgtccacccctgagatggagcaggtcaaaggcaatgagttggctattgtccatgaagatgaacctgctgcacctcctgttcgaagccctgcttcaccccgcgatggcgaggtgggtgactactggatgaaacccaccaaggaagagatccagaacatgaatcgccatcagcgtgcacaagtgcccaacttcactgttggccggaaaaatatcggttatgtcaggttcaagagtttggtcgatttgactacgatcgatcttgacaatatcttcaacaagatcgttgtattggagccccggtcggcaacagtttatcccaatgccgccaagaagccaccgatgggcaaaggtctgaatgttccctcgattattaacctagagaatgcctaccctcgagctactagaactggcaaagttatatctatcaacaaacacgtggagcgcctgaaaaagattgccgacactaccttcgagaattacaatccacagactggcgaatggacgttctccgtcgagcatttcactacatatggacttgacgatagtgaagacgaagagggagacacggaaccagagcctctcgagaatcctgcgcacagggccgactcaacatcacacgtcggttcagaccagcgcgacagccaacagtcaaagttccgtagctctgtccctggtgccttcgatgatgaacaagaatatggaggcgaagagctggagatggccggaaccaacgccaagccgtcttttttagctaatcgctccgtgggttctgcgtcccaagcccttatccgaacggatgaaggggacatggacgacgaatatgcgatgtccgaggtaaacgacaatgcgagtgatcaccctggataccatctcgccgcggagcacgacgaaggcccgttcgatggtagtcagtcggattttgttccggagacccctgcaggcatcatgagggcaagaatgcgtgccatcaaaagttcagctacaccatcgaaagtgcaagttgcagctggtgatgactggatggatatgcttggcaaaaccatcagtccccaaaaacgtgaccgagcgctgctgaggagcatgcatgaagcggataagtatcgctttgcccaagacggtgctcgggaggcagcgcctacaaagaagaggattgtctctgatggcaaaggatttgcgaccagtatcgatttgatgaattcactatttgagaaggccaaagtcccagcggagaatttgcaggcttctattcggccacaaggtgtcaagttcccatacaagcgactcacaaaaaacattgatgaaagcaagatggatagtaaagagcgaacatggcatgatactatgcgtcctacctgggggccaaatggtactctcattttctgcgctactcctacagcatcaacctttgggcgatcaggacgtatcaccgagaagaatgggctaatgacggttatgaaaggcggtattgtcacggaaacacaggacatcaggatcgctaaattcgcgaacgagatgtctgctcaggccattgaagcacattcgaaattggcggaagttcacgtggttgatggtattcctactgtggagctgagttccaggtcaagccttaaggacttcttcattgggaccggacccaagaactctgcggcggagcacgaacgacttgtttgggatctagccagcgtcttgtttgacaatgtcaaagtccctgctgacctccaagatgatcccgaggcaattgagaagctgcgccgagacaacctatctcgtttttgggaagttatggttgaggagcgtacaaaccgagcagtcgggatggctggcactcttgaggagaaggctgttgccgctctttcgggtcatcgcattgctgaagcatgcaaacatctgctggacgggaagaacttccgtcttgccactctcatcgccctgattggagccaacgacgatgcaaaaaaagacgtcaaggagcagcttaaagaatggcaaaaatctaacttgatgtcagagttcacactgcccattcgcgctctatatgagatgctcagtgggaacgtctgcgtctgcgaagggaaaaaggcagaccgggaccttgagcatcgtgctgaatcattcgtgatctctcaaaagtttggccttaactggcaacaagcttttgggttgagattatggtacacaatttcgagtcacagcaatatcgctgaagccgtcgagaagtattgggaagatgtccaacaggacaaggaactccaccctcaggtgtggttcacgcagcacggcattcccagcatttggaacgatccgcgcaaggggggtcgcgaagatctactctggggtcttctcaagctttattcagacgacaaagcagacctcgagtctatcctacgcccagagaattcgcagctctcccccctagactaccgtctctgttggcagttaggacagatccttacgtctactggccgagtttcctttgggaagaacgccgaggagaaatcagacgccgctaccactgcttttgcagcacaattgacaaacgagggcagttggcttccggcgatcttcgttctcctgcatctcagcaatcccgattcacgatcaagggctatccaagatcacttgtgccgacacgcttccttgataggcaacgaggactccactgctttcaggaggctcgtaagcgacttcaagattccatccccttggatttggcatgcaaaggccttatacatgcgaagcgccaagaaggatgcaacagctgaggtccaatgtctgctacgcgcagaatcttgggctgaagcccacttgacttttgtcaaggaagttgccccggcaacaataatagagcgagatttcgacgcactagcggatatactccagcagtttgagggccgacatgcacaggtcccggactggaacgttggtggtgcaatttacaaagctttcctccagctcgtgggctgtcgtcgccgatcggaagagccaccacagccactggttaacagcctgcttgaggggctccctgctatgcatggcaatacgcctgaagctggaattatcgagtttgcagctctgacggatatggcagctgaagttgcgaaggcggtcactgcgatggcaaacttgggacagtcggagcatgaccgtatcatgcaactgccactaactgaggatgttcttctgaaacactcgaaagatttggcatggaatcactactctgccgtcatggccggacactag

SEQ ID NO: 30080 - protein, 1934 aa, Muscodor strobelii
  misc_feature: SGI Peptide ID NO. 570341
  misc_feature (883)..(1035): Pfam Id: PF04096 Pfam Desc: Nucleoporin autopeptidase
  misc_feature (14)..(1932): NCBI GI: 46128219 Blast Desc: FG08487.1 [Gibberella zeae PH-1]
  misc_feature (21)..(1932): NCBI GI: 256733947 Blast Desc: NECHADRAFT_77586 [Nectria haematococca mpVI 77-13-4]
  misc_feature (73)..(1933): NCBI GI: 261360763 Blast Desc: nucleoporin nup189 [Verticillium albo-atrum VaMs.102]
  misc_feature (43)..(1933): NCBI GI: 154322899 Blast Desc: BC1G_00792 [Botryotinia fuckeliana B05.10] gi|150848126|gb|EDN23319.1| BC1G_00792 [Botryotinia fuckeliana B05.10]
  misc_feature (20)..(1815): NCBI GI: 39945270 Blast Desc: MGG_04617 [Magnaporthe grisea 70-15] gi|145021446|gb|EDK05575.1| MGG_04617 [Magnaporthe grisea 70-15]
  misc_feature (357)..(1933): NCBI GI: 156064667 Blast Desc: SS1G_00341 [Sclerotinia sclerotiorum 1980] gi|154691203|gb|EDN90941.1| SS1G_00341 [Sclerotinia sclerotiorum 1980]
  misc_feature (444)..(1923): NCBI GI: 85097269 Blast Desc: NCU04784 [Neurospora crassa OR74A] gi|25466261|pir||T51890 related to Nup98-Nup96 precursor [imported] - Neurospora crassa gi|28921901|gb|EAA31174.1| crassa
  misc_feature (432)..(1890): NCBI GI: 171681956 Blast Desc: protein product [Podospora anserina] gi|170940937|emb|CAP66587.1| protein product [Podospora anserina]
  misc_feature (20)..(1932): NCBI GI: 189191104 Blast Desc: nucleoporin nup189 [Pyrenophora tritici-repentis Pt-1C-BFP] gi|187973497|gb|EDU40996.1| nucleoporin nup189 [Pyrenophora tritici-repentis Pt-1C-BFP]
  misc_feature (167)..(1933): NCBI GI: 255947862 Blast Desc: Pc22g06700 [Penicillium chrysogenum Wisconsin 54-1255] gi|211591715|emb|CAP97958.1| Pc22g06700 [Penicillium chrysogenum Wisconsin 54-1255]
MSFGGSGFSGFGSNNNTTGGFGGFGSNNTSSGTGFGANNTNTTGAFGSTSTTGGGLFGSGSTSTGFGSNTTAFGSANNTSSAFGAKPGGFGSTSTAGGGLFGNSGSTPAVASNTGFGGFGSNNANTSTPAFGSSSNSLFGSTANKPAFGSTTGTTGGLFGSGNNTATNPGSSFGAFGSSANAPASTALGAVGDPPGTANIQTFSPLVEKESATSAAQNSFQNILFQDPYKKWSAEELRLADYAAGRRYGGAGGSSTFGTGSGFGAFGSNTQPTSTGFGGTTTGTTGGLFGASNNNPSTTGGFGQNNQTSGFGSSNTTGGGLFGAKPVTTGGGLFGSTATTQPAPASGGLFGASGTTGGFGSNTGTSGFGASNTNTSTGGGLFGSANTNTANKTPFSGFGTGTTTTGGFGSGANTSFGSSNNTGGGIFGSNNTSTPQAGGGLFGNTAQQNTGAFGSSGFGQQQTQQTAGGLFGGNSQVQKPAGGGLFGNPSATNTGTGGGLFGGGTGAFGGQQNQPASSGLFGNANNKPAGSTGGLFGNTGTAQNTSGGLFGSGQNNQIQQQQPQQGGGLFGQSQQKPGGLFGASTGSTGGMFGNQNQQNSMFGSSQQQPQNNTMGSSLFGASQSTQSNAPSLTASINDPSAYGSLFANLGSNEAASPGPLATPTNRRSSRRPSILPYYKLNPASASRFVTPQKRGYGFSYSTYGTPNSPSSVASTPGTMSQSLLGGSLSRNLGKSVSTSNLRRSFNVEDSVLVPGAFSASSGPRGYHNGSVKKLVINKELRSDLFSTPTKDKPTPETPNTARKLSKRVSFDTSNVEAIENGSAGNGSIASAPNAEQLGYMRPKSTNGTNGTETQSSSTPEMEQVKGNELAIVHEDEPAAPPVRSPASPRDGEVGDYWMKPTKEEIQNMNRHQRAQVPNFTVGRKNIGYVRFKSLVDLTTIDLDNIFNKIVVLEPRSATVYPNAAKKPPMGKGLNVPSIINLENAYPRATRTGKVISINKHVERLKKIADTTFENYNPQTGEWTFSVEHFTTYGLDDSEDEEGDTEPEPLENPAHRADSTSHVGSDQRDSQQSKFRSSVPGAFDDEQEYGGEELEMAGTNAKPSFLANRSVGSASQALIRTDEGDMDDEYAMSEVNDNASDHPGYHLAAEHDEGPFDGSQSDFVPETPAGIMRARMRAIKSSATPSKVQVAAGDDWMDMLGKTISPQKRDRALLRSMHEADKYRFAQDGAREAAPTKKRIVSDGKGFATSIDLMNSLFEKAKVPAENLQASIRPQGVKFPYKRLTKNIDESKMDSKERTWHDTMRPTWGPNGTLIFCATPTASTFGRSGRITEKNGLMTVMKGGIVTETQDIRIAKFANEMSAQAIEAHSKLAEVHVVDGIPTVELSSRSSLKDFFIGTGPKNSAAEHERLVWDLASVLFDNVKVPADLQDDPEAIEKLRRDNLSRFWEVMVEERTNRAVGMAGTLEEKAVAALSGHRIAEACKHLLDGKNFRLATLIALIGANDDAKKDVKEQLKEWQKSNLMSEFTLPIRALYEMLSGNVCVCEGKKADRDLEHRAESFVISQKFGLNWQQAFGLRLWYTISSHSNIAEAVEKYWEDVQQDKELHPQVWFTQHGIPSIWNDPRKGGREDLLWGLLKLYSDDKADLESILRPENSQLSPLDYRLCWQLGQILTSTGRVSFGKNAEEKSDAATTAFAAQLTNEGSWLPAIFVLLHLSNPDSRSRAIQDHLCRHASLIGNEDSTAFRRLVSDFKIPSPWIWHAKALYMRSAKKDATAEVQCLLRAESWAEAHLTFVKEVAPATIIERDFDALADILQQFEGRHAQVPDWNVGGAIYKAFLQLVGCRRRSEEPPQPLVNSLLEGLPAMHGNTPEAGIIEFAALTDMAAEVAKAVTAMANLGQSEHDRIMQLPLTEDVLLKHSKDLAWNHYSAVMAGH

SEQ ID NO: 30081 - DNA, 6968 bp, Muscodor strobelii
  misc_feature: SGI EST ID NO. CUFF.71397.0
  misc_feature: Variant of the nucleotide sequence at SEQ ID NO 30079
gaccatctgcagctctgtggcctctgtggacactggaagggaacaagtacttgtacctgtgtagccccggccaccccttcccccaagcgtaaggtttctctgcctcttttcgacacctgagcttctttgcggcctggggagctactgccagttgctgggctagcctctacctcactcgcattgtcgcgggcgcgcatctctctcctagcacctgcttcctccttcccccaaagtcgtcaagcgccaaccgacgggcgacaacctctctttccttccctttcgacgggtcgttgtccattggccgttctaattcttttccatccttgcgcgacgcattcaattccttcgcacatcgcccctacagacatcgcatcccagtctagacagaaaaaaagtccactcccatccaacatcccccctgtcgcggtcgcgggactacgcatctgtctatcctgtatcagctcgtctcgtcgacatcacgactacgaccgtatcatcactacgatcctctacctctcggccgtcgctctctccctgacgcccttttccatgtcttcctcctagccccgtcgatccacccagctttcttcaacgcgtcggacgcgactactctcgactgccctccgccactactcatactcggctctcttgagcagctttcacttcgagagcactgcccaccatgtcgttcggcggcagcggcttcagcggcttcggcagcaacaataacaccactggtggatttggtggcttcggctccaacaacaccagttccggcacaggattcggtgccaacaacacaaacaccaccggtgccttcggttccaccagcactacgggtggtgggctgttcggttcggggagcacctccacaggcttcggctctaatacaaccgcattcgggtctgcaaacaataccagcagcgccttcggggccaaacctggaggcttcggatctacctctaccgctggaggcggtctcttcggcaactctggctctactcccgcagtcgcctcgaacaccggcttcggtgggtttggttcgaacaatgcaaacacctcgacgcctgccttcggctccagctccaactctctcttcggcagtaccgccaacaagcccgccttcggaagcactaccggcacgaccggtggtctctttggtagtggcaacaacactgctaccaatccaggaagctccttcggtgcatttggctcttcggccaacgcccccgccagcaccgcattaggagctgtgggtgatccaccaggaactgccaatatccagactttctctccgcttgtcgagaaggagagtgccaccagtgccgcgcagaattctttccagaatatcttgttccaagatccgtataagaagtggtcagcagaagagctcaggctggctgattatgctgctggccgtcgctatggcggcgctggaggcagcagcacttttggcacaggaagcggcttcggcgcctttgggtctaatactcaacccacttctacaggctttggcggtacgactacaggtactacgggcggtctcttcggagctagcaacaacaatccctctacaaccggaggatttggccagaataaccagactagcggcttcggttcgagcaacaccactggcggtggactgtttggagccaagcccgtgactactggaggtggccttttcggcagcactgcaaccacacaaccagctcctgcctccggtggtctcttcggcgcctctggcacgaccggcggctttgggagcaacactggcacctctggtttcggtgcatctaataccaatactagtacaggtggcggattatttggcagcgccaataccaatacagccaacaagacacccttcagtggctttggaaccggcacaaccaccactggtggattcggttccggtgccaacactagcttcggcagcagcaacaacactggcggcggaatttttggttccaacaatacaagcactccgcaagctggcggagggctattcggcaacactgcacaacaaaatacgggtgcttttggctcgagtgggttcggccagcagcagacgcaacaaacagccggtggtctcttcggtggtaattcccaagtacaaaagccggctggtggtggcctgtttgggaatcccagtgcaacgaacactggaacgggcggcggtctgttcggcggtggcactggtgcgtttggtggccagcagaaccaacccgcatccagtggattgtttgggaatgctaataataagcccgcaggatccactggtggacttttcgggaatactggaaccgcacaaaacactagcggtggactgttcgggtcgggacaaaacaatcaaattcaacagcaacaaccacagcaaggcggaggtctatttggacagagtcaacagaagcccggtgggctgttcggcgcgagcaccgggtcgacaggtggcatgtttggaaatcagaatcagcagaattccatgtttggttcttctcaacaacagccacaaaacaataccatgggcagctctctgtttggagcttcgcagagcactcaatccaatgccccctctttaactgctagtatcaatgacccctcggcatacggatccctttttgccaatctgggcagcaatgaagctgcaagtccaggacctctggccacgccaaccaacaggcgatcctcccgacgaccctcgatcctaccgtactacaaactcaatcctgcctcagcttcgcgcttcgtgactcctcagaaacgaggttatggcttttcatacagcacctatggcacacccaacagtccatctagtgtagctagtacgcctggtactatgtcgcagagtttattgggaggaagtctctctcgcaaccttggcaagagcgtgtccacaagcaatttgcgccgtagcttcaatgttgaggacagcgtgcttgtccctggtgccttctcagccagctcgggcccaagagggtatcataacggtagcgtcaagaagctggtcatcaataaagagcttcgaagcgatctgttttctacacccaccaaagataaacccacgcccgagacccctaacactgcgcgcaagctaagcaaacgggtcagtttcgatacgagcaatgtagaagcgattgaaaatggaagtgccggtaatggatcaattgcttccgcccccaatgctgaacagttaggctacatgagacctaagagcacgaacggcacaaatggtacggaaacccagtcttcgtccacccctgagatggagcaggtcaaaggcaatgagttggctattgtccatgaagatgaacctgctgcacctcctgttcgaagccctgcttcaccccgcgatggcgaggtgggtgactactggatgaaacccaccaaggaagagatccagaacatgaatcgccatcagcgtgcacaagtgcccaacttcactgttggccggaaaaatatcggttatgtcaggttcaagagtttggtcgatttgactacgatcgatcttgacaatatcttcaacaagatcgttgtattggagccccggtcggcaacagtttatcccaatgccgccaagaagccaccgatgggcaaaggtctgaatgttccctcgattattaacctagagaatgcctaccctcgagctactagaactggcaaagttatatctatcaacaaacacgtggagcgcctgaaaaagattgccgacactaccttcgagaattacaatccacagactggcgaatggacgttctccgtcgagcatttcactacatatggacttgacgatagtgaagacgaagagggagacacggaaccagagcctctcgagaatcctgcgcacagggccgactcaacatcacacgtcggttcagaccagcgcgacagccaacagtcaaagttccgtagctctgtccctggtgccttcgatgatgaacaagaatatggaggcgaagagctggagatggccggaaccaacgccaagccgtcttttttagctaatcgctccgtgggttctgcgtcccaagcccttatccgaacggatgaaggggacatggacgacgaatatgcgatgtccgaggtaaacgacaatgcgagtgatcaccctggataccatctcgccgcggagcacgacgaaggcccgttcgatggtagtcagtcggattttgttccggagacccctgcaggcatcatgagggcaagaatgcgtgccatcaaaagttcagctacaccatcgaaagtgcaagttgcagctggtgatgactggatggatatgcttggcaaaaccatcagtccccaaaaacgtgaccgagcgctgctgaggagcatgcatgaagcggataagtatcgctttgcccaagacggtgctcgggaggcagcgcctacaaagaagaggattgtctctgatggcaaaggatttgcgaccagtatcgatttgatgaattcactatttgagaaggccaaagtcccagcggagaatttgcaggcttctattcggccacaaggtgtcaaggtttgtctttgagtcccttctttcctgctcagaagctgagggcgaagaacatcgcttgtaactaaattggaaatcaatacaagtatccatactaagtccttttcgtgcaatatagttcccatacaagcgactcacaaaaaacattgatgaaagcaagatggatagtaaagagcgaacatggcatgatactatgcgtcctacctgggggccaaatggtactctcattttctgcgctactcctacagcatcaacctttgggcgatcaggacgtatcaccgagaagaatgggctaatgacggttatgaaaggcggtattgtcacggaaacacaggacatcaggatcgctaaattcgcgaacgagatgtctgctcaggccattgaagcacattcgaaattggcggaagttcacgtggttgatggtattcctactgtggagctgagttccaggtcaagccttaaggacttcttcattgggaccggacccaagaactctgcggcggagcacgaacgacttgtttgggatctagccagcgtcttgtttgacaatgtcaaagtccctgctgacctccaagatgatcccgaggcaattgagaagctgcgccgagacaacctatctcgtttttgggaagttatggttgaggagcgtacaaaccgagcagtcgggatggctggcactcttgaggagaaggctgttgccgctctttcgggtcatcgcattgctgaagcatgcaaacatctgctggacgggaagaacttccgtcttgccactctcatcgccctgattggagccaacgacgatgcaaaaaaagacgtcaaggagcagcttaaagaatggcaaaaatctaacttgatgtcagagttcacactgcccattcgcgctctatatgagatgctcagtgggaacgtctgcgtctgcgaagggaaaaaggcagaccgggaccttgagcatcgtgctgaatcattcgtgatctctcaaaagtttggccttaactggcaacaagcttttgggttgagattatggtacacaatttcgagtcacagcaatatcgctgaagccgtcgagaagtattgggaagatgtccaacaggacaaggaactccaccctcaggtgtggttcacgcagcacggcattcccagcatttggaacgatccgcgcaaggggggtcgcgaagatctactctggggtcttctcaagctttattcagacgacaaagcagacctcgagtctatcctacgcccagagaattcgcagctctcccccctagactaccgtctctgttggcagttaggacagatccttacgtctactggccgagtttcctttgggaagaacgccgaggagaaatcagacgccgctaccactgcttttgcagcacaattgacaaacgagggcagttggcttccggcgatcttcgttctcctgcatctcagcaatcccgattcacgatcaagggctatccaagatcacttgtgccgacacgcttccttgataggcaacgaggactccactgctttcaggaggctcgtaagcgacttcaagattccatccccttggatttggcatgcaaaggccttatacatgcgaagcgccaagaaggatgcaacagctgaggtccaatgtctgctacgcgcagaatcttgggctgaagcccacttgacttttgtcaaggaagttgccccggcaacaataatagagcgagatttcgacgcactagcggatatactccagcagtttgagggccgacatgcacaggtcccggactggaacgttggtggtgcaatttacaaagctttcctccagctcgtgggctgtcgtcgccgatcggaagagccaccacagccactggttaacagcctgcttgaggggctccctgctatgcatggcaatacgcctgaagctggaattatcgagtttgcagctctgacggatatggcagctgaagttgcgaaggcggtcactgcgatggcaaacttgggacagtcggagcatgaccgtatcatgcaactgccactaactgaggatgttcttctgaaacactcgaaagatttggcatggaatcactactctgccgtcatggccggacactagaagggttctagcagagatgatatcccaaacgatcctatggatatggagcactagtggtcggtagaagaacatgagatgaataccagtgacgacactggcagtgaaaggtcggtgacccatggtcattcacctcgtaggatatggagcgccttgtaggacaaagttggtagccgtgttgagctaggtggaggggaaagaaaggatatgagtatagctaatgcgctctgctggagcgcgagcgagttgttacgccccgtcacgagactcttcttttcccccgccggcaggttgtaaaaatagtttcggtggtaaaaaaagtacacaagtacacactagtagatagacattagatagcctaacacttaa

SEQ ID NO: 30082 - DNA, 1731 bp, Muscodor strobelii
  misc_feature: SGI cDNA ID NO. 570342
  misc_feature: Encodes the peptide sequence at SEQ ID NO 30083
atgtccaaatatcaacaagccaaagtccggcgacaagcgctcttcgtcgcaacgatcgggattattctcattttgtcatttgttatccttggaggcttttcatctcgtatcgcagtaagtgatgatgaagtcctcgtcgaaagcgacagatgcggtttcctgcttgggaatacaactgttgagcgacagtacttcagtgttgtctcgtacctagccgaaaagattggcgatgcagcagattacgcccaacaatgctactctgacatatccaatcgttttgactgcaatagatatgtcattccgaaaattgatagcagtgtgcaaacaaatgcgacttgtccgtttgacaatagcatctgcctcggcgataacactaaccttcgtattgacagtggatatatcgacagccattctcacataggccttaatgctcctcctagaaggagagtgttttggaggaatgtcctgcattgtgcaccgttggtcacagacggctttaccaccctgtacgaagatgaccaaagtgatgcacacgatattctctatcactatggatcttacaactataacaaccagacgtacgattacgtgtatcgggcagaagatgtagattcacaatatgcgtatctcagaggaggtgtcactgggatagaatcccacttgaattttcaactagatgcttttgaggcccatgctctgtatggcatgcatgatgaaatgaattctgctttcagaccgattgatgttctcgcccgaaacgatgcagatctctacctcgttatgttgcaaggcaaccgtgttctgttctctgagccctcggaggacccgtggtataacatttctgggccgagcatcagcttcgggttaatcaacaacgggaaattgcctaatctcacattctatctaccgggcgccgcggcgtctcctctcgcgtgtacggatcaacaccaattctgcgtgtcccaggaccctagcagttgcgggccattggctagtcttaaagatgctatcatcggggctactcctctgttcaagaactcatccgcctcaggtgctgcagagtcaaaggaagcagctttattcacatattttaccagtggctttgccttaacccagaatgtcatcatcaatatactaagcgagctgggaccgaaagccttgttatcccagaataggctcattcatggtatccaggggtcaattccgccaaatcagtggcaactggacgtggctcattggtggagtatatcaatgtctgtgatgcagggcatatttctcgacagcgcatacggcccgactgatccagctctacaagagctccgtgtgaaattcacggcgccccagtttcatgagttttgtcacaatcagaaaatgaagacaacggcctttgcatctctcagcgtctttggtcttgcttttacttacctcgtcggcgtgtcactgacgctactctcatacactctagagccagcgtatgggtggcttcacaagcgaagagcaagagccaatattccgcaggataatgtgagacagcataagtatctggaatgggctactaatgcgacattacaactccaacggctagctcacgagggtattgggcaaggaacttggtcacgaggtacggagatgataccaaggacgcaggatggggagcttcttggagtgttggacatttcgaacttgcagcaccctgtacttcgaccgctgcagaaggtagacacgaaatga

SEQ ID NO: 30083 - protein, 576 aa, Muscodor strobelii
  misc_feature: SGI Peptide ID NO. 570342
  misc_feature (23)..(565): NCBI GI: 169615058 Blast Desc: SNOG_10683 [Phaeosphaeria nodorum SN15] gi|111060957|gb|EAT82077.1| SNOG_10683 [Phaeosphaeria nodorum SN15]
  misc_feature (18)..(575): NCBI GI: 189194015 Blast Desc: conserved [Pyrenophora tritici-repentis Pt-1C-BFP] gi|187978910|gb|EDU45536.1| conserved [Pyrenophora tritici-repentis Pt-1C-BFP]
  misc_feature (6)..(576): NCBI GI: 115399382 Blast Desc: [Aspergillus terreus NIH2624] gi|114192163|gb|EAU33863.1| [Aspergillus terreus NIH2624]
  misc_feature (3)..(554): NCBI GI: 119474227 Blast Desc: NFIA_004500 [Neosartorya fischeri NRRL 181] gi|119407142|gb|EAW17092.1| conserved [Neosartorya fischeri NRRL 181]
  misc_feature (3)..(552): NCBI GI: 159128250 Blast Desc: conserved [Aspergillus fumigatus A1163]
  misc_feature (3)..(552): NCBI GI: 70986226 Blast Desc: conserved [Aspergillus fumigatus Af293] gi|66846236|gb|EAL86569.1| conserved [Aspergillus fumigatus Af293]
  misc_feature (8)..(566): NCBI GI: 256723662 Blast Desc: NECHADRAFT_86728 [Nectria haematococca mpVI 77-13-4]
  misc_feature (27)..(548): NCBI GI: 169772941 Blast Desc: [Aspergillus oryzae RIB40] gi|83768800|dbj|BAE58937.1| protein product [Aspergillus oryzae]
  misc_feature (13)..(558): NCBI GI: 169618215 Blast Desc: SNOG_12297 [Phaeosphaeria nodorum SN15] gi|160703576|gb|EAT80110.2| SNOG_12297 [Phaeosphaeria nodorum SN15]
  misc_feature (24)..(534): NCBI GI: 121699395 Blast Desc: ACLA_082720 [Aspergillus clavatus NRRL 1] gi|119396149|gb|EAW06581.1| ACLA_082720 [Aspergillus clavatus NRRL 1]
MSKYQQAKVRRQALFVATIGIILILSFVILGGFSSRIAVSDDEVLVESDRCGFLLGNTTVERQYFSVVSYLAEKIGDAADYAQQCYSDISNRFDCNRYVIPKIDSSVQTNATCPFDNSICLGDNTNLRIDSGYIDSHSHIGLNAPPRRRVFWRNVLHCAPLVTDGFTTLYEDDQSDAHDILYHYGSYNYNNQTYDYVYRAEDVDSQYAYLRGGVTGIESHLNFQLDAFEAHALYGMHDEMNSAFRPIDVLARNDADLYLVMLQGNRVLFSEPSEDPWYNISGPSISFGLINNGKLPNLTFYLPGAAASPLACTDQHQFCVSQDPSSCGPLASLKDAIIGATPLFKNSSASGAAESKEAALFTYFTSGFALTQNVIINILSELGPKALLSQNRLIHGIQGSIPPNQWQLDVAHWWSISMSVMQGIFLDSAYGPTDPALQELRVKFTAPQFHEFCHNQKMKTTAFASLSVFGLAFTYLVGVSLTLLSYTLEPAYGWLHKRRARANIPQDNVRQHKYLEWATNATLQLQRLAHEGIGQGTWSRGTEMIPRTQDGELLGVLDISNLQHPVLRPLQKVDTK

SEQ ID NO: 30084 - DNA, 1646 bp, Muscodor strobelii
  misc_feature: SGI EST ID NO. CUFF.71169.0
  misc_feature: Variant of the nucleotide sequence at SEQ ID NO 30082
cgccgctttactcattgcattcacgagtactttcattgcgtttgtcgcaactcgagtttggaggaccctttgcttcgtcctacacaggcattactccgtttcagcgcctcaaagtgcgtcctatcatcaactccaagcgattttgcgaaacgcttcagatgctgaagatggagtgagattatctttgatcttatcctcgcgagaaaatcggcggatgtccaaatatcaacaagccaaagtccggcgacaagcgctcttcgtcgcaacgatcgggattattctcattttgtcatttgttatccttggaggcttttcatctcgtatcgcagtaagtgatgatgaagtcctcgtcgaaagcgacagatgcggtttcctgcttgggaatacaactgttgagcgacagtacttcagtgttgtctcgtacctagccgaaaagattggcgatgcagcagattacgcccaacaatgctactctgacatatccaatcgttttgactgcaatagatatgtcattccgaaaattgatagcagtgtgcaaacaaatgcgacttgtccgtttgacaatagcatctgcctcggcgataacactaaccttcgtattgacagtggatatatcgacagccattctcacataggccttaatgctcctcctagaaggagagtgttttggaggaatgtcctgcattgtgcaccgttggtcacagacggctttaccaccctgtacgaagatgaccaaagtgatgcacacgatattctctatcactatggatcttacaactataacaaccagacgtacgattacgtgtatcgggcagaagatgtagattcacaatatgcgtatctcagaggaggtgtcactgggatagaatcccacttgaattttcaactagatgcttttgaggcccatgctctgtatggcatgcatgatgaaatgaattctgctttcagaccgattgatgttctcgcccgaaacgatgcagatctctacctcgttatgttgcaaggcaaccgtgttctgttctctgagccctcggaggacccgtggtataacatttctgggccgagcatcagcttcgggttaatcaacaacgggaaattgcctaatctcacattctatctaccgggcgccgcggcgtctcctctcgcgtgtacggatcaacaccaattctgcgtgtcccaggaccctagcagttgcgggccattggctagtcttaaagatgctatcatcggggctactcctctgttcaagaactcatccgcctcaggtgctgcagagtcaaaggaagcagctttattcacatattttaccagtggctttgccttaacccagaatgtcatcatcaatatactaagcgagctgggaccgaaagccttgttatcccagaataggctcattcatggtatccaggggtcaattccgccaaatcagtggcaactggacgtggctcattggtggagtatatcaatgtctgtgatgcagggcatatttctcgacagcgcatacggcccgactgatccagctctacaagagctccgtgtgaaattcacggcgccccagtttcatgagttttgtcacaatcagaaaatgaagacaacggcctttgcatctctcagcgtctttggtcttgcttttacttacctcgtcg

SEQ ID NO: 30085 - DNA, 945 bp, Muscodor strobelii
  misc_feature: SGI cDNA ID NO. 570343
  misc_feature: Encodes the peptide sequence at SEQ ID NO 30086
atgcagaatgtagctcgtgaacttcaacgtaagactgacttcctgagtctcaaggctccagaaggtgtatcgacgacgatacttgatatgtgcatggcacctggctcattcctccatcaggctaagtgcttcaacccgcaagcgactgcccgggcattcgcccttctccctgaagttggtggccacaaagtcctgcttcctcgagatcacaatgctcatgtcgaatatctggacatcgtaatgttagcggaggacatgggagtcccccttgattctattccttctgcccatccagacgcagcgaattttctgtcacgtcgaatcagcgaggacgaagtctttgacctcgtcatttgcgacggccaggtcctccgcatacatccccgtaaatcataccgtgaaaagcgtgaagcaacacgtctcgccctcacccagctctcgataggcctctctcacattcgggcccgggggaccatgcttattctccttcaccggatcgagtctctcaaatgcgttgaattgttgcacactttttcggccttctccacaattcaggttgttaaaccggaatccttacatcagaaccgatcttctttttatttgattgcgaaaaacatcgaccctgaacacaagacagctatcgccgctgttgaaacctggagaaagctctggaaaagcgttacttttgacactgatgaggagtttgaagagctagaacgaagtatgcagccggaaataactgagctgctggaggaatttggagacgaattcctaaagatggcacgaccagtctggcaggttcaaaaggaagcactagcaaaggcgccctttattcgtgcacaacgggagaaggggaaaggtgtagatagaggaactactgaagccgaaacgatctgttcggaagcttcagaaggaagctccgactacaccacccctcatccgtga

SEQ ID NO: 30086 - protein, 314 aa, Muscodor strobelii
  misc_feature: SGI Peptide ID NO. 570343
  misc_feature (1)..(281): NCBI GI: 119178221 Blast Desc: CIMG_07967 [Coccidioides immitis RS]
  misc_feature (1)..(281): NCBI GI: 240104792 Blast Desc: FtsJ-like methyltransferase family protein [Coccidioides posadasii C735 delta SOWgp]
  misc_feature (1)..(279): NCBI GI: 225562093 Blast Desc: conserved [Ajellomyces capsulatus G186AR]
  misc_feature (1)..(279): NCBI GI: 238492087 Blast Desc: conserved [Aspergillus flavus NRRL3357] gi|220695774|gb|EED52116.1| conserved [Aspergillus flavus NRRL3357]
  misc_feature (1)..(281): NCBI GI: 115433296 Blast Desc: [Aspergillus terreus NIH2624] gi|114189637|gb|EAU31337.1| [Aspergillus terreus NIH2624]
  misc_feature (1)..(282): NCBI GI: 171683097 Blast Desc: protein product [Podospora anserina] gi|170941508|emb|CAP67160.1| protein product [Podospora anserina]
  misc_feature (1)..(279): NCBI GI: 67538738 Blast Desc: AN5539.2 [Aspergillus nidulans FGSC A4] gi|40743509|gb|EAA62699.1| AN5539.2 [Aspergillus nidulans FGSC A4] gi|259485005|tpe|CBF81710.1| TPA: conserved [Aspergillus FGSC
  misc_feature (8)..(267): NCBI GI: 242821002 Blast Desc: TSTA_000170 [Talaromyces stipitatus ATCC 10500] gi|218712514|gb|EED11939.1| TSTA_000170 [Talaromyces stipitatus ATCC 10500]
  misc_feature (1)..(279): NCBI GI: 255953451 Blast Desc: Pc21g04320 [Penicillium chrysogenum Wisconsin 54-1255] gi|211589189|emb|CAP95329.1| Pc21g04320 [Penicillium chrysogenum Wisconsin 54-1255]
  misc_feature (1)..(280): NCBI GI: 46134143 Blast Desc: FG09211.1 [Gibberella zeae PH-1]
MQNVARELQRKTDFLSLKAPEGVSTTILDMCMAPGSFLHQAKCFNPQATARAFALLPEVGGHKVLLPRDHNAHVEYLDIVMLAEDMGVPLDSIPSAHPDAANFLSRRISEDEVFDLVICDGQVLRIHPRKSYREKREATRLALTQLSIGLSHIRARGTMLILLHRIESLKCVELLHTFSAFSTIQVVKPESLHQNRSSFYLIAKNIDPEHKTAIAAVETWRKLWKSVTFDTDEEFEELERSMQPEITELLEEFGDEFLKMARPVWQVQKEALAKAPFIRAQREKGKGVDRGTTEAETICSEASEGSSDYTTPHP

SEQ ID NO: 30087 - DNA, 1833 bp, Muscodor strobelii
  misc_feature: SGI cDNA ID NO. 570344
  misc_feature: Encodes the peptide sequence at SEQ ID NO 30088
atggcctctacagaagatcttgaccgtccctcgctggctgatgatagtgattaccatcctttcatacaaccccaaggtttaagtagacctacaaggaattctacacgctaccggaacccaagtccgaacttttttgaacgaggtgtgcgactggtctcgcgcctttttcgcgacgatggggtgcacaaacactccaggtccccctcgcacacattgctgcgggacgagaatggcgttctgtcttttcgggattcgctcaaattcatgatatcctcctcctatatcaactacttgataattttcgtaccatttggtatcgtaacctactggcttgattcacctcattcggtcatcttcgcattcaacgccatctcaattgtaccgttgtcaaatattcttggacatgctacagaatgtatcgcggccgatcttggcgatgccatcggagcactcatgaacatcagttttggcaaccttgtagaaattataatgttctttgccgccttgcgatacggccatttgaaagttgtcaagagtgcgcttgtgggctcgatattggtcaatcttttgttgatcttgggcacgtccattattgcggctgaatttcaacctgccgatctcgtatatgatatgaataatgcccaggctcttgcgtgtctgttgtcgcttacgatattttctatccttattcctatggccttccattttacattcaagaatgttcaagagcgcgagtacgcagttcgtacactgagcagggcttcatccgtaatcctgctcattgtctattttgtatatttggcctttcttcttgtaccaaatcgacggcgcactgcgatagttacgagtgaggagctattcgacgctacaaatgaagaacgaggggcacggggtatgatggaaccctacgttggttcggaactcagctttcctcaagtaaatggacaccaacagcgatcagaatctgtgccgcgtacaataaagttcgcagctccagcggttccgacaccgatccgtgaagaacatagtgagggtaatgccgagcaattcgccgaagagccttacaaaggtcatcatcggagatcatcgtctcagcgagtagaacacgataacgtacatcgctggatgaaaggaactcctgacgcttctaaatctcgagctgtacatacacgacagcggcgcagcatgagccaaagttcgtttggcacaacacgatcacttcgaggtgttgaaatcgttgaacgatatgccgatggcggaggccaaagctattcatctcagcaacagaggcacgcgcccaatactagaccagaattctccttcagtattgtggagcccaataacgaaattgtcgcgaaggatgaacctcctaaagtcagccacgcagccgcgatctttgtgctcactgcctcgactctcttcactgcgatatgtgcggagtttctggtcgatacgattggggatatcatcaagtacagcgggttgacacagtctttcatcggcctggtcattctatctgtcgttggaaatgcagcagagtatataactggagtccgagtcgcagcgagaggcaaactagacttggcgattggtgtctccttcggttcctccatccagatcgcattgttcgtaagcccgcttaccgtcattggtggctgggcaatgggaaagaacatggatctgtatatgggcttgttcgagacttcggcgttagtaggtagtgcgatcctcgtgaatttcgtcatggccaatgggaggacgaactatcttgagggtacattgctttgcgcttgctacctcatcattgggatcggttcatacctgatcccttag

SEQ ID NO: 30088 - protein, 610 aa, Muscodor strobelii
  misc_feature: SGI Peptide ID NO. 570344
  misc_feature (473)..(606): Pfam Id: PF01699 Pfam Desc: Sodium/calcium exchanger protein
  misc_feature (124)..(270): Pfam Id: PF01699 Pfam Desc: Sodium/calcium exchanger protein
  misc_feature (92)..(610): NCBI GI: 85115854 Blast Desc: NCU00795 [Neurospora crassa OR74A] gi|28926749|gb|EAA35715.1| conserved [Neurospora crassa OR74A]
  misc_feature (80)..(610): NCBI GI: 46114774 Blast Desc: FG03229.1 [Gibberella zeae PH-1]
  misc_feature (42)..(603): NCBI GI: 261359132 Blast Desc: vacuolar calcium ion transporter [Verticillium albo-atrum VaMs.102]
  misc_feature (80)..(610): NCBI GI: 256728389 Blast Desc: NECHADRAFT_53916 [Nectria haematococca mpVI 77-13-4]
  misc_feature (454)..(610): NCBI GI: 164428680 Blast Desc: NCU00916 [Neurospora crassa OR74A] gi|157072239|gb|EAA35506.2| [Neurospora crassa OR74A]
  misc_feature (454)..(610): NCBI GI: 38636450 Blast Desc: [Neurospora crassa]
  misc_feature (457)..(610): NCBI GI: 238492345 Blast Desc: membrane bound cation transporter, [Aspergillus flavus NRRL3357] gi|220695903|gb|EED52245.1| membrane bound cation transporter, [Aspergillus flavus NRRL3357]
  misc_feature (449)..(610): NCBI GI: 146323607 Blast Desc: membrane bound cation transporter [Aspergillus fumigatus Af293] gi|129555303|gb|EBA27180.1| membrane bound cation transporter, [Aspergillus fumigatus Af293]
  misc_feature (449)..(610): NCBI GI: 119487375 Blast Desc: sodium/calcium transporter, [Neosartorya fischeri NRRL 181] gi|119410637|gb|EAW20583.1| sodium/calcium transporter, [Neosartorya fischeri NRRL 181]
  misc_feature (454)..(610): NCBI GI: 240107630 Blast Desc: Sodium/calcium exchanger family protein [Coccidioides posadasii C735 delta SOWgp]
MASTEDLDRPSLADDSDYHPFIQPQGLSRPTRNSTRYRNPSPNFFERGVRLVSRLFRDDGVHKHSRSPSHTLLRDENGVLSFRDSLKFMISSSYINYLIIFVPFGIVTYWLDSPHSVIFAFNAISIVPLSNILGHATECIAADLGDAIGALMNISFGNLVEIIMFFAALRYGHLKVVKSALVGSILVNLLLILGTSIIAAEFQPADLVYDMNNAQALACLLSLTIFSILIPMAFHFTFKNVQEREYAVRTLSRASSVILLIVYFVYLAFLLVPNRRRTAIVTSEELFDATNEERGARGMMEPYVGSELSFPQVNGHQQRSESVPRTIKFAAPAVPTPIREEHSEGNAEQFAEEPYKGHHRRSSSQRVEHDNVHRWMKGTPDASKSRAVHTRQRRSMSQSSFGTTRSLRGVEIVERYADGGGQSYSSQQQRHAPNTRPEFSFSIVEPNNEIVAKDEPPKVSHAAAIFVLTASTLFTAICAEFLVDTIGDIIKYSGLTQSFIGLVILSVVGNAAEYITGVRVAARGKLDLAIGVSFGSSIQIALFVSPLTVIGGWAMGKNMDLYMGLFETSALVGSAILVNFVMANGRTNYLEGTLLCACYLIIGIGSYLIP

SEQ ID NO: 30089 - DNA, 2238 bp, Muscodor strobelii
  misc_feature: SGI EST ID NO. CUFF.71188.0
  misc_feature: Variant of the nucleotide sequence at SEQ ID NO 30087
gtgacatttaaagtagcccttcctcaggatcttgactgtggccgacgcgtcacgacatggcctctacagaagatcttgaccgtccctcgctggctgatgatagtgattaccatcctttcatacaaccccaaggtttaagtagacctacaaggaattctacacgctaccggaacccaagtccgaacttttttgaacgaggtgtgcgactggtctcgcgcctttttcgcgacgatggggtgcacaaacactccaggtccccctcgcacacattgctgcgggacgagaatggcgttctgtcttttcgggattcgctcaaattcatgatatcctcctcctatatcaactacttgataattttcgtaccatttggtatcgtaacctactggcttgattcacctcattcggtcatcttcgcattcaacgccatctcaattgtaccgttgtcaaatattcttggacatgctacagaatgtatcgcggccgatcttggcgatgccatcggagcactcatgaacatcagttttggcaaccttgtagaaattataatgttctttgccgccttgcgatacggccatttgaaagttgtcaagagtgcgcttgtgggctcgatattggtcaatcttttgttgatcttgggcacgtccattattgcggctgaatttcaacctgccgatctcgtatatgatatgaataatgcccaggctcttgcgtgtctgttgtcgcttacgatattttctatccttattcctatggccttccattttacattcaagaatgttcaagagcgcgagtacgcagttcgtacactgagcagggcttcatccgtaatcctgctcattgtctattttgtatatttggcctttcttcttgtaccaaatcgacggcgcactgcgatagttacgagtgaggagctattcgacgctacaaatgaagaacgaggggcacggggtatgatggaaccctacgttggttcggaactcagctttcctcaagtaaatggacaccaacagcgatcagaatctgtgccgcgtacaataaagttcgcagctccagcggttccgacaccgatccgtgaagaacatagtgagggtaatgccgagcaattcgccgaagagccttacaaaggtcatcatcggagatcatcgtctcagcgagtagaacacgataacgtacatcgctggatgaaaggaactcctgacgcttctaaatctcgagctgtacatacacgacagcggcgcagcatgagccaaagttcgtttggcacaacacgatcacttcgaggtgttgaaatcgttgaacgatatgccgatggcggaggccaaagctattcatctcagcaacagaggcacgcgcccaatactagaccagaattctccttcagtattgtggagcccaataacgaaattgtcgcgaaggatgaacctcctaaagtcagccacgcagccgcgatctttgtgctcactgcctcgactctcttcactgcgatatgtgcggagtttctggtcgatacgattggggatatcatcaagtacagcgggttgacacagtctttcatcggcctggtcattctatctgtcgttggaaatgcagcagagtatataactggagtccgagtcgcagcgagaggcaaactagacttggcgattggtgtctccttcggttcctccatccagatcgcattgttcgtaagcccgcttaccgtcattggtggctgggcaatgggaaagaacatggatctgtatatgggcttgttcgagacttcggcgttagtaggtagtgcgatcctcgtgaatttcgtcatggccaatgggaggacgaactatcttgagggtacattgctttgcgcttgctacctcatcattgggatcggttcatacctgatcccttagacgacaaccttaattggagggagctgttcctctattattccttgtacaaaacaccagcatcattcctatgcattcccggaatagcactaccaagacacacggcaggaccgtcggccagttttgcaattactacagtgacggcttgattggcattaactctactagaaatggcgtcggttcagataatagacaagctttccttgcatatcattgcatatttcatagttcagcattattgtcggtggttgggtatgagttgtcgccacccctaggcgctatgtacattggttacaaatttcaggttgttcaataataattctgcatctgcctgtctagtctatgagccaac

SEQ ID NO: 30090 - DNA, 618 bp, Muscodor strobelii
  misc_feature: SGI cDNA ID NO. 570345
  misc_feature: Elevated expression when VOC is produced
  misc_feature: Encodes the peptide sequence at SEQ ID NO 30091
atgacggaacctctttccaaggtcgactccgctgtcgaaggcgtcgatggtcccccgaaggtcgaggtcaaggaccgaagaacatctcgactgagttcgagcgctaatcagcagcctagtcggaaagactactacctgaccaaaactgaacttgccgtcgctccggagacacagaagactggctggaaggtcaattccaacccaagcacgttggaggataaggagattgccaacaggccaattgtctcaccgccgatcagaaatctggatctgaagataggcgagatcattgttcccgtacggaatacggcagctagcggcgtcactatccacgatgcaatgaccgcgatcttcaagaagaagaagaaggtggcggacgaagatttgaaagacggtccttacctcaagggcttcgagtggccaattctcagccccggttgggaggaagacgcattgaaggccgccaagagcaaaggcgcgaaactctcaccggaagacctagagaaggcaatagacgaggagaaagcgaagatatggggaacgctcatcgtgcacacatctgctacagcagaaaccaacgtcggtggcggtaagaagaagaagaagcaggccgagtaa

SEQ ID NO: 30091 - protein, 205 aa, Muscodor strobelii
  misc_feature: SGI Peptide ID NO. 570345
  misc_feature (1)..(140): NCBI GI: 261360718 Blast Desc: conserved [Verticillium albo-atrum VaMs.102]
  misc_feature (3)..(197): NCBI GI: 171681766 Blast Desc: protein product [Podospora anserina] gi|170940842|emb|CAP66492.1| protein product [Podospora anserina]
  misc_feature (1)..(140): NCBI GI: 39974843 Blast Desc: MGG_00432 [Magnaporthe grisea 70-15] gi|145018676|gb|EDK02955.1| MGG_00432 [Magnaporthe grisea 70-15]
  misc_feature (1)..(140): NCBI GI: 242785871 Blast Desc: conserved [Talaromyces stipitatus ATCC 10500] gi|242785879|ref|XP_002480689.1| conserved [Talaromyces stipitatus ATCC 10500] gi|242785884|ref|XP_002480690.1| conserved
  misc_feature (1)..(140): NCBI GI: 46127963 Blast Desc: FG08359.1 [Gibberella zeae PH-1]
  misc_feature (1)..(140): NCBI GI: 62953170 Blast Desc: [Gibberella fujikuroi]
  misc_feature (1)..(140): NCBI GI: 255939622 Blast Desc: Pc16g02070 [Penicillium chrysogenum Wisconsin 54-1255] gi|211585203|emb|CAP92877.1| Pc16g02070 [Penicillium chrysogenum Wisconsin 54-1255]
  misc_feature (1)..(140): NCBI GI: 212543151 Blast Desc: conserved [Penicillium marneffei ATCC 18224] gi|210066637|gb|EEA20730.1| conserved [Penicillium marneffei ATCC 18224]
  misc_feature (1)..(140): NCBI GI: 261198949 Blast Desc: conserved [Ajellomyces dermatitidis SLH14081] gi|239595028|gb|EEQ77609.1| conserved [Ajellomyces dermatitidis SLH14081] gi|239609861|gb|EEQ86848.1| conserved [Ajellomyces
  misc_feature (3)..(140): NCBI GI: 85097532 Blast Desc: NCU05498 [Neurospora crassa OR74A] gi|28921952|gb|EAA31224.1| conserved [Neurospora crassa OR74A]
  misc_feature: Useful for introducing or modulating the production of volatile compounds
MTEPLSKVDSAVEGVDGPPKVEVKDRRTSRLSSSANQQPSRKDYYLTKTELAVAPETQKTGWKVNSNPSTLEDKEIANRPIVSPPIRNLDLKIGEIIVPVRNTAASGVTIHDAMTAIFKKKKKVADEDLKDGPYLKGFEWPILSPGWEEDALKAAKSKGAKLSPEDLEKAIDEEKAKIWGTLIVHTSATAETNVGGGKKKKKQAE

SEQ ID NO: 30092 - DNA, 1800 bp, Muscodor strobelii
  misc_feature: SGI EST ID NO. CUFF.71191.0
  misc_feature: Variant of the nucleotide sequence at SEQ ID NO 30090
gaacagcaattggaggaatcacacagagaacaggacttaatagtgacataaaggcgtccgcagagtcaccgttcgcaagtagagcatctgaagtttcgaccaggttcccctcgttgtctaacttcaagttcattcacctgccggcgactcactcccctgcctacatgtacttgcagctacctgctgatcttgcatctgtgcctgcctaccataaacagcggaattgacgtacctcacccgcgcctcgccagtggtttcgtgtcagagaccgaacccctcctttcctgccctctccaaaactccttttactctctatccttcccctctccctccttctttctccttctctcttccaggtcacccctctcttgttacacatcaacagcaaacgcagcctactcaagccatccgttctcacgtcctagtgaccggaaacatcatctcttatatccccatcaatttcattgcagtttcatttccgtgaagctgatcgcctacccctcatctctactttaaagagtcatcactcgccctgcccataatgacggaacctctttccaaggtcgactccgctgtcgaaggcgtcgatggtcccccgaaggtcgaggtcaaggaccgaagaacatctcgactgagttcgagcgctaatcagcagcctagtcggaaagactactacctgaccaaaactgaacttgccgtcgctccggagacacagaagactggctggaaggtcaattccaacccaagcacgttggaggataaggagattgccaacaggccaattgtctcaccgccgatcagaaatctggatctgaagataggcgagatcattgttcccgtacggaatacggcagctagcggcgtcactatccacgatgcaatgaccgcgatcttcaagaagaagaagaaggtggcggacgaagatttgaaagacggtccttacctcaagggcttcgagtggccaattctcagccccggttgggaggaagacgcattgaaggccgccaagagcaaaggcgcgaaactctcaccggaagacctagagaaggcaatagacgaggagaaagcgaagatatggggaacgctcatcgtgcacacatctgctacagcagaaaccaacgtcggtggcggtaagaagaagaagaagcaggccgagtaaatcgatgcctcgcacatcaatccagcttccctagactctgttcatagctccccacttcgtgtttactatccgagtctagtctgctgtgtatcagagggcgaccaacatattagcagcgccgtctgaattgggaacttgttgcggttctcactgatgcgcaatcagcttcacgctggcaaatactacgtcgctcttatcaatgaggactaatgcgcaaaagattgtgtaacacatcgtgaatggtacacagcggactcaatcttcttgatttgctgcctagccgtgagccaatttgatcgacgacactttcccaactacgactggaaattttctgttctagtcacggctagcagcatctgtaaaatacgtacatgctacattactgatcatgcaaccactctctcaatgaggcaacgttgtcgctcttatcattcgtacggcgactcgcctgggcgcatagtggtgtcgggatatgagcatggggggcagtagctgatgcacatttcaaatttgcagtacacccattcgcatgtagctaagttacggcagctttggattcgagtgcattgatgaatgtagtcgcgtagcagctgccagacgtactactgtagcatcgtcaggccaaacaacaagcctgccga

SEQ ID NO: 30093 - DNA, 336 bp, Muscodor strobelii
  misc_feature: SGI cDNA ID NO. 570346
  misc_feature: Encodes the peptide sequence at SEQ ID NO 30094
atgtcagatcaacagaacaagaaccaaggcggtctcctgggcgggctcgtcggcggcgtcgacaacattctttcaggcggcgacaaagctcaaggccaaggcggcttgcttggcggtctgaatagtaccgtaggaaagacgacggaaggtctgggaagtactttgaacaagacgactgagggtgttggcaatacgctcggcgaaacgacacagggcgttagcaacatcgccggctcggctaccgacgcggccggaggaacggcgaagaatcttactggtactgtggacaatacggtgaaaggtgtagggggcacaggacagcagcagaccaaataa

SEQ ID NO: 30094 - protein, 111 aa, Muscodor strobelii
  misc_feature: SGI Peptide ID NO. 570346
MSDQQNKNQGGLLGGLVGGVDNILSGGDKAQGQGGLLGGLNSTVGKTTEGLGSTLNKTTEGVGNTLGETTQGVSNIAGSATDAAGGTAKNLTGTVDNTVKGVGGTGQQQTK

SEQ ID NO: 30095 - DNA, 1776 bp, Muscodor strobelii
  misc_feature: SGI cDNA ID NO. 570347
  misc_feature: Encodes the peptide sequence at SEQ ID NO 30096
atgccgcgaaaattgttactctgttttattcatggtttcaaaggagacgatgacacattccgcacatttcccgacgatttgaaaacccaagtcgcaaaacaactaccggaagatcatgtggaatctgtcgtataccccaagtacgatacgaaaggcgagcttggtcaatgtaccgaagcctttttgtcatggcttaaagagagggtcatggacatgcgcaaggggcattgcgagaatccatggccgccaaatgatcgtgaggtcggcgtcattctagttgctcattctatgggcgggtttgtggcatctgatgcactattcctcattttgaacgagaggattgcgaataagcaggagtcgtcgccaatcttccccttaatacaggggatactgacttttgatacgccttttaatggtctcgcaagatcgatgttcgtatacggcgccttttcgaattaccagaaagttagcagtgttttcaacgtgatgacagcgttatctgctgcagccccaagcgcgctttcgaaaagcgcattcaagaggacggcagcgaaactaccctcgacgaaatcttcaaattcagcatggaagggatggcagctgcttgctgttcgaaccggcactgttggcgcgattgccgcaggaggtgttgcggcttacattcaccgtcagcagatcatggatggcatgcgaagtatgcgtaatctcaacaaggaatcggtgaaagaaggataccaacaaagtgtcgatacgatcagccaaggactagcgtatataaatcgcggcaatgtggggaggtccttcgaatatctttctgaccacttcacgttcgtaggaacgctcatgaaacagcaagagttatgccgaagactggaacgtatggccctcctcaaaggcattggtattcacgacttctatacgtcgcttggtgagaatggcatgtggagcggtggatatttcgtgcctgaacgcacattttgcgcggttccttccaaagacgaacaagcttgcccgctcttctcacgaagaattatcaaaaacgtcgaagacgaggttcaagcccatatgagcatgttcatacgagacaagaatgacgaatacgaacagatgacacaagaagcaactaatcttgtcattcgctggttccatgatgattctgatattgtggacgaccctaagttcatcgaacccccgcctccggagcctgtcgaagagccagtcactactacggaagaagggaaagagatacccaaaacagatggcattgctgtccatgctagttcttcttcggagaagctagtctctccagaggaagaacacgaactacctgacgagtcaccccttgacattaccgccgttgctgcagtcgtgccactacccgatgatgatgaggaagcaccgcaacttgcagatgcaagtggcgaaaaagatagcacgtacatgaggtatcttattggcattgctcagcaagctggcacaggtgtcaaatcatatgtaccaacgaaaatgcctgagatgccgtctggtcctagctttaaatcctttgtacctaggcagatgccccaattaccatcaatgccatccatttcgcggccgacggtgggcatgttcagccgaaaacagcaaccagatgtcggcgatcctgaccagtctacgaaggcgaccgactctggagttacggagcctgtggaaggacgtgattctaatggtcaaggcgaaggacagccacaagagcaacctggcgtacaagaatcgccgtcagtagccgtgtcctag

SEQ ID NO: 30096 - protein, 591 aa, Muscodor strobelii
  misc_feature: SGI Peptide ID NO. 570347
  misc_feature (1)..(581): NCBI GI: 171680956 Blast Desc: protein product [Podospora anserina] gi|170940436|emb|CAP65663.1| protein product [Podospora anserina]
  misc_feature (3)..(563): NCBI GI: 85090655 Blast Desc: NCU09526 [Neurospora crassa OR74A] gi|28919890|gb|EAA29285.1| [Neurospora crassa OR74A]
  misc_feature (1)..(587): NCBI GI: 256734165 Blast Desc: NECHADRAFT_36628 [Nectria haematococca mpVI 77-13-4]
  misc_feature (1)..(579): NCBI GI: 145606745 Blast Desc: MGG_09435 [Magnaporthe grisea 70-15] gi|145014407|gb|EDJ98975.1| MGG_09435 [Magnaporthe grisea 70-15]
  misc_feature (15)..(589): NCBI GI: 46129274 Blast Desc: FG08822.1 [Gibberella zeae PH-1]
  misc_feature (1)..(514): NCBI GI: 156065513 Blast Desc: SS1G_00767 [Sclerotinia sclerotiorum 1980] gi|154691626|gb|EDN91364.1| SS1G_00767 [Sclerotinia sclerotiorum 1980]
  misc_feature (70)..(374): NCBI GI: 116191439 Blast Desc: CHGG_05437 [Chaetomium globosum CBS 148.51] gi|88181350|gb|EAQ88818.1| CHGG_05437 [Chaetomium globosum CBS 148.51]
  misc_feature (171)..(541): NCBI GI: 261354358 Blast Desc: conserved [Verticillium albo-atrum VaMs.102]
  misc_feature (1)..(407): NCBI GI: 46125855 Blast Desc: FG07305.1 [Gibberella zeae PH-1]
  misc_feature (1)..(385): NCBI GI: 145602368 Blast Desc: MGG_12961 [Magnaporthe grisea 70-15] gi|145010791|gb|EDJ95447.1| MGG_12961 [Magnaporthe grisea 70-15]
MPRKLLLCFIHGFKGDDDTFRTFPDDLKTQVAKQLPEDHVESVVYPKYDTKGELGQCTEAFLSWLKERVMDMRKGHCENPWPPNDREVGVILVAHSMGGFVASDALFLILNERIANKQESSPIFPLIQGILTFDTPFNGLARSMFVYGAFSNYQKVSSVFNVMTALSAAAPSALSKSAFKRTAAKLPSTKSSNSAWKGWQLLAVRTGTVGAIAAGGVAAYIHRQQIMDGMRSMRNLNKESVKEGYQQSVDTISQGLAYINRGNVGRSFEYLSDHFTFVGTLMKQQELCRRLERMALLKGIGIHDFYTSLGENGMWSGGYFVPERTFCAVPSKDEQACPLFSRRIIKNVEDEVQAHMSMFIRDKNDEYEQMTQEATNLVIRWFHDDSDIVDDPKFIEPPPPEPVEEPVTTTEEGKEIPKTDGIAVHASSSSEKLVSPEEEHELPDESPLDITAVAAVVPLPDDDEEAPQLADASGEKDSTYMRYLIGIAQQAGTGVKSYVPTKMPEMPSGPSFKSFVPRQMPQLPSMPSISRPTVGMFSRKQQPDVGDPDQSTKATDSGVTEPVEGRDSNGQGEGQPQEQPGVQESPSVAVS

SEQ ID NO: 30097 - DNA, 4035 bp, Muscodor strobelii
  misc_feature: SGI cDNA ID NO. 570348
  misc_feature: Encodes the peptide sequence at SEQ ID NO 30098
atgtccggcatcgcagaatcggccaagggcctgaccagcccacttggcaaagctacatcacaggcaggtcaatcagagaaagctccccaaaccccaaaaaaccaggaagcaccgcgatccatgccagatacgtcggagtcgaatctagaaggctccaattctggcgataatgaaggagagatggtcccggcagcagggcgtattaatgaaaagggagaagtcatagacgacgatgggaatgccatcggcaaagtagtaagcggcgaagcatccaaatttggcggtttcattgtcacacaggaaggtgatattctagataatgacggaagcattgtcggtaaagctgagccgctagacgatgtggcctcagaactcaactacacaacaaaatccaccagagatgaaggaggtagcagacttggtggagtaggcagtaccattggtggggctgccaaatccgctggctctgccgctggtggtcttaccagtggtctgggtaaggctgcctcgggtgtcactggtgccgttggtgacacagccaagggtgccactgacacagtcggggaagccaccggaacaggcgatgctaccgatactgtaggtgatactgtcaaaggtgctaccgataccgctggcgacgctgcagagaacgttactggcgctgctggtgagaccacggaagatgctacaggcgaagtcggcgagactgccgaaggcgtcaatgacaccactggcgaggtcaccgaaggcgttaaggatactgctggtgacaccgtcgaaggtgctcaagatactgtcgacgagaccgctgaaggtgtcaaggatactgctggcgaagccgcggagaacccgacagacgctgtcggcgaggcgggtgaagatgtcaccggccaagtcgaagaagctgccgagggcgctccatccgtcgacgtccctacagtcgaccagaaggacatggctgagggtgtgaccgaacaacaaccccttggctccaaagctgacttggactccaaaattcaagaggtcaaggacaaggccgaagaagcaccctcggccggaatcccatctctttcaccttcactggcccagaaagtcgtggctatgttcgaaggtccctttactgtcgcagacggtggcaaggttcacgataaggatggcaaggttatcggaaagctcgcggcagagtcagatatccaagatcttgtgggcaagcaagtcaatggcatagatcaagagggctcaattgcacagaagatcaaggaacaattccccgaggcagctgaacattttgatgcaattgagaaagcccaagaagcagcacctattcaaatcccgtcttttgctccaacagttgcaggcaaagtcattgctatgttcgagggccctttcaacatcgccgaagatggtcaggtcacagatcagaatggcaaggttctcggtaagcttgctgagggacaaaactacgaacatcttgttggcaaagacatcaaagggatcgacgagcgcggccagctactaggtgacaacgagacagttcttggcaaggtcgagcttgtacctgagggtacaatcgtcgagcgaatcaaggaagaagttcccgaagccgccgaacgcctcgatgccattgacgctgccaagcagcaagcagaggaacaggcagaagaacaaaccgaaggtctcgaattgcctcccatctcaatccttgagggcttgaagattaacaaagccggaaatgtcgttgacagcgacggcaaccctcttggaaaggtcaagagtggtgagctgaagaaacttgttggcaaatcacccgacaagaatggtaaagtctgggacggcagcggcaacgtcattggtgaagtcgaagttctcccagaggccgtccaaaacctttcgtcaccctttgaagatttcccagatgccaccgtcgacaagtttggtaaggtcatttttgagggccgccaggtcggtgtcgtcgtcggcgacgatttccagaagttgatcggcaagaaggtcgacgccgacggcgatattctcgacaagaacggtaatgttatcggtcacgcagagcgccaagaggccgaagaggagccagagcctgaagaggaagccatcgactactccatgcttcgtgacaagaaggtcaacaagcttggtaacgtagtggacgacaagggtcaagtctggggtcatgttgttcagggaatcctgaagcacctcatcggcaagaaagttggcgaggaaggtcaaatcttcaacgacgctggcaaggtaatcggcaaatgtgagcccattcctgagaacgagcgcgaggaagccagggaacccgctccttttgaggatttccccgatgccgttgtcggtgagaacggtgctgtcatgtttaacggcgaacaagtcggtatcgtcgtcgaaggtgatgctaagaagctcaaggggaagaccgtcgatgctgacggagatattcttgaccgagctggcaacacactcggccgtgctgagcgttgggaagcacctgaagaggagcctgagcccgaaatcgacatgtctgcattggccggcaagcgtatcaacaaagctggaaatgctgtcgacaagcatggagatatctatggtcgcgtgatcgagggtagcctcgctcggcttgttggcaagatgtgcgacaagcaaggcttcatccgcaatgaaggcggtgatgttatcggcaagtgtgaactcattccagaggctgaacgtgagggcatgaaagaaggcccattctccgagctttcgggttgcactgttaccaaagaaggcaaagtcgtcactcccggtggtgatgtcgtcggtcgcctcgtcgagggcgatccaaaagcccttgctggccgtcccgttgatgacgatggtgacattctagacaagaacggtaacactcttggccgcgctgaacgctgggaagaacccgaggttgagaaggaagtcaaccccatggccggcagaagagtcaatcgtgaaggaaatgtcatggatgacaatggtgacattatgggtaagctcacatccggtgagcttcagcaatgtgccggtaagaagatcgatgatgatggcgatgttgttgaccagaagggcacatccatcggacacgtctcacttcttgaagaaattcctaaggacgagagagaaatcagtcccatgtgcggccgtagagtcaaccgtgagggtaacgttgtcgacgagaatggtgacctgatgggtaaactcacttctggtgacctcggccagtgcattggcaagccaatcgacgaagatggtgatgtcgtcgaccaaaagggtaacagacttggacactgttctttgttggctgagattcctgaagaggagcctgagcccgagcctgaacccgagccgactgagacggacgaggaacgtgaggctcgtctacagctcgagcaagatcgcaaaattgccaaccagatctcttactgtatcgagcaatcacttgataagatcaagccaatttgcagaatgattgttgaccgtatcaacgccgaagaggccaagaaagaggaggatcgtgacgaggaggaacttatcaagcaagtccgtcctctcattgaagagggtggaaagatcctcactgaagcaaacggtgttatccgtggactcgaccctgacggtcgtatttccgcgaacgccaagggccgcgccgggtctcgtgaagctacacctgaagagtatcgccttgctgagctgctgaaggagctcactggtaccgtcactgagacgatcgagaatgctaagcgcaaactcgaaaatctacctaaggccaagaagggaatcaaccctctctggggtctcctgtctgagcctctgttccagatcatcgctgcagtcggtttgttgctcagcggcgtcttgggtctggttggcaagctactcaatggccttggccttggcggtttggtcaacaacttgctgggtggccttggtctcactaaggtccttgatgggctgggacttggtagtgtccttgcaccgatcaccggcaagaagaagtag

SEQ ID NO: 30098 - protein, 1344 aa, Muscodor strobelii
  misc_feature: SGI Peptide ID NO. 570348
  misc_feature (151)..(1047): NCBI GI: 154320151 Blast Desc: BC1G_02056 [Botryotinia fuckeliana B05.10] gi|150854795|gb|EDN29987.1| BC1G_02056 [Botryotinia fuckeliana B05.10]
  misc_feature (375)..(1047): NCBI GI: 156065511 Blast Desc: SS1G_00766 [Sclerotinia sclerotiorum 1980] gi|154691625|gb|EDN91363.1| SS1G_00766 [Sclerotinia sclerotiorum 1980]
  misc_feature (57)..(1289): NCBI GI: 46109622 Blast Desc: FG01693.1 [Gibberella zeae PH-1]
  misc_feature (464)..(1344): NCBI GI: 256730701 Blast Desc: NECHADRAFT_74068 [Nectria haematococca mpVI 77-13-4]
  misc_feature (366)..(1044): NCBI GI: 256730701 Blast Desc: NECHADRAFT_74068 [Nectria haematococca mpVI 77-13-4]
  misc_feature (151)..(1289): NCBI GI: 242799629 Blast Desc: LEA domain protein [Talaromyces stipitatus ATCC 10500] gi|218716765|gb|EED16186.1| LEA domain protein [Talaromyces stipitatus ATCC 10500]
  misc_feature (373)..(1289): NCBI GI: 119484526 Blast Desc: LEA domain protein [Neosartorya fischeri NRRL 181] gi|119410198|gb|EAW20145.1| LEA domain protein [Neosartorya fischeri NRRL 181]
  misc_feature (702)..(1047): NCBI GI: 85108877 Blast Desc: NCU07981 [Neurospora crassa OR74A] gi|28924262|gb|EAA33415.1| [Neurospora crassa OR74A]
  misc_feature (702)..(1335): NCBI GI: 171688326 Blast Desc: protein product [Podospora anserina] gi|170944125|emb|CAP70235.1| protein product [Podospora anserina]
  misc_feature (516)..(1289): NCBI GI: 145247688 Blast Desc: An12g10470 [Aspergillus niger] gi|134080834|emb|CAK41394.1| protein product [Aspergillus niger]
MSGIAESAKGLTSPLGKATSQAGQSEKAPQTPKNQEAPRSMPDTSESNLEGSNSGDNEGEMVPAAGRINEKGEVIDDDGNAIGKVVSGEASKFGGFIVTQEGDILDNDGSIVGKAEPLDDVASELNYTTKSTRDEGGSRLGGVGSTIGGAAKSAGSAAGGLTSGLGKAASGVTGAVGDTAKGATDTVGEATGTGDATDTVGDTVKGATDTAGDAAENVTGAAGETTEDATGEVGETAEGVNDTTGEVTEGVKDTAGDTVEGAQDTVDETAEGVKDTAGEAAENPTDAVGEAGEDVTGQVEEAAEGAPSVDVPTVDQKDMAEGVTEQQPLGSKADLDSKIQEVKDKAEEAPSAGIPSLSPSLAQKVVAMFEGPFTVADGGKVHDKDGKVIGKLAAESDIQDLVGKQVNGIDQEGSIAQKIKEQFPEAAEHFDAIEKAQEAAPIQIPSFAPTVAGKVIAMFEGPFNIAEDGQVTDQNGKVLGKLAEGQNYEHLVGKDIKGIDERGQLLGDNETVLGKVELVPEGTIVERIKEEVPEAAERLDAIDAAKQQAEEQAEEQTEGLELPPISILEGLKINKAGNVVDSDGNPLGKVKSGELKKLVGKSPDKNGKVWDGSGNVIGEVEVLPEAVQNLSSPFEDFPDATVDKFGKVIFEGRQVGVVVGDDFQKLIGKKVDADGDILDKNGNVIGHAERQEAEEEPEPEEEAIDYSMLRDKKVNKLGNVVDDKGQVWGHVVQGILKHLIGKKVGEEGQIFNDAGKVIGKCEPIPENEREEAREPAPFEDFPDAVVGENGAVMFNGEQVGIVVEGDAKKLKGKTVDADGDILDRAGNTLGRAERWEAPEEEPEPEIDMSALAGKRINKAGNAVDKHGDIYGRVIEGSLARLVGKMCDKQGFIRNEGGDVIGKCELIPEAEREGMKEGPFSELSGCTVTKEGKVVTPGGDVVGRLVEGDPKALAGRPVDDDGDILDKNGNTLGRAERWEEPEVEKEVNPMAGRRVNREGNVMDDNGDIMGKLTSGELQQCAGKKIDDDGDVVDQKGTSIGHVSLLEEIPKDEREISPMCGRRVNREGNVVDENGDLMGKLTSGDLGQCIGKPIDEDGDVVDQKGNRLGHCSLLAEIPEEEPEPEPEPEPTETDEEREARLQLEQDRKIANQISYCIEQSLDKIKPICRMIVDRINAEEAKKEEDRDEEELIKQVRPLIEEGGKILTEANGVIRGLDPDGRISANAKGRAGSREATPEEYRLAELLKELTGTVTETIENAKRKLENLPKAKKGINPLWGLLSEPLFQIIAAVGLLLSGVLGLVGKLLNGLGLGGLVNNLLGGLGLTKVLDGLGLGSVLAPITGKKK

SEQ ID NO: 30099 - DNA, 4769 bp, Muscodor strobelii
  misc_feature: SGI EST ID NO. CUFF.71289.0
  misc_feature: Variant of the nucleotide sequence at SEQ ID NO 30097
gttcagcatgggttccatgctgttatcctacaatgacgttctagacttgatgttctgagagctcttcaggtcggcatgacgtcgaaagcaatatgcacaaggcccaaatctgcggggagagctagaataccatgctgttctatgtaggagacggccgtgacgctcgtagtgtgacgtatgctgagatatatcacgaacagcttcctcggtgaatacaatctaagtttatatatgaaaacagcgtgtggcttttactctggaatatcttcaatctcatgtcccatcaacactcctctaccaatcaagtaatccaaccacaaaccaataacacattttccattaagacttctgcacacacagagactattaccacagatcaaaaccctgtttctattatccatcccgccgcaatgtccggcatcgcagaatcggccaagggcctgaccagcccacttggcaaagctacatcacaggcaggtcaatcagagaaagctccccaaaccccaaaaaaccaggaagcaccgcgatccatgccagatacgtcggagtcgaatctagaaggctccaattctggcgataatgaaggagagatggtcccggcagcagggcgtattaatgaaaagggagaagtcatagacgacgatgggaatgccatcggcaaagtagtaagcggcgaagcatccaaatttggcggtttcattgtcacacaggaaggtgatattctagataatgacggaagcattgtcggtaaagctgagccgctagacgatgtggcctcagaactcaactacacaacaaaatccaccagagatgaaggaggtagcagacttggtggagtaggcagtaccattggtggggctgccaaatccgctggctctgccgctggtggtcttaccagtggtctgggtaaggctgcctcgggtgtcactggtgccgttggtgacacagccaagggtgccactgacacagtcggggaagccaccggaacaggcgatgctaccgatactgtaggtgatactgtcaaaggtgctaccgataccgctggcgacgctgcagagaacgttactggcgctgctggtgagaccacggaagatgctacaggcgaagtcggcgagactgccgaaggcgtcaatgacaccactggcgaggtcaccgaaggcgttaaggatactgctggtgacaccgtcgaaggtgctcaagatactgtcgacgagaccgctgaaggtgtcaaggatactgctggcgaagccgcggagaacccgacagacgctgtcggcgaggcgggtgaagatgtcaccggccaagtcgaagaagctgccgagggcgctccatccgtcgacgtccctacagtcgaccagaaggacatggctgagggtgtgaccgaacaacaaccccttggctccaaagctgacttggactccaaaattcaagaggtcaaggacaaggccgaagaagcaccctcggccggaatcccatctctttcaccttcactggcccagaaagtcgtggctatgttcgaaggtccctttactgtcgcagacggtggcaaggttcacgataaggatggcaaggttatcggaaagctcgcggcagagtcagatatccaagatcttgtgggcaagcaagtcaatggcatagatcaagagggtaatctatcggtgagaatgatactatccttggaaaggttgacattcttcctgaaggctcaattgcacagaagatcaaggaacaattccccgaggcagctgaacattttgatgcaattgagaaagcccaagaagcagcacctattcaaatcccgtcttttgctccaacagttgcaggcaaagtcattgctatgttcgagggccctttcaacatcgccgaagatggtcaggtcacagatcagaatggcaaggttctcggtaagcttgctgagggacaaaactacgaacatcttgttggcaaagacatcaaagggatcgacgagcgcggccagctactaggtgacaacgagacagttcttggcaaggtcgagcttgtacctgagggtacaatcgtcgagcgaatcaaggaagaagttcccgaagccgccgaacgcctcgatgccattgacgctgccaagcagcaagcagaggaacaggcagaagaacaaaccgaaggtctcgaattgcctcccatctcaatccttgagggcttgaagattaacaaagccggaaatgtcgttgacagcgacggcaaccctcttggaaaggtcaagagtggtgagctgaagaaacttgttggcaaatcacccgacaagaatggtaaagtctgggacggcagcggcaacgtcattggtgaagtcgaagttctcccagaggccgtccaaaacctttcgtcaccctttgaagatttcccagatgccaccgtcgacaagtttggtaaggtcatttttgagggccgccaggtcggtgtcgtcgtcggcgacgatttccagaagttgatcggcaagaaggtcgacgccgacggcgatattctcgacaagaacggtaatgttatcggtcacgcagagcgccaagaggccgaagaggagccagagcctgaagaggaagccatcgactactccatgcttcgtgacaagaaggtcaacaagcttggtaacgtagtggacgacaagggtcaagtctggggtcatgttgttcagggaatcctgaagcacctcatcggcaagaaagttggcgaggaaggtcaaatcttcaacgacgctggcaaggtaatcggcaaatgtgagcccattcctgagaacgagcgcgaggaagccagggaacccgctccttttgaggatttccccgatgccgttgtcggtgagaacggtgctgtcatgtttaacggcgaacaagtcggtatcgtcgtcgaaggtgatgctaagaagctcaaggggaagaccgtcgatgctgacggagatattcttgaccgagctggcaacacactcggccgtgctgagcgttgggaagcacctgaagaggagcctgagcccgaaatcgacatgtctgcattggccggcaagcgtatcaacaaagctggaaatgctgtcgacaagcatggagatatctatggtcgcgtgatcgagggtagcctcgctcggcttgttggcaagatgtgcgacaagcaaggcttcatccgcaatgaaggcggtgatgttatcggcaagtgtgaactcattccagaggctgaacgtgagggcatgaaagaaggcccattctccgagctttcgggttgcactgttaccaaagaaggcaaagtcgtcactcccggtggtgatgtcgtcggtcgcctcgtcgagggcgatccaaaagcccttgctggccgtcccgttgatgacgatggtgacattctagacaagaacggtaacactcttggccgcgctgaacgctgggaagaacccgaggttgagaaggaagtcaaccccatggccggcagaagagtcaatcgtgaaggaaatgtcatggatgacaatggtgacattatgggtaagctcacatccggtgagcttcagcaatgtgccggtaagaagatcgatgatgatggcgatgttgttgaccagaagggcacatccatcggacacgtctcacttcttgaagaaattcctaaggacgagagagaaatcagtcccatgtgcggccgtagagtcaaccgtgagggtaacgttgtcgacgagaatggtgacctgatgggtaaactcacttctggtgacctcggccagtgcattggcaagccaatcgacgaagatggtgatgtcgtcgaccaaaagggtaacagacttggacactgttctttgttggctgagattcctgaagaggagcctgagcccgagcctgaacccgagccgactgagacggacgaggaacgtgaggctcgtctacagctcgagcaagatcgcaaaattgccaaccagatctcttactgtatcgagcaatcacttgataagatcaagccaatttgcagaatgattgttgaccgtatcaacgccgaagaggccaagaaagaggaggatcgtgacgaggaggaacttatcaagcaagtccgtcctctcattgaagagggtggaaagatcctcactgaagcaaacggtgttatccgtggactcgaccctgacggtcgtatttccgcgaacgccaagggccgcgccgggtctcgtgaagctacacctgaagagtatcgccttgctgagctgctgaaggagctcactggtaccgtcactgagacgatcgagaatgctaagcgcaaactcgaaaatctacctaaggccaagaagggaatcaaccctctctggggtctcctgtctgagcctctgttccagatcatcgctgcagtcggtttgttgctcagcggcgtcttgggtctggttggcaagctactcaatggccttggccttggcggtttggtcaacaacttgctgggtggccttggtctcactaaggtccttgatgggctgggacttggtagtgtccttgcaccgatcaccggcaagaagaagtagatggtcgggttatttgattctgtggtaatttgactctgatggatggtcattagtcatctttcctgtctctagtcttattgtctcttttttcgcggcgttggaatcacggtttgtaacggggcgttgatgattttatgatgaatgtttcacgacagctagcaaaagtgttctttctcatcctgtaactgtatatgtaactagctattctcctaaatcccttaataacgagttttccacaatatcaaccttcgaaccctatattgtgcac

SEQ ID NO: 30100 - DNA, 1815 bp, Muscodor strobelii
  misc_feature: SGI cDNA ID NO. 570349
  misc_feature: Reduced expression when VOC is produced
  misc_feature: Encodes the peptide sequence at SEQ ID NO 30101
atggcagacaccctctcccacgcaactccaaagaaactcttcaaggcgtctagcaagaccaaaacgcacacttccgtgaaacgcatcactccctcgaccgctagctcggtcacgaatgcgcagacgtcacgttcgcagcgtacaagccaatcgccgtcgtctgtgcgctcgactgcgtcgcagtccaccgagtcgctgcgtagagtgtccccagacgacgtcttccaatcgaccaatctagcccctctcacggactcaacagcggctgcttcaggcaagcttgcgcaatccatcggatccgacattagcgactttcgtagcggcataattgatagcgacgcattgagctacacagatacactcagtcgcagtacgggcgatcactcgccttcattgaggcatacgacgccaagcctcaaagggttctctccgagcttcaagaaaaaggtgtcgcaagccagagcagcatccaaaaggtctaccgacggtggcagagggcggcgggccaatacatcagacgaagcattgcaaaggtccacaagcaatctctcagaagcgtcttccagcgtcactgacaagcctgagccgtctattgatttgaccaaatatttccaagatcagggcaatcctgagatgagcaattttgtcacagcgttactaggtgattcccccgcaagcctttctgagataaaacgtaaggtcgccgaagttacccagttgggaccttcagaagaattatccgacggtctaaagaaaatcatggacaaaaacacgatgcagcaatcaggcgatatttcaaaaaaagccgatggggcttttcgagcgaccaaggacactctatctggagcagcacctacaaataaaattggtgagcccgacgctgccagcatctctcgcagtgcgcaacctgcagtacccaatctcagggctcgacagtctgcccaatcgccaccaacaagcgcagacggtacacaagaattcgacaatatgggtcggccggctcacattgatcgccgcatcgagattccccttcaacggccaaaaaaagtagtcgagaatcccccagaaggagatcctcgtggtgggcttggggatgtcagcgatctgccaaacaccgacgatctgcgaagcaccgatgagcttcgtagcaccgacgacctcccggaaatatacgacgggtctcaggatcctcccgaagagattttagacccgtcggtgcactcttcttccaccagcatcacacccattccaaagattccaaaaattgcgcccattgactcagcaccaccagtcaatctggagcgtctagctaagggtctaggaggccacgtcgttgacgatgttggcaacatcgttgacgagtctggaaaggttttaggccatgcaactggtgatcttccatcgatggtgggtaaaaaagtttcgaatgatggcgaaatctacggagaaagtggcgaagtcattgggtatgtctctgaaaacttcgtcaacccgcccgaacccactgaaataccaagtgaggttttgggcggtctcaaagttgatcatgaaggcaacatactggattcaaatggcaatgtcataggaaagttccaccaaaggccggagcaaaatagctcgttaccgccctttatgcaatccacacttccgaagaccgaagggaagtctaaggaggagcagaaacccaaggtcaatgcgcacacaggaggcagtccatcagatatctttctcgatgtgaagtcaactaccgacggcattcagctaactatccggataccaaccaccttttcacgaccgcccaaagaagaatcatga

SEQ ID NO: 30101 - protein, 604 aa, Muscodor strobelii
  misc_feature: SGI Peptide ID NO. 570349
  misc_feature (431)..(597): NCBI GI: 46109624 Blast Desc: FG01694.1 [Gibberella zeae PH-1]
  misc_feature (403)..(596): NCBI GI: 85108869 Blast Desc: NCU07979 [Neurospora crassa OR74A] gi|28924260|gb|EAA33413.1| [Neurospora crassa OR74A]
  misc_feature (418)..(597): NCBI GI: 256730702 Blast Desc: NECHADRAFT_18786 [Nectria haematococca mpVI 77-13-4]
  misc_feature (415)..(597): NCBI GI: 261360590 Blast Desc: conserved [Verticillium albo-atrum VaMs.102]
  misc_feature (440)..(596): NCBI GI: 39977957 Blast Desc: MGG_06863 [Magnaporthe grisea 70-15] gi|145013577|gb|EDJ98218.1| MGG_06863 [Magnaporthe grisea 70-15]
  misc_feature (409)..(532): NCBI GI: 116196842 Blast Desc: CHGG_05019 [Chaetomium globosum CBS 148.51] gi|88180932|gb|EAQ88400.1| CHGG_05019 [Chaetomium globosum CBS 148.51]
  misc_feature (395)..(531): NCBI GI: 171688328 Blast Desc: protein product [Podospora anserina] gi|170944126|emb|CAP70236.1| protein product [Podospora anserina]
  misc_feature (440)..(536): NCBI GI: 115400245 Blast Desc: [Aspergillus terreus NIH2624] gi|114191377|gb|EAU33077.1| [Aspergillus terreus NIH2624]
  misc_feature (392)..(531): NCBI GI: 145247688 Blast Desc: An12g10470 [Aspergillus niger] gi|134080834|emb|CAK41394.1| protein product [Aspergillus niger]
  misc_feature (449)..(531): NCBI GI: 46109622 Blast Desc: FG01693.1 [Gibberella zeae PH-1]
  misc_feature: Useful for introducing or modulating the production of volatile compounds
MADTLSHATPKKLFKASSKTKTHTSVKRITPSTASSVTNAQTSRSQRTSQSPSSVRSTASQSTESLRRVSPDDVFQSTNLAPLTDSTAAASGKLAQSIGSDISDFRSGIIDSDALSYTDTLSRSTGDHSPSLRHTTPSLKGFSPSFKKKVSQARAASKRSTDGGRGRRANTSDEALQRSTSNLSEASSSVTDKPEPSIDLTKYFQDQGNPEMSNFVTALLGDSPASLSEIKRKVAEVTQLGPSEELSDGLKKIMDKNTMQQSGDISKKADGAFRATKDTLSGAAPTNKIGEPDAASISRSAQPAVPNLRARQSAQSPPTSADGTQEFDNMGRPAHIDRRIEIPLQRPKKVVENPPEGDPRGGLGDVSDLPNTDDLRSTDELRSTDDLPEIYDGSQDPPEEILDPSVHSSSTSITPIPKIPKIAPIDSAPPVNLERLAKGLGGHVVDDVGNIVDESGKVLGHATGDLPSMVGKKVSNDGEIYGESGEVIGYVSENFVNPPEPTEIPSEVLGGLKVDHEGNILDSNGNVIGKFHQRPEQNSSLPPFMQSTLPKTEGKSKEEQKPKVNAHTGGSPSDIFLDVKSTTDGIQLTIRIPTTFSRPPKEES

SEQ ID NO: 30102 - DNA, 2894 bp, Muscodor strobelii
  misc_feature: SGI EST ID NO. CUFF.71214.0
  misc_feature: Variant of the nucleotide sequence at SEQ ID NO 30100
caaggattcaaggtgtagggactcacaatagtcctaaaatcaatagagcgttaccgatgacgcataggagggggaatgttaccaaaggctgaggtcaagctggtgtgcttcgatagccagagatgccgtttaccaactctcaattctgagactgtcttccttgcatttgaaacaaccgtgtaccaattatgattgtcgcaagacactgctacgtaaatgcatagcaattgccgatgaataacaactcggccatcgattctggtctcctccacgacgttatcctggtattctgcatcgtagtctctctccactctcgcgccaaccaaatctggcacattgcaacagccatggcagacaccctctcccacgcaactccaaagaaactcttcaaggcgtctagcaagaccaaaacgcacacttccgtgaaacgcatcactccctcgaccgctagctcggtcacgaatgcgcagacgtcacgttcgcagcgtacaagccaatcgccgtcgtctgtgcgctcgactgcgtcgcagtccaccgagtcgctgcgtagagtgtccccagacgacgtcttccaatcgaccaatctagcccctctcacggactcaacagcggctgcttcaggcaagcttgcgcaatccatcggatccgacattagcgactttcgtagcggcataattgatagcgacgcattgagctacacagatacactcagtcgcagtacgggcgatcactcgccttcattgaggcatacgacgccaagcctcaaagggttctctccgagcttcaagaaaaaggtgtcgcaagccagagcagcatccaaaaggtctaccgacggtggcagagggcggcgggccaatacatcagacgaagcattgcaaaggtccacaagcaatctctcagaagcgtcttccagcgtcactgacaagcctgagccgtctattgatttgaccaaatatttccaagatcagggcaatcctgagatgagcaattttgtcacagcgttactaggtgattcccccgcaagcctttctgagataaaacgtaaggtcgccgaagttacccagttgggaccttcagaagaattatccgacggtctaaagaaaatcatggacaaaaacacgatgcagcaatcaggcgatatttcaaaaaaagccgatggggcttttcgagcgaccaaggacactctatctggagcagcacctacaaataaaattggtgagcccgacgctgccagcatctctcgcagtgcgcaacctgcagtacccaatctcagggctcgacagtctgcccaatcgccaccaacaagcgcagacggtacacaagaattcgacaatatgggtcggccggctcacattgatcgccgcatcgagattccccttcaacggccaaaaaaagtagtcgagaatcccccagaaggagatcctcgtggtgggcttggggatgtcagcgatctgccaaacaccgacgatctgcgaagcaccgatgagcttcgtagcaccgacgacctcccggaaatatacgacgggtctcaggatcctcccgaagagattttagacccgtcggtgcactcttcttccaccagcatcacacccattccaaagattccaaaaattgcgcccattgactcagcaccaccagtcaatctggagcgtctagctaagggtctaggaggccacgtcgttgacgatgttggcaacatcgttgacgagtctggaaaggttttaggccatgcaactggtgatcttccatcgatggtgggtaaaaaagtttcgaatgatggcgaaatctacggagaaagtggcgaagtcattgggtatgtctctgaaaacttcgtcaacccgcccgaacccactgaaataccaagtgaggttttgggcggtctcaaagttgatcatgaaggcaacatactggattcaaatggcaatgtcataggaaagttccaccaaaggccggagcaaaatagctcgttaccgccctttatgcaatccacacttccgaagaccgaagggaagtctaaggaggagcagaaacccaaggtcaatgcgcacacaggaggcagtccatcagatatctttctcgatgtgaagtcaactaccgacggcattcagctaactatccggataccaaccaccttttcacgaccgcccaaagaagaatcatgacataaggcaggcagcgcgtcagacatcttcttggatatcaaatctactccggatggaatacaactcataatccgggtcccgaacatgtctgtacagctgcctcaagaatcattacagatactgttgtaaagttacgctaatggatggtgacgatggtgattaggaaatgtagggcattcatcacggagacttgtggcattatatgggataacaatgtaaaatgatcgtttggaattcattggtatttacactacctgtgtcgagtgccatgccgccctttgctgtcgcccggaacttgaagtataggtccaggattgtcatcattactgtggggtaaaactggaacgaagcagctgcactggcaaggttgctgctatggaatatcgtcagcgaagacttcactttgctacaagctctatcgtttggctgatcggttctgtgattatcagttgtgatacttctattctttaataattattgtgacagccaccgtcgagagactttttagccacaccgatcagcggtattctccacagtgcaggtgatatctaccatccggcgggttcgtgaggaccgtatgcattcacccccgagatcacactaagatcacactacgacgaatgatgctccctgcagggcatgtatcatttctttcatcgctttttcgcattttggcacaggttgcaatagatttcagtgccatttatgacgttcgtctgatgtcgatcttcg

SEQ ID NO: 30103 - DNA, 555 bp, Muscodor strobelii
  misc_feature: SGI cDNA ID NO. 570350
  misc_feature: Reduced expression when VOC is produced
  misc_feature: Encodes the peptide sequence at SEQ ID NO 30104
atgtctactaatgtagaggataccacacggcaggaaagcgacgttgagcaagaccaacgagatggtgtcgaagaccaacccgaagagcagcccagtgaagaagagccctctccaaataatgtagaggatgcccagaaagaagaaaaagaggacgatgaagaaccgaagcccgaacttcaacaacgctcagattctagggacgcgaagaagcccaagcaacgagtagagtcccaaaaaggctcgcgccgcccgcggcgtcgtcgtaaccagccatcatacttggaatccgatcgcgaaagtgtgcaggaaaaacaggtggccccgcggcgaccacgccaacagcctcaataccagcagcagcagtatcagcagcagatgcaacaacaacagatgcaaatgcagatgcaacagcaacagcaacaacaaatgcagcaatcacagaagaaggatagcggcagcggcaagctgtctctacaccttgatctgaatcttgaagttgaggtcactctgaaagccagacttcatggtgatctgacactttcacttttggaatag

SEQ ID NO: 30104 - protein, 184 aa, Muscodor strobelii
  misc_feature: SGI Peptide ID NO. 570350
  misc_feature (151)..(183): NCBI GI: 256730496 Blast Desc: NECHADRAFT_98506 [Nectria haematococca mpVI 77-13-4]
  misc_feature (133)..(183): NCBI GI: 119497507 Blast Desc: NFIA_023260 [Neosartorya fischeri NRRL 181] gi|119413674|gb|EAW23615.1| conserved [Neosartorya fischeri NRRL 181]
  misc_feature (87)..(183): NCBI GI: 46109630 Blast Desc: FG01697.1 [Gibberella zeae PH-1]
  misc_feature (153)..(183): NCBI GI: 46136619 Blast Desc: FG09825.1 [Gibberella zeae PH-1]
  misc_feature (139)..(183): NCBI GI: 121703461 Blast Desc: conserved [Aspergillus clavatus NRRL 1] gi|119398138|gb|EAW08569.1| conserved [Aspergillus clavatus NRRL 1]
  misc_feature (50)..(183): NCBI GI: 171688334 Blast Desc: protein product [Podospora anserina] gi|170944129|emb|CAP70239.1| protein product [Podospora anserina]
  misc_feature (146)..(183): NCBI GI: 154320145 Blast Desc: [Botryotinia fuckeliana B05.10] gi|150854792|gb|EDN29984.1| [Botryotinia fuckeliana B05.10]
  misc_feature: Useful for introducing or modulating the production of volatile compounds
MSTNVEDTTRQESDVEQDQRDGVEDQPEEQPSEEEPSPNNVEDAQKEEKEDDEEPKPELQQRSDSRDAKKPKQRVESQKGSRRPRRRRNQPSYLESDRESVQEKQVAPRRPRQQPQYQQQQYQQQMQQQQMQMQMQQQQQQQMQQSQKKDSGSGKLSLHLDLNLEVEVTLKARLHGDLTLSLLE

SEQ ID NO: 30105 - DNA, 1883 bp, Muscodor strobelii
  misc_feature: SGI EST ID NO. CUFF.71382.1
  misc_feature: Variant of the nucleotide sequence at SEQ ID NO 30103
gctgacatgggcaaattggggaggattatggcgtcacagccagccatagagttacaagtttaaacgaagaaaagccaactttcgattcatggctatgcagagtagaaagatgagacgcgaacactaaaactaatgatggcccacgcgtatgtaggaatcgatgattttgtgggctagattcatcatcagctaaacaattgtaataccacaatctcgcgccatctgagttgttacatactggagattcaaagatgtctactaatgtagaggataccacacggcaggaaagcgacgttgagcaagaccaacgagatggtgtcgaagaccaacccgaagagcagcccagtgaagaagagccctctccaaataatgtagaggatgcccagaaagaagaaaaagaggacgatgaagaaccgaagcccgaacttcaacaacgctcagattctagggacgcgaagaagcccaagcaacgagtagagtcccaaaaaggctcgcgccgcccgcggcgtcgtcgtaaccagccatcatacttggaatccgatcgcgaaagtgtgcaggaaaaacaggtggccccgcggcgaccacgccaacagcctcaataccagcagcagcagtatcagcagcagatgcaacaacaacagatgcaaatgcagatgcaacagcaacagcaacaacaaatgcagcaatcacagaagaaggatagcggcagcggcaagctgtctctacaccttgatctgaatcttgaagttgaggtcactctgaaagccagacttcatggtgatctgacactttcactttttggctagagagctgttcattcttatctcaacaatagaaaaatgcttgcgagaagcctagaatatgttgtcgagatggtcctcggattgttcaattcgaactgtatcataattcttacgatatcgctgctttaatcggcattttgttggcaccaaggcgatgggcgtttgggactacatagggcatttgggagtatcgaagttagagagatcacttttaatgccataatgatcactgccactttgctatttgaatccacaggccaccaagtactttttgaaaaagcgaaaacacccgaggcgaatatgaagggattcgagtaatcacctgcactcgcaacagcagtgttggagacaaatgtttcatgcgccaacccactaaacttccgttacactattacgccgttatacttgtgaccacaagctcctgggcttctttccaacgttctgcttctcaaaagtctgattggcgcaatcaaatgagaatataattcaggctatctactaatgactgaatcgtaaagaaccggagttattgcacaatgtcaggatggatgtcggcaacgaggctcagattgaagtaacgctgtcggaagacagaaccgagtcagaatcagaacattacatgtagttggcctcattctcggtcgaggacaacctccgtttgatctaatgacaagtcagatagacttgaactttgagtcgagtcttgctgcatgcatccccctcgagctccgtctgttatcgaacagatccgcgtcacctgctttgtgacagaactttccattgccgtggttcgttgacctcatgcccatgcccatctcttcgcaaacgccccaacgaccaaatctgtgccgtctgtcaactttcaacccgctaaggacctcctgaacaacatgtctcacgtttttaacgccaatatcgagcagcgcgcattgagacttctcattttatgggacagttggtctcaaacattctatgtagcaaagtgcattgcacaataaacccagtgagaatttactttagttatctctgggttatccacgagacctagcttagaaatgtgcgtgcaacactccagtgtgg

SEQ ID NO: 30106 - DNA, 555 bp, Muscodor strobelii
  misc_feature: SGI cDNA ID NO. 570351
  misc_feature: Reduced expression when VOC is produced
  misc_feature: Encodes the peptide sequence at SEQ ID NO 30107
atgtctactaatgtagaggataccacacggcaggaaagcgacgttgagcaagaccaacgagatggtgtcgaagaccaacccgaagagcagcccagtgaagaagagccctctccaaataatgtagaggatgcccagaaagaagaaaaagaggacgatgaagaaccgaagcccgaacttcaacaacgctcagattctagggacgcgaagaagcccaagcaacgagtagagtcccaaaaaggctcgcgccgcccgcggcgtcgtcgtaaccagccatcatacttggaatccgatcgcgaaagtgtgcaggaaaaacaggtggccccgcggcgaccacgccaacagcctcaataccagcagcagcagtatcagcagcagatgcaacaacaacagatgcaaatgcagatgcaacagcaacagcaacaacaaatgcagcaatcacagaagaaggatagcggcagcggcaagctgtctctacaccttgatctgaatcttgaagttgaggtcactctgaaagccagacttcatggtgatctgacactttcactttttggctag

SEQ ID NO: 30107 - protein, 184 aa, Muscodor strobelii
  misc_feature: SGI Peptide ID NO. 570351
  misc_feature (151)..(183): NCBI GI: 256730496 Blast Desc: NECHADRAFT_98506 [Nectria haematococca mpVI 77-13-4]
  misc_feature (133)..(183): NCBI GI: 119497507 Blast Desc: NFIA_023260 [Neosartorya fischeri NRRL 181] gi|119413674|gb|EAW23615.1| conserved [Neosartorya fischeri NRRL 181]
  misc_feature (87)..(183): NCBI GI: 46109630 Blast Desc: FG01697.1 [Gibberella zeae PH-1]
  misc_feature (153)..(184): NCBI GI: 46136619 Blast Desc: FG09825.1 [Gibberella zeae PH-1]
  misc_feature (146)..(183): NCBI GI: 154320145 Blast Desc: [Botryotinia fuckeliana B05.10] gi|150854792|gb|EDN29984.1| [Botryotinia fuckeliana B05.10]
  misc_feature (139)..(183): NCBI GI: 121703461 Blast Desc: conserved [Aspergillus clavatus NRRL 1] gi|119398138|gb|EAW08569.1| conserved [Aspergillus clavatus NRRL 1]
  misc_feature (50)..(183): NCBI GI: 171688334 Blast Desc: protein product [Podospora anserina] gi|170944129|emb|CAP70239.1| protein product [Podospora anserina]
  misc_feature: Useful for introducing or modulating the production of volatile compounds
MSTNVEDTTRQESDVEQDQRDGVEDQPEEQPSEEEPSPNNVEDAQKEEKEDDEEPKPELQQRSDSRDAKKPKQRVESQKGSRRPRRRRNQPSYLESDRESVQEKQVAPRRPRQQPQYQQQQYQQQMQQQQMQMQMQQQQQQQMQQSQKKDSGSGKLSLHLDLNLEVEVTLKARLHGDLTLSLFG

SEQ ID NO: 30108 - DNA, 1883 bp, Muscodor strobelii; identical to SEQ ID NO: 30105
  misc_feature: SGI EST ID NO. CUFF.71382.1
  misc_feature: Variant of the nucleotide sequence at SEQ ID NO 30106

SEQ ID NO: 30109 - DNA, 606 bp, Muscodor strobelii
  misc_feature: SGI cDNA ID NO. 570352
  misc_feature: Encodes the peptide sequence at SEQ ID NO 30110
atggccctctccagtttggggttgttgactatcggcgcaattcccacagtcattggggttgctgaggctatcgatgcacagaagaagcagaatgcacaagcaaaggagagaattaagtttaacctgacagccaaattttcacacgatggcgagtcgccgccacagactgcttatgtcatcttcaaagataataagctctatctagatcatccgtctagccccgcagcgggctatcgattcaacggtttttacttcggctatccaggtcctgaggagtaccaaggtcttgttgcacctattgcagatgatcctccaatgctcaactggatctacgctgataaagacacgggtttgctacgccatggaagtcgaaaagacacgataggccatatcataggaccgtggagttggactgaagacgaggagtttttgattcttgaaggcgagaaatttttcgccgcggttcaaaacgacgatggcacgtggtgtgcctactacgacaaggaaggcgacctgcacgagaaattggcggatagagacgtggtcgagattgagcttcatagagagttacaattaggtgtatctagtcgaatgacaagagactaa

SEQ ID NO: 30110 - protein, 201 aa, Muscodor strobelii
  misc_feature: SGI Peptide ID NO. 570352
  misc_feature (6)..(169): NCBI GI: 85108860 Blast Desc: NCU07977 [Neurospora crassa OR74A] gi|28924258|gb|EAA33411.1| [Neurospora crassa OR74A]
  misc_feature (3)..(149): NCBI GI: 39977963 Blast Desc: MGG_06866 [Magnaporthe grisea 70-15] gi|145013575|gb|EDJ98216.1| MGG_06866 [Magnaporthe grisea 70-15]
  misc_feature (6)..(200): NCBI GI: 171688332 Blast Desc: protein product [Podospora anserina] gi|170944128|emb|CAP70238.1| protein product [Podospora anserina]
  misc_feature (5)..(199): NCBI GI: 156065503 Blast Desc: SS1G_00762 [Sclerotinia sclerotiorum 1980] gi|154691621|gb|EDN91359.1| SS1G_00762 [Sclerotinia sclerotiorum 1980]
  misc_feature (5)..(199): NCBI GI: 154320143 Blast Desc: BC1G_02052 [Botryotinia fuckeliana B05.10] gi|150854791|gb|EDN29983.1| BC1G_02052 [Botryotinia fuckeliana B05.10]
  misc_feature (6)..(200): NCBI GI: 46109628 Blast Desc: FG01696.1 [Gibberella zeae PH-1]
  misc_feature (6)..(167): NCBI GI: 256730704 Blast Desc: NECHADRAFT_65059 [Nectria haematococca mpVI 77-13-4]
  misc_feature (6)..(171): NCBI GI: 70996482 Blast Desc: conserved [Aspergillus fumigatus Af293] gi|66850631|gb|EAL90958.1| conserved [Aspergillus fumigatus Af293] gi|159131730|gb|EDP56843.1| conserved [Aspergillus A1163]
  misc_feature (6)..(171): NCBI GI: 119494473 Blast Desc: NFIA_009140 [Neosartorya fischeri NRRL 181] gi|119412294|gb|EAW22235.1| conserved [Neosartorya fischeri NRRL 181]
  misc_feature (6)..(171): NCBI GI: 238483995 Blast Desc: conserved [Aspergillus flavus NRRL3357] gi|220701286|gb|EED57624.1| conserved [Aspergillus flavus NRRL3357]
MALSSLGLLTIGAIPTVIGVAEAIDAQKKQNAQAKERIKFNLTAKFSHDGESPPQTAYVIFKDNKLYLDHPSSPAAGYRFNGFYFGYPGPEEYQGLVAPIADDPPMLNWIYADKDTGLLRHGSRKDTIGHIIGPWSWTEDEEFLILEGEKFFAAVQNDDGTWCAYYDKEGDLHEKLADRDVVEIELHRELQLGVSSRMTRD

SEQ ID NO: 30111 - DNA, 914 bp, Muscodor strobelii
  misc_feature: SGI EST ID NO. CUFF.71384.0
  misc_feature: Variant of the nucleotide sequence at SEQ ID NO 30109
ctttcagacatcgcgacaatcttggctacacgcgctggaagttggatttttgcgctgcgcgattacgaccactgccccagggattgacacgtgaatacatcctcggcttctctccttaccgcatacaagtcctccaaactgatagaacgcgaggtcgcgctcgagtcctggtggggttcgtcgccccaagtatctgcagcccatggccctctccagtttggggttgttgactatcggcgcaattcccacagtcattggggttgctgaggctatcgatgcacagaagaagcagaatgcacaagcaaaggagagaattaagtttaacctgacagccaaattttcacacgatggcgagtcgccgccacagactgcttatgtcatcttcaaagataataagctctatctagatcatccgtctagccccgcagcgggctatcgattcaacggtttttacttcggctatccaggtcctgaggagtaccaaggtcttgttgcacctattgcagatgatcctccaatgctcaactggatctacgctgataaagacacgggtttgctacgccatggaagtcgaaaagacacgataggccatatcataggaccgtggagttggactgaagacgaggagtttttgattcttgaaggcgagaaatttttcgccgcggttcaaaacgacgatggcacgtggtgtgcctactacgacaaggaaggcgacctgcacgagaaattggcggatagagacgtggtcgagattgagcttcatagagagttacaattaggtgtatctagtcgaatgacaagagactaaaatgccgaagaccgagagtaaataagaagtatttttttctcgactcataccagacaggttggttcaatgcgccgcgttttgatagaaggatacaagaaatcagcaa

SEQ ID NO: 30112 - DNA, 378 bp, Muscodor strobelii
  misc_feature: SGI cDNA ID NO. 570353
  misc_feature: Reduced expression when VOC is produced
  misc_feature: Encodes the peptide sequence at SEQ ID NO 30113
atgagagtatcgatgaggagtatgaggcaccacagccccagcgccgccgccaacaaagacagaagacacagcaacaagaccaacagggaggaggaggcccccctcggtggcctgccccttgtcggcggtggaggtgttggtgacgccttacccattggtaacgtgggtgagactgccaacaacctcgtcaacagcgctcagggtaccctcggtaatgtgaccggaggtgctctaggtggtgttttgggcggtggcggtggcggcgatggtggcaagagcgacacattgaaattgagactcgacctgaatctcgaggtcgaggtcacactcaaagctagaatccatggtgacttgactttagccttactggacgcctaa

SEQ ID NO: 30113 - protein, 125 aa, Muscodor strobelii
  misc_feature: SGI Peptide ID NO. 570353
  misc_feature (90)..(123): NCBI GI: 256730496 Blast Desc: NECHADRAFT_98506 [Nectria haematococca mpVI 77-13-4]
  misc_feature (46)..(124): NCBI GI: 154320141 Blast Desc: BC1G_02051 [Botryotinia fuckeliana B05.10] gi|150854790|gb|EDN29982.1| BC1G_02051 [Botryotinia fuckeliana B05.10]
  misc_feature (89)..(124): NCBI GI: 145605790 Blast Desc: [Magnaporthe grisea 70-15] gi|145013574|gb|EDJ98215.1| [Magnaporthe grisea 70-15]
  misc_feature (55)..(123): NCBI GI: 70983091 Blast Desc: AFUA_8G01330 [Aspergillus fumigatus Af293] gi|66844698|gb|EAL85035.1| AFUA_8G01330 [Aspergillus fumigatus Af293]
  misc_feature (70)..(123): NCBI GI: 146322337 Blast Desc: conserved [Aspergillus fumigatus Af293] gi|129556967|gb|EAL87847.2| conserved [Aspergillus fumigatus Af293] gi|159124793|gb|EDP49911.1| conserved [Aspergillus A1163]
  misc_feature (90)..(123): NCBI GI: 85108864 Blast Desc: NCU07978 [Neurospora crassa OR74A] gi|28924259|gb|EAA33412.1| NCU07978 [Neurospora crassa OR74A]
  misc_feature (60)..(123): NCBI GI: 169858926 Blast Desc: [Coprinopsis cinerea okayama7#130] gi|116502813|gb|EAU85708.1| [Coprinopsis cinerea okayama7#130]
  misc_feature (88)..(123): NCBI GI: 46109630 Blast Desc: FG01697.1 [Gibberella zeae PH-1]
  misc_feature (70)..(123): NCBI GI: 119497507 Blast Desc: NFIA_023260 [Neosartorya fischeri NRRL 181] gi|119413674|gb|EAW23615.1| conserved [Neosartorya fischeri NRRL 181]
  misc_feature (55)..(123): NCBI GI: 159123959 Blast Desc: AFUB_085280 [Aspergillus fumigatus A1163]
  misc_feature: Useful for introducing or modulating the production of volatile compounds
MRVSMRSMRHHSPSAAANKDRRHSNKTNREEEAPLGGLPLVGGGGVGDALPIGNVGETANNLVNSAQGTLGNVTGGALGGVLGGGGGGDGGKSDTLKLRLDLNLEVEVTLKARIHGDLTLALLDA

SEQ ID NO: 30114 - DNA, 1261 bp, Muscodor strobelii
  misc_feature: SGI EST ID NO. CUFF.71506.1
  misc_feature: Variant of the nucleotide sequence at SEQ ID NO 30112
caagattctgcccggatcccctgctgcaccccggtactctcgaccaaatacacatcgcaatgacgtcgtccccaccacaacacacaatatgcgcctcgccctggtcatcccgctggtccctacatatcgacggactgtagaatataacaaaaacttgcggcagtccggcccaagacagtcgctcatcaactagattattttcgctttggtcagatttgtcgctcctcacttgaaccaccagatatttccactgatccattcacccacaacctactagacattagcgcattatgtcttctccaagcccatcccaaaaccagagcaagagcagaggcccaagccgtggtggccgtcgctcgcgtcgaaaccgatctcaagttcccgccccaggaccatccgctcagtcagaatttgatgagagtatcgatgaggagtatgaggcaccacagccccagcgccgccgccaacaaagacagaagacacagcaacaagaccaacagggaggaggaggcccccctcggtggcctgccccttgtcggcggtggaggtgttggtgacgccttacccattggtaacgtgggtgagactgccaacaacctcgtcaacagcgctcagggtaccctcggtaatgtgaccggaggtgctctaggtggtgttttgggcggtggcggtggcggcgatggtggcaagagcgacacattgaaattgagactcgacctgaatctcgaggtcgaggtcacactcaaagctagaatccatggtgacttgactttagccttactggacggcatttaagcatgttaaactgcatgcgtctgtttgatcgttttgcccttatacgagtctcctacaacgcattctcgagcatatgcacatatattatgaggagaagtgcaatatcgctgatacgattaggaattaaaaggacgatgtgatgaatgctcattcactacaattcatttgggacattttctgtttgctgcggcgttgagggtaaagcgatatgcttctcgtattataggaaggaacgacaataaggtcaacttgtacctttgatagacttgtaatattgaacgtttctacagtttcttgtatttttgagcggatgtgacactagtcaacgatatgttaacgtgagacaatgaggctttaaacttctagcacctagtgaaaataatgggccgatattactgtacaatctggcgattaccttacttttcaatcgtcctgtgccgcctgatctttttatttctaatatccg

SEQ ID NO: 30115 - DNA, 381 bp, Muscodor strobelii
  misc_feature: SGI cDNA ID NO. 570354
  misc_feature: Reduced expression when VOC is produced
  misc_feature: Encodes the peptide sequence at SEQ ID NO 30116
atgagagtatcgatgaggagtatgaggcaccacagccccagcgccgccgccaacaaagacagaagacacagcaacaagaccaacagggaggaggaggcccccctcggtggcctgccccttgtcggcggtggaggtgttggtgacgccttacccattggtaacgtgggtgagactgccaacaacctcgtcaacagcgctcagggtaccctcggtaatgtgaccggaggtgctctaggtggtgttttgggcggtggcggtggcggcgatggtggcaagagcgacacattgaaattgagactcgacctgaatctcgaggtcgaggtcacactcaaagctagaatccatggtgacttgactttagccttactggacggcatttaa

SEQ ID NO: 30116 - protein, 126 aa, Muscodor strobelii
  misc_feature: SGI Peptide ID NO. 570354
  misc_feature (90)..(123): NCBI GI: 256730496 Blast Desc: NECHADRAFT_98506 [Nectria haematococca mpVI 77-13-4]
  misc_feature (46)..(124): NCBI GI: 154320141 Blast Desc: BC1G_02051 [Botryotinia fuckeliana B05.10] gi|150854790|gb|EDN29982.1| BC1G_02051 [Botryotinia fuckeliana B05.10]
  misc_feature (55)..(123): NCBI GI: 70983091 Blast Desc: AFUA_8G01330 [Aspergillus fumigatus Af293] gi|66844698|gb|EAL85035.1| AFUA_8G01330 [Aspergillus fumigatus Af293]
  misc_feature (70)..(123): NCBI GI: 146322337 Blast Desc: conserved [Aspergillus fumigatus Af293] gi|129556967|gb|EAL87847.2| conserved [Aspergillus fumigatus Af293] gi|159124793|gb|EDP49911.1| conserved [Aspergillus A1163]
  misc_feature (90)..(123): NCBI GI: 85108864 Blast Desc: NCU07978 [Neurospora crassa OR74A] gi|28924259|gb|EAA33412.1| NCU07978 [Neurospora crassa OR74A]
  misc_feature (60)..(123): NCBI GI: 169858926 Blast Desc: [Coprinopsis cinerea okayama7#130] gi|116502813|gb|EAU85708.1| [Coprinopsis cinerea okayama7#130]
  misc_feature (83)..(125): NCBI GI: 154320145 Blast Desc: [Botryotinia fuckeliana B05.10] gi|150854792|gb|EDN29984.1| [Botryotinia fuckeliana B05.10]
  misc_feature (88)..(123): NCBI GI: 46109630 Blast Desc: FG01697.1 [Gibberella zeae PH-1]
  misc_feature (70)..(123): NCBI GI: 119497507 Blast Desc: NFIA_023260 [Neosartorya fischeri NRRL 181] gi|119413674|gb|EAW23615.1| conserved [Neosartorya fischeri NRRL 181]
  misc_feature (55)..(123): NCBI GI: 159123959 Blast Desc: AFUB_085280 [Aspergillus fumigatus A1163]
  misc_feature: Useful for introducing or modulating the production of volatile compounds
MRVSMRSMRHHSPSAAANKDRRHSNKTNREEEAPLGGLPLVGGGGVGDALPIGNVGETANNLVNSAQGTLGNVTGGALGGVLGGGGGGDGGKSDTLKLRLDLNLEVEVTLKARIHGDLTLALLDGI

SEQ ID NO: 30117 - DNA, 1261 bp, Muscodor strobelii; identical to SEQ ID NO: 30114
  misc_feature: SGI EST ID NO. CUFF.71506.1
  misc_feature: Variant of the nucleotide sequence at SEQ ID NO 30115

SEQ ID NO: 30118 - DNA, 744 bp, Muscodor strobelii
  misc_feature: SGI cDNA ID NO. 570355
  misc_feature: Encodes the peptide sequence at SEQ ID NO 30119
atgacagcaacaagacaaatagttctggtgacaggcgggaatgccggagtcggcttcgagatttgtaaacagctcatttcgcacaactttcacgttctacttagctctcgctctcttgagcgaggacaagaggcagccaaggagttatcaagcctcagcctatccggcactgttgaatctttgcaacttgacgttgatgaagaggattctgtggccaaggccactgatttcattaggaagagatatggcagacttgatgctttagtcaacaacgctggcatatcatccagcagtggcactgtcgcagcgcaaatggctgcctgttttcgcacgaatgctatcggcgcttatcttacggtatcttatttctcaccactccttcttgcatcactcgaacagaccaagttcaccccacgtgttgtgaacgtaacatccggtgcaggctccatcaaaaaccgtatgacgcccaacgcgcacggcgatagcatgccggtcgtaccatatcgcgtgagtaaagcagcgatgaacatggtatccgccattcagtttcgcgaattcgatcctcagggaatcaaagtatttctctatgggcccggtccaacggcttcgagaaagaacaaccgtcctggcatgaagagcacggcagagggcgtggcgcctattactcagatcctcctgggtaagagggataacgatgcaggagtgtacttggaatatgaagttgacggggcattcccttggtag

SEQ ID NO: 30119 - protein, 247 aa, Muscodor strobelii
  misc_feature: SGI Peptide ID NO. 570355
  misc_feature (6)..(158): Pfam Id: PF00106 Pfam Desc: short chain dehydrogenase
  misc_feature (6)..(116): Pfam Id: PF00106 Pfam Desc: short chain dehydrogenase
  misc_feature (8)..(94): Pfam Id: PF08659 Pfam Desc: KR domain
  misc_feature (2)..(247): NCBI GI: 242819987 Blast Desc: short chain dehydrogenase/reductase, [Talaromyces stipitatus ATCC 10500] gi|218713890|gb|EED13314.1| short chain dehydrogenase/reductase, [Talaromyces stipitatus ATCC 10500]
  misc_feature (3)..(247): NCBI GI: 212538947 Blast Desc: short-chain dehydrogenase, [Penicillium marneffei ATCC 18224] gi|210069371|gb|EEA23462.1| short-chain dehydrogenase, [Penicillium marneffei ATCC 18224]
  misc_feature (4)..(247): NCBI GI: 169616133 Blast Desc: SNOG_11240 [Phaeosphaeria nodorum SN15] gi|111060619|gb|EAT81739.1| SNOG_11240 [Phaeosphaeria nodorum SN15]
  misc_feature (1)..(247): NCBI GI: 119467095 Blast Desc: NFIA_047930 [Neosartorya fischeri NRRL 181] gi|119405506|gb|EAW15457.1| conserved [Neosartorya fischeri NRRL 181]
  misc_feature (5)..(247): NCBI GI: 189206910 Blast Desc: carbonyl reductase [Pyrenophora tritici-repentis Pt-1C-BFP] gi|187975882|gb|EDU42508.1| carbonyl reductase [Pyrenophora tritici-repentis Pt-1C-BFP]
  misc_feature (5)..(203): NCBI GI: 169596210 Blast Desc: SNOG_00861 [Phaeosphaeria nodorum SN15] gi|160701254|gb|EAT92356.2| SNOG_00861 [Phaeosphaeria nodorum SN15]
  misc_feature (1)..(237): NCBI GI: 119488536 Blast Desc: short chain dehydrogenase/reductase, [Neosartorya fischeri NRRL 181] gi|119410876|gb|EAW20821.1| short chain dehydrogenase/reductase, [Neosartorya fischeri NRRL 181]
  misc_feature (14)..(240): NCBI GI: 121714072 Blast Desc: short chain dehydrogenase/reductase, [Aspergillus clavatus NRRL 1] gi|119402800|gb|EAW13221.1| short chain dehydrogenase/reductase, [Aspergillus clavatus NRRL 1]
  misc_feature (2)..(247): NCBI GI: 169598838 Blast Desc: SNOG_02225 [Phaeosphaeria nodorum SN15] gi|111069317|gb|EAT90437.1| SNOG_02225 [Phaeosphaeria nodorum SN15]
  misc_feature (1)..(237): NCBI GI: 145249618 Blast Desc: An14g05250 [Aspergillus niger] gi|134081831|emb|CAK42086.1| protein product [Aspergillus niger]
  misc_feature (4)..(160): SWISSPROT Homolog: EC 1.1.1.208 (+)-neomenthol dehydrogenase
MTATRQIVLVTGGNAGVGFEICKQLISHNFHVLLSSRSLERGQEAAKELSSLSLSGTVESLQLDVDEEDSVAKATDFIRKRYGRLDALVNNAGISSSSGTVAAQMAACFRTNAIGAYLTVSYFSPLLLASLEQTKFTPRVVNVTSGAGSIKNRMTPNAHGDSMPVVPYRVSKAAMNMVSAIQFREFDPQGIKVFLYGPGPTASRKNNRPGMKSTAEGVAPITQILLGKRDNDAGVYLEYEVDGAFPW

SEQ ID NO: 30120 - DNA, 159 bp, Muscodor strobelii
  misc_feature: SGI EST ID NO. CUFF.71250.0
  misc_feature: Variant of the nucleotide sequence at SEQ ID NO 30118
cagccaaggagttatcaagcctcagcctatccggcactgttgaatctttgcaacttgacgttgatgaagaggattctgtggccaaggccactgatttcattaggaagagatatggcagacttgatgctttagtcaacaacgctggcatatcatccagca

SEQ ID NO: 30121 - DNA, 1008 bp, Muscodor strobelii
  misc_feature: SGI cDNA ID NO. 570356
  misc_feature: Encodes the peptide sequence at SEQ ID NO 30122
atgccatacactttagaatcatgggaacctcctattcgggcgtctaccgatactatttacccaccgcctcctggaattgagtccaacttcatcgatccggtctcgcggtcatgggctgccagaatcgccgtgtacaccactctaccaattatggtactatcgttcttacttcgggtctacgtccgcttcttcctgtcaagaacgtgggggtctgatgattatttctgcttcttggcttttactgctgcagttgcctatagtgggcttttgctttcaaactttgataacgacatgattgggcgacatatatgggacataccaacggagttcttcgcacttcaccctgcagcagtcacgtccattatcataccagggggtttactaattattggcataaactttacgaaactcacattgcttgtcctttacctccgactattcaaagcgggaatcgtgaacgccattgccgatttttacttgctggcaataccggtcacgactgtcatgggcattaatgtcagcacgagcagaaaacttgcgatagtgggtgtattcatcactggactcttggcgactcttttgactgttgttggtgccgtttaccgtttcaaaagtacccatacctatgattctacatggataaacacatggatcgcacccttgagtgtcgctgaaatgaacgttggtgtcatttgtgcatgtctacccatggcctttcaacttttcaagacccttcccgaaaagacagagacagcatgggcgcaaatgaggaattacttaggctctagttcggagcaccacattgatgacatccatgttgaagctcaaatcaaaggatcaatcagccatgaccgtggccgttcacagtggtcaaagactggtgcgacagagcatcgtagaagttcatacgttgagctagaatcaattgattatgactcgcacagcaatcgggcacatgatctattagaaccggaccctgccttgattaagaaaagcctagccaggtag

SEQ ID NO: 30122 - protein, 335 aa, Muscodor strobelii
  misc_feature: SGI Peptide ID NO. 570356
  misc_feature (22)..(320): NCBI GI: 145252774 Blast Desc: An16g05920 [Aspergillus niger] gi|134083454|emb|CAK46932.1| protein product [Aspergillus niger]
  misc_feature (22)..(246): NCBI GI: 171678517 Blast Desc: protein product [Podospora anserina] gi|170937328|emb|CAP61986.1| protein product [Podospora anserina]
  misc_feature (19)..(263): NCBI GI: 70990186 Blast Desc: plasma membrane protein Pth11-like [Aspergillus fumigatus Af293] gi|66847574|gb|EAL87904.1| plasma membrane protein Pth11-like, [Aspergillus fumigatus Af293]
  misc_feature (19)..(263): NCBI GI: 159130422 Blast Desc: plasma membrane protein Pth11-like, [Aspergillus fumigatus A1163]
  misc_feature (21)..(236): NCBI GI: 50949206 Blast Desc: G protein-coupled receptor alpha [Botryotinia fuckeliana]
  misc_feature (15)..(274): NCBI GI: 242818275 Blast Desc: conserved [Talaromyces stipitatus ATCC 10500] gi|218713549|gb|EED12973.1| conserved [Talaromyces stipitatus ATCC 10500]
  misc_feature (21)..(326): NCBI GI: 238841669 Blast Desc: integral membrane protein [Microsporum canis CBS 113480]
  misc_feature (19)..(292): NCBI GI: 46128061 Blast Desc: FG08408.1 [Gibberella zeae PH-1]
  misc_feature (19)..(257): NCBI GI: 242761452 Blast Desc: conserved [Talaromyces stipitatus ATCC 10500] gi|218723378|gb|EED22795.1| conserved [Talaromyces stipitatus ATCC 10500]
  misc_feature (21)..(242): NCBI GI: 226287616 Blast Desc: PADG_07949 [Paracoccidioides brasiliensis Pb18]
MPYTLESWEPPIRASTDTIYPPPPGIESNFIDPVSRSWAARIAVYTTLPIMVLSFLLRVYVRFFLSRTWGSDDYFCFLAFTAAVAYSGLLLSNFDNDMIGRHIWDIPTEFFALHPAAVTSIIIPGGLLIIGINFTKLTLLVLYLRLFKAGIVNAIADFYLLAIPVTTVMGINVSTSRKLAIVGVFITGLLATLLTVVGAVYRFKSTHTYDSTWINTWIAPLSVAEMNVGVICACLPMAFQLFKTLPEKTETAWAQMRNYLGSSSEHHIDDIHVEAQIKGSISHDRGRSQWSKTGATEHRRSSYVELESIDYDSHSNRAHDLLEPDPALIKKSLAR

SEQ ID NO: 30123 - DNA, 660 bp, Muscodor strobelii
  misc_feature: SGI EST ID NO. CUFF.71265.0
  misc_feature: Variant of the nucleotide sequence at SEQ ID NO 30121
ctaagactcagtgcatctcagggaatcgtgaacgccattgccgatttttacttgctggcaataccggtcacgactgtcatgggcattaatgtcagcacgagcagaaaacttgcgatagtgggtgtattcatcactggactcttggcgactcttttgactgttgttggtgccgtttaccgtttcaaaagtacccatacctatgattctacatggataaacacatggatcgcacccttgagtgtcgctgaaatgaacgttggtgtcatttgtgcatgtctacccatggcctttcaacttttcaagacccttcccgaaaagacagagacagcatgggcgcaaatgaggaattacttaggctctagttcggagcaccacattgatgacatccatgttgaagctcaaatcaaaggatcaatcagccatgaccgtggccgttcacagtggtcaaagactggtgcgacagagcatcgtagaagttcatacgttgagctagaatcaattgattatgactcgcacagcaatcgggcacatgatctattagaaccggaccctgccttgattaagaaaagcctagccaggtagacagctttacatagcagaatggaagaagtaaaaggcctatggcttgatcactcaccgctcgtgcgtcctgtatttctt

SEQ ID NO: 30124 - DNA, 405 bp, Muscodor strobelii
  misc_feature: SGI cDNA ID NO. 570357
  misc_feature: Encodes the peptide sequence at SEQ ID NO 30125
atgtccctcacaagctcctccgcaaccacaacctgcacagcagacctcctcatcgcgctagcacgagaagacgcagtgaatttccaaatcaaggtcttcggcagtattatgctcctgctcatcatatcctggatctgtctcgcctccttcttcctctaccactttgtgaaacctgtcagaggcaaactgtcacttcgaaaccgtgatcatcaccgacaccgcgccaccgagggaggagggatcgagctcgatgtcctcgctatgccaacaccgcctagacctgcggcggcagcgcttgtcacgcccccgagggtccaggtcactagtccgactatcaccccgcgctcgtcgcgtcaggttggtgagaatcgtccgcatacgccgcagtggtgggaggagttttag

SEQ ID NO: 30125 - protein, 134 aa, Muscodor strobelii
  misc_feature: SGI Peptide ID NO. 570357
MSLTSSSATTTCTADLLIALAREDAVNFQIKVFGSIMLLLIISWICLASFFLYHFVKPVRGKLSLRNRDHHRHRATEGGGIELDVLAMPTPPRPAAAALVTPPRVQVTSPTITPRSSRQVGENRPHTPQWWEEF

SEQ ID NO: 30126 - DNA, 4296 bp, Muscodor strobelii
  misc_feature: SGI EST ID NO. CUFF.71285.0
  misc_feature: Variant of the nucleotide sequence at SEQ ID NO 30124
agacctgcggcggcagcgcttgtcacgcccccgagggtccaggtcactagtccgactatcaccccgcgctcgtcgcgtcaggttggtgagaatcgtccgcatacgccgcagtggtgggaggagttttagggaaggtgctatgggaggggttggagcgatgggaaatgagggtctggatattgatgacgtgtggctttctaagtactgagaaaggcgatagtgcagcttgggttgtctgccatgggttgccaaagcggaattaggcttgagtactgtccctgtctggacatactgactatatttatatatcaaagggctattcctgtgatagggaaataagtgagttctttacctacctctttgtaccattagtcctcaaatgcatgctcgatacaatagcctgcattctcttgctgcgcgaaaagagagtttgtaccacagaggctgaagttgtaggatgctctggatttatctctctacgagtcttgtaaaggatgacctttactttattaagcttctatgcaccagtcctaggcccaacgcattggtacatgtccatgactcaaacatatcaatgtgccatctacaagagattcaaaaccctttcaatgactcccaacttattcaacagccctccaccgttgttccaaacatttcacagtggatactgatcctccgcttataactccagatccaacatccatagcttgctgactataagacgcgctctgcaatctatccatcgtaggaaaaccgcccaagtccggggcggaatacgtatgcctcgacccataagtaatctggtctagatgtcccgcaacattatgataagttcccgtcgtattcacatactcctgttgattcagcgcagctttcgcattcgcgataatagccctcatctgcggcacagtctcgaaatacacctgtcgtcttttctcagaaaattctaacaaccgaattagattattcgaagcgccacactcggtatagagattccgcatgcgagtgctgtacatctcgcagactgtactattcgctaggggtgcatctcgtagttccatgaggttggctagcacgccctgtttagcgaatgaatggtagcattcgggacaaatcagacattcgcgccagccgtaccagcgtccgcctgttcgctctacatcgcgagaacaagggggaatggatgcgtagactgatgcgtaactatcgagggcgcttgagtcgagcgtgtaatacatctcaaggagtctgggtatgagttgtccaaggcgaggatggttgaagttgaagcagcaaagtgtctttgtgcctgctattacgtctgttttgcgtttccagaggtgagagatattcagcggttcgaggatcgctgcgtagcatgcgccgcagacgccgaaatctcttggatttgagggcagtgtgtaccatgtaccgccagtaataccatcgtctgcgcaaggtttctcgtgtttgaccttgtccatggctttctagaatatggcccaattcttttccttgtgtgcttgagtacaaagaagccggatattgaacgtgcctactgcgcaactgacttccgcgcgttcgttccgcacgagttctgttgctacctcccatttaaactcttcgccagagtgagcaatcagatcacaatagcacgccacacagagaaagaggcctgggattcttgctttgggcgtcatccaggttctgctggctgccgttactgtttgccgatcagggcatcgcggaagagctaatcgggcttttgcttcggatgtgaagctggcccaggcattgcgttttgctttctcatcgaggtcctcttggatgtagagcattgccatgtcacaagcccacgtctctttttcgccctgctgctgcaagaagggtgtaaattggttggcgaatcgattaccaattatatagtcctgataacaagcttcacaggccaggaagccggggacctgattttgttgtattgtgtaccatctaagtcctaagccttctgttccttttacgcctcctatgcctttgcagtctggtattgtggatcgtgccttcatcgcggccaccatgctgactagcgaactagatgcacgagctttttccgtctcatattctttcatgcggggcttattgaaccggcaaacgcgcggcttgccatcgtcgaacttctgatgcttgaattgagtatcgtagttcgtgccatggatataattaacatagcatcgcgagcagatcatgtactcagatgcttcttgatgccagtaccagtcagtgataaaggacacagccgtatcgatacagcctgtgactgcttttggtgctgagacacgcgacaatgcatgtgatgtctcaagaggcttagtctcttgagaaacagtcgattccaccggcgtggtcttacttgcaggcaagtgaatactctcgccggacatctcatagattgcaacaggttgtgcctctggtccagtgaacggagtactgcgacttgtggctggaaccggagagccaggtaattcaacaggaaagttcgttgcgcctatttggtaagagcttctcggactctgaggaaaatttggctgtggcgagtttagctttaacgattgaaaacttgtctcaaggttacgagtctcaataggcgagaacaatggagcagcagcggcatctgtaatccaatgaaaggcttgagaatctcggtgtgatgcagtgacccggacttgcgtctccgaactttgtgaccttccatcatgtgcatttgctaacggtgtatagtctgagagtgaagactcggtaaggccatagggacgctgtagatgtggacttggcaagtggtctgtacgagttacgtagctgggtagcgtgttgctatgtggcctcgcatgatagtccggttgaggagtaactggactataaggctgatattggacatggctaatgggcgaatgtgggcgtgaaaagttgccatgtcttcctcctggaatcagaggggataaaggggctgaatattgtgcaaaccctcctgataagggggcgtaatatgagttcgtcaaagaagaatgattcgaccaggtggttggacttggaggtccaggttgtaatatcgctggatgggtatttccccattgaggaggctgcggctgatattgagcagctagtgtggcaggatctaaggataccgtccctagtggaagaggtccgggaggtggtggcggcggaggaaagctgacgtgagcctcgctgtaaggtcttataggtgagtatacagggggagtagcactactggattcaaaacctgggggtctgggcggtacaggcggaggggcaccgaccggagcaagtggtgtgcctgagtctcccggaggcagtaccggcggagaaagcggagaaatgtattgaggctgctgtgggtaagtatattccggcggttgtggacttcgaggtgggagcggcggcggtggtaatctgcgtccgtattgtgacatgatcacagacttctttggatgttccaaagtgatgttttcactgtaacatatctaattctcaaggcgtgacgtgaaacgaaacgatggcgtttagctcatctcaatgattttcagctggcccagtcaagaccaatatgatggtgttagctccatttgctgcgaagcgaatgttcctaacgtctacagatgacatcgcaagcataagttcatctcattacagtatggaagacggatacattgtgtgactaaaagctgcaagtttttgcaacatggaatttagttcggaatctcaacgcgtctgttttgcggctcagcacagaatgcctcacgaggcactcagctcagctcgctctgatcatcactgcagaggcgaagccacctttccaagtacgtgtacgcgtatgaatttgccgtcgctactgttgaaataccatataaatatttagagtatattacaagcggttcgaatatgtagtctgttgctcattgtttatcacggatagtctcataaagcgtagtaggacacgctgatgtggaatgcagcagatgaagaaagtgacaaattccgatgtgtgttacgatgatcaatgccgcccgtattacctgaaatgttcgcacactagcacgagaatctactaattgcgagttgactaagcggagcgatgatcacaaaggtcaccataagccatatcggtattgcaaggtagtgtgcactcgtcccatgtgaggctcaaatgttggtgccaatttacccaggcgaatgagttgatgtgttacacgcggcttattggcatctgccatttgccatgaa

SEQ ID NO: 30127 - DNA, 948 bp, Muscodor strobelii
  misc_feature: SGI cDNA ID NO. 570358
  misc_feature: Encodes the peptide sequence at SEQ ID NO 30128
atgtccggcgagagtattcacttgcctgcaagtaagaccacgccggtggaatcgactgtttctcaagagactaagcctcttgagacatcacatgcattgtcgcgtgtctcagcaccaaaagcagtcacaggctgtatcgatacggctgtgtcctttatcactgactggtactggcatcaagaagcatctgagtacatgatctgctcgcgatgctatgttaattatatccatggcacgaactacgatactcaattcaagcatcagaagttcgacgatggcaagccgcgcgtttgccggttcaataagccccgcatgaaagaatatgagacggaaaaagctcgtgcatctagttcgctagtcagcatggtggccgcgatgaaggcacgatccacaataccagactgcaaaggcataggaggcgtaaaaggaacagaaggcttaggacttagatggtacacaatacaacaaaatcaggtccccggcttcctggcctgtgaagcttgttatcaggactatataattggtaatcgattcgccaaccaatttacacccttcttgcagcagcagggcgaaaaagagacgtgggcttgtgacatggcaatgctctacatccaagaggacctcgatgagaaagcaaaacgcaatgcctgggccagcttcacatccgaagcaaaagcccgattagctcttccgcgatgccctgatcggcaaacagtaacggcagccagcagaacctggatgacgcccaaagcaagaatcccaggcctctttctctgtgtggcgtgctattgtgatctgattgctcactctggcgaagagtttaaatgggaggtagcaacagaactcgtgcggaacgaacgcgcggaagtcagttgcgcagtaggcacgttcaatatccggcttctttgtactcaagcacacaaggaaaagaattgggccatattctag

SEQ ID NO: 30128 - protein, 315 aa, Muscodor strobelii
  misc_feature: SGI Peptide ID NO. 570358
  misc_feature (41)..(315): NCBI GI: 261356532 Blast Desc: conserved [Verticillium albo-atrum VaMs.102]
  misc_feature (47)..(272): NCBI GI: 256728328 Blast Desc: NECHADRAFT_73005 [Nectria haematococca mpVI 77-13-4]
  misc_feature (4)..(315): NCBI GI: 46110713 Blast Desc: FG02238.1 [Gibberella zeae PH-1]
  misc_feature (50)..(289): NCBI GI: 46114820 Blast Desc: FG03252.1 [Gibberella zeae PH-1]
  misc_feature (39)..(315): NCBI GI: 121703878 Blast Desc: conserved [Aspergillus clavatus NRRL 1] gi|119398347|gb|EAW08777.1| conserved [Aspergillus clavatus NRRL 1]
  misc_feature (56)..(315): NCBI GI: 169778345 Blast Desc: [Aspergillus oryzae RIB40] gi|83772375|dbj|BAE62505.1| protein product [Aspergillus oryzae]
  misc_feature (56)..(315): NCBI GI: 238495652 Blast Desc: conserved [Aspergillus flavus NRRL3357] gi|220695712|gb|EED52055.1| conserved [Aspergillus flavus NRRL3357]
  misc_feature (36)..(315): NCBI GI: 256725022 Blast Desc: NECHADRAFT_34719 [Nectria haematococca mpVI 77-13-4]
  misc_feature (42)..(246): NCBI GI: 256730488 Blast Desc: NECHADRAFT_74051 [Nectria haematococca mpVI 77-13-4]
  misc_feature (47)..(267): NCBI GI: 212544190 Blast Desc: conserved [Penicillium marneffei ATCC 18224] gi|210065218|gb|EEA19312.1| conserved [Penicillium marneffei ATCC 18224]
MSGESIHLPASKTTPVESTVSQETKPLETSHALSRVSAPKAVTGCIDTAVSFITDWYWHQEASEYMICSRCYVNYIHGTNYDTQFKHQKFDDGKPRVCRFNKPRMKEYETEKARASSSLVSMVAAMKARSTIPDCKGIGGVKGTEGLGLRWYTIQQNQVPGFLACEACYQDYIIGNRFANQFTPFLQQQGEKETWACDMAMLYIQEDLDEKAKRNAWASFTSEAKARLALPRCPDRQTVTAASRTWMTPKARIPGLFLCVACYCDLIAHSGEEFKWEVATELVRNERAEVSCAVGTFNIRLLCTQAHKEKNWAIF

SEQ ID NO: 30129 - DNA, 4296 bp, Muscodor strobelii
  misc_feature: SGI EST ID NO. CUFF.71285.0
  misc_feature: Variant of the nucleotide sequence at SEQ ID NO 30127
ttcatggcaaatggcagatgccaataagccgcgtgtaacacatcaactcattcgcctgggtaaattggcaccaacatttgagcctcacatgggacgagtgcacactaccttgcaataccgatatggcttatggtgacctttgtgatcatcgctccgcttagtcaactcgcaattagtagattctcgtgctagtgtgcgaacatttcaggtaatacgggcggcattgatcatcgtaacacacatcggaatttgtcactttcttcatctgctgcattccacatcagcgtgtcctactacgctttatgagactatccgtgataaacaatgagcaacagactacatattcgaaccgcttgtaatatactctaaatatttatatggtatttcaacagtagcgacggcaaattcatacgcgtacacgtacttggaaaggtggcttcgcctctgcagtgatgatcagagcgagctgagctgagtgcctcgtgaggcattctgtgctgagccgcaaaacagacgcgttgagattccgaactaaattccatgttgcaaaaacttgcagcttttagtcacacaatgtatccgtcttccatactgtaatgagatgaacttatgcttgcgatgtcatctgtagacgttaggaacattcgcttcgcagcaaatggagctaacaccatcatattggtcttgactgggccagctgaaaatcattgagatgagctaaacgccatcgtttcgtttcacgtcacgccttgagaattagatatgttacagtgaaaacatcactttggaacatccaaagaagtctgtgatcatgtcacaatacggacgcagattaccaccgccgccgctcccacctcgaagtccacaaccgccggaatatacttacccacagcagcctcaatacatttctccgctttctccgccggtactgcctccgggagactcaggcacaccacttgctccggtcggtgcccctccgcctgtaccgcccagacccccaggttttgaatccagtagtgctactccccctgtatactcacctataagaccttacagcgaggctcacgtcagctttcctccgccgccaccacctcccggacctcttccactagggacggtatccttagatcctgccacactagctgctcaatatcagccgcagcctcctcaatggggaaatacccatccagcgatattacaacctggacctccaagtccaaccacctggtcgaatcattcttctttgacgaactcatattacgcccccttatcaggagggtttgcacaatattcagcccctttatcccctctgattccaggaggaagacatggcaacttttcacgcccacattcgcccattagccatgtccaatatcagccttatagtccagttactcctcaaccggactatcatgcgaggccacatagcaacacgctacccagctacgtaactcgtacagaccacttgccaagtccacatctacagcgtccctatggccttaccgagtcttcactctcagactatacaccgttagcaaatgcacatgatggaaggtcacaaagttcggagacgcaagtccgggtcactgcatcacaccgagattctcaagcctttcattggattacagatgccgctgctgctccattgttctcgcctattgagactcgtaaccttgagacaagttttcaatcgttaaagctaaactcgccacagccaaattttcctcagagtccgagaagctcttaccaaataggcgcaacgaactttcctgttgaattacctggctctccggttccagccacaagtcgcagtactccgttcactggaccagaggcacaacctgttgcaatctatgagatgtccggcgagagtattcacttgcctgcaagtaagaccacgccggtggaatcgactgtttctcaagagactaagcctcttgagacatcacatgcattgtcgcgtgtctcagcaccaaaagcagtcacaggctgtatcgatacggctgtgtcctttatcactgactggtactggcatcaagaagcatctgagtacatgatctgctcgcgatgctatgttaattatatccatggcacgaactacgatactcaattcaagcatcagaagttcgacgatggcaagccgcgcgtttgccggttcaataagccccgcatgaaagaatatgagacggaaaaagctcgtgcatctagttcgctagtcagcatggtggccgcgatgaaggcacgatccacaataccagactgcaaaggcataggaggcgtaaaaggaacagaaggcttaggacttagatggtacacaatacaacaaaatcaggtccccggcttcctggcctgtgaagcttgttatcaggactatataattggtaatcgattcgccaaccaatttacacccttcttgcagcagcagggcgaaaaagagacgtgggcttgtgacatggcaatgctctacatccaagaggacctcgatgagaaagcaaaacgcaatgcctgggccagcttcacatccgaagcaaaagcccgattagctcttccgcgatgccctgatcggcaaacagtaacggcagccagcagaacctggatgacgcccaaagcaagaatcccaggcctctttctctgtgtggcgtgctattgtgatctgattgctcactctggcgaagagtttaaatgggaggtagcaacagaactcgtgcggaacgaacgcgcggaagtcagttgcgcagtaggcacgttcaatatccggcttctttgtactcaagcacacaaggaaaagaattgggccatattctagaaagccatggacaaggtcaaacacgagaaaccttgcgcagacgatggtattactggcggtacatggtacacactgccctcaaatccaagagatttcggcgtctgcggcgcatgctacgcagcgatcctcgaaccgctgaatatctctcacctctggaaacgcaaaacagacgtaatagcaggcacaaagacactttgctgcttcaacttcaaccatcctcgccttggacaactcatacccagactccttgagatgtattacacgctcgactcaagcgccctcgatagttacgcatcagtctacgcatccattcccccttgttctcgcgatgtagagcgaacaggcggacgctggtacggctggcgcgaatgtctgatttgtcccgaatgctaccattcattcgctaaacagggcgtgctagccaacctcatggaactacgagatgcacccctagcgaatagtacagtctgcgagatgtacagcactcgcatgcggaatctctataccgagtgtggcgcttcgaataatctaattcggttgttagaattttctgagaaaagacgacaggtgtatttcgagactgtgccgcagatgagggctattatcgcgaatgcgaaagctgcgctgaatcaacaggagtatgtgaatacgacgggaacttatcataatgttgcgggacatctagaccagattacttatgggtcgaggcatacgtattccgccccggacttgggcggttttcctacgatggatagattgcagagcgcgtcttatagtcagcaagctatggatgttggatctggagttataagcggaggatcagtatccactgtgaaatgtttggaacaacggtggagggctgttgaataagttgggagtcattgaaagggttttgaatctcttgtagatggcacattgatatgtttgagtcatggacatgtaccaatgcgttgggcctaggactggtgcatagaagcttaataaagtaaaggtcatcctttacaagactcgtagagagataaatccagagcatcctacaacttcagcctctgtggtacaaactctcttttcgcgcagcaagagaatgcaggctattgtatcgagcatgcatttgaggactaatggtacaaagaggtaggtaaagaactcacttatttccctatcacaggaatagccctttgatatataaatatagtcagtatgtccagacagggacagtactcaagcctaattccgctttggcaacccatggcagacaacccaagctgcactatcgcctttctcagtacttagaaagccacacgtcatcaatatccagaccctcatttcccatcgctccaacccctcccatagcaccttccctaaaactcctcccaccactgcggcgtatgcggacgattctcaccaacctgacgcgacgagcgcggggtgatagtcggactagtgacctggaccctcgggggcgtgacaagcgctgccgccgcaggtct

SEQ ID NO: 30130 - DNA, 3207 bp, Muscodor strobelii
  misc_feature: SGI cDNA ID NO. 570359
  misc_feature: Reduced expression when VOC is produced
  misc_feature: Encodes the peptide sequence at SEQ ID NO 30131
atggaacaccgacgcccacgctccagccagaccaccgtgtccgtcaacttcgacgagtccgagtccctgtctccccatcccagactcaacttcggcgtggcagagtgcatagagaccaaggtcgtcaccaccacgaccaccaccaaacgctcctaccctcccttactcgtccgtgcctcgcatcctctcctctctctcaacgccaaagagtttcccctcgcccataaacccactcccccagagctggccaacttctccttcaccattgacgacgatggctacgccgactggcccgtggacgacgacactgccgagagccatgagctagtatgtcttgcctcttaccctgctgcccaccatttcggcctgtctccctcgaccaacctccctatccagacaggatgtcttactgattacgccacattccagacccagctttccaccagcgatgaattcagccaggagagtcagcagcattctgcgcaggacggatcatttaccgaccctccccgatcaacctcgaagtcttactcgtcaccctcccgaacatcatcccagcgagcacgcagagcgatgtacgagccctcctctccgacacgtagtaattccggcaagaagagctccaatcgtccgtcgtggcgatcacagaacccacctccgcagctccctcacgccgtggccgacaaattacgtcgtggtttgtcccggtcttctcgactggataccgacagagacggagccatccgaccgaccagcggagtccccatcacccccgatgccttcgatgttcctccaagccataacaggccccctttaaagcttcgccgtacaaatctcgattccttcgaaactcccctgtccgaatccagccagcagcagtctttcttcgacatctcgagtcctacgggcagcgacccgcatactctctttagcagcaacgtagcaacgcctcccatcaccgatgcggatatcgacgccgagcccttcgccgacgccgacgagtccctccagcaatccatccgctcgctgcatcacccgaggcccattaacactgtggtagctcaggatgccagccttcctagtccgcgcttgtctccgactctacaggcagcccagttgcataccgaagaccagaccgatggcgacgttcgtatggacgaagagtcggtgggaaccttggctgaggatggccagaccacgcccgatgacgaagtcggaccttcggatggtgtgaatcatttcgaccccagtgcactcgcccggtatgacgagccttcggcaagccaaacgactctgatggacagccgctcaatgctcgagtcctttgacgccatgccggcagaaatgaagaaattcatgatgtatcagctactccgccggtgttcacgcaagacgctgcacatggttgctgacgttgtcaacccggccctcaagtgcgacatcattcagtttcttcccctggagctcacactgcacatactctcctttctcgattatcaatctctctgccgcgctgctcaggtgtccagctactggcgagggatcattgacagcaatgaaacaggttggagggagctctttgatcgggatggctttatccttgcccccaacgaactcgacagagctattcgagagggttggggctggcaagaccctattggggccgaaggatgcgagcgagacctcagcacccagaaccgcctgacgctgcccgagacagagcttcgcacccctagaccggagcctcgtccccagaccctgcgatcttccaagagaaagagagcactgaactcgttcagctccgtatgctcgaagcgccgggccagcaatcaagacaatgtcaccaaagatgaaagagcttacaacggcagtacggttcgcaaatctgaaggccctatttcagccgccaatgctgcggccgtcgccgtgcctgatccacagcttggtataccaagactgagaaagctccacctattcaagtcactctatcgacgccatttcatgatcaacaggagctggacaagcggtaaggtcaagcccagccatgtggctttcgcagctcatcctcggcacgtaatcacctgtcttcaattcgacgacgacaagatcatcacaggcagcgacgaccagcttatacatgtctatgaaaccaagaccggcagattgagaagaaaactggagggccacgaaggtggcgtctgggctttgcagtacgagggcaacaccctagtatccggatcaacagatcgctccgttcgtgtctgggatatcgaaaagggtctttgcacacaagtgttctatggtcacacgagtactgttcgatgtttacaaatcctgatgccaaccaagactggggaagacgaaaacggccaagacatcatgatgcctgcgaaacctctgatcataaccgggtctcgtgacagtcaactgcgagtttggcggttgccggaggccggctccagaagatacatacagactggcccgcctgccaatgatgctgactgcccgtatttcatacgtaccctacagggccacacacactctgtccgagccattgctgcacatgccgataccctagtcagtggaagctacgataataccgtacgcgtctggcggatcagcacaggagagactgttcatgtcttgcagggtcattcacaaaaagtgtacagcgtcgtcctggataccgagcgaaaccgttgcatatccggaagcatggacagctttgtcaaaatatgggatctcgataccggatcatgcctttatacacttgagggacattctctgctagtgggcctcttggatctccgtgatcagcgtctcgtctctgctgctgctgacagcactctgcgtatctgggatccggaaagtggccgctgtcgatccactttgtctgctcacactggtgctattacctgtttccagcatgatggacgtaaagtcattagcggtagtgaccgtacattgaaaatgtgggatacgcgcacgggagagtgccttcaggacctgctcacagatctcagtggggtttggcaagtccgattcgacgagcgacgtgtcgttgccgctgtccagagggataatcttacttatgtcgagatcctcgactttggtgccgtgcgcgatggcaagagacccgaagaactcgggaaacgagttctgcttaacccgggggaagttcaacgcatcatcgaggaagacgcctag

SEQ ID NO: 30131 - protein, 1068 aa, Muscodor strobelii
  misc_feature: SGI Peptide ID NO. 570359
  misc_feature (480)..(527): Pfam Id: PF00646 Pfam Desc: F-box domain
  misc_feature (836)..(872): Pfam Id: PF00400 Pfam Desc: WD domain, G-beta repeat
  misc_feature (760)..(814): Pfam Id: PF00400 Pfam Desc: WD domain, G-beta repeat
  misc_feature (876)..(914): Pfam Id: PF00400 Pfam Desc: WD domain, G-beta repeat
  misc_feature (720)..(756): Pfam Id: PF00400 Pfam Desc: WD domain, G-beta repeat
  misc_feature (958)..(993): Pfam Id: PF00400 Pfam Desc: WD domain, G-beta repeat
  misc_feature (918)..(954): Pfam Id: PF00400 Pfam Desc: WD domain, G-beta repeat
  misc_feature (1)..(1068): NCBI GI: 46110711 Blast Desc: FG02237.1 [Gibberella zeae PH-1]
  misc_feature (1)..(1068): NCBI GI: 116203061 Blast Desc: CHGG_09415 [Chaetomium globosum CBS 148.51] gi|88177933|gb|EAQ85401.1| CHGG_09415 [Chaetomium globosum CBS 148.51]
  misc_feature (1)..(1068): NCBI GI: 171682778 Blast Desc: protein product [Podospora anserina] gi|170941348|emb|CAP66998.1| protein product [Podospora anserina]
  misc_feature (13)..(1066): NCBI GI: 145612916 Blast Desc: MGG_08345 [Magnaporthe grisea 70-15] gi|145020006|gb|EDK04234.1| MGG_08345 [Magnaporthe grisea 70-15]
  misc_feature (5)..(1064): NCBI GI: 85091195 Blast Desc: NCU05939 [Neurospora crassa OR74A] gi|28920168|gb|EAA29547.1| conserved [Neurospora crassa OR74A]
  misc_feature (432)..(1059): NCBI GI: 261361492 Blast Desc: cell division control protein [Verticillium albo-atrum VaMs.102]
  misc_feature (281)..(1067): NCBI GI: 156042187 Blast Desc: SS1G_11644 [Sclerotinia sclerotiorum 1980] gi|154696027|gb|EDN95765.1| SS1G_11644 [Sclerotinia sclerotiorum 1980]
  misc_feature (20)..(1056): NCBI GI: 189193291 Blast Desc: WD repeat containing protein pop1 [Pyrenophora tritici-repentis Pt-1C-BFP] gi|187978548|gb|EDU45174.1| WD repeat containing protein pop1 [Pyrenophora tritici-repentis Pt-1C-BFP]
  misc_feature (335)..(1056): NCBI GI: 67538694 Blast Desc: AN5517.2 [Aspergillus nidulans FGSC A4] gi|40743487|gb|EAA62677.1| AN5517.2 [Aspergillus nidulans FGSC A4] gi|259485031|tpe|CBF81755.1| TPA: cell division control Cdc4,
  misc_feature (5)..(1056): NCBI GI: 212534262 Blast Desc: cell division control protein Cdc4, [Penicillium marneffei ATCC 18224] gi|210069686|gb|EEA23776.1| cell division control protein Cdc4, [Penicillium marneffei ATCC 18224]
  misc_feature: Useful for introducing or modulating the production of volatile compounds
MEHRRPRSSQTTVSVNFDESESLSPHPRLNFGVAECIETKVVTTTTTTKRSYPPLLVRASHPLLSLNAKEFPLAHKPTPPELANFSFTIDDDGYADWPVDDDTAESHELVCLASYPAAHHFGLSPSTNLPIQTGCLTDYATFQTQLSTSDEFSQESQQHSAQDGSFTDPPRSTSKSYSSPSRTSSQRARRAMYEPSSPTRSNSGKKSSNRPSWRSQNPPPQLPHAVADKLRRGLSRSSRLDTDRDGAIRPTSGVPITPDAFDVPPSHNRPPLKLRRTNLDSFETPLSESSQQQSFFDISSPTGSDPHTLFSSNVATPPITDADIDAEPFADADESLQQSIRSLHHPRPINTVVAQDASLPSPRLSPTLQAAQLHTEDQTDGDVRMDEESVGTLAEDGQTTPDDEVGPSDGVNHFDPSALARYDEPSASQTTLMDSRSMLESFDAMPAEMKKFMMYQLLRRCSRKTLHMVADVVNPALKCDIIQFLPLELTLHILSFLDYQSLCRAAQVSSYWRGIIDSNETGWRELFDRDGFILAPNELDRAIREGWGWQDPIGAEGCERDLSTQNRLTLPETELRTPRPEPRPQTLRSSKRKRALNSFSSVCSKRRASNQDNVTKDERAYNGSTVRKSEGPISAANAAAVAVPDPQLGIPRLRKLHLFKSLYRRHFMINRSWTSGKVKPSHVAFAAHPRHVITCLQFDDDKIITGSDDQLIHVYETKTGRLRRKLEGHEGGVWALQYEGNTLVSGSTDRSVRVWDIEKGLCTQVFYGHTSTVRCLQILMPTKTGEDENGQDIMMPAKPLIITGSRDSQLRVWRLPEAGSRRYIQTGPPANDADCPYFIRTLQGHTHSVRAIAAHADTLVSGSYDNTVRVWRISTGETVHVLQGHSQKVYSVVLDTERNRCISGSMDSFVKIWDLDTGSCLYTLEGHSLLVGLLDLRDQRLVSAAADSTLRIWDPESGRCRSTLSAHTGAITCFQHDGRKVISGSDRTLKMWDTRTGECLQDLLTDLSGVWQVRFDERRVVAAVQRDNLTYVEILDFGAVRDGKRPEELGKRVLLNPGEVQRIIEEDA

SEQ ID NO: 30132 - DNA, 4719 bp, Muscodor strobelii
  misc_feature: SGI EST ID NO. CUFF.71717.3
  misc_feature: Variant of the nucleotide sequence at SEQ ID NO 30130
gcaggcacaaacgccagcgatttgcagtgaattcgcaggcgagggaagcgcagctggtcggctgcacagtctgagctggactgtggacagtgtgtctctctgcacctcttctgcaaggcttgactcggtacacacaggtcactgtgcacactcactcatcgctcagtcatcccttctctccctcccgtctcaacactatctaccttacatacactgtaaaatccgttcacaagtccgccctcgtctcccaccacaccccattgccgtccaaaccacgtaattcaggggcagacacgaaaaacccaccaacgccgaaatctctcacgggcttcccgactcctggttttctcggagtcgagtctcccgcgttcacgaccttctctaccgccactcccagcccactccttcgtgtcctctctgcctgcttgaccgtttgatcttgctggccccccgggctcgaaggaggcaactaataccgcctcaacccgtacttaaaacgatatagacacgtcacgacggcattctgactacgacaccgacgataacaacgacgataataacgaaagagctcgacctgcactctccatcttccctcagctgttaactccgtcactctgtcctcgcgtatacatgatttgctcatagtatagtcgactgccgtgaactaggggtcctcagccggcggcatggaacaccgacgcccacgctccagccagaccaccgtgtccgtcaacttcgacgagtccgagtccctgtctccccatcccagactcaacttcggcgtggcagagtgcatagagaccaaggtcgtcaccaccacgaccaccaccaaacgctcctaccctcccttactcgtccgtgcctcgcatcctctcctctctctcaacgccaaagagtttcccctcgcccataaacccactcccccagagctggccaacttctccttcaccattgacgacgatggctacgccgactggcccgtggacgacgacactgccgagagccatgagctaacccagctttccaccagcgatgaattcagccaggagagtcagcagcattctgcgcaggacggatcatttaccgaccctccccgatcaacctcgaagtcttactcgtcaccctcccgaacatcatcccagcgagcacgcagagcgatgtacgagccctcctctccgacacgtagtaattccggcaagaagagctccaatcgtccgtcgtggcgatcacagaacccacctccgcagctccctcacgccgtggccgacaaattacgtcgtggtttgtcccggtcttctcgactggataccgacagagacggagccatccgaccgaccagcggagtccccatcacccccgatgccttcgatgttcctccaagccataacaggccccctttaaagcttcgccgtacaaatctcgattccttcgaaactcccctgtccgaatccagccagcagcagtctttcttcgacatctcgagtcctacgggcagcgacccgcatactctctttagcagcaacgtagcaacgcctcccatcaccgatgcggatatcgacgccgagcccttcgccgacgccgacgagtccctccagcaatccatccgctcgctgcatcacccgaggcccattaacactgtggtagctcaggatgccagccttcctagtccgcgcttgtctccgactctacaggcagcccagttgcataccgaagaccagaccgatggcgacgttcgtatggacgaagagtcggtgggaaccttggctgaggatggccagaccacgcccgatgacgaagtcggaccttcggatggtgtgaatcatttcgaccccagtgcactcgcccggtatgacgagccttcggcaagccaaacgactctgatggacagccgctcaatgctcgagtcctttgacgccatgccggcagaaatgaagaaattcatgatgtatcagctactccgccggtgttcacgcaagacgctgcacatggttgctgacgttgtcaacccggccctcaagtgcgacatcattcagtttcttcccctggagctcacactgcacatactctcctttctcgattatcaatctctctgccgcgctgctcaggtgtccagctactggcgagggatcattgacagcaatgaaacaggttggagggagctctttgatcgggatggctttatccttgcccccaacgaactcgacagagctattcgagagggttggggctggcaagaccctattggggccgaaggatgcgagcgagacctcagcacccagaaccgcctgacgctgcccgagacagagcttcgcacccctagaccggagcctcgtccccagaccctgcgatcttccaagagaaagagagcactgaactcgttcagctccgtatgctcgaagcgccgggccagcaatcaagacaatgtcaccaaagatgaaagagcttacaacggcagtacggttcgcaaatctgaaggccctatttcagccgccaatgctgcggccgtcgccgtgcctgatccacagcttggtataccaagactgagaaagctccacctattcaagtcactctatcgacgccatttcatgatcaacaggagctggacaagcggtaaggtcaagcccagccatgtggctttcgcagctcatcctcggcacgtaatcacctgtcttcaattcgacgacgacaagatcatcacaggcagcgacgaccagcttatacatgtctatgaaaccaagaccggcagattgagaagaaaactggagggccacgaaggtggcgtctgggctttgcagtacgagggcaacaccctagtatccggatcaacagatcgctccgttcgtgtctgggatatcgaaaagggtctttgcacacaagtgttctatggtcacacgagtactgttcgatgtttacaaatcctgatgccaaccaagactggggaagacgaaaacggccaagacatcatgatgcctgcgaaacctctgatcataaccgggtctcgtgacagtcaactgcgagtttggcggttgccggaggccggctccagaagatacatacagactggcccgcctgccaatgatgctgactgcccgtatttcatacgtaccctacagggccacacacactctgtccgagccattgctgcacatgccgataccctagtcagtggaagctacgataataccgtacgcgtctggcggatcagcacaggagagactgttcatgtcttgcagggtcattcacaaaaagtgtacagcgtcgtcctggataccgagcgaaaccgttgcatatccggaagcatggacagctttgtcaaaatatgggatctcgataccggatcatgcctttatacacttgagggacattctctgctagtgggcctcttggatctccgtgatcagcgtctcgtctctgctgctgctgacagcactctgcgtatctgggatccggaaagtggccgctgtcgatccactttgtctgctcacactggtgctattacctgtttccagcatgatggacgtaaagtcattagcggtagtgaccgtacattgaaaatgtgggatacgcgcacgggagagtgccttcaggacctgctcacagatctcagtggggtttggcaagtccgattcgacgagcgacgtgtcgttgccgctgtccagagggataatcttacttatgtcgagatcctcgactttggtgccgtgcgcgatggcaagagacccgaagaactcgggaaacgagttctgcttaacccgggggaagttcaacgcatcatcgaggaagacgcctaggctgtgatgcataggacacgtcttacctcgaactgtatgtgattgggaaggatcgccgatgatttttgagaccgtcatacttagctcgagatgtctcgtcttttcggcccaacatggctagcatcattatatctacatgcgtaggcatgtcaagctcgttacctcttatggcgcaccgcaaatatcgacagcaaagacatgtttttccacattgcacggtgtattatctgttactggcgaagggaggtacccaactacaaatttcatgataatgatcgtgacgacatttgtctctacttacccgatgtccatgcattcgccggaggatggttgtggggccctgtcatcattgcttatcctggcactccgttgctgacccggctgctgccaaaatctcacctactcaggtgcaaattctctccctggttcgtctctcagaaacacatacacatatctgttcagcattttttatggcgagcatcgatgaaaatcagaaacggcgttcggacggttgtgaacacaccaaagcagcatttgatgaggcgtacttgacttttgtaggagtatgaagagcttatctgcacaaaggggtcaatgtttatttcagtttagttatcatgacaccgtctaatgtccccggaaaatactactgcaggcttgttcgattatgattgagacctgagctttccacacgtgcaatgacccagtgctaccaaagtagaatgaatatatatagagatgacttttttttagaagttgtcctatcccgtcggcgtgaactgcatgtcaggggctgtgcattctttgatgaattgagagctagtctggctctctgtgcatgtgggtgctagtgtgagggtggagaattggctctcgtagattctggggagagcagttagttatatggcagatacggcggaatttgctg

SEQ ID NO: 30133 - DNA, 3105 bp, Muscodor strobelii
  misc_feature: SGI cDNA ID NO. 570360
  misc_feature: Reduced expression when VOC is produced
  misc_feature: Encodes the peptide sequence at SEQ ID NO 30134
atggaacaccgacgcccacgctccagccagaccaccgtgtccgtcaacttcgacgagtccgagtccctgtctccccatcccagactcaacttcggcgtggcagagtgcatagagaccaaggtcgtcaccaccacgaccaccaccaaacgctcctaccctcccttactcgtccgtgcctcgcatcctctcctctctctcaacgccaaagagtttcccctcgcccataaacccactcccccagagctggccaacttctccttcaccattgacgacgatggctacgccgactggcccgtggacgacgacactgccgagagccatgagctaacccagctttccaccagcgatgaattcagccaggagagtcagcagcattctgcgcaggacggatcatttaccgaccctccccgatcaacctcgaagtcttactcgtcaccctcccgaacatcatcccagcgagcacgcagagcgatgtacgagccctcctctccgacacgtagtaattccggcaagaagagctccaatcgtccgtcgtggcgatcacagaacccacctccgcagctccctcacgccgtggccgacaaattacgtcgtggtttgtcccggtcttctcgactggataccgacagagacggagccatccgaccgaccagcggagtccccatcacccccgatgccttcgatgttcctccaagccataacaggccccctttaaagcttcgccgtacaaatctcgattccttcgaaactcccctgtccgaatccagccagcagcagtctttcttcgacatctcgagtcctacgggcagcgacccgcatactctctttagcagcaacgtagcaacgcctcccatcaccgatgcggatatcgacgccgagcccttcgccgacgccgacgagtccctccagcaatccatccgctcgctgcatcacccgaggcccattaacactgtggtagctcaggatgccagccttcctagtccgcgcttgtctccgactctacaggcagcccagttgcataccgaagaccagaccgatggcgacgttcgtatggacgaagagtcggtgggaaccttggctgaggatggccagaccacgcccgatgacgaagtcggaccttcggatggtgtgaatcatttcgaccccagtgcactcgcccggtatgacgagccttcggcaagccaaacgactctgatggacagccgctcaatgctcgagtcctttgacgccatgccggcagaaatgaagaaattcatgatgtatcagctactccgccggtgttcacgcaagacgctgcacatggttgctgacgttgtcaacccggccctcaagtgcgacatcattcagtttcttcccctggagctcacactgcacatactctcctttctcgattatcaatctctctgccgcgctgctcaggtgtccagctactggcgagggatcattgacagcaatgaaacaggttggagggagctctttgatcgggatggctttatccttgcccccaacgaactcgacagagctattcgagagggttggggctggcaagaccctattggggccgaaggatgcgagcgagacctcagcacccagaaccgcctgacgctgcccgagacagagcttcgcacccctagaccggagcctcgtccccagaccctgcgatcttccaagagaaagagagcactgaactcgttcagctccgtatgctcgaagcgccgggccagcaatcaagacaatgtcaccaaagatgaaagagcttacaacggcagtacggttcgcaaatctgaaggccctatttcagccgccaatgctgcggccgtcgccgtgcctgatccacagcttggtataccaagactgagaaagctccacctattcaagtcactctatcgacgccatttcatgatcaacaggagctggacaagcggtaaggtcaagcccagccatgtggctttcgcagctcatcctcggcacgtaatcacctgtcttcaattcgacgacgacaagatcatcacaggcagcgacgaccagcttatacatgtctatgaaaccaagaccggcagattgagaagaaaactggagggccacgaaggtggcgtctgggctttgcagtacgagggcaacaccctagtatccggatcaacagatcgctccgttcgtgtctgggatatcgaaaagggtctttgcacacaagtgttctatggtcacacgagtactgttcgatgtttacaaatcctgatgccaaccaagactggggaagacgaaaacggccaagacatcatgatgcctgcgaaacctctgatcataaccgggtctcgtgacagtcaactgcgagtttggcggttgccggaggccggctccagaagatacatacagactggcccgcctgccaatgatgctgactgcccgtatttcatacgtaccctacagggccacacacactctgtccgagccattgctgcacatgccgataccctagtcagtggaagctacgataataccgtacgcgtctggcggatcagcacaggagagactgttcatgtcttgcagggtcattcacaaaaagtgtacagcgtcgtcctggataccgagcgaaaccgttgcatatccggaagcatggacagctttgtcaaaatatgggatctcgataccggatcatgcctttatacacttgagggacattctctgctagtgggcctcttggatctccgtgatcagcgtctcgtctctgctgctgctgacagcactctgcgtatctgggatccggaaagtggccgctgtcgatccactttgtctgctcacactggtgctattacctgtttccagcatgatggacgtaaagtcattagcggtagtgaccgtacattgaaaatgtgggatacgcgcacgggagagtgccttcaggacctgctcacagatctcagtggggtttggcaagtccgattcgacgagcgacgtgtcgttgccgctgtccagagggataatcttacttatgtcgagatcctcgactttggtgccgtgcgcgatggcaagagacccgaagaactcgggaaacgagttctgcttaacccgggggaagttcaacgcatcatcgaggaagacgcctag

SEQ ID NO: 30134 - protein, 1034 aa, Muscodor strobelii
  misc_feature: SGI Peptide ID NO. 570360
  misc_feature (446)..(493): Pfam Id: PF00646 Pfam Desc: F-box domain
  misc_feature (802)..(838): Pfam Id: PF00400 Pfam Desc: WD domain, G-beta repeat
  misc_feature (726)..(780): Pfam Id: PF00400 Pfam Desc: WD domain, G-beta repeat
  misc_feature (842)..(880): Pfam Id: PF00400 Pfam Desc: WD domain, G-beta repeat
  misc_feature (686)..(722): Pfam Id: PF00400 Pfam Desc: WD domain, G-beta repeat
  misc_feature (924)..(959): Pfam Id: PF00400 Pfam Desc: WD domain, G-beta repeat
  misc_feature (884)..(920): Pfam Id: PF00400 Pfam Desc: WD domain, G-beta repeat
  misc_feature (1)..(1034): NCBI GI: 46110711 Blast Desc: FG02237.1 [Gibberella zeae PH-1]
  misc_feature (1)..(1034): NCBI GI: 116203061 Blast Desc: CHGG_09415 [Chaetomium globosum CBS 148.51] gi|88177933|gb|EAQ85401.1| CHGG_09415 [Chaetomium globosum CBS 148.51]
  misc_feature (1)..(1034): NCBI GI: 171682778 Blast Desc: protein product [Podospora anserina] gi|170941348|emb|CAP66998.1| protein product [Podospora anserina]
  misc_feature (13)..(1032): NCBI GI: 145612916 Blast Desc: MGG_08345 [Magnaporthe grisea 70-15] gi|145020006|gb|EDK04234.1| MGG_08345 [Magnaporthe grisea 70-15]
  misc_feature (5)..(1030): NCBI GI: 85091195 Blast Desc: NCU05939 [Neurospora crassa OR74A] gi|28920168|gb|EAA29547.1| conserved [Neurospora crassa OR74A]
  misc_feature (7)..(1033): NCBI GI: 156042187 Blast Desc: SS1G_11644 [Sclerotinia sclerotiorum 1980] gi|154696027|gb|EDN95765.1| SS1G_11644 [Sclerotinia sclerotiorum 1980]
  misc_feature (398)..(1025): NCBI GI: 261361492 Blast Desc: cell division control protein [Verticillium albo-atrum VaMs.102]
  misc_feature (20)..(1022): NCBI GI: 189193291 Blast Desc: WD repeat containing protein pop1 [Pyrenophora tritici-repentis Pt-1C-BFP] gi|187978548|gb|EDU45174.1| WD repeat containing protein pop1 [Pyrenophora tritici-repentis Pt-1C-BFP]
  misc_feature (301)..(1022): NCBI GI: 67538694 Blast Desc: AN5517.2 [Aspergillus nidulans FGSC A4] gi|40743487|gb|EAA62677.1| AN5517.2 [Aspergillus nidulans FGSC A4] gi|259485031|tpe|CBF81755.1| TPA: cell division control Cdc4,
  misc_feature (5)..(1022): NCBI GI: 212534262 Blast Desc: cell division control protein Cdc4, [Penicillium marneffei ATCC 18224] gi|210069686|gb|EEA23776.1| cell division control protein Cdc4, [Penicillium marneffei ATCC 18224]
  misc_feature: Useful for introducing or modulating the production of volatile compounds
MEHRRPRSSQTTVSVNFDESESLSPHPRLNFGVAECIETKVVTTTTTTKRSYPPLLVRASHPLLSLNAKEFPLAHKPTPPELANFSFTIDDDGYADWPVDDDTAESHELTQLSTSDEFSQESQQHSAQDGSFTDPPRSTSKSYSSPSRTSSQRARRAMYEPSSPTRSNSGKKSSNRPSWRSQNPPPQLPHAVADKLRRGLSRSSRLDTDRDGAIRPTSGVPITPDAFDVPPSHNRPPLKLRRTNLDSFETPLSESSQQQSFFDISSPTGSDPHTLFSSNVATPPITDADIDAEPFADADESLQQSIRSLHHPRPINTVVAQDASLPSPRLSPTLQAAQLHTEDQTDGDVRMDEESVGTLAEDGQTTPDDEVGPSDGVNHFDPSALARYDEPSASQTTLMDSRSMLESFDAMPAEMKKFMMYQLLRRCSRKTLHMVADVVNPALKCDIIQFLPLELTLHILSFLDYQSLCRAAQVSSYWRGIIDSNETGWRELFDRDGFILAPNELDRAIREGWGWQDPIGAEGCERDLSTQNRLTLPETELRTPRPEPRPQTLRSSKRKRALNSFSSVCSKRRASNQDNVTKDERAYNGSTVRKSEGPISAANAAAVAVPDPQLGIPRLRKLHLFKSLYRRHFMINRSWTSGKVKPSHVAFAAHPRHVITCLQFDDDKIITGSDDQLIHVYETKTGRLRRKLEGHEGGVWALQYEGNTLVSGSTDRSVRVWDIEKGLCTQVFYGHTSTVRCLQILMPTKTGEDENGQDIMMPAKPLIITGSRDSQLRVWRLPEAGSRRYIQTGPPANDADCPYFIRTLQGHTHSVRAIAAHADTLVSGSYDNTVRVWRISTGETVHVLQGHSQKVYSVVLDTERNRCISGSMDSFVKIWDLDTGSCLYTLEGHSLLVGLLDLRDQRLVSAAADSTLRIWDPESGRCRSTLSAHTGAITCFQHDGRKVISGSDRTLKMWDTRTGECLQDLLTDLSGVWQVRFDERRVVAAVQRDNLTYVEILDFGAVRDGKRPEELGKRVLLNPGEVQRIIEEDA

SEQ ID NO: 30135 - DNA, 4778 bp, Muscodor strobelii
  misc_feature: SGI EST ID NO. CUFF.71717.2
  misc_feature: Variant of the nucleotide sequence at SEQ ID NO 30133
gcaggcacaaacgccagcgatttgcagtgaattcgcaggcgagggaagcgcagctggtcggctgcacagtctgagctggactgtggacagtgtgtctctctgcacctcttctgcaaggcttgactcggtacacacaggtcactgtgcacactcactcatcgctcagtcatcccttctctccctcccgtctcaacactatctaccttacatacactgtaaaatccgttcacaagtccgccctcgtctcccaccacaccccattgccgtccaaaccacgtaattcaggggcagacacgaaaaacccaccaacgccgaaatctctcacgggcttcccgactcctggttttctcggagtcgagtctcccgcgttcacgaccttctctaccgccactcccagcccactccttcgtgtcctctctgcctgcttgaccgtttgatcttgctggccccccgggctcgaaggaggcaactaataccgcctcaacccgtacttaaaacgatatagacacgtcacgacggcattctgactacgacaccgacgataacaacgacgataataacgaaagagctcgacctgcactctccatcttccctcagctgttaactccgtcactctgtcctcgcgtatacatgatttgctcatagtatagtcgactgccgtgaactaggggtcctcagccggcggcatggaacaccgacgcccacgctccagccagaccaccgtgtccgtcaacttcgacgagtccgagtccctgtctccccatcccagactcaacttcggcgtggcagagtgcatagagaccaaggtcgtcaccaccacgaccaccaccaaacgctcctaccctcccttactcgtccgtgcctcgcatcctctcctctctctcaacgccaaagagtttcccctcgcccataaacccactcccccagagctggccaacttctccttcaccattgacgacgatggctacgccgactggcccgtggacgacgacactgccgagagccatgagctaacccagctttccaccagcgatgaattcagccaggagagtcagcagcattctgcgcaggacggatcatttaccgaccctccccgatcaacctcgaagtcttactcgtcaccctcccgaacatcatcccagcgagcacgcagagcgatgtacgagccctcctctccgacacgtagtaattccggcaagaagagctccaatcgtccgtcgtggcgatcacagaacccacctccgcagctccctcacgccgtggccgacaaattacgtcgtggtttgtcccggtcttctcgactggataccgacagagacggagccatccgaccgaccagcggagtccccatcacccccgatgccttcgatgttcctccaagccataacaggccccctttaaagcttcgccgtacaaatctcgattccttcgaaactcccctgtccgaatccagccagcagcagtctttcttcgacatctcgagtcctacgggcagcgacccgcatactctctttagcagcaacgtagcaacgcctcccatcaccgatgcggatatcgacgccgagcccttcgccgacgccgacgagtccctccagcaatccatccgctcgctgcatcacccgaggcccattaacactgtggtagctcaggatgccagccttcctagtccgcgcttgtctccgactctacaggcagcccagttgcataccgaagaccagaccgatggcgacgttcgtatggacgaagagtcggtgggaaccttggctgaggatggccagaccacgcccgatgacgaagtcggaccttcggatggtgtgaatcatttcgaccccagtgcactcgcccggtatgacgagccttcggcaagccaaacgactctgatggacagccgctcaatgctcgagtcctttgacgccatgccggcagaaatgaagaaattcatgatgtatcagctactccgccggtgttcacgcaagacgctgcacatggttgctgacgttgtcaacccggccctcaagtgcgacatcattcagtttcttcccctggagctcacactgcacatactctcctttctcgattatcaatctctctgccgcgctgctcaggtgtccagctactggcgagggatcattgacagcaatgaaacaggttggagggagctctttgatcgggatggctttatccttgcccccaacgaactcgacagagctattcgagagggttggggctggcaagaccctattggggccgaaggatgcgagcgagacctcagcacccagaaccgcctgacgctgcccgagacagagcttcgcacccctagaccggagcctcgtccccagaccctgcgatcttccaagagaaagagagcactgaactcgttcagctccgtatgctcgaagcgccgggccagcaatcaagacaatgtcaccaaagatgaaagagcttacaacggcagtacggttcgcaaatctgaaggccctatttcagccgccaatgctgcggccgtcgccgtgcctgatccacagcttggtataccaagactgagaaagctccacctattcaagtcactctatcgacgccatttcatgatcaacaggagctggacaagcggtaaggtcaagcccagccatgtggctttcgcagctcatcctcggcacgtaatcacctgtcttcaattcgacgacgacaagatcatcacaggcagcgacgaccagcttatacatgtctatgaaaccaagaccggcagattgagaagaaaactggagggccacgaaggtggcgtctgggctttgcagtacgagggcaacaccctagtatccggatcaacagatcgctccgttcgtgtctgggatatcgaaaagggtctttgcacacaagtgttctatggtcacacgagtactgttcgatgtttacaaatcctgatgccaaccaagactggggaagacgaaaacggccaagacatcatgatgcctgcgaaacctctgatcataaccgggtctcgtgacagtcaactgcgagtttggcggttgccggaggccggctccagaagatacatacagactggcccgcctgccaatgatgctgactgcccgtatttcatacgtaccctacagggccacacacactctgtccgagccattgctgcacatgccgataccctagtcagtggaagctacgataataccgtacgcgtctggcggatcagcacaggagagactgttcatgtcttgcagggtcattcacaaaaagtgtacagcgtcgtcctggataccgagcgaaaccgttgcatatccggaagcatggacagctttgtcaaaatatgggatctcgataccggatcatgcctttatacacttgagggacattctctgctagtgggcctcttggatctccgtgatcagcgtctcgtctctgctgctgctgacagcactctgcgtatctgggatccggaaagtggccgctgtcgatccactttgtctgctcacactggtgctattacctgtttccagcatgatggacgtaaagtcattagcggtagtgaccgtacattgaaaatgtgggatacgcgcacgggagagtgccttcaggacctgctcacagatctcagtggggtttggcaagtccgattcgacgagcgacgtgtcgttgccgctgtccagagggataatcttacttatgtcgaggtgagttggtgtattaaaatattcatggagacgagagactaatcactatattcttgtagatcctcgactttggtgccgtgcgcgatggcaagagacccgaagaactcgggaaacgagttctgcttaacccgggggaagttcaacgcatcatcgaggaagacgcctaggctgtgatgcataggacacgtcttacctcgaactgtatgtgattgggaaggatcgccgatgatttttgagaccgtcatacttagctcgagatgtctcgtcttttcggcccaacatggctagcatcattatatctacatgcgtaggcatgtcaagctcgttacctcttatggcgcaccgcaaatatcgacagcaaagacatgtttttccacattgcacggtgtattatctgttactggcgaagggaggtacccaactacaaatttcatgataatgatcgtgacgacatttgtctctacttacccgatgtccatgcattcgccggaggatggttgtggggccctgtcatcattgcttatcctggcactccgttgctgacccggctgctgccaaaatctcacctactcaggtgcaaattctctccctggttcgtctctcagaaacacatacacatatctgttcagcattttttatggcgagcatcgatgaaaatcagaaacggcgttcggacggttgtgaacacaccaaagcagcatttgatgaggcgtacttgacttttgtaggagtatgaagagcttatctgcacaaaggggtcaatgtttatttcagtttagttatcatgacaccgtctaatgtccccggaaaatactactgcaggcttgttcgattatgattgagacctgagctttccacacgtgcaatgacccagtgctaccaaagtagaatgaatatatatagagatgacttttttttagaagttgtcctatcccgtcggcgtgaactgcatgtcaggggctgtgcattctttgatgaattgagagctagtctggctctctgtgcatgtgggtgctagtgtgagggtggagaattggctctcgtagattctggggagagcagttagttatatggcagatacggcggaatttgctg

SEQ ID NO: 30136 - DNA, 891 bp, Muscodor strobelii
  misc_feature: SGI cDNA ID NO. 570361
  misc_feature: Encodes the peptide sequence at SEQ ID NO 30137
atgccgcctctcacagtccaccatctcggcgtctcacaatccgaccgcgtcgtctggctgtgcgaagaactcggtctcgactacaatctcaagttatataaacgctcacctatacttgctggaccggatttcaagtcattgcatcctatcggttcagcgcccgtaatcgaagatggcgagatcaagctcgctgagtccagcgcttgtctcgagtatatcgcccaggtctatggcaatgggcgcttcatcgtcaagcctggagaggaagactatgctcaatatctctactggtttcatttcgcgaacgcaacattgacatctacactcatgcgcatcttctccaccaagtccatagttggaaaatccgaagacggaagcgagccgccaatcatggctcgttttagggaaaagctaggcttatgtctggaaacagtggatgagcgattatccaaggcgcctttcctcggcggcaaggatctgaccctcgcagacataatgagcgtctgttctcttacaacactgcgctgttttcagcctctggaattgcacccgtatccgaacatcctcgcttggctcgagcgatgtgcggcgcgcgagggctacaagaaagcggtggccaaaggagacccggaccaagacatctcacagctgatctccgctgatggaccgccattatttctggaggtacaacaacaagccctcgttgcgctcgagtgggatctagttcggccgacactagttgatctcactacagatgatgtactcgttgacgagattaaggaggacaccaaaaagggtgtgcaaaaggaggtcaaaaggaagatcaagaaggagaagaaggatccagtgcatgctcatcggaagaagagaccaagaaccgtggtaaattga

SEQ ID NO: 30137 - protein, 296 aa, Muscodor strobelii
  misc_feature: SGI Peptide ID NO. 570361
  misc_feature (109)..(199): Pfam Id: PF00043 Pfam Desc: Glutathione S-transferase, C-terminal domain
  misc_feature (2)..(75): Pfam Id: PF02798 Pfam Desc: Glutathione S-transferase, N-terminal domain
  misc_feature (4)..(211): NCBI GI: 115376512 Blast Desc: glutathione S-transferase [Stigmatella aurantiaca DW4/3-1] gi|115366515|gb|EAU65516.1| glutathione S-transferase [Stigmatella aurantiaca DW4/3-1]
  misc_feature (4)..(211): NCBI GI: 162457133 Blast Desc: sce8848 [Sorangium cellulosum 'So ce 56'] gi|161167715|emb|CAN99020.1| gst19 [Sorangium cellulosum 'So ce 56']
  misc_feature (3)..(227): NCBI GI: 46122905 Blast Desc: FG05830.1 [Gibberella zeae PH-1]
  misc_feature (3)..(215): NCBI GI: 256731226 Blast Desc: NECHADRAFT_85252 [Nectria haematococca mpVI 77-13-4]
  misc_feature (4)..(211): NCBI GI: 83648923 Blast Desc: glutathione S-transferase [Hahella chejuensis KCTC 2396] gi|83636966|gb|ABC32933.1| Glutathione S-transferase [Hahella chejuensis KCTC 2396]
  misc_feature (4)..(210): NCBI GI: 27380811 Blast Desc: glutathione S-transferase-like protein [Bradyrhizobium japonicum USDA 110] gi|27353976|dbj|BAC50965.1| glutathione S-transferase like protein [Bradyrhizobium japonicum USDA 110]
  misc_feature (4)..(210): NCBI GI: 146338231 Blast Desc: glutathione S-transferase [Bradyrhizobium sp. ORS278] gi|146191037|emb|CAL75042.1| glutathione S-transferase [Bradyrhizobium sp. ORS278]
  misc_feature (4)..(215): NCBI GI: 238486522 Blast Desc: glutathione S-transferase, [Aspergillus flavus NRRL3357] gi|220699378|gb|EED55717.1| glutathione S-transferase, [Aspergillus flavus NRRL3357]
  misc_feature (4)..(214): NCBI GI: 148258125 Blast Desc: glutathione S-transferase [Bradyrhizobium sp. BTAi1] gi|146410298|gb|ABQ38804.1| glutathione S-transferase [Bradyrhizobium sp. BTAi1]
  misc_feature (4)..(211): NCBI GI: 90425080 Blast Desc: glutathione S-transferase-like [Rhodopseudomonas palustris BisB18] gi|90107094|gb|ABD89131.1| glutathione S-transferase-like [Rhodopseudomonas palustris BisB18]
  misc_feature (20)..(207): SWISSPROT Homolog: EC 2.5.1.18 Glutathione transferase
MPPLTVHHLGVSQSDRVVWLCEELGLDYNLKLYKRSPILAGPDFKSLHPIGSAPVIEDGEIKLAESSACLEYIAQVYGNGRFIVKPGEEDYAQYLYWFHFANATLTSTLMRIFSTKSIVGKSEDGSEPPIMARFREKLGLCLETVDERLSKAPFLGGKDLTLADIMSVCSLTTLRCFQPLELHPYPNILAWLERCAAREGYKKAVAKGDPDQDISQLISADGPPLFLEVQQQALVALEWDLVRPTLVDLTTDDVLVDEIKEDTKKGVQKEVKRKIKKEKKDPVHAHRKKRPRTVVN

SEQ ID NO: 30138 - DNA, 1623 bp, Muscodor strobelii
  misc_feature: SGI EST ID NO. CUFF.71301.0
  misc_feature: Variant of the nucleotide sequence at SEQ ID NO 30136
cggcgggactaccacaggaaacgtgtgactgggaaaaggcattggtagtgtaaaggaatgaatccttgaaacgactggacagcagcgcaccacccggcgttgcggcatctacactacggaccatcccggacgaattgactcataatcgcgagaatactgcaggcagatgaccggattccaagacatcatccgatcagatagtatttcgagccttctgaaacgaatcaaaaatgaagataatggatcaccaaagttcgtccgcggctctcgttgaaagccaaaggcaacgaggaaagcgcagcgggactatggcgtcactaaaattggccagaacgaacttcccctcaagaaagtacccgcgaaccgagggtctataaagagcaacgaattttgtacaaagaatgtcagaaatcgacatcaacatcgatcatacatctgtatagatcgccacattccctctttcttcaatcaatcactcgctatccaataatcgcaccaagcgtattgcaacatgccgcctctcacagtccaccatctcggcgtctcacaatccgaccgcgtcgtctggctgtgcgaagaactcggtctcgactacaatctcaagttatataaacgctcacctatacttgctggaccggatttcaagtcattgcatcctatcggttcagcgcccgtaatcgaagatggcgagatcaagctcgctgagtccagcgcttgtctcgagtatatcgcccaggtctatggcaatgggcgcttcatcgtcaagcctggagaggaagactatgctcaatatctctactggtttcatttcgcgaacgcaacattgacatctacactcatgcgcatcttctccaccaagtccatagttggaaaatccgaagacggaagcgagccgccaatcatggctcgttttagggaaaagctaggcttatgtctggaaacagtggatgagcgattatccaaggcgcctttcctcggcggcaaggatctgaccctcgcagacataatgagcgtctgttctcttacaacactgcgctgttttcagcctctggaattgcacccgtatccgaacatcctcgcttggctcgagcgatgtgcggcgcgcgagggctacaagaaagcggtggccaaaggagacccggaccaagacatctcacagctgatctccgctgatggaccgccattgtttgggccgctacgggcttagaaagcctttcagtgctactgtgacgacgtggccgacgatgcatcgtccagatttctggaggtacaacaacaagccctcgttgcgctcgagtgggatctagttcggccgacactagttgatctcactacagatgatgtactcgttgacgagattaaggaggacaccaaaaagggtgtgcaaaaggaggtcaaaaggaagatcaagaaggagaagaaggatccagtgcatgctcatcggaagaagagaccaagaaccgtggtaaattgatcgttgaatttttacctttacactcactcacatccatgtgtgttatgccaacaagataccgatttgtataccacaagtttataaccagtaggaattagaacatctcgctcatagcattcataacaaaaaaggaatgacacacatcatgt

SEQ ID NO: 30139 - DNA, 858 bp, Muscodor strobelii
  misc_feature: SGI cDNA ID NO. 570362
  misc_feature: Elevated expression when VOC is produced
  misc_feature: Encodes the peptide sequence at SEQ ID NO 30140
atggcgacaactccacccaaactacagcaagtgaaagtcacagacgacgctgaaaccgttctcaagcatattcgcgaagacggagctgtcatcatcaaaggactgttcaccaaagaccaagtccgacgtttcaacgaagaagttcaacctgctatagataagttgaacgttggctcaaaacacaaggaggaatgggtcaaagactttttcggtgataacaccaaacgactgaatggtgtcgtcgctattagcaagactttccgggatgagatactagagagcgagttgattcataaagtctgtgaggcagtgtacttgaaagatgcaggaggatattggatgaattccgctcaggtcattgatatccagccaccgagcagagctcaaccactacatcgagaccaatggcaatttcccattttcacacactgcggccctgatgcacccgaagcgagctgcaacttcgtcgttgctctgacggattttactgatgcgaacggcgccacaagagtcatcccgggaagtcacaggtggaaagatctcaacgataacggaaagccggaagacacaattcccgccgagatggaagcaggtgatgcatgtttcatctcaggaaaagtcgtacatggtggaggcgcaaatacaacgagtaatatcacgcgaagagccataacactcgttttccaatgctcttatctcacgcctgaagaagcataccctttcatcataagtagagagctcgtaaagacgatgtcaccacgagctcagcgtatgatagggttccggtctcagttcttgaaagatagcccaggagtttggaaaacggattatagtcaagctgacgagacttattgctag

SEQ ID NO: 30140 - protein, 285 aa, Muscodor strobelii
  misc_feature: SGI Peptide ID NO. 570362
  misc_feature (22)..(223): Pfam Id: PF05721 Pfam Desc: Phytanoyl-CoA dioxygenase (PhyH)
  misc_feature (6)..(285): NCBI GI: 116197034 Blast Desc: CHGG_05115 [Chaetomium globosum CBS 148.51] gi|88181028|gb|EAQ88496.1| CHGG_05115 [Chaetomium globosum CBS 148.51]
  misc_feature (8)..(279): NCBI GI: 226362434 Blast Desc: ROP_30200 [Rhodococcus opacus B4] gi|226240919|dbj|BAH51267.1| [Rhodococcus opacus B4]
  misc_feature (4)..(279): NCBI GI: 258565063 Blast Desc: conserved [Uncinocarpus reesii 1704] gi|237906977|gb|EEP81378.1| conserved [Uncinocarpus reesii 1704]
  misc_feature (1)..(282): NCBI GI: 54023239 Blast Desc: nfa12720 [Nocardia farcinica IFM 10152] gi|54014747|dbj|BAD56117.1| [Nocardia farcinica IFM 10152]
  misc_feature (1)..(279): NCBI GI: 226362444 Blast Desc: ROP_30300 [Rhodococcus opacus B4] gi|226240929|dbj|BAH51277.1| [Rhodococcus opacus B4]
  misc_feature (6)..(278): NCBI GI: 26989533 Blast Desc: PP_2814 [Pseudomonas putida KT2440] gi|24984408|gb|AAN68422.1|AE016475_1 conserved [Pseudomonas putida KT2440]
  misc_feature (2)..(280): NCBI GI: 154314877 Blast Desc: BC1G_04780 [Botryotinia fuckeliana B05.10] gi|150848318|gb|EDN23511.1| BC1G_04780 [Botryotinia fuckeliana B05.10]
  misc_feature (20)..(282): NCBI GI: 72384202 Blast Desc: phytanoyl-CoA dioxygenase [Ralstonia eutropha JMP134] gi|72123545|gb|AAZ65699.1| Phytanoyl-CoA dioxygenase [Ralstonia eutropha JMP134]
  misc_feature (26)..(278): NCBI GI: 254240667 Blast Desc: PA2G_01326 [Pseudomonas aeruginosa 2192] gi|12698405|gb|AAK01519.1| [Pseudomonas aeruginosa] gi|126194045|gb|EAZ58108.1| PA2G_01326 [Pseudomonas aeruginosa
  misc_feature (28)..(278): NCBI GI: 107101670 Blast Desc: PaerPA_01002714 [Pseudomonas aeruginosa PACS2] gi|218891803|ref|YP_002440670.1| PLES_30811 [Pseudomonas aeruginosa LESB58] gi|218772029|emb|CAW27808.1| [Pseudomonas
  misc_feature: Useful for introducing or modulating the production of volatile compounds
MATTPPKLQQVKVTDDAETVLKHIREDGAVIIKGLFTKDQVRRFNEEVQPAIDKLNVGSKHKEEWVKDFFGDNTKRLNGVVAISKTFRDEILESELIHKVCEAVYLKDAGGYWMNSAQVIDIQPPSRAQPLHRDQWQFPIFTHCGPDAPEASCNFVVALTDFTDANGATRVIPGSHRWKDLNDNGKPEDTIPAEMEAGDACFISGKVVHGGGANTTSNITRRAITLVFQCSYLTPEEAYPFIISRELVKTMSPRAQRMIGFRSQFLKDSPGVWKTDYSQADETYC

SEQ ID NO: 30141 - DNA, 1229 bp, Muscodor strobelii
  misc_feature: SGI EST ID NO. CUFF.71303.0
  misc_feature: Variant of the nucleotide sequence at SEQ ID NO 30139
ctcgtatgagtccacgagctggatgtaggagagaataacgatcaaatgtcaaacagagactcatacagacaattatctcctaaccgtcctcaattcgacgcataaacccactattaccataaacaattatattaggtgaagtgcttacattctttaagccatggcgacaactccacccaaactacagcaagtgaaagtcacagacgacgctgaaaccgttctcaagcatattcgcgaagacggagctgtcatcatcaaaggactgttcaccaaagaccaagtccgacgtttcaacgaagaagttcaacctgctatagataagttgaacgttggctcaaaacacaaggaggaatgggtcaaagactttttcggtgataacaccaaacgactgaatggtgtcgtcgctattagcaagactttccgggatgagatactagagagcgagttgattcataaagtctgtgaggcagtgtacttgaaagatgcaggaggatattggatgaattccgctcaggtcattgatatccagccaccgagcagagctcaaccactacatcgagaccaatggcaatttcccattttcacacactgcggccctgatgcacccgaagcgagctgcaacttcgtcgttgctctgacggattttactgatgcgaacggcgccacaagagtcatcccgggaagtcacaggtggaaagatctcaacgataacggaaagccggaagacacaattcccgccgagatggaagcaggtgatgcatgtttcatctcaggaaaagtcgtacatggtggaggcgcaaatacaacgagtaatatcacgcgaagagccataacactcgttttccaatgctcttatctcacgcctgaagaagcataccctttcatcataagtagagagctcgtaaagacgatgtcaccacgagctcagcgtatgatagggttccggtctcagttcttgaaagatagcccaggagtttggaaaacggattatagtcaagctgacgagacttattgctagtaattgctggcaaatctgccagaatgcttctgaatctagtgatgtctgattttggatagcgactgttcaagtaataaattaatcccaaactgtactccttcttacacatcacttatttgaaacaatagcaaagcaattgattacccgttatcaattattactcacaatacttcatactcatccgcggacaatgaagctatctccaaagctg

SEQ ID NO: 30142 - DNA, 1002 bp, Muscodor strobelii
  misc_feature: SGI cDNA ID NO. 570363
  misc_feature: Encodes the peptide sequence at SEQ ID NO 30143
atgtctgtggtggccatcgctggtggcacgggcgacttgggtggcttgatcgctgataccctacaagagactggcctgtatgaggtctacgttatgtcaagaaagacgataaatgccaaatctcgtcatatttcgccattgacagggcaccaatattcccctctccttcaaacagactattcatccgaggagtctttgctcgagatctttgagcaaaagaaagtcaacatagtgatctcagtgttcattatggacaatgatgctgtgtcggacgcacaactacgcctaatccgcgctgctgatcaatgctcttccgttcggcgcttcattccatctgagttcaacgtcgaatatgatgttggtgatgacatcttaccatatccagaaaagaagtttcatatgatctctagacgcgagcttgaaaagacaaccactctagagtatacgtatgtctatccagggatgttgatggattactttgggcttccgcgagtgaagagtgtactgcgtggactttgcttctttgtcgacccggaaaatgggcgtgcaatgctacccggagacggcgaagcaagaatgagcatgactttgacagtggatgttgcccgatatgtggctcttgctcttcaacttgacaaatggccacgtattttaagcaccgtagcaagcactatcacattgaatgagctctgcgggcttgtggagcagaaactgggccgtaagcttgacatcagctatcagcctgtcgaaaaattgctgaagcacgatgtgatcgatcttcaagctaatatcgattatgcccaccaacagcctgaacgctttcctggaggattgcagcagttacgtgggctgattgcggacttggaggcaggagttgcactcggagcatatgatctgtcaaagctagacggacatctagatcttgtcaaggagtttgagggtcaagtgccgcctcctaagcgcattgagcagctgatagaggaggcttggaaaacagtgtag

SEQ ID NO: 30143 - protein, 333 aa, Muscodor strobelii
  misc_feature: SGI Peptide ID NO. 570363
  misc_feature (4)..(248): Pfam Id: PF05368 Pfam Desc: NmrA-like family
  misc_feature (55)..(254): Pfam Id: PF05368 Pfam Desc: NmrA-like family
  misc_feature (1)..(331): NCBI GI: 116197032 Blast Desc: CHGG_05114 [Chaetomium globosum CBS 148.51] gi|88181027|gb|EAQ88495.1| CHGG_05114 [Chaetomium globosum CBS 148.51]
  misc_feature (1)..(263): NCBI GI: 256730078 Blast Desc: NECHADRAFT_7302 [Nectria haematococca mpVI 77-13-4]
  misc_feature (3)..(287): NCBI GI: 256725502 Blast Desc: NECHADRAFT_70763 [Nectria haematococca mpVI 77-13-4]
  misc_feature (1)..(331): NCBI GI: 116204097 Blast Desc: CHGG_09932 [Chaetomium globosum CBS 148.51] gi|88176060|gb|EAQ83528.1| CHGG_09932 [Chaetomium globosum CBS 148.51]
  misc_feature (1)..(272): NCBI GI: 238492437 Blast Desc: conserved [Aspergillus flavus NRRL3357] gi|220695949|gb|EED52291.1| conserved [Aspergillus flavus NRRL3357]
  misc_feature (1)..(307): NCBI GI: 145254761 Blast Desc: An18g02800 [Aspergillus niger] gi|134084324|emb|CAK48664.1| protein product [Aspergillus niger]
  misc_feature (1)..(332): NCBI GI: 256721577 Blast Desc: NECHADRAFT_92336 [Nectria haematococca mpVI 77-13-4]
  misc_feature (1)..(331): NCBI GI: 115383750 Blast Desc: [Aspergillus terreus NIH2624] gi|114196114|gb|EAU37814.1| [Aspergillus terreus NIH2624]
  misc_feature (3)..(256): NCBI GI: 238843568 Blast Desc: conserved [Microsporum canis CBS 113480]
  misc_feature (1)..(330): NCBI GI: 256723448 Blast Desc: NECHADRAFT_42269 [Nectria haematococca mpVI 77-13-4]
  misc_feature (55)..(254): SWISSPROT Homolog: EC 1.3.1.45 2'-hydroxyisoflavone reductase
MSVVAIAGGTGDLGGLIADTLQETGLYEVYVMSRKTINAKSRHISPLTGHQYSPLLQTDYSSEESLLEIFEQKKVNIVISVFIMDNDAVSDAQLRLIRAADQCSSVRRFIPSEFNVEYDVGDDILPYPEKKFHMISRRELEKTTTLEYTYVYPGMLMDYFGLPRVKSVLRGLCFFVDPENGRAMLPGDGEARMSMTLTVDVARYVALALQLDKWPRILSTVASTITLNELCGLVEQKLGRKLDISYQPVEKLLKHDVIDLQANIDYAHQQPERFPGGLQQLRGLIADLEAGVALGAYDLSKLDGHLDLVKEFEGQVPPPKRIEQLIEEAWKTV

SEQ ID NO: 30144 - DNA, 1109 bp, Muscodor strobelii
  misc_feature: SGI EST ID NO. CUFF.71310.0
  misc_feature: Variant of the nucleotide sequence at SEQ ID NO 30142
acacgcttgacagttgatcaatatagtaaaatatcacctttttcgaccctgaaagactcaaaagcgacattcacaagatgtctgtggtggccatcgctggtggcacgggcgacttgggtggcttgatcgctgataccctacaagagactggcctgtatgaggtctacgttatgtcaagaaagacgataaatgccaaatctcgtcatatttcgccattgacagggcaccaatattcccctctccttcaaacagactattcatccgaggagtctttgctcgagatctttgagcaaaagaaagtcaacatagtgatctcagtgttcattatggacaatgatgctgtgtcggacgcacaactacgcctaatccgcgctgctgatcaatgctcttccgttcggcgcttcattccatctgagttcaacgtcgaatatgatgttggtgatgacatcttaccatatccagaaaagaagtttcatatgatctctagacgcgagcttgaaaagacaaccactctagagtatacgtatgtctatccagggatgttgatggattactttgggcttccgcgagtgaagagtgtactgcgtggactttgcttctttgtcgacccggaaaatgggcgtgcaatgctacccggagacggcgaagcaagaatgagcatgactttgacagtggatgttgcccgatatgtggctcttgctcttcaacttgacaaatggccacgtattttaagcaccgtagcaagcactatcacattgaatgagctctgcgggcttgtggagcagaaactgggccgtaagcttgacatcagctatcagcctgtcgaaaaattgctgaagcacgatgtgatcgatcttcaagctaatatcgattatgcccaccaacagcctgaacgctttcctggaggattgcagcagttacgtgggctgattgcggacttggaggcaggagttgcactcggagcatatgatctgtcaaagctagacggacatctagatcttgtcaaggagtttgagggtcaagtgccgcctcctaagcgcattgagcagctgatagaggaggcttggaaaacagtgtagattaggtacctaatccatacgtcttgtgaa

SEQ ID NO: 30145 - DNA, 426 bp, Muscodor strobelii
  misc_feature: SGI cDNA ID NO. 570364
  misc_feature: Encodes the peptide sequence at SEQ ID NO 30146
atgagcatgactttgacagtggatgttgcccgatatgtggctcttgctcttcaacttgacaaatggccacgtattttaagcaccgtagcaagcactatcacattgaatgagctctgcgggcttgtggagcagaaactgggccgtaagcttgacatcagctatcagcctgtcgaaaaattgctgaagcacgatgtgatcgatcttcaagctaatatcgattatgcccaccaacagcctgaacgctttcctggaggattgcagcagttacgtgggctgattgcggacttggaggcaggagttgcactcggagcatatgatctgtcaaagctagacggacatctagatcttgtcaaggagtttgagggtcaagtgccgcctcctaagcgcattgagcagctgatagaggaggcttggaaaacagtgtag

SEQ ID NO: 30146 - protein, 141 aa, Muscodor strobelii
  misc_feature: SGI Peptide ID NO. 570364
  misc_feature (1)..(139): NCBI GI: 116197032 Blast Desc: CHGG_05114 [Chaetomium globosum CBS 148.51] gi|88181027|gb|EAQ88495.1| CHGG_05114 [Chaetomium globosum CBS 148.51]
  misc_feature (1)..(71): NCBI GI: 256730078 Blast Desc: NECHADRAFT_7302 [Nectria haematococca mpVI 77-13-4]
  misc_feature (1)..(115): NCBI GI: 145254761 Blast Desc: An18g02800 [Aspergillus niger] gi|134084324|emb|CAK48664.1| protein product [Aspergillus niger]
  misc_feature (1)..(107): NCBI GI: 39940278 Blast Desc: MGG_05101 [Magnaporthe grisea 70-15] gi|145010644|gb|EDJ95300.1| MGG_05101 [Magnaporthe grisea 70-15]
  misc_feature (1)..(108): NCBI GI: 261357174 Blast Desc: conserved [Verticillium albo-atrum VaMs.102]
  misc_feature (1)..(72): NCBI GI: 256725489 Blast Desc: NECHADRAFT_95181 [Nectria haematococca mpVI 77-13-4]
  misc_feature (1)..(122): NCBI GI: 46140119 Blast Desc: FG11574.1 [Gibberella zeae PH-1]
  misc_feature (1)..(139): NCBI GI: 256727905 Blast Desc: NECHADRAFT_46266 [Nectria haematococca mpVI 77-13-4]
  misc_feature (1)..(138): NCBI GI: 256723448 Blast Desc: NECHADRAFT_42269 [Nectria haematococca mpVI 77-13-4]
  misc_feature (6)..(66): NCBI GI: 255939810 Blast Desc: Pc16g03060 [Penicillium chrysogenum Wisconsin 54-1255] gi|211585297|emb|CAP92976.1| Pc16g03060 [Penicillium chrysogenum Wisconsin 54-1255]
MSMTLTVDVARYVALALQLDKWPRILSTVASTITLNELCGLVEQKLGRKLDISYQPVEKLLKHDVIDLQANIDYAHQQPERFPGGLQQLRGLIADLEAGVALGAYDLSKLDGHLDLVKEFEGQVPPPKRIEQLIEEAWKTV

SEQ ID NO: 30147 - DNA, 1109 bp, Muscodor strobelii; identical to SEQ ID NO: 30144
  misc_feature: SGI EST ID NO. CUFF.71310.0
  misc_feature: Variant of the nucleotide sequence at SEQ ID NO 30145

SEQ ID NO: 30148 - DNA, 7521 bp, Muscodor strobelii
  misc_feature: SGI cDNA ID NO. 570365
  misc_feature: Encodes the peptide sequence at SEQ ID NO 30149
atgcattgtgtggtgaccgaggctgaccagcacatggctgcaaggacaaccagtgttcagaacaccgaaacccaaggagattgtctacatcatctttttgaagatgcagttgcaaaatatgatgacaatactgctgtcatctgcggaaagtcagcactcacctttaaagagctgaacgaaatctcaaatcgcttcgctagagtccttgttcaaagaggcatcagacatggcgatttcgttgctgtagcgtttgagcgctctgtcgagctcgtcatggtattattggcggtttcaaaaactggtgcggcatatgtgccaatagatcctggatttcctgcggaacgtatcaatcaaatgctagaagacgctcaaccaagaatactgattattggcggaacgacgttcgacgcaatgtctctctggaaagatttatgtcttcacgtagacgaggaactgagcaggatgggccaagacttagacagcgataatctcgacttacctatgaaaaacgataatcttgtatatctcatgtgcaatatatcagacacctcaggttcgactggcagaccaaaaggtgtcaatatcagccataagagtgtccataacctactttcatcattgaaaaagaagccgggtctcagcgaaaacgacagactgcttgcaataacgacagtctcttttgacatggcagttgttgagctattcctgcctctaatctgtggcggagctaccgtcattgcacagaaccacgatatcaaagaccctaccgcacttatagagctaatgaaaatacacaatatcacagttatgcaaggcactcccgttgcttggcaaatgcttttggactccggatggcgtggtaaccctcatctaaacaagatcttctgtggcggcgaagctcttacacgccagcttgcaaataggttgctgagctgcagcgaacagacctggaacatgtacggtccaacagaagcaactgtctatgcttcgatatcaaatgtacgcaaagacggaagcattgacattggcggcccaatagacaattgctatctctatgttctcgatgacaagctgttaccagtacctcctggatcacctggagagctatacataagcggcagtggtgtggcgtctgggtatcgcaataacgatgacctgactagctccaaatttctagacgacccatttcatggaggaaagatgtatggaacaggtgacctcgcacatttcctcgagtccggcgaagtgagccttatgggccgtatcgatggacaagttaaaattcgaggatatagaatcgaggtcgcagatatcgaggcggcgattctccaacgagaggatatctcccaggcggtcgttgtctgccacgctgatcgactagcagcgtactgcgtactgaaagcagcgacagatgctgataataatcatgccaaactaccacttcggcaaacattacgtccctggctggcttcactactaccagaatacatgataccttcatttttcgttgaaatgaaagcttttgcaatcacaccgaacgggaaagtcgatcggaaagctcttccagatccgatagagtcaattcagcaaacaaacaagacaaatccgggttcggcgctcgaggatcagcttcgtgcgatatggtcaaacgttctaggccatgagtatgtcggcgttgatgataatttctttgagattggaggtgactccgcacgtcttgtccgtcttcaaaagaaactcgaattgttgttagatcggcgcttgccaataaccaagttatttgagcactatactattgagtcattaactgcgtatctcaactctcagtctaagaaacagaacccgaaccccgctactaagtcaagtcgagctagcaagaacgaagacatcgccatcatatctatggcctgcaggctgccaggcaacatctcaagtccgtcggagttttgggatctacttgagcgtgggggcgatgcgataacagacattccaaagagtcgctgggatgcggacgctttatatgatagcaacccagagtctcctggtaaaacatattgtcgccaaggcggctttatctcttcgatagatacatacgatgtctcgttcttcggtatctccccgcgagaggcacgtacactcgatcctgcgcagtacttgatgctagaaacttgttgggaaggattcgagcgagctggctatacaacgcagcaattacgcggtagtcaaactggcgttttcatcggcacgagtaatattctggctcatctcagtctcaactctaattcttcacaaagttgggcagatcttgatggatacgcagtcaccggctccgctggcggtaccatgtccggtcgcatttcgtatcatctagggttggagggtcctgcgatgacaatagacacagcgtgctcttcgtcactcgtaacgacacacctagcctgtaatgctctaaggcagggcgaatgcgaccttgctgtgtctggtggtgttagtctcttgctaaatccaggcttacatgtggagttcagtcgattacaaggcatgtcaccagacggacgatgtcgagcgttctcagaagacactgagggtactggatggtctgaaggtgcggcagcggttgtgctgaagcggctttctgatgctcaacgtgatggcgataagattgaagcggtaatacgcggcagcgccgtaaatcacgatggacgtagtgctacactaacgacgcctagcggttctgctcaagagaagctgatcaaaactgccttgtcggttgctaatctagagcccaacgatattgactatgtcgaagctcatggcactgcaacgaagcttggggacccaattgaagcgattgcactagcagaagttttcggtgccactcgtgttggccacgaacctctttggatcggttcagcaaaatcgaacatcggccatactcaagccactgctggcctggtcggtcttctgaaagtcgtcctagctatgaagcatagcattttacccaaaacaatgcatatcaccaaaccaactccagccgtcgactggcaatatggaaacattaccccggttcgagagaatcgcccatgggcatcacagctggatagaccgcgatgcgctggtataagtgcattcggcataggcggaacaaatgctcatgtgattatcgaagaacctccaagagaccgtgtcgatgtgaatggtagaataatagccactcggaatcatctagcgacgcccttcctcctctcagccgatacggacgccggtttgcgtgtccaggctgagaagctccatgctcatattatggctcgctgtactgaagacgacctcggagatcttgcctactctttagcaacaactcgcaatcattttcggaaacgggttgcattgacagccaaaaataagcatgagttattggacaagctgaaatgcgtcacgctgcccgatcgcttcatacttcctgtgagtgccgtatccttgaaagagcgaaagatcgcgttgcttttcactggccaagggagccagtttccaggcatgggtcaggagttatgtgagatcttcccaattttcaaagaggccatacaagatattgctgctatgttcacggatttggacgtaccgctactcgacgttatgtgggcgagccccggaagtgagcaagcgacactgttagatcgcacagacttcgcccagcctgctttatttacgctagaagtcgcattgtggcggctgtggcatagttggggaataaattcaaatttcctcctaggccatagcttgggcgagatcgtagcagctcatgtggcgggtattttagaaatttctgacgcctgtcgactggtgtctgctagaggccgaatgatggaagctcaatctggcgacgttaaaatggaatcgatcgacgccagtgctgcggagatacaagcagctatagactgtttagatgataacatcaagatcgatgtggctgcgttcaactcgcctacgcagatcgtcgtatccggttgcacggccggcgtcgaggatctggccaatcactttattatgaagggccgtaaaacaaaaacgctggtagttggtcacgcctttcactctcgccatatgaacggtgtcttggaagagtttcgagcagttgttcaaagtatttcattctatcctgctaagcgaaatgtcattagcagtgtatacggtaggcttgccaatccaggtgaattggagcaagctgactactgggtcaaccaaatccgagaatctgttcgattcgatgccagcattcggtcactccgcgatcatggtgttgacatcttcatcgaaataggcccacagccagtgttgagcggcctcggcgccgcttgttttgcggctgatgattcttgtaattcattgacatggctttcgtctatgaaacgtgacaaggccagtgacattacgattcagaagagcgtcggggagttacactgtcgacacgtcgcaattgactggttagcttattttggaactacatatcatcgacgtatagagctgcccacatacgccttccaacgagactacattgttccaatgcgcaaaaaacgcgccgatacttcaattgatatgacgaaaagttccatcactagtccggaatgcatttcgaattctcatcaattcgaaatatcttgggagcaagtgaagaccacaaagcactacgctcgcgaaacttggggcatctattatttaaccgatggcaatccatttgtggaatccataaaatcttgctttgcacgcacagatatcacattaatacgggttgatgacatcaagcacggtacaaagttgaatggtttgatctctgtgtggcactcggaggctgatatcatctcacaaacgcacgatttgatctctgaggcacttcatcaacttcattcggcagttgaaatacaatttagctcgccacttgtctggattactcaccaggcaataggcaccggcctcgaatccaatgatcacgcgtcaggactcggagcggctccattatggggtttgctgcgaaccgcccgaagcgagcatccggaactgcgctgccgtttagtagatcttgacgacgagatcggtacgtcgacaatatcagcattgatactgagcaacgaagcggaagtcgcagttagacaaaatcagatttatgttccgcgaatgctacctgcaagatcacaaccctcgaaatcatctagttcgcaccttatacgaccagatggcgcagtgttaatcacaggtggcctcggtgaccttggacgaagagctgcacgatggctggctcgagaccgagctgtccgtgacttggtactcagctcacgccgaggagtagcatcattcgctaccgataagttgattgcggatctttctcgactcggagcaagggccactctgataagctgtgacatggcagatagtgatgatgttaagtctttgatggcaatgtttggcccggaacgcccacttaggggcataatccattgcgctggcgtctctgattctggtgtcctcacgacaatgacacccgaaagatttgcaactacaatgaaacctaaggcacatggggcatggcttctgcaccgtttgactcttgatatggatttagacttctttgtaatgttctcttcaatatcaggtgtcttaggcatgccaggactagccaattacgcagcggccaatactttcgttgatgcgctggcgcatctgcgtcgcagtcagggattgccggcgacgtcaattgcatatggaacgtggagtggcgacggcatggcagcgaggctaacaaaagctacgaatgcacatctcgagcaatatggtatggataatctggcaacagatgatggactgagatttcttgaagaagcagtgttgagtggccgtccattgacagttgcggcctcgttggatttagaacgacttcaacgttactacttcgaacgtgggggcataccaagtctgcttcagtctttgcttcgcgaggtcgatactgctaaattccaggaaatggaactcgtccagactttgagcgacgctcgagctaatcaacggccagacattatcatgagtatggttcgcgaagtagttggcaaagccttgggtttcacaaaccctgttgatatagacttggatcgtcaaatgcaagacatcggtatcgactcattgacagcagtccagatacggaatcacttaggacttctgaccggtcttactcttccggtgaacatcacttttcgtcaccagaatttgagggccttgagccaatttttgcttggtcaactacataactcggaaacatcgtcttccgctacaaggtccagtagcgtaacgtcagcaacgactgtatctaatgttccacacctggacatgaccgcaattcgcaaagggtgcgttgacagtagctttacattcgagaacattacccaggactcgacgggctgctctctaagtcctcaatacgtttttctcacaggcgccaccggctttgtcggtgccttcatattgtatgaattgctgagccacggcattactacctactgtttggtgcgcgcgagcagcaccgacaaggcactgcaacgattggtgaccactcttgaggattacgagatgtgggaacccaagttttcatccttgatcattccgattgcaggcgacttaagtcagcctctgcttggcttagctgaagacgtcttcgacaatttggcggatgaggtgagcagtatatgtcattcgggcggtctcgtcgactggatgcgaccattcgaggactatgtcggtcccaatatcattagcgctcatgaaatcctgcgccttgcatctagaggtcggccaaagacgatacatcttgtgtctacaatctccacactgccaaagcatatgggccttgatttaacggaggacgatcaagaatatggctacggtacatcgaagtatatcgctgagagaatgatagcagccgctcgttggcgtggtgctaaagcgtccgtctatcgcttgccctatgtgaccgcatctactaccacgggtcacttccgacgagaccgtggcgattttttacataatttcatcactggatgtctcgaaatgggagcattcccttccttagacgccagcctatcgattgttctgcctgttgactatctgagcggaacaatagtagcagtaatgacgaaagacttggctcgaatcggacatgacttcgacttcgtcaatgcaaacgcgctaacgtgtaatgccttctttgagatggctgctgctcaccatggcggatcggagatcgtcccattcagtgcatggaagaagcgggctttatcgcatgctgcgacaaatccttcaagcccgttggctcgcattgccgtggtgcttgacaactacaccgatgaaacagcatccaatatgtttacaggctcacctgttggagcccacgtctttggacggacggactatcctgcaccgtcattaggtaaagatttcatcagtctttatctcgatcgttgccgcgctggattaaggtag

SEQ ID NO: 30149 - protein, 2506 aa, Muscodor strobelii
  misc_feature: SGI Peptide ID NO. 570365
  misc_feature (1166)..(1492): Pfam Id: PF00698 Pfam Desc: Acyl transferase domain
  misc_feature (1744)..(1911): Pfam Id: PF00106 Pfam Desc: short chain dehydrogenase
  misc_feature (54)..(453): Pfam Id: PF00501 Pfam Desc: AMP-binding enzyme
  misc_feature (1746)..(1968): Pfam Id: PF01370 Pfam Desc: NAD dependent epimerase/dehydratase family
  misc_feature (628)..(881): Pfam Id: PF00109 Pfam Desc: Beta-ketoacyl synthase, N-terminal domain
  misc_feature (889)..(1007): Pfam Id: PF02801 Pfam Desc: Beta-ketoacyl synthase, C-terminal domain
  misc_feature (1744)..(1924): Pfam Id: PF08659 Pfam Desc: KR domain
  misc_feature (2158)..(2387): Pfam Id: PF07993 Pfam Desc: Male sterility protein
  misc_feature (542)..(606): Pfam Id: PF00550 Pfam Desc: Phosphopantetheine attachment site
  misc_feature (2025)..(2092): Pfam Id: PF00550 Pfam Desc: Phosphopantetheine attachment site
  misc_feature (795)..(830): Pfam Id: PF00108 Pfam Desc: Thiolase, N-terminal domain
  misc_feature (549)..(1520): NCBI GI: 62737768 Blast Desc: polyketide synthase type I [Streptomyces aizunensis]
  misc_feature (549)..(1515): NCBI GI: 62737768 Blast Desc: polyketide synthase type I [Streptomyces aizunensis]
  misc_feature (563)..(1529): NCBI GI: 62737768 Blast Desc: polyketide synthase type I [Streptomyces aizunensis]
  misc_feature (510)..(2120): NCBI GI: 283138884 Blast Desc: EpoD [Sorangium cellulosum]
  misc_feature (626)..(2095): NCBI GI: 283138884 Blast Desc: EpoD [Sorangium cellulosum]
  misc_feature (562)..(1516): NCBI GI: 283138884 Blast Desc: EpoD [Sorangium cellulosum]
  misc_feature (557)..(1516): NCBI GI: 283138884 Blast Desc: EpoD [Sorangium cellulosum]
  misc_feature (530)..(2096): NCBI GI: 159038702 Blast Desc: Beta-ketoacyl synthase [Salinispora arenicola CNS-205] gi|157917537|gb|ABV98964.1| Beta-ketoacyl synthase [Salinispora arenicola CNS-205]
  misc_feature (553)..(2096): NCBI GI: 159038702 Blast Desc: Beta-ketoacyl synthase [Salinispora arenicola CNS-205] gi|157917537|gb|ABV98964.1| Beta-ketoacyl synthase [Salinispora arenicola CNS-205]
  misc_feature (553)..(1514): NCBI GI: 159038702 Blast Desc: Beta-ketoacyl synthase [Salinispora arenicola CNS-205] gi|157917537|gb|ABV98964.1| Beta-ketoacyl synthase [Salinispora arenicola CNS-205]
  misc_feature (562)..(2096): SWISSPROT Homolog: EC 2.3.1.94 6-deoxyerythronolide-B synthase
  misc_feature: Useful for fungicidal and/or biocontrol applications
MHCVVTEADQHMAARTTSVQNTETQGDCLHHLFEDAVAKYDDNTAVICGKSALTFKELNEISNRFARVLVQRGIRHGDFVAVAFERSVELVMVLLAVSKTGAAYVPIDPGFPAERINQMLEDAQPRILIIGGTTFDAMSLWKDLCLHVDEELSRMGQDLDSDNLDLPMKNDNLVYLMCNISDTSGSTGRPKGVNISHKSVHNLLSSLKKKPGLSENDRLLAITTVSFDMAVVELFLPLICGGATVIAQNHDIKDPTALIELMKIHNITVMQGTPVAWQMLLDSGWRGNPHLNKIFCGGEALTRQLANRLLSCSEQTWNMYGPTEATVYASISNVRKDGSIDIGGPIDNCYLYVLDDKLLPVPPGSPGELYISGSGVASGYRNNDDLTSSKFLDDPFHGGKMYGTGDLAHFLESGEVSLMGRIDGQVKIRGYRIEVADIEAAILQREDISQAVVVCHADRLAAYCVLKAATDADNNHAKLPLRQTLRPWLASLLPEYMIPSFFVEMKAFAITPNGKVDRKALPDPIESIQQTNKTNPGSALEDQLRAIWSNVLGHEYVGVDDNFFEIGGDSARLVRLQKKLELLLDRRLPITKLFEHYTIESLTAYLNSQSKKQNPNPATKSSRASKNEDIAIISMACRLPGNISSPSEFWDLLERGGDAITDIPKSRWDADALYDSNPESPGKTYCRQGGFISSIDTYDVSFFGISPREARTLDPAQYLMLETCWEGFERAGYTTQQLRGSQTGVFIGTSNILAHLSLNSNSSQSWADLDGYAVTGSAGGTMSGRISYHLGLEGPAMTIDTACSSSLVTTHLACNALRQGECDLAVSGGVSLLLNPGLHVEFSRLQGMSPDGRCRAFSEDTEGTGWSEGAAAVVLKRLSDAQRDGDKIEAVIRGSAVNHDGRSATLTTPSGSAQEKLIKTALSVANLEPNDIDYVEAHGTATKLGDPIEAIALAEVFGATRVGHEPLWIGSAKSNIGHTQATAGLVGLLKVVLAMKHSILPKTMHITKPTPAVDWQYGNITPVRENRPWASQLDRPRCAGISAFGIGGTNAHVIIEEPPRDRVDVNGRIIATRNHLATPFLLSADTDAGLRVQAEKLHAHIMARCTEDDLGDLAYSLATTRNHFRKRVALTAKNKHELLDKLKCVTLPDRFILPVSAVSLKERKIALLFTGQGSQFPGMGQELCEIFPIFKEAIQDIAAMFTDLDVPLLDVMWASPGSEQATLLDRTDFAQPALFTLEVALWRLWHSWGINSNFLLGHSLGEIVAAHVAGILEISDACRLVSARGRMMEAQSGDVKMESIDASAAEIQAAIDCLDDNIKIDVAAFNSPTQIVVSGCTAGVEDLANHFIMKGRKTKTLVVGHAFHSRHMNGVLEEFRAVVQSISFYPAKRNVISSVYGRLANPGELEQADYWVNQIRESVRFDASIRSLRDHGVDIFIEIGPQPVLSGLGAACFAADDSCNSLTWLSSMKRDKASDITIQKSVGELHCRHVAIDWLAYFGTTYHRRIELPTYAFQRDYIVPMRKKRADTSIDMTKSSITSPECISNSHQFEISWEQVKTTKHYARETWGIYYLTDGNPFVESIKSCFARTDITLIRVDDIKHGTKLNGLISVWHSEADIISQTHDLISEALHQLHSAVEIQFSSPLVWITHQAIGTGLESNDHASGLGAAPLWGLLRTARSEHPELRCRLVDLDDEIGTSTISALILSNEAEVAVRQNQIYVPRMLPARSQPSKSSSSHLIRPDGAVLITGGLGDLGRRAARWLARDRAVRDLVLSSRRGVASFATDKLIADLSRLGARATLISCDMADSDDVKSLMAMFGPERPLRGIIHCAGVSDSGVLTTMTPERFATTMKPKAHGAWLLHRLTLDMDLDFFVMFSSISGVLGMPGLANYAAANTFVDALAHLRRSQGLPATSIAYGTWSGDGMAARLTKATNAHLEQYGMDNLATDDGLRFLEEAVLSGRPLTVAASLDLERLQRYYFERGGIPSLLQSLLREVDTAKFQEMELVQTLSDARANQRPDIIMSMVREVVGKALGFTNPVDIDLDRQMQDIGIDSLTAVQIRNHLGLLTGLTLPVNITFRHQNLRALSQFLLGQLHNSETSSSATRSSSVTSATTVSNVPHLDMTAIRKGCVDSSFTFENITQDSTGCSLSPQYVFLTGATGFVGAFILYELLSHGITTYCLVRASSTDKALQRLVTTLEDYEMWEPKFSSLIIPIAGDLSQPLLGLAEDVFDNLADEVSSICHSGGLVDWMRPFEDYVGPNIISAHEILRLASRGRPKTIHLVSTISTLPKHMGLDLTEDDQEYGYGTSKYIAERMIAAARWRGAKASVYRLPYVTASTTTGHFRRDRGDFLHNFITGCLEMGAFPSLDASLSIVLPVDYLSGTIVAVMTKDLARIGHDFDFVNANALTCNAFFEMAAAHHGGSEIVPFSAWKKRALSHAATNPSSPLARIAVVLDNYTDETASNMFTGSPVGAHVFGRTDYPAPSLGKDFISLYLDRCRAGLR

SEQ ID NO: 30150 - DNA, 2583 bp, Muscodor strobelii
  misc_feature: SGI cDNA ID NO. 570366
  misc_feature: Encodes the peptide sequence at SEQ ID NO 30151
atgagcaaccctccggattactatgccttatcttaccggtggggtgatacctcgcaaagagccgggctcatcgtaaacggaagccacatcgatatctcgatgagcttgggtgaagcactggcctcgatcaatttgaccccgggcgtcctaatttgggcagacgctatatgtatcaaccaaaatgatctctatgagaaaagctatcaggtgcgaatgatgggcttgatctacacaaaagcccagagcacagtatcatggattggacgcgagctacccagtgttgaacacgctcatgcactttgtgccgagatacaacgcttggccgcaaacgatgaagatgaccagctacgagcttcctatttcaccaaggccttgcgatgccatcaacagccggttcgtgctctctatgcgctacacgaacttctttctcagccatactgggagcgggtttggatcatccaagaactcattaaggctaagtcggttgaagtccggtgcggctctttcagtttcagtctggaaactctgctttggtgttcgtctcggctgaaaaatttctcgtcgcgagctcagagcctgttagatgcagtaaagaagttcaagataacggagtcaacagtgcgtcatggaggacaccgaatctctctgtttgaggctatgataacgacacggcatttctttgcttctgatgagcgtgataaagtctatgctctactcggactaacacgagatggaaacgacctggtcccgataccaacatatactatgcaggcgcaagaattgttcgaatcattgacagttgcgattctccattcgccacaacaggcattgattccgctattatcttcacgagcccctctgcgctatagattcccctgcgcaccgtcatgggccgtggattgggcagatctagcactgacccttccaccctggctaactcggaattctgagaagatcaccacgaatagtctcttcgacgttaagggaactaccaatccttcggtcaactccgaatactctattcatttggcaactgaaggaagaccgattggcatcatctgcagcacaaccgagacaacagatttccacgaaggtcaagatccgactgagggtgatccattagcgagattgaaaaagacggcctcgagcgttttgaagtcgatatgcaatagcctgctactaaaaccagccccaatagttgtggcaggcaaaacaatcctcgagacagagtgcatcgaatcactggcccgcttgattgtatgcggaaagcactccacagcatggggggtgcccgacatggatcacctgatcgatcaagcatctcaacttggggaattggttttctctgaatggtctctcagtgttttggccgcagcctggcttcttggcctcggacctaggaatttgagtgaggcatcagacaggaaggataagcggccaaacataccaacttcgaaagccaggaaattttctgacgattcaaccacaactaccgaaagctccaaagacgtatccgaggtcgtaaccatgcccttttctcctgtatgggtggctcagcttgggaggaagcattcaagtaaagacggagaattctcgcctgcaagcaaggcggatgagacacgggcaacggccttgaaaaaattgacagagcgtctgctgcacttctctgagtcctcttcaggaattaaagatgacgaccgaccaatgagccctgatcagctgaaagaatcccgagcgcaaacacctgaacccccgatcgcaagcaagacagaagaatcaggagcggtaaatttcaggaagatagccgagcgcctcatggccgagcacaagcagcaattccctgactcctcattggctgacaaaacagaagaaagtcgacctattggcctcaaaaagctaacggaatctctgcagcaattggccacctctcgcacacgatcatttgccataccaccttgtcgattgcctcccgcagcgttcgagttgtggcacgaagtcttttcttccttgaatgccacccctgaaaacggccttgtactagcaaatgtctcttttaagtcacattgggcagtcatcttagctcgtcaaggaacagcgcctggcgatcaactgtactggctcaataacttccctttgccgcttgtcctacgcgacatcggtgatggacaatttgccttgattggtgaggcatgcgtgggtcctaatcctgataaacagtggacagcggcgaagaatatccaatggctcaaagagaaggaatctgtaccagaaccatctaaaatccagatagacttgggtcatgatgggaccatcttggatagcgaacagctgtcttcatcagatgagctagatgaaaccccactggaagaagattcaacgcaaatcgacgatatgcggagcttcgacctgacccagagcgggatttggcaagcttcacagaacgcagacgttaagtatagcgctgaattcgccatccgtccttcatccattcaaggcgaccattgcactcccaccccgctattcgacagcattatacaggagaggccagctattattaacgagcttggatcagctggctattag

SEQ ID NO: 30151 - protein, 860 aa, Muscodor strobelii
  misc_feature: SGI Peptide ID NO. 570366
  misc_feature (7)..(155): Pfam Id: PF06985 Pfam Desc: Heterokaryon incompatibility protein (HET)
  misc_feature (7)..(88): Pfam Id: PF06985 Pfam Desc: Heterokaryon incompatibility protein (HET)
  misc_feature (5)..(304): NCBI GI: 256731898 Blast Desc: NECHADRAFT_80737 [Nectria haematococca mpVI 77-13-4]
  misc_feature (5)..(270): NCBI GI: 169604370 Blast Desc: SNOG_05197 [Phaeosphaeria nodorum SN15] gi|111066468|gb|EAT87588.1| SNOG_05197 [Phaeosphaeria nodorum SN15]
  misc_feature (5)..(249): NCBI GI: 256721196 Blast Desc: NECHADRAFT_82325 [Nectria haematococca mpVI 77-13-4]
  misc_feature (1)..(264): NCBI GI: 256722665 Blast Desc: NECHADRAFT_87188 [Nectria haematococca mpVI 77-13-4]
  misc_feature (1)..(300): NCBI GI: 154305655 Blast Desc: BC1G_07642 [Botryotinia fuckeliana B05.10] gi|150853161|gb|EDN28353.1| BC1G_07642 [Botryotinia fuckeliana B05.10]
  misc_feature (1)..(301): NCBI GI: 115449831 Blast Desc: [Aspergillus terreus NIH2624] gi|114187656|gb|EAU29356.1| [Aspergillus terreus NIH2624]
  misc_feature (1)..(177): NCBI GI: 256726238 Blast Desc: NECHADRAFT_23734 [Nectria haematococca mpVI 77-13-4]
  misc_feature (6)..(301): NCBI GI: 256733030 Blast Desc: NECHADRAFT_78922 [Nectria haematococca mpVI 77-13-4]
  misc_feature (5)..(271): NCBI GI: 145609415 Blast Desc: MGG_13423 [Magnaporthe grisea 70-15] gi|145016783|gb|EDK01213.1| MGG_13423 [Magnaporthe grisea 70-15]
  misc_feature (7)..(301): NCBI GI: 145234110 Blast Desc: An02g12950 [Aspergillus niger] gi|134057368|emb|CAK37923.1| protein product [Aspergillus niger]
MSNPPDYYALSYRWGDTSQRAGLIVNGSHIDISMSLGEALASINLTPGVLIWADAICINQNDLYEKSYQVRMMGLIYTKAQSTVSWIGRELPSVEHAHALCAEIQRLAANDEDDQLRASYFTKALRCHQQPVRALYALHELLSQPYWERVWIIQELIKAKSVEVRCGSFSFSLETLLWCSSRLKNFSSRAQSLLDAVKKFKITESTVRHGGHRISLFEAMITTRHFFASDERDKVYALLGLTRDGNDLVPIPTYTMQAQELFESLTVAILHSPQQALIPLLSSRAPLRYRFPCAPSWAVDWADLALTLPPWLTRNSEKITTNSLFDVKGTTNPSVNSEYSIHLATEGRPIGIICSTTETTDFHEGQDPTEGDPLARLKKTASSVLKSICNSLLLKPAPIVVAGKTILETECIESLARLIVCGKHSTAWGVPDMDHLIDQASQLGELVFSEWSLSVLAAAWLLGLGPRNLSEASDRKDKRPNIPTSKARKFSDDSTTTTESSKDVSEVVTMPFSPVWVAQLGRKHSSKDGEFSPASKADETRATALKKLTERLLHFSESSSGIKDDDRPMSPDQLKESRAQTPEPPIASKTEESGAVNFRKIAERLMAEHKQQFPDSSLADKTEESRPIGLKKLTESLQQLATSRTRSFAIPPCRLPPAAFELWHEVFSSLNATPENGLVLANVSFKSHWAVILARQGTAPGDQLYWLNNFPLPLVLRDIGDGQFALIGEACVGPNPDKQWTAAKNIQWLKEKESVPEPSKIQIDLGHDGTILDSEQLSSSDELDETPLEEDSTQIDDMRSFDLTQSGIWQASQNADVKYSAEFAIRPSSIQGDHCTPTPLFDSIIQERPAIINELGSAGY

SEQ ID NO: 30152 - DNA, 1617 bp, Muscodor strobelii
  misc_feature: SGI EST ID NO. CUFF.71345.0
  misc_feature: Variant of the nucleotide sequence at SEQ ID NO 30150
ctgagggtgatccattagcgagattgaaaaagacggcctcgagcgttttgaagtcgatatgcaatagcctgctactaaaaccagccccaatagttgtggcaggcaaaacaatcctcgagacagagtgcatcgaatcactggcccgcttgattgtatgcggaaagcactccacagcatggggggtgcccgacatggatcacctgatcgatcaagcatctcaacttggggaattggttttctctgaatggtctctcagtgttttggccgcagcctggcttcttggcctcggacctaggaatttgagtgaggcatcagacaggaaggataagcggccaaacataccaacttcgaaagccaggaaattttctgacgattcaaccacaactaccgaaagctccaaagacgtatccgaggtcgtaaccatgcccttttctcctgtatgggtggctcagcttgggaggaagcattcaagtaaagacggagaattctcgcctgcaagcaaggcggatgagacacgggcaacggccttgaaaaaattgacagagcgtctgctgcacttctctgagtcctcttcaggaattaaagatgacgaccgaccaatgagccctgatcagctgaaagaatcccgagcgcaaacacctgaacccccgatcgcaagcaagacagaagaatcaggagcggtaaatttcaggaagatagccgagcgcctcatggccgagcacaagcagcaattccctgactcctcattggctgacaaaacagaagaaagtcgacctattggcctcaaaaagctaacggaatctctgcagcaattggccacctctcgcacacgatcatttgccataccaccttgtcgattgcctcccgcagcgttcgagttgtggcacgaagtcttttcttccttgaatgccacccctgaaaacggccttgtactagcaaatgtctcttttaagtcacattgggcagtcatcttagctcgtcaaggaacagcgcctggcgatcaactgtactggctcaataacttccctttgccgcttgtcctacgcgacatcggtgatggacaatttgccttgattggtgaggcatgcgtgggtcctaatcctgataaacagtggacagcggcgaagaatatccaatggctcaaagagaaggaatctgtaccagaaccatctaaaatccagatagacttgggtcatgatgggaccatcttggatagcgaacagctgtcttcatcagatgagctagatgaaaccccactggaagaagattcaacgcaaatcgacgatatgcggagcttcgacctgacccagagcgggatttggcaagcttcacagaacgcagacgttaagtatagcgctgaattcgccatccgtccttcatccattcaaggcgaccattgcactcccaccccgctattcgacagcattatacaggagaggccagctattattaacgagcttggatcagctggctattaggaaataccaagagtactatatttgctcaatgcctgtcatagtgtcaggaatataaaggagttcggagttctagattgaaacaacaaaaagaccttatcatactgccaacggtctgtacatacacttatgaatataattg

SEQ ID NO: 30153 - DNA, 3030 bp, Muscodor strobelii
  misc_feature: SGI cDNA ID NO. 570367
  misc_feature: Encodes the peptide sequence at SEQ ID NO 30154
atggcgtctgcgaaacagacaagtgacgaactacgatcattctacagtgcccgcgcctcaatcgaagacgactacgcccgaaaactcatgtcgctatgccgaaaagccctaggatcacacgaaatgggctccctgaagtcatcgctcgatacggtacgcggagaagtagagaacatggcaaaacagcacgcaagcattgcgcagcagatgaagtcagagctcgaggaacccctggcagccttcgctggtggaatgaaagagcgacgtaaaatcatccagaacacagtagagaagctattaaaagtcaagatacagcaaacgcagacggtcaacaagactcgagatcgatacgaacaagactgcctaaggataaaaggctacttagcacaaggccacatggttatgggacaagaggagcgcaaaaacaaagcaaaacttgagaagacgcagattagtctggcaagctccaatgcagagtacgaagctgcagttaaagccttggaagataccacggcacgctggaaccgtgaatggaaagcggctgccgacaagttccaagatcttgaagaggagagactggacttcacaaagagcagtctgtggacattagcgaatattgcgtctacagtttgtgttagcgacgatgcctcatgcgagaaaatccggttgtcccttgagaaaatggacgttgagaaggacattgttcatttcatcaaagagaaaggcactggtcaagagattccagacccgcccaagtatatcaacttctgccggggagatatggacgaccaccgctcagaagcttcggacgatgacaattactctgttgcgcaatttcctcgcagcatcaatccggccttccgcacttcgtcgccccagccatcgaccttcgagtctcatcatgaccccaactccgctcttgcccgtgatttgggccacggcgagccagtagcgcctctgcaaatggacatgaatcctccttcgcagaagagccagcaacaggtcatgccgtcccgaggatctctcgatattgaccactcacctcttgtaattccccaggagcgccgtgagaacagctattcacaggtcgcaccgcccctggatcgccgagagaataattattcgcaaaaccatcctcccctggatcgtcgcaatgacagcttttcgcaggtgatgtctcctcaagaccgactcgacaagcaagatcgccgagtggtgcagcaggcacagcaatatgattccgaacaatttgcagctgtgcctcatgatccatacccaatggatggcatgaccatgctctgccgcacagacggtgtaatgaattcggcaacgaattccaacgtttcgtctagattcgacggtatgaagtcagcgaccacatcgaatatctcgtcacgatacgacaatctcaattcaggaacaagctccaacgtctccaatagattcgatggcatgaattcagccaccagttcaaacttatctgcgcggccgtcgagccgcgacgacaacagcgattattccaatcccacgtcgttctctagtcaagaccctcctaacacaaatgtcgcacctcccaaaccggagcctattgttgcacagccggctgctatagagccagagaagcgactcttcaagaagaagagtggtttcttccagaatcacagtccattccgccgcaagagcacgaaagatatccagcagcccaataccaacaggaacacctggagccccgtgactgttcagagctcgtcctctactccccgtagaccccaggtttatggatcagacacgcggcaaaacatgatcgcagacaggactgccagcccgaagcccattgacgcgaacgcaacgttagcactgaacgtcggtcagaatgtgttccctgtagccaatacagacaagcgcaagacggctgacaacagcgcacgacccgtacaagaggagctggaccccattgctcgagcgctggcagagctgaagggagttggagacaccaagcaatccgcaagccggatctccgccgatcgttaccatggtatctctacacccgttcccgatcggacacaggaccaacatcaatcattcaaccgcactacgccgacgggaagaccaatgagcgaggccgctggtggggcgagaggcgctccgcccccttcatacgacacgcctgtacagaggttaggcgtgccttcacctgctgtgacgtcgaaggccatgaaagaatctactcgaaagtggacggaatcaaagagagacccgtttactgcctcacgtccggcctccgtgtacaacagtactccctcacgacccgcgaccagaagctccgatgtcccacgtgctgtatcccctgcccctccccgcagcgcttctcctcggcctggtatgcacccggacacacgccaggcacaccgctcggcgtcacctaacccatatagtgggagccagcacagggcctcgccacagactaatatgccaccccatcgtggctcagatcaaggattctatagacataactctcgtcagaactcacctaacacagcacactcacgaacagcttctccggctccttaccgaggcgattatgaccgaccttctagcagccgaggaagtgcaatggcagtccaactcgccccggttggcggagacggatcagtttatggtggttccatgcgcggaagaggaggcggaggaggaggaggtaataatggccgtcccggtacgagctccagctctcgtgctatgagcttctatgatggtcgcgatccgaacgtacaggagaatcgacagcgcagcaagagtgttgccgacccatctcgacagtataccccagaaggccgtgctatcctgcattatgcacgagcattgtacatgtaccaagctgctattcctgaggaattgggctttgcgaagggtgatacgctcgctgttctccgacaccaggatgatggatggtgggaggcagaaattcacgccggacaagacgtgggacgaggcgggctggttcccagcaattacctccagccttgttaa

SEQ ID NO: 30154 - protein, 1009 aa, Muscodor strobelii
  misc_feature: SGI Peptide ID NO. 570367
  misc_feature (950)..(1009): Pfam Id: PF00018 Pfam Desc: SH3 domain
  misc_feature (951)..(1009): Pfam Id: PF07653 Pfam Desc: Variant SH3 domain
  misc_feature (9)..(70): Pfam Id: PF00611 Pfam Desc: Fes/CIP4 homology domain
  misc_feature (17)..(1009): NCBI GI: 145606190 Blast Desc: MGG_11899 [Magnaporthe grisea 70-15] gi|145013914|gb|EDJ98555.1| MGG_11899 [Magnaporthe grisea 70-15]
  misc_feature (1)..(1009): NCBI GI: 171682082 Blast Desc: protein product [Podospora anserina] gi|170941000|emb|CAP66650.1| protein product [Podospora anserina]
  misc_feature (1)..(1007): NCBI GI: 119491877 Blast Desc: SH3 domain protein [Neosartorya fischeri NRRL 181] gi|119411593|gb|EAW21536.1| SH3 domain protein [Neosartorya fischeri NRRL 181]
  misc_feature (1)..(1007): NCBI GI: 242782312 Blast Desc: cell division control protein (Cdc15), [Talaromyces stipitatus ATCC 10500] gi|218720121|gb|EED19540.1| cell division control protein (Cdc15), [Talaromyces stipitatus ATCC 10500]
  misc_feature (1)..(1007): NCBI GI: 212526996 Blast Desc: cell division control protein (Cdc15), [Penicillium marneffei ATCC 18224] gi|210073053|gb|EEA27140.1| cell division control protein (Cdc15), [Penicillium marneffei ATCC 18224]
  misc_feature (1)..(1007): NCBI GI: 146323408 Blast Desc: cell division control protein (Cdc15) [Aspergillus fumigatus Af293] gi|129558305|gb|EAL92556.2| cell division control protein (Cdc15), [Aspergillus fumigatus Af293] cell
  misc_feature (1)..(1007): NCBI GI: 238487060 Blast Desc: cell division control protein (Cdc15), [Aspergillus flavus NRRL3357] gi|220699647|gb|EED55986.1| cell division control protein (Cdc15), [Aspergillus flavus NRRL3357]
  misc_feature (17)..(1009): NCBI GI: 258563678 Blast Desc: conserved [Uncinocarpus reesii 1704] gi|237908091|gb|EEP82492.1| conserved [Uncinocarpus reesii 1704]
  misc_feature (1)..(331): NCBI GI: 46128195 Blast Desc: FG08475.1 [Gibberella zeae PH-1]
  misc_feature (1)..(321): NCBI GI: 116202181 Blast Desc: CHGG_08975 [Chaetomium globosum CBS 148.51] gi|88177493|gb|EAQ84961.1| CHGG_08975 [Chaetomium globosum CBS 148.51]
MASAKQTSDELRSFYSARASIEDDYARKLMSLCRKALGSHEMGSLKSSLDTVRGEVENMAKQHASIAQQMKSELEEPLAAFAGGMKERRKIIQNTVEKLLKVKIQQTQTVNKTRDRYEQDCLRIKGYLAQGHMVMGQEERKNKAKLEKTQISLASSNAEYEAAVKALEDTTARWNREWKAAADKFQDLEEERLDFTKSSLWTLANIASTVCVSDDASCEKIRLSLEKMDVEKDIVHFIKEKGTGQEIPDPPKYINFCRGDMDDHRSEASDDDNYSVAQFPRSINPAFRTSSPQPSTFESHHDPNSALARDLGHGEPVAPLQMDMNPPSQKSQQQVMPSRGSLDIDHSPLVIPQERRENSYSQVAPPLDRRENNYSQNHPPLDRRNDSFSQVMSPQDRLDKQDRRVVQQAQQYDSEQFAAVPHDPYPMDGMTMLCRTDGVMNSATNSNVSSRFDGMKSATTSNISSRYDNLNSGTSSNVSNRFDGMNSATSSNLSARPSSRDDNSDYSNPTSFSSQDPPNTNVAPPKPEPIVAQPAAIEPEKRLFKKKSGFFQNHSPFRRKSTKDIQQPNTNRNTWSPVTVQSSSSTPRRPQVYGSDTRQNMIADRTASPKPIDANATLALNVGQNVFPVANTDKRKTADNSARPVQEELDPIARALAELKGVGDTKQSASRISADRYHGISTPVPDRTQDQHQSFNRTTPTGRPMSEAAGGARGAPPPSYDTPVQRLGVPSPAVTSKAMKESTRKWTESKRDPFTASRPASVYNSTPSRPATRSSDVPRAVSPAPPRSASPRPGMHPDTRQAHRSASPNPYSGSQHRASPQTNMPPHRGSDQGFYRHNSRQNSPNTAHSRTASPAPYRGDYDRPSSSRGSAMAVQLAPVGGDGSVYGGSMRGRGGGGGGGNNGRPGTSSSSRAMSFYDGRDPNVQENRQRSKSVADPSRQYTPEGRAILHYARALYMYQAAIPEELGFAKGDTLAVLRHQDDGWWEAEIHAGQDVGRGGLVPSNYLQPC

SEQ ID NO: 30155 - DNA, 2903 bp, Muscodor strobelii
  misc_feature: SGI EST ID NO. CUFF.71357.0
  misc_feature: Variant of the nucleotide sequence at SEQ ID NO 30153
gaggagagactggacttcacaaagagcagtctgtggacattagcgaatattgcgtctacagtttgtgttagcgacgatgcctcatgcgagaaaatccggttgtcccttgagaaaatggacgttgagaaggacattgttcatttcatcaaagagaaaggcactggtcaagagattccagacccgcccaagtatatcaacttctgccggggagatatggacgaccaccgctcagaagcttcggacgatgacaattactctgttgcgcaatttcctcgcagcatcaatccggccttccgcacttcgtcgccccagccatcgaccttcgagtctcatcatgaccccaactccgctcttgcccgtgatttgggccacggcgagccagtagcgcctctgcaaatggacatgaatcctccttcgcagaagagccagcaacaggtcatgccgtcccgaggatctctcgatattgaccactcacctcttgtaattccccaggagcgccgtgagaacagctattcacaggtcgcaccgcccctggatcgccgagagaataattattcgcaaaaccatcctcccctggatcgtcgcaatgacagcttttcgcaggtgatgtctcctcaagaccgactcgacaagcaagatcgccgagtggtgcagcaggcacagcaatatgattccgaacaatttgcagctgtgcctcatgatccatacccaatggatggcatgaccatgctctgccgcacagacggtgtaatgaattcggcaacgaattccaacgtttcgtctagattcgacggtatgaagtcagcgaccacatcgaatatctcgtcacgatacgacaatctcaattcaggaacaagctccaacgtctccaatagattcgatggcatgaattcagccaccagttcaaacttatctgcgcggccgtcgagccgcgacgacaacagcgattattccaatcccacgtcgttctctagtcaagaccctcctaacacaaatgtcgcacctcccaaaccggagcctattgttgcacagccggctgctatagagccagagaagcgactcttcaagaagaagagtggtttcttccagaatcacagtccattccgccgcaagagcacgaaagatatccagcagcccaataccaacaggaacacctggagccccgtgactgttcagagctcgtcctctactccccgtagaccccaggtttatggatcagacacgcggcaaaacatgatcgcagacaggactgccagcccgaagcccattgacgcgaacgcaacgttagcactgaacgtcggtcagaatgtgttccctgtagccaatacagacaagcgcaagacggctgacaacagcgcacgacccgtacaagaggagctggaccccattgctcgagcgctggcagagctgaagggagttggagacaccaagcaatccgcaagccggatctccgccgatcgttaccatggtatctctacacccgttcccgatcggacacaggaccaacatcaatcattcaaccgcactacgccgacgggaagaccaatgagcgaggccgctggtggggcgagaggcgctccgcccccttcatacgacacgcctgtacagaggttaggcgtgccttcacctgctgtgacgtcgaaggccatgaaagaatctactcgaaagtggacggaatcaaagagagacccgtttactgcctcacgtccggcctccgtgtacaacagtactccctcacgacccgcgaccagaagctccgatgtcccacgtgctgtatcccctgcccctccccgcagcgcttctcctcggcctggtatgcacccggacacacgccaggcacaccgctcggcgtcacctaacccatatagtgggagccagcacagggcctcgccacagactaatatgccaccccatcgtggctcagatcaaggattctatagacataactctcgtcagaactcacctaacacagcacactcacgaacagcttctccggctccttaccgaggcgattatgaccgaccttctagcagccgaggaagtgcaatggcagtccaactcgccccggttggcggagacggatcagtttatggtggttccatgcgcggaagaggaggcggaggaggaggaggtaataatggccgtcccggtacgagctccagctctcgtgctatgagcttctatgatggtcgcgatccgaacgtacaggagaatcgacagcgcagcaagagtgttgccgacccatctcgacagtataccccagaaggccgtgctatcctgcattatgcacgagcattgtacatgtaccaagctgctattcctgaggaattgggctttgcgaagggtgatacgctcgctgttctccgacaccaggatgatggatggtgggaggcagaaattcacgccggacaagacgtgggacgaggcgggctggttcccagcaattacctccagccttgttaaattgcccttccgcttttttgattggttttgcatgataccattgatgagatgaagtttgaaccacgcttctgcgttttggtgtggatatggcttttgcatgagctgcatatatcgcgtctgttggagttagcattgtgtacaagactttggtcttttgtctctctgtctgtgtataacgaacgaatgttgatgaggtatgagaactttcttgttgatagcttttgagagtctcatagcctatccatgataaaggtaaaagggagttaagtttataagaaattgcattaccataatgaaaatacatcgattaaaatcaccatcttcgtctggactctccgtgatatgattaattttccaaaaatttacccttgatcataatgtgggagtttatgttgccatacgatatgttgccaatggaatatgatttcagtggttgcgac

SEQ ID NO: 30156 - DNA, 3126 bp, Muscodor strobelii
  misc_feature: SGI cDNA ID NO. 570368
  misc_feature: Encodes the peptide sequence at SEQ ID NO 30157
atgccttcagctgcagatggcccgacagtggcactgtcgttcgccaataacttctggggtaaagaagatgccggtgttgggccattgctcgatcgcatggcgtctgcgaaacagacaagtgacgaactacgatcattctacagtgcccgcgcctcaatcgaagacgactacgcccgaaaactcatgtcgctatgccgaaaagccctaggatcacacgaaatgggctccctgaagtcatcgctcgatacggtacgcggagaagtagagaacatggcaaaacagcacgcaagcattgcgcagcagatgaagtcagagctcgaggaacccctggcagccttcgctggtggaatgaaagagcgacgtaaaatcatccagaacacagtagagaagctattaaaagtcaagatacagcaaacgcagacggtcaacaagactcgagatcgatacgaacaagactgcctaaggataaaaggctacttagcacaaggccacatggttatgggacaagaggagcgcaaaaacaaagcaaaacttgagaagacgcagattagtctggcaagctccaatgcagagtacgaagctgcagttaaagccttggaagataccacggcacgctggaaccgtgaatggaaagcggctgccgacaagttccaagatcttgaagaggagagactggacttcacaaagagcagtctgtggacattagcgaatattgcgtctacagtttgtgttagcgacgatgcctcatgcgagaaaatccggttgtcccttgagaaaatggacgttgagaaggacattgttcatttcatcaaagagaaaggcactggtcaagagattccagacccgcccaagtatatcaacttctgccggggagatatggacgaccaccgctcagaagcttcggacgatgacaattactctgttgcgcaatttcctcgcagcatcaatccggccttccgcacttcgtcgccccagccatcgaccttcgagtctcatcatgaccccaactccgctcttgcccgtgatttgggccacggcgagccagtagcgcctctgcaaatggacatgaatcctccttcgcagaagagccagcaacaggtcatgccgtcccgaggatctctcgatattgaccactcacctcttgtaattccccaggagcgccgtgagaacagctattcacaggtcgcaccgcccctggatcgccgagagaataattattcgcaaaaccatcctcccctggatcgtcgcaatgacagcttttcgcaggtgatgtctcctcaagaccgactcgacaagcaagatcgccgagtggtgcagcaggcacagcaatatgattccgaacaatttgcagctgtgcctcatgatccatacccaatggatggcatgaccatgctctgccgcacagacggtgtaatgaattcggcaacgaattccaacgtttcgtctagattcgacggtatgaagtcagcgaccacatcgaatatctcgtcacgatacgacaatctcaattcaggaacaagctccaacgtctccaatagattcgatggcatgaattcagccaccagttcaaacttatctgcgcggccgtcgagccgcgacgacaacagcgattattccaatcccacgtcgttctctagtcaagaccctcctaacacaaatgtcgcacctcccaaaccggagcctattgttgcacagccggctgctatagagccagagaagcgactcttcaagaagaagagtggtttcttccagaatcacagtccattccgccgcaagagcacgaaagatatccagcagcccaataccaacaggaacacctggagccccgtgactgttcagagctcgtcctctactccccgtagaccccaggtttatggatcagacacgcggcaaaacatgatcgcagacaggactgccagcccgaagcccattgacgcgaacgcaacgttagcactgaacgtcggtcagaatgtgttccctgtagccaatacagacaagcgcaagacggctgacaacagcgcacgacccgtacaagaggagctggaccccattgctcgagcgctggcagagctgaagggagttggagacaccaagcaatccgcaagccggatctccgccgatcgttaccatggtatctctacacccgttcccgatcggacacaggaccaacatcaatcattcaaccgcactacgccgacgggaagaccaatgagcgaggccgctggtggggcgagaggcgctccgcccccttcatacgacacgcctgtacagaggttaggcgtgccttcacctgctgtgacgtcgaaggccatgaaagaatctactcgaaagtggacggaatcaaagagagacccgtttactgcctcacgtccggcctccgtgtacaacagtactccctcacgacccgcgaccagaagctccgatgtcccacgtgctgtatcccctgcccctccccgcagcgcttctcctcggcctggtatgcacccggacacacgccaggcacaccgctcggcgtcacctaacccatatagtgggagccagcacagggcctcgccacagactaatatgccaccccatcgtggctcagatcaaggattctatagacataactctcgtcagaactcacctaacacagcacactcacgaacagcttctccggctccttaccgaggcgattatgaccgaccttctagcagccgaggaagtgcaatggcagtccaactcgccccggttggcggagacggatcagtttatggtggttccatgcgcggaagaggaggcggaggaggaggaggtaataatggccgtcccggtacgagctccagctctcgtgctatgagcttctatgatggtcgcgatccgaacgtacaggagaatcgacagcgcagcaagagtgttgccgacccatctcgacagtataccccagaaggccgtgctatcctgcattatgcacgagcattgtacatgtaccaagctgctattcctgaggaattgggctttgcgaagggtgatacgctcgctgttctccgacaccaggatgatggatggtgggaggcagaaattcacgccggacaagacgtgggacgaggcgggctggttcccagcaattacctccagccttgttaa

SEQ ID NO: 30157 - protein, 1041 aa, Muscodor strobelii
  misc_feature: SGI Peptide ID NO. 570368
  misc_feature (16)..(102): Pfam Id: PF00611 Pfam Desc: Fes/CIP4 homology domain
  misc_feature (982)..(1041): Pfam Id: PF00018 Pfam Desc: SH3 domain
  misc_feature (983)..(1041): Pfam Id: PF07653 Pfam Desc: Variant SH3 domain
  misc_feature (49)..(1041): NCBI GI: 145606190 Blast Desc: MGG_11899 [Magnaporthe grisea 70-15] gi|145013914|gb|EDJ98555.1| MGG_11899 [Magnaporthe grisea 70-15]
  misc_feature (6)..(1041): NCBI GI: 171682082 Blast Desc: protein product [Podospora anserina] gi|170941000|emb|CAP66650.1| protein product [Podospora anserina]
  misc_feature (1)..(1039): NCBI GI: 119491877 Blast Desc: SH3 domain protein [Neosartorya fischeri NRRL 181] gi|119411593|gb|EAW21536.1| SH3 domain protein [Neosartorya fischeri NRRL 181]
  misc_feature (1)..(1039): NCBI GI: 212526996 Blast Desc: cell division control protein (Cdc15), [Penicillium marneffei ATCC 18224] gi|210073053|gb|EEA27140.1| cell division control protein (Cdc15), [Penicillium marneffei ATCC 18224]
  misc_feature (1)..(1039): NCBI GI: 242782312 Blast Desc: cell division control protein (Cdc15), [Talaromyces stipitatus ATCC 10500] gi|218720121|gb|EED19540.1| cell division control protein (Cdc15), [Talaromyces stipitatus ATCC 10500]
  misc_feature (1)..(1039): NCBI GI: 238487060 Blast Desc: cell division control protein (Cdc15), [Aspergillus flavus NRRL3357] gi|220699647|gb|EED55986.1| cell division control protein (Cdc15), [Aspergillus flavus NRRL3357]
  misc_feature (1)..(1039): NCBI GI: 146323408 Blast Desc: cell division control protein (Cdc15) [Aspergillus fumigatus Af293] gi|129558305|gb|EAL92556.2| cell division control protein (Cdc15), [Aspergillus fumigatus Af293] cell
  misc_feature (49)..(1041): NCBI GI: 258563678 Blast Desc: conserved [Uncinocarpus reesii 1704] gi|237908091|gb|EEP82492.1| conserved [Uncinocarpus reesii 1704]
  misc_feature (1)..(363): NCBI GI: 46128195 Blast Desc: FG08475.1 [Gibberella zeae PH-1]
  misc_feature (1)..(353): NCBI GI: 116202181 Blast Desc: CHGG_08975 [Chaetomium globosum CBS 148.51] gi|88177493|gb|EAQ84961.1| CHGG_08975 [Chaetomium globosum CBS 148.51]
MPSAADGPTVALSFANNFWGKEDAGVGPLLDRMASAKQTSDELRSFYSARASIEDDYARKLMSLCRKALGSHEMGSLKSSLDTVRGEVENMAKQHASIAQQMKSELEEPLAAFAGGMKERRKIIQNTVEKLLKVKIQQTQTVNKTRDRYEQDCLRIKGYLAQGHMVMGQEERKNKAKLEKTQISLASSNAEYEAAVKALEDTTARWNREWKAAADKFQDLEEERLDFTKSSLWTLANIASTVCVSDDASCEKIRLSLEKMDVEKDIVHFIKEKGTGQEIPDPPKYINFCRGDMDDHRSEASDDDNYSVAQFPRSINPAFRTSSPQPSTFESHHDPNSALARDLGHGEPVAPLQMDMNPPSQKSQQQVMPSRGSLDIDHSPLVIPQERRENSYSQVAPPLDRRENNYSQNHPPLDRRNDSFSQVMSPQDRLDKQDRRVVQQAQQYDSEQFAAVPHDPYPMDGMTMLCRTDGVMNSATNSNVSSRFDGMKSATTSNISSRYDNLNSGTSSNVSNRFDGMNSATSSNLSARPSSRDDNSDYSNPTSFSSQDPPNTNVAPPKPEPIVAQPAAIEPEKRLFKKKSGFFQNHSPFRRKSTKDIQQPNTNRNTWSPVTVQSSSSTPRRPQVYGSDTRQNMIADRTASPKPIDANATLALNVGQNVFPVANTDKRKTADNSARPVQEELDPIARALAELKGVGDTKQSASRISADRYHGISTPVPDRTQDQHQSFNRTTPTGRPMSEAAGGARGAPPPSYDTPVQRLGVPSPAVTSKAMKESTRKWTESKRDPFTASRPASVYNSTPSRPATRSSDVPRAVSPAPPRSASPRPGMHPDTRQAHRSASPNPYSGSQHRASPQTNMPPHRGSDQGFYRHNSRQNSPNTAHSRTASPAPYRGDYDRPSSSRGSAMAVQLAPVGGDGSVYGGSMRGRGGGGGGGNNGRPGTSSSSRAMSFYDGRDPNVQENRQRSKSVADPSRQYTPEGRAILHYARALYMYQAAIPEELGFAKGDTLAVLRHQDDGWWEAEIHAGQDVGRGGLVPSNYLQPC

SEQ ID NO: 30158 - DNA, 2903 bp, Muscodor strobelii; identical to SEQ ID NO: 30155
  misc_feature: SGI EST ID NO. CUFF.71357.0
  misc_feature: Variant of the nucleotide sequence at SEQ ID NO 30156

SEQ ID NO: 30159 - DNA, 1368 bp, Muscodor strobelii
  misc_feature: SGI cDNA ID NO. 570369
  misc_feature: Encodes the peptide sequence at SEQ ID NO 30160
atgtgggagtttatgttgccatacgatatgttgccaatggaatatgatttcagtggttgcgactggcctatgtcgttcgaagatggctcttcgccgggtagctccgacctgacttcagaagcatacagttgcgacagctccaccaactcgaatgccaagactacctcccacatgccaaatccaaacgacatcattgagaacgaacgactatctttcaactttgcgccgaccgtcagacctatctcaacatcaacttcccactccgaagagcgtctagcctaccacggcgcctttggcgcatctgcgttggcgacagggaagatcatggagtggattagaaccccgtacagagctgcggtatcgccagcagcgaaaagaacatatcttgggactatattattcgtgggcgccgcattggctctgatgtgcattgccgcactggcatatcccgtcttctactacaatcatgttccgaagaaagtcttaaccatccctattcacctacagtataatgctggtctaaatccctatgccgtcacacatctctcaccgaacctcatgcttgagcaagcatacgatgtatcagtcgagctcacactcccacgctcacccgcgaacctagagcgaggaaacttcatggtcgcgcttcacgtcttgaagacgaagccagagaatccagctctggcattcacatttccgtcagatccctacgagcatctcaccaaagagaacgtagtattctcatcacgacgtccagtcctaattccgtaccaagacccgattgtatcaatagcttcacgcgtattcttcatactctaccatatcatattcgcctcttcgcaaaccgaaaaactcatcgttcccatgggcgaactcgtcgaattccgtggcgctctcccactatccatgattcttgacattgaggcagggcaaacattgcaagtctatacaagcaccatcacgctcgtcgcgcgcctcacaggtctcagatggttcatgtacaatcatcgcatcctctcattcatagcctgcaccaccgtattctggctcgcggaagtgctgtccatgggcatcgcgtggattatcttaggattctgtttcagtggtcgaaaggacaagacagtgatcaagaaagagaagtctatcgaagcacctggcacatggaatttagagtctgagagactcaagtcggaagacgatgctaatatcaaacaggaggacacggagcaggatacacttgttgagttcccgcgtcacgctggagatgcggatgatgaggacgatggcgatgatgcctcgggtgctgggacgggactggagcgcaaaggagccggtctgcgtagacgtgtgtctggagggcgggcatag

SEQ ID NO: 30160 - protein, 455 aa, Muscodor strobelii
  misc_feature: SGI Peptide ID NO. 570369
  misc_feature (137)..(349): Pfam Id: PF06775 Pfam Desc: adipose-regulatory protein (Seipin)
  misc_feature (109)..(454): NCBI GI: 46128195 Blast Desc: FG08475.1 [Gibberella zeae PH-1]
  misc_feature (116)..(454): NCBI GI: 261360779 Blast Desc: conserved [Verticillium albo-atrum VaMs.102]
  misc_feature (110)..(444): NCBI GI: 39968769 Blast Desc: MGG_02477 [Magnaporthe grisea 70-15] gi|145013913|gb|EDJ98554.1| MGG_02477 [Magnaporthe grisea 70-15]
  misc_feature (108)..(451): NCBI GI: 255936887 Blast Desc: Pc13g10500 [Penicillium chrysogenum Wisconsin 54-1255] gi|211584090|emb|CAP92119.1| Pc13g10500 [Penicillium chrysogenum Wisconsin 54-1255]
  misc_feature (115)..(451): NCBI GI: 146323406 Blast Desc: conserved [Aspergillus fumigatus Af293] gi|129558306|gb|EAL92558.2| conserved [Aspergillus fumigatus Af293] gi|159127609|gb|EDP52724.1| conserved [Aspergillus A1163]
  misc_feature (117)..(360): NCBI GI: 256733954 Blast Desc: NECHADRAFT_5671 [Nectria haematococca mpVI 77-13-4]
  misc_feature (116)..(367): NCBI GI: 85067741 Blast Desc: NCU04762 [Neurospora crassa OR74A] gi|28921781|gb|EAA31059.1| [Neurospora crassa OR74A] gi|40882295|emb|CAF06118.1| [Neurospora crassa]
  misc_feature (115)..(451): NCBI GI: 119491881 Blast Desc: NFIA_067050 [Neosartorya fischeri NRRL 181] gi|119411595|gb|EAW21538.1| conserved [Neosartorya fischeri NRRL 181]
  misc_feature (101)..(451): NCBI GI: 67537592 Blast Desc: AN4966.2 [Aspergillus nidulans FGSC A4] gi|40741854|gb|EAA61044.1| AN4966.2 [Aspergillus nidulans FGSC A4] gi|259482162|tpe|CBF76380.1| TPA: [Aspergillus nidulans FGSC
  misc_feature (114)..(448): NCBI GI: 242782302 Blast Desc: conserved [Talaromyces stipitatus ATCC 10500] gi|218720119|gb|EED19538.1| conserved [Talaromyces stipitatus ATCC 10500]
MWEFMLPYDMLPMEYDFSGCDWPMSFEDGSSPGSSDLTSEAYSCDSSTNSNAKTTSHMPNPNDIIENERLSFNFAPTVRPISTSTSHSEERLAYHGAFGASALATGKIMEWIRTPYRAAVSPAAKRTYLGTILFVGAALALMCIAALAYPVFYYNHVPKKVLTIPIHLQYNAGLNPYAVTHLSPNLMLEQAYDVSVELTLPRSPANLERGNFMVALHVLKTKPENPALAFTFPSDPYEHLTKENVVFSSRRPVLIPYQDPIVSIASRVFFILYHIIFASSQTEKLIVPMGELVEFRGALPLSMILDIEAGQTLQVYTSTITLVARLTGLRWFMYNHRILSFIACTTVFWLAEVLSMGIAWIILGFCFSGRKDKTVIKKEKSIEAPGTWNLESERLKSEDDANIKQEDTEQDTLVEFPRHAGDADDEDDGDDASGAGTGLERKGAGLRRRVSGGRA

SEQ ID NO: 30161 - DNA, 1383 bp, Muscodor strobelii
  misc_feature: SGI EST ID NO. CUFF.71393.0
  misc_feature: Variant of the nucleotide sequence at SEQ ID NO 30159
gccaaatccaaacgacatcattgagaacgaacgactatctttcaactttgcgccgaccgtcagacctatctcaacatcaacttcccactccgaagagcgtctagcctaccacggcgcctttggcgcatctgcgttggcgacagggaagatcatggagtggattagaaccccgtacagagctgcggtatcgccagcagcgaaaagaacatatcttgggactatattattcgtgggcgccgcattggctctgatgtgcattgccgcactggcatatcccgtcttctactacaatcatgttccgaagaaagtcttaaccatccctattcacctacagtataatgctggtctaaatccctatgccgtcacacatctctcaccgaacctcatgcttgagcaagcatacgatgtatcagtcgagctcacactcccacgctcacccgcgaacctagagcgaggaaacttcatggtcgcgcttcacgtcttgaagacgaagccagagaatccagctctggcattcacatttccgtcagatccctacgagcatctcaccaaagagaacgtagtattctcatcacgacgtccagtcctaattccgtaccaagacccgattgtatcaatagcttcacgcgtattcttcatactctaccatatcatattcgcctcttcgcaaaccgaaaaactcatcgttcccatgggcgaactcgtcgaattccgtggcgctctcccactatccatgattcttgacattgaggcagggcaaacattgcaagtctatacaagcaccatcacgctcgtcgcgcgcctcacaggtctcagatggttcatgtacaatcatcgcatcctctcattcatagcctgcaccaccgtattctggctcgcggaagtgctgtccatgggcatcgcgtggattatcttaggattctgtttcagtggtcgaaaggacaagacagtgatcaagaaagagaagtctatcgaagcacctggcacatggaatttagagtctgagagactcaagtcggaagacgatgctaatatcaaacaggaggacacggagcaggatacacttgttgagttcccgcgtcacgctggagatgcggatgatgaggacgatggcgatgatgcctcgggtgctgggacgggactggagcgcaaaggagccggtctgcgtagacgtgtgtctggagggcgggcatagattgctggtgctttgacatggtgaggtatggtcaatagctatggacttggccatgctagatcagttgcttgtggcattcgatacccgaaatagatcgagataatatgcatttttgaactcatttagtccgcagacttcgtctcaggtcttaaaagtattcgtgaatgttcaaaagtctttgttatagc

SEQ ID NO: 30162 - DNA, 1731 bp, Muscodor strobelii
  misc_feature: SGI cDNA ID NO. 570370
  misc_feature: Encodes the peptide sequence at SEQ ID NO 30163
atgccctgcttcaagggcatcgcggtcagcatccatgccaactcggccccggtgcccgagtatggcatgcagaagcagtcgcgcctttcgcgcatcagcacctacatacccgtcccccagccccagctgaacccggacacctccaagcacgagcctgccaagttcgccatctccatcacgctgctcactccgggccaccctatcccctacaccactcccaaatcctcacagaccaacccgcacccgaagcctctctatgccgggcctctgccatccacgagctcggacccgtctaagcatgccaacacggtcacaccctacatacccatgaccaactcggaaaacgagacgattgctgcttacatctacttcgacggccgcgccaaggaagaggttgccacacttctgcgtcctggagaggagacctgggtaaatagcagatgggttcaggtcccagacagcgaaggcgggggactggctgagagagaatttctgttcagagaggtcggcttggagagatggcttaatgggctggacctgcagggtcatgatgccgctgagaaggtagagaagcgcaggcagaagttcgagcgccgccatcgccgacagaagtcccagatgggcgacgacatggacgccgacaagccccgccgtacccgagataccctcacctatcgctcagatgacttgccgattggagactcggaggacgatgactccttttcggacgacgacgacgagcccccagaggctaccggtcagatcaaggtggccatgttccgtgtgatcgcttccggagagatcaaaaagggcgaatactctccgcagttcgatgctcacgatgacgatgaggatagtgagaacagcaacaagggaggtactaatggagcgatcgatgcggatgttgagcataccactagttttgctaagcccaagacgctcgatcctaagtcgattagcactcagacggtgactggcatcgatggtcctgataagccctatgcggtgttcaccttcttttaccgcggtcagcgccagcttaccaagatgggcattcacccaggaactaaagagaaagagaagaccccgggtagcaaacgtcgttcaactctagacttttccggtttaggtccgttgaaatccactggtaccgttggcttctccgcattccgagaccaagaggccgaagcaggcaaacggcgcaagtcaagaaggaagagtaatggtaacacggccggtgagatggacgaagacagtgatgatgacgacgacgaggaccgtatgccgctggccaaactggaagacactgacgatagggtcgtcaagacccacctggcacctgaggatgcgcaagtcgctggagagcttcaagctggaattgacagaattcggctcaagcgacagcattctgccgagccagagtctcttgcgaacaatcgcaaatcgcccagcgctggtcctaacgctggtgacgccacccctacggatacacagcattctgaacgagctaatgcggatgcggtctcgactctgctgtctgatgctttcaccgccgaatctgccatcggtagtcccatgaagaaacagcgaccaagcgcagacgacgctgccccggatcgttcagctaatttcccatccgcacttggagatgtgctgggccgggccacagctgctcaacaagcaacgtcgagcatcccagccgtcaagcttgatgaggatgaagagctttag

SEQ ID NO: 30163 - protein, 576 aa, Muscodor strobelii
  misc_feature: SGI Peptide ID NO. 570370
  misc_feature (1)..(559): NCBI GI: 171682068 Blast Desc: protein product [Podospora anserina] gi|170940993|emb|CAP66643.1| protein product [Podospora anserina]
  misc_feature (1)..(537): NCBI GI: 256733953 Blast Desc: NECHADRAFT_77597 [Nectria haematococca mpVI 77-13-4]
  misc_feature (1)..(537): NCBI GI: 46128197 Blast Desc: FG08476.1 [Gibberella zeae PH-1]
  misc_feature (1)..(532): NCBI GI: 116202185 Blast Desc: CHGG_08977 [Chaetomium globosum CBS 148.51] gi|88177495|gb|EAQ84963.1| CHGG_08977 [Chaetomium globosum CBS 148.51]
  misc_feature (1)..(539): NCBI GI: 85067739 Blast Desc: NCU04761 [Neurospora crassa OR74A] gi|28921780|gb|EAA31058.1| conserved [Neurospora crassa OR74A] gi|40882296|emb|CAF06119.1| [Neurospora crassa]
  misc_feature (1)..(576): NCBI GI: 156052961 Blast Desc: SS1G_06648 [Sclerotinia sclerotiorum 1980] gi|154704426|gb|EDO04165.1| SS1G_06648 [Sclerotinia sclerotiorum 1980]
  misc_feature (1)..(575): NCBI GI: 39968771 Blast Desc: MGG_02478 [Magnaporthe grisea 70-15] gi|145013912|gb|EDJ98553.1| MGG_02478 [Magnaporthe grisea 70-15]
  misc_feature (1)..(576): NCBI GI: 154318469 Blast Desc: BC1G_03402 [Botryotinia fuckeliana B05.10] gi|150842925|gb|EDN18118.1| BC1G_03402 [Botryotinia fuckeliana B05.10]
  misc_feature (1)..(536): NCBI GI: 238486690 Blast Desc: conserved [Aspergillus flavus NRRL3357] gi|220699462|gb|EED55801.1| conserved [Aspergillus flavus NRRL3357]
  misc_feature (1)..(576): NCBI GI: 259486195 Blast Desc: TPA: conserved [Aspergillus nidulans FGSC A4]
MPCFKGIAVSIHANSAPVPEYGMQKQSRLSRISTYIPVPQPQLNPDTSKHEPAKFAISITLLTPGHPIPYTTPKSSQTNPHPKPLYAGPLPSTSSDPSKHANTVTPYIPMTNSENETIAAYIYFDGRAKEEVATLLRPGEETWVNSRWVQVPDSEGGGLAEREFLFREVGLERWLNGLDLQGHDAAEKVEKRRQKFERRHRRQKSQMGDDMDADKPRRTRDTLTYRSDDLPIGDSEDDDSFSDDDDEPPEATGQIKVAMFRVIASGEIKKGEYSPQFDAHDDDEDSENSNKGGTNGAIDADVEHTTSFAKPKTLDPKSISTQTVTGIDGPDKPYAVFTFFYRGQRQLTKMGIHPGTKEKEKTPGSKRRSTLDFSGLGPLKSTGTVGFSAFRDQEAEAGKRRKSRRKSNGNTAGEMDEDSDDDDDEDRMPLAKLEDTDDRVVKTHLAPEDAQVAGELQAGIDRIRLKRQHSAEPESLANNRKSPSAGPNAGDATPTDTQHSERANADAVSTLLSDAFTAESAIGSPMKKQRPSADDAAPDRSANFPSALGDVLGRATAAQQATSSIPAVKLDEDEEL

SEQ ID NO: 30164 - DNA, 3838 bp, Muscodor strobelii
  misc_feature: SGI EST ID NO. CUFF.71393.3
  misc_feature: Variant of the nucleotide sequence at SEQ ID NO 30162
tttcagacggcacataacagcaacgcagtatctaatcatcgaaatgaactcagaggtattataaagctcgatctgcctctaacgtctaagtcctggggtaaaacattagtagcaatgggcaagtattggggagtccagttgcagggtagcttgtattgttatgtgtaaatgcagagcaaaccggtgagtatcgtacactggaacgggatgaatcatatttaaggcattgaaagctgtctgcgattttgagtagcatcttgcactccgatcatttcacctactactgtatctgtatcgattacttgcatatatagcggaataaatcaattgctgtttgatatgcgatcgagctgtcgttaaatgttgagacgtgtggcaggtttcccagcaaaacccagcttgggtaccgatgcaagtctcgcacagcgttctgctccgcggcaccgtgattggcccagcgcaacggtaatgtcgatagagcccgtgtagtggcatggtaccttccccgccatcttcttgtcgcaatagctccttgccagctctgcttttgccagctcaaccgtccgtcggccactaagaggtagtcgcatccattgcttcaagcatctacgttcaagcaccgtagtgctggcccaagtgaagtgcggtctagaagaaacgaaagcgaagaaacaaggccggactgactaacattgagagacccgaacccgacgcttgggttcagctctcaacggcttgggagtagcaagcaacgaccctgcgtccgagaattttgaaagcattcggccactcactcgctcagtcgctcacagcatggaaacacctgagtatcactctctcactgtagtattatcttgaaccccaaactaccttaaggtcccattgccccctctcgcgggcgcattgttcgagctgcgggctgcatggatcagcgagcagcgagaccgcctgtctgctgccggcccgcatccactgtccactgcccacacaggcccccccaacccaccaagccagccctggcgtcgtgcataggacctccaacttgatctcacctcccctcccgtgattttcgagggccatctccacaaacaagacgacaatattgattgctgagctgccgagctgcacctgcttgtcggctcttcgccgtgttctgtacgcattgtcattgtcattgtcattctgcattttcactctgcatcgcattctggcaattgtgcttggtccgacctcgacggaccgtgtagcattgacgtgacagctgcatggccgccacggctcccttcacaccgagtcctcctcattcgtgcagcttgaagctgtgacacttcaataccctacaatacatacctatttgcatctgtagccttgggccaaccaccctttggccgctacgacacaacgatacaaccatacatagaactgattttgtcgacatcatcaatacacagcatccctcgcgccactgcttgtctttcagactacctactcgtcctccacaaattcctacaccgacaaatcagacttctgccgccactcttctgcccgctgccgcagacacatacacccagtcttgaccacgcccacgcccacgccgccggcaaagtcctccaaaccctcacgatgccctgcttcaagggcatcgcggtcagcatccatgccaactcggccccggtgcccgagtatggcatgcagaagcagtcgcgcctttcgcgcatcagcacctacatacccgtcccccagccccagctgaacccggacacctccaagcacgagcctgccaagttcgccatctccatcacgctgctcactccgggccaccctatcccctacaccactcccaaatcctcacagaccaacccgcacccgaagcctctctatgccgggcctctgccatccacgagctcggacccgtctaagcatgccaacacggtcacaccctacatacccatgaccaactcggaaaacgagacgattgctgcttacatctacttcgacggccgcgccaaggaagaggttgccacacttctgcgtcctggagaggagacctgggtaaatagcagatgggttcaggtcccagacagcgaaggcgggggactggctgagagagaatttctgttcagagaggtcggcttggagagatggcttaatgggctggacctgcagggtcatgatgccgctgagaaggtagagaagcgcaggcagaagttcgagcgccgccatcgccgacagaagtcccagatgggcgacgacatggacgccgacaagccccgccgtacccgagataccctcacctatcgctcagatgacttgccgattggagactcggaggacgatgactccttttcggacgacgacgacgagcccccagaggctaccggtcagatcaaggtggccatgttccgtgtgatcgcttccggagagatcaaaaagggcgaatactctccgcagttcgatgctcacgatgacgatgaggatagtgagaacagcaacaagggaggtactaatggagcgatcgatgcggatgttgagcataccactagttttgctaagcccaagacgctcgatcctaagtcgattagcactcagacggtgactggcatcgatggtcctgataagccctatgcggtgttcaccttcttttaccgcggtcagcgccagcttaccaagatgggcattcacccaggaactaaagagaaagagaagaccccgggtagcaaacgtcgttcaactctagacttttccggtttaggtccgttgaaatccactggtaccgttggcttctccgcattccgagaccaagaggccgaagcaggcaaacggcgcaagtcaagaaggaagagtaatggtaacacggccggtgagatggacgaagacagtgatgatgacgacgacgaggaccgtatgccgctggccaaactggaagacactgacgatagggtcgtcaagacccacctggcacctgaggatgcgcaagtcgctggagagcttcaagctggaattgacagaattcggctcaagcgacagcattctgccgagccagagtctcttgcgaacaatcgcaaatcgcccagcgctggtcctaacgctggtgacgccacccctacggatacacagcattctgaacgagctaatgcggatgcggtctcgactctgctgtctgatgctttcaccgccgaatctgccatcggtagtcccatgaagaaacagcgaccaagcgcagacgacgctgccccggatcgttcagctaatttcccatccgcacttggagatgtgctgggccgggccacagctgctcaacaagcaacgtcgagcatcccagccgtcaagcttgatgaggatgaagagctttagtaccattcatggcatgtggatacccgccccgatgacttgttacatatccatctccccgcgtctgtggatatggacgtcatctatgatgcggatgatgaatcttgttctcagcaccaatcgatgttgagactacacactaggagtgtgctgggtgaggaaaccccaacaaaaagtaaggactagagcggcccggatgatacctgtgcttgctctgacgatacgttgatgggtagagtgctccttagctaaaagcgagcaagggccacgaaacgaagtgaactggacactctagtatttgcaagggaaaaacgcagtgacgagccctatggatagatatgggcctggatgcggactacttgggcatgagtctaggagagtcgtgtcatttctgagcacattggcttgcaagcatcaagtgttcgactaacaaacagctataaacagcgagaaattcactttacatgaaaaataaactaattatgag

SEQ ID NO: 30165 - DNA, 336 bp, Muscodor strobelii
  misc_feature: SGI cDNA ID NO. 570371
  misc_feature: Reduced expression when VOC is produced
  misc_feature: Encodes the peptide sequence at SEQ ID NO 30166
atgccatccgcctccaccgtctcccgcgcgacgcgcgccctgcaaaccacgagccggagacaattttctgccacggcacgaacgcccgcgtctcacggcccgcagtacgatcccccgaccggctggctctggggcgtgaaacccggtgagaagtaccagaaggaagggtgggagacgcccttctattggggattctgcggaagtgttgcgcttgcggcttttgcttatgcttttaagcctgatacttcgatacaaacctgggcactcgaggaagcccgccggaggttagaagccgagggtatcctagaggatcccgacaagaagtcatcatcatga

SEQ ID NO: 30166 - protein, 111 aa, Muscodor strobelii
  misc_feature: SGI Peptide ID NO. 570371
  misc_feature (9)..(110): NCBI GI: 171682044 Blast Desc: protein product [Podospora anserina] gi|170940981|emb|CAP66631.1| protein product [Podospora anserina]
  misc_feature (5)..(108): NCBI GI: 116202221 Blast Desc: CHGG_08995 [Chaetomium globosum CBS 148.51] gi|88177513|gb|EAQ84981.1| CHGG_08995 [Chaetomium globosum CBS 148.51]
  misc_feature (1)..(105): NCBI GI: 85067723 Blast Desc: NADH:ubiquinone oxidoreductase 11.6kD subunit [Neurospora crassa OR74A] gi|28921772|gb|EAA31050.1| NADH:ubiquinone oxidoreductase 11.6kD subunit [Neurospora crassa
  misc_feature (3)..(106): NCBI GI: 258568738 Blast Desc: conserved [Uncinocarpus reesii 1704] gi|237906559|gb|EEP80960.1| conserved [Uncinocarpus reesii 1704]
  misc_feature (3)..(107): NCBI GI: 169764835 Blast Desc: [Aspergillus oryzae RIB40] gi|238503898|ref|XP_002383181.1| conserved [Aspergillus flavus NRRL3357] gi|83764743|dbj|BAE54887.1| protein product oryzae]
  misc_feature (4)..(107): NCBI GI: 238838956 Blast Desc: NADH:ubiquinone oxidoreductase kD subunit [Microsporum canis CBS 113480]
  misc_feature (1)..(107): NCBI GI: 212542439 Blast Desc: conserved [Penicillium marneffei ATCC 18224] gi|210066281|gb|EEA20374.1| conserved [Penicillium marneffei ATCC 18224]
  misc_feature (4)..(108): NCBI GI: 67526395 Blast Desc: AN3655.2 [Aspergillus nidulans FGSC A4] gi|40740673|gb|EAA59863.1| AN3655.2 [Aspergillus nidulans FGSC A4] gi|259481811|tpe|CBF75681.1| TPA: conserved [Aspergillus FGSC
  misc_feature (3)..(107): NCBI GI: 121708262 Blast Desc: conserved [Aspergillus clavatus NRRL 1] gi|119400225|gb|EAW10651.1| conserved [Aspergillus clavatus NRRL 1]
  misc_feature (30)..(107): NCBI GI: 255947608 Blast Desc: Pc22g05370 [Penicillium chrysogenum Wisconsin 54-1255] gi|211591588|emb|CAP97825.1| Pc22g05370 [Penicillium chrysogenum Wisconsin 54-1255]
  misc_feature: Useful for introducing or modulating the production of volatile compounds
MPSASTVSRATRALQTTSRRQFSATARTPASHGPQYDPPTGWLWGVKPGEKYQKEGWETPFYWGFCGSVALAAFAYAFKPDTSIQTWALEEARRRLEAEGILEDPDKKSSS

SEQ ID NO: 30167 - DNA, 1186 bp, Muscodor strobelii
  misc_feature: SGI EST ID NO. CUFF.71551.0
  misc_feature: Variant of the nucleotide sequence at SEQ ID NO 30165
gggagatgtcacgtgtggcccgctttggtgaagctagtaccacgtccgcaaagtcgctcagctccccgaagacgtccgagcttggccaccaccactgcactgcacagtcacttgacgactctctagtgtcaaacagattgccgtcattccaacaacaaccaggacttccccccttcgtcaatccaattgggaagcccttcaccatccacgatcttcagacaactctccactcaccgcgttctcttgacttcgattccaacaaggcaggagaccttaactcctccttcccacccgctcggaaatccaacaaaccccatcccatcccatcaatccaaacgtacgaacaacactctcgacgaggaaaagatgccatccgcctccaccgtctcccgcgcgacgcgcgccctgcaaaccacgagccggagacaattttctgccacggcacgaacgcccgcgtctcacggcccgcagtacgatcccccgaccggctggctctggggcgtgaaacccggtgagaagtaccagaaggaagggtgggagacgcccttctattggggattctgcggaagtgttgcgcttgcggcttttgcttatgcttttaagcctgatacttcgatacaaacctgggcactcgaggaagcccgccggaggttagaagccgagggtatcctagaggatcccgacaagaagtcatcatcatgagcactcttgccacaaaagaatcttcatgatcacttcttcgtcgccaatatcaactactacactccggcttctcccctcttgtacatgagtccctcttccacttcatgtcgctcgtcactaggaaggatctagtcatcaccacttcccaacttccccgcgaggtgtggcaatgactggaaggaaattggtttcgggttcaaattagaaagaaaggcacatcaccaaatcatagaggaatactcaaccactcactgcatgtaatgtagattgtgcggtttgagtaagggattgagaaggaagggatttttcttttgtttgttacatcattacatcaactgactttctgctctcgctgctatgctacggctagtctttgatagagagtaaatgaaaaaaacatgctacttcacaacatgtctgcgtttccattcgagtgtatcaaagtacaatactggggagctcataaaagagaattgaagtatcc

SEQ ID NO: 30168 - DNA, 1245 bp, Muscodor strobelii
  misc_feature: SGI cDNA ID NO. 570372
  misc_feature: Reduced expression when VOC is produced
  misc_feature: Encodes the peptide sequence at SEQ ID NO 30169
atgctgcgtcctctactctcgcgatgtggatgtgggagtgggagagtcgcactcagagcgaccactgctcgtccggcggcgctccaagcgacgagatggctcagcataaaaccagaagctgcttcaacagccaagcccgtagacatagacataagaaaactcgaaatcaccaagacctccaaccctaagactcccagcgacccaaagacactcgtcttcggccgcgagttcacagaccacatgctttccatagaatggaaccaaacaaccggctggctcacgcccaaaatccagccgtaccaagacctatccctcgacccagcatcctgcgtgctgcactacgcattcgaatgtttcgaaggcatgaaagcctacaaagacaagagcggtcaaatccgtctcttccgcccagacaagaacatggagcgcctcaacaaatccgccgcccggatcgtactcccgaccttcaacagcgtagacatgataaacctgatctcgcaattcgccaagctcgaatcgagattcatacccaacgagcgaggctactctctctacctccgcccaaccctaatcggcacccagaagaccctcggcgtcgggcctccggggtccgcattattcttcctcatcgcttcgccggttgggccgtactacccgacgggcttcaaagcgatatccctcgaggcaaccgactacgcggtccgcgcctggcccggcggtgtcggggacaagaaattaggcgccaactacgctccttgcatcctcccgcagttggaagccgcgagtcgtggacaccagcagaatctctggttattcggcgagcaggagtacgtcactgaggtcgggacgatgaacctcttcgtcgcggtgaagaataaggagacgggccagaaggaacttatcaccgctcccctcgacggcacgatcctagagggcgtcacgcgagacagtatcctatcactcgctagggagaaactagcccctgagggctggttgatcagcgagcggaaaatcaccatgccgcaactcgccgaagcatcggaagaaggccggctcatcgaagtttttggtgctggaactgctgccattgtgtcgcccgtcaggaagatcagctggaagggcaaggtggtcgattgtgggttgaaggcagaggaggagagcggtgagatcgccctgaggatgaagggctggatcgaggctaggcagtatggcgacgaggagcatgagtggagcgttgtttgttag

SEQ ID NO: 30169 - protein, 414 aa, Muscodor strobelii
  misc_feature: SGI Peptide ID NO. 570372
  misc_feature (94)..(399): Pfam Id: PF01063 Pfam Desc: Aminotransferase class IV
  misc_feature (1)..(411): NCBI GI: 46135993 Blast Desc: FG09512.1 [Gibberella zeae PH-1]
  misc_feature (1)..(414): NCBI GI: 116202219 Blast Desc: CHGG_08994 [Chaetomium globosum CBS 148.51] gi|88177512|gb|EAQ84980.1| CHGG_08994 [Chaetomium globosum CBS 148.51]
  misc_feature (1)..(414): NCBI GI: 171682046 Blast Desc: protein product [Podospora anserina] gi|170940982|emb|CAP66632.1| protein product [Podospora anserina]
  misc_feature (15)..(414): NCBI GI: 39968793 Blast Desc: MGG_02489 [Magnaporthe grisea 70-15] gi|145013898|gb|EDJ98539.1| MGG_02489 [Magnaporthe grisea 70-15]
  misc_feature (32)..(413): NCBI GI: 212528526 Blast Desc: branched-chain amino acid aminotransferase, cytosolic [Penicillium marneffei ATCC 18224] gi|210073818|gb|EEA27905.1| branched-chain amino acid aminotransferase, cytosolic marneffei
  misc_feature (18)..(414): NCBI GI: 242766171 Blast Desc: branched-chain amino acid aminotransferase, cytosolic [Talaromyces stipitatus ATCC 10500] gi|242766177|ref|XP_002341121.1| branched-chain amino acid ATCC
  misc_feature (1)..(414): NCBI GI: 156053435 Blast Desc: branched-chain-amino-acid aminotransferase [Sclerotinia sclerotiorum 1980] gi|154704663|gb|EDO04402.1| branched-chain-amino-acid aminotransferase [Sclerotinia 1980]
  misc_feature (16)..(413): NCBI GI: 145256477 Blast Desc: An04g00430 [Aspergillus niger] gi|134058307|emb|CAK38498.1| protein product [Aspergillus niger]
  misc_feature (11)..(411): NCBI GI: 121706494 Blast Desc: branched-chain amino acid aminotransferase, cytosolic [Aspergillus clavatus NRRL 1] gi|119399657|gb|EAW10083.1| branched-chain amino acid aminotransferase, cytosolic clavatus 1]
  misc_feature (49)..(413): NCBI GI: 255949648 Blast Desc: Pc22g16780 [Penicillium chrysogenum Wisconsin 54-1255] gi|211592608|emb|CAP98966.1| Pc22g16780 [Penicillium chrysogenum Wisconsin 54-1255]
  misc_feature (49)..(413): SWISSPROT Homolog: EC 2.6.1.42 Branched-chain-amino-acid transaminase
  misc_feature: Useful for introducing or modulating the production of volatile compounds
  misc_feature: Useful for fungicidal and/or biocontrol applications
  misc_feature: Useful for production of fusel alcohols
MLRPLLSRCGCGSGRVALRATTARPAALQATRWLSIKPEAASTAKPVDIDIRKLEITKTSNPKTPSDPKTLVFGREFTDHMLSIEWNQTTGWLTPKIQPYQDLSLDPASCVLHYAFECFEGMKAYKDKSGQIRLFRPDKNMERLNKSAARIVLPTFNSVDMINLISQFAKLESRFIPNERGYSLYLRPTLIGTQKTLGVGPPGSALFFLIASPVGPYYPTGFKAISLEATDYAVRAWPGGVGDKKLGANYAPCILPQLEAASRGHQQNLWLFGEQEYVTEVGTMNLFVAVKNKETGQKELITAPLDGTILEGVTRDSILSLAREKLAPEGWLISERKITMPQLAEASEEGRLIEVFGAGTAAIVSPVRKISWKGKVVDCGLKAEEESGEIALRMKGWIEARQYGDEEHEWSVVC

SEQ ID NO: 30170 - DNA, 1669 bp, Muscodor strobelii
  misc_feature: SGI EST ID NO. CUFF.71555.0
  misc_feature: Variant of the nucleotide sequence at SEQ ID NO 30168
catggacatatatctgacttaaccaccgctcttcgcaccttttcacccagtcgcattgcttttttcgaggtcaattggggttgtctactctgtaacaacaagatccggtctatttccactctcatttcattccctatcacatttgaaacgtcattgtacataccaacacgcgttgcaaaaaaatgctgcgtcctctactctcgcgatgtggatgtgggagtgggagagtcgcactcagagcgaccactgctcgtccggcggcgctccaagcgacgagatggctcagcataaaaccagaagctgcttcaacagccaagcccgtagacatagacataagaaaactcgaaatcaccaagacctccaaccctaagactcccagcgacccaaagacactcgtcttcggccgcgagttcacagaccacatgctttccatagaatggaaccaaacaaccggctggctcacgcccaaaatccagccgtaccaagacctatccctcgacccagcatcctgcgtgctgcactacgcattcgaatgtttcgaaggcatgaaagcctacaaagacaagagcggtcaaatccgtctcttccgcccagacaagaacatggagcgcctcaacaaatccgccgcccggatcgtactcccgaccttcaacagcgtagacatgataaacctgatctcgcaattcgccaagctcgaatcgagattcatacccaacgagcgaggctactctctctacctccgcccaaccctaatcggcacccagaagaccctcggcgtcgggcctccggggtccgcattattcttcctcatcgcttcgccggttgggccgtactacccgacgggcttcaaagcgatatccctcgaggcaaccgactacgcggtccgcgcctggcccggcggtgtcggggacaagaaattaggcgccaactacgctccttgcatcctcccgcagttggaagccgcgagtcgtggacaccagcagaatctctggttattcggcgagcaggagtacgtcactgaggtcgggacgatgaacctcttcgtcgcggtgaagaataaggagacgggccagaaggaacttatcaccgctcccctcgacggcacgatcctagagggcgtcacgcgagacagtatcctatcactcgctagggagaaactagcccctgagggctggttgatcagcgagcggaaaatcaccatgccgcaactcgccgaagcatcggaagaaggccggctcatcgaagtttttggtgctggaactgctgccattgtgtcgcccgtcaggaagatcagctggaagggcaaggtggtcgattgtgggttgaaggcagaggaggagagcggtgagatcgccctgaggatgaagggctggatcgaggctaggcagtatggcgacgaggagcatgagtggagcgttgtttgttagatgtagatgtgtatagagattaaggtgtgggtgaagagtagacgggaggggaatggaggaggaagataccatggctttgttgagaacgagaacctttgctgcatctgggatatatagcatgtgtgtatgtatctagacatggcgtctttaagttgcatatatgttttattactcgttcactcatctacacaagatcttgcttgggatgttcaatcccgacgtaaccagtaatgaactcgaaa

SEQ ID NO: 30171 - DNA, 2865 bp, Muscodor strobelii
  misc_feature: SGI cDNA ID NO. 570373
  misc_feature: Reduced expression when VOC is produced
  misc_feature: Encodes the peptide sequence at SEQ ID NO 30172
atggcttctctatttaagagtttccagtccaacatcaattccaactataccgtgtcccaatccgtctcctccaccgccggcgcatggaagatctacgatgcgactaagaagtccaccaagaagccatactccgtcttcgtgttcgaaagaaagtccctcgatgcacatggcggctcactgtcccgctcgaccaaagctgcctatgcgcgcgcgactgaagaggtcgtcgaacgtctgaagaaagaagcctcgtcgctcgccaaactgcgccaccccagcgtcctcgaactcgtcgagccggtcgaagaaacgaggggaggcgggctccagttcgtcaccgaacctgtcacgacctccctcgctagccttctacaagagaaagatgatcaggaaaggggcggcggccgctctggccgggaagatccggatggtatcaggcgacgccgtggcgaagtcgaaatagacgagctggagatacagaagggcttacttcaagtgagcaaggctttggagtttcttcatgaggctgccggcctgatccatggcaacctgacacccgactctatcctcattaatgctaagtctgactggaagatcagcggcttggccttttgcagtcctcccgaaaattcatcaaaaccaacatctttccagcctatcagtctatcagagatcctaaaccttgatccccgactaccacgtcacgtacagctcaacttagactacacctcgcccgacttcgttttggacaacaacctcacttcatccgccgacatgttttcccttggtctagtatgcattgcgctatataattccccgcacaagtcacctatagaaagcagtggtagcatctccgcttacaaaaggatatttacctcttcatccaccgtcccctccgccagcaacgatttcctgtcgaagcggacacttccaagagacctgtcgaacaatgttttaccacggttgattacgcgcaggccggcccagcgtatgtcagccaaggaattccaggagagcgaatatttcgataatatttttgtttcaaccattcgctttctggatgctttccctgccaagacccctggcgagaaagccgcattcatgagggggttgaataaggttttgaaggaatttccgaagtcggtgatggagaaaaaagtcttaccggcacttttggaagagacgaaggacaaggaactactgccgctcatcctgaagaacgtcttcaagatactggagctattgtcctcctcgcgacgcgcctttggtgacaaggttcgacctaagctcaaagagatatttgtcgacaatgccaaacagacccaagaaaaggatagtgctcgggattcaggattgatggttgtgctagagaacatggctttaattgccaataattcctcgggtaaagagttcaaagatgacgtcttgccaataataatggctgccactgagtctgccactccatccttggtcgatgccgcattgcgaagtctcccagtggtacttcctgttctcgacttcagcactatcaaaaatgagctgtttcctgtcattgcctctgtatttagcaagaccaatagtctggcgatcaaagtacgcggctgtcgcgcattcgtcatactttgcggcggtactaatgaggcaagttctgctgatgatgggctggacggcttcggaccagacaagaagaaaacctcgtcatcgagcgctctggacaagtatactatgcaagagaagattgtgcccctaatcaaagcaatcaagaccaaggaaccggctgtcatgatggctggtctcgatgtcttacgtgtcgttggcgataacgcagatgcagacttcattgctatggatatcttgccaatcctttggagcatgagtttgggtccattgctcgacctgaaacagtttcaacggttcatggaccaaatcaagtcgctatcaagaaaggtagaagatgaacaaatgaagaaactgcaagagctggccgtaacaaatggacaaccggagccagcaccgattgaagacttcatgggttttggtggtgtgagtggcacaacgtttgactcaacgaatggtggtgctacgccggatgactttgagcgtctcgtcaagggccgagagtctcggacatcaacgagtgctatggataatggctgggacgcatcgccaaacccgtcggccgccacggcttcaaaggctcctgcccaattctcctggtcaacgccaagccctaccaacaacagccagtttaatcctcccaaagcgcaggcgcagcctccctcattccggactgtaactcctgatctagcgtcgttcggaacgctgtctcctcagtctacccagtactcgcagcctttaaagcctgctacacagaacactgtgacagcccaaccaccatcatcgggtatcaattggtcctcaagtacgagtacgaacacggccaatccatgggcatcttccactcccatgtctcccatgtcgtctggcatgtcaaacatgtctatgaaccagcagcagagaccaaccttaaatcaaacctcgtcatccttctctctcgctccgccgccatccggatcgacggcgttcggaagcagcgctcaatcatcatttagtattgcaccaccaccgcccagcggaattcaaaggcaaacttcaagcatgtccttcggacaaccatcttcaggctttggtgcgatgtctccaccgccaccagccgggagtatgaatagcatgatggggtcgggaatgagcatgaataatagtatgaatgcatgggcccagcagaagccacagcaacctcagcagcagcagcagcagcagcagcagcagaagagcggcttggataagtaccagagtctgatatga

SEQ ID NO: 30172 - protein, 954 aa, Muscodor strobelii
  misc_feature: SGI Peptide ID NO. 570373
  misc_feature (1)..(781): NCBI GI: 256727119 Blast Desc: NECHADRAFT_91286 [Nectria haematococca mpVI 77-13-4]
  misc_feature (5)..(913): NCBI GI: 189189674 Blast Desc: protein kinase domain-containing protein ppk32 [Pyrenophora tritici-repentis Pt-1C-BFP] gi|187972782|gb|EDU40281.1| protein kinase domain-containing
  misc_feature (5)..(776): NCBI GI: 169607459 Blast Desc: SNOG_06786 [Phaeosphaeria nodorum SN15] gi|160701412|gb|EAT85437.2| SNOG_06786 [Phaeosphaeria nodorum SN15]
  misc_feature (1)..(954): NCBI GI: 238838787 Blast Desc: clathrin-coated vesicle protein [Microsporum canis CBS 113480]
  misc_feature (1)..(954): NCBI GI: 169773999 Blast Desc: [Aspergillus oryzae RIB40] gi|83769329|dbj|BAE59466.1| protein product [Aspergillus oryzae]
  misc_feature (1)..(954): NCBI GI: 119188309 Blast Desc: CIMG_04202 [Coccidioides immitis RS]
  misc_feature (1)..(954): NCBI GI: 240107885 Blast Desc: kinase domain containing protein [Coccidioides posadasii C735 delta SOWgp]
  misc_feature (1)..(954): NCBI GI: 238492028 Blast Desc: protein kinase Scy1, [Aspergillus flavus NRRL3357] gi|220697664|gb|EED54005.1| protein kinase Scy1, [Aspergillus flavus NRRL3357]
  misc_feature (1)..(954): NCBI GI: 70994864 Blast Desc: protein kinase Scy1 [Aspergillus fumigatus Af293] gi|66849843|gb|EAL90171.1| protein kinase Scy1, [Aspergillus fumigatus Af293] gi|159124878|gb|EDP49995.1| protein kinase Scy1,
  misc_feature (1)..(954): NCBI GI: 154270507 Blast Desc: conserved [Ajellomyces capsulatus NAm1] gi|150409912|gb|EDN05300.1| conserved [Ajellomyces capsulatus NAm1]
  misc_feature: Useful for introducing or modulating the production of volatile compounds
MASLFKSFQSNINSNYTVSQSVSSTAGAWKIYDATKKSTKKPYSVFVFERKSLDAHGGSLSRSTKAAYARATEEVVERLKKEASSLAKLRHPSVLELVEPVEETRGGGLQFVTEPVTTSLASLLQEKDDQERGGGRSGREDPDGIRRRRGEVEIDELEIQKGLLQVSKALEFLHEAAGLIHGNLTPDSILINAKSDWKISGLAFCSPPENSSKPTSFQPISLSEILNLDPRLPRHVQLNLDYTSPDFVLDNNLTSSADMFSLGLVCIALYNSPHKSPIESSGSISAYKRIFTSSSTVPSASNDFLSKRTLPRDLSNNVLPRLITRRPAQRMSAKEFQESEYFDNIFVSTIRFLDAFPAKTPGEKAAFMRGLNKVLKEFPKSVMEKKVLPALLEETKDKELLPLILKNVFKILELLSSSRRAFGDKVRPKLKEIFVDNAKQTQEKDSARDSGLMVVLENMALIANNSSGKEFKDDVLPIIMAATESATPSLVDAALRSLPVVLPVLDFSTIKNELFPVIASVFSKTNSLAIKVRGCRAFVILCGGTNEASSADDGLDGFGPDKKKTSSSSALDKYTMQEKIVPLIKAIKTKEPAVMMAGLDVLRVVGDNADADFIAMDILPILWSMSLGPLLDLKQFQRFMDQIKSLSRKVEDEQMKKLQELAVTNGQPEPAPIEDFMGFGGVSGTTFDSTNGGATPDDFERLVKGRESRTSTSAMDNGWDASPNPSAATASKAPAQFSWSTPSPTNNSQFNPPKAQAQPPSFRTVTPDLASFGTLSPQSTQYSQPLKPATQNTVTAQPPSSGINWSSSTSTNTANPWASSTPMSPMSSGMSNMSMNQQQRPTLNQTSSSFSLAPPPSGSTAFGSSAQSSFSIAPPPPSGIQRQTSSMSFGQPSSGFGAMSPPPPAGSMNSMMGSGMSMNNSMNAWAQQKPQQPQQQQQQQQQQKSGLDKYQSLI

SEQ ID NO: 30173 - DNA, 4713 bp, Muscodor strobelii
  misc_feature: SGI EST ID NO. CUFF.71387.0
  misc_feature: Variant of the nucleotide sequence at SEQ ID NO 30171
attatttatatgcttgcagcttggtagtaggtgcctatctaaggcagtattgaaacttgtaagtgttggagaaagaagtggcttgactccaagagcttgccctgcctggctcgtggaaatgtaactgacacgaaaagtggcacccgagtgcaccatgcctgcaatcatgtcgttcatccaaactgaacatctaagtccaaatcgaagattgaggccaatgattatacgctgattagtctagatatcaatgtgtatagtagttgattggctatcgaaaaggcatccgggtgtttattcgatatatcatagaacgaagtgatcgacatagtgccattggttatgtccgctgatagagtttggactgggtccttgaatggaactggctggagtgttacgctgataaagacaaaaagagcattctttagtgattgaagaccaacatcaaaaccacatcttatggccccttatcgcgtctaaaacccaatcgaacccattgaatttcattgaatcttcgcaaaaagcacctaattaccatacttagtcatatcgttgcgctacttgcgacagagtcggcgataaacagcctggagcctggcaaatacccgacctacttcatcgccatctcgcgccaccacgatatcatgagggtcgcggccacgtgcccaacacccgtcgcccaacatggcttctctatttaagagtttccagtccaacatcaattccaactataccgtgtcccaatccgtctcctccaccgccggcgcatggaagatctacgatgcgactaagaagtccaccaagaagccatactccgtcttcgtgttcgaaagaaagtccctcgatgcacatggcggctcactgtcccgctcgaccaaagctgcctatgcgcgcgcgactgaagaggtcgtcgaacgtctgaagaaagaagcctcgtcgctcgccaaactgcgccaccccagcgtcctcgaactcgtcgagccggtcgaagaaacgaggggaggcgggctccagttcgtcaccgaacctgtcacgacctccctcgctagccttctacaagagaaagatgatcaggaaaggggcggcggccgctctggccgggaagatccggatggtatcaggcgacgccgtggcgaagtcgaaatagacgagctggagatacagaagggcttacttcaagtgagcaaggctttggagtttcttcatgaggctgccggcctgatccatggcaacctgacacccgactctatcctcattaatgctaagtctgactggaagatcagcggcttggccttttgcagtcctcccgaaaattcatcaaaaccaacatctttccagcctatcagtctatcagagatcctaaaccttgatccccgactaccacgtcacgtacagctcaacttagactacacctcgcccgacttcgttttggacaacaacctcacttcatccgccgacatgttttcccttggtctagtatgcattgcgctatataattccccgcacaagtcacctatagaaagcagtggtagcatctccgcttacaaaaggatatttacctcttcatccaccgtcccctccgccagcaacgatttcctgtcgaagcggacacttccaagagacctgtcgaacaatgttttaccacggttgattacgcgcaggccggcccagcgtatgtcagccaaggaattccaggagagcgaatatttcgataatatttttgtttcaaccattcgctttctggatgctttccctgccaagacccctggcgagaaagccgcattcatgagggggttgaataaggttttgaaggaatttccgaagtcggtgatggagaaaaaagtcttaccggcacttttggaagagacgaaggacaaggaactactgccgctcatcctgaagaacgtcttcaagatactggagctattgtcctcctcgcgacgcgcctttggtgacaaggttcgacctaagctcaaagagatatttgtcgacaatgccaaacagacccaagaaaaggatagtgctcgggattcaggattgatggttgtgctagagaacatggctttaattgccaataattcctcgggtaaagagttcaaagatgacgtcttgccaataataatggctgccactgagtctgccactccatccttggtcgatgccgcattgcgaagtctcccagtggtacttcctgttctcgacttcagcactatcaaaaatgagctgtttcctgtcattgcctctgtatttagcaagaccaatagtctggcgatcaaagtacgcggctgtcgcgcattcgtcatactttgcggcggtactaatgaggcaagttctgctgatgatgggctggacggcttcggaccagacaagaagaaaacctcgtcatcgagcgctctggacaagtatactatgcaagagaagattgtgcccctaatcaaagcaatcaagaccaaggaaccggctgtcatgatggctggtctcgatgtcttacgtgtcgttggcgataacgcagatgcagacttcattgctatggatatcttgccaatcctttggagcatgagtttgggtccattgctcgacctgaaacagtttcaacggttcatggaccaaatcaagtcgctatcaagaaaggtagaagatgaacaaatgaagaaactgcaagagctggccgtaacaaatggacaaccggagccagcaccgattgaagacttcatgggttttggtggtgtgagtggcacaacgtttgactcaacgaatggtggtgctacgccggatgactttgagcgtctcgtcaagggccgagagtctcggacatcaacgagtgctatggataatggctgggacgcatcgccaaacccgtcggccgccacggcttcaaaggctcctgcccaattctcctggtcaacgccaagccctaccaacaacagccagtttaatcctcccaaagcgcaggcgcagcctccctcattccggactgtaactcctgatctagcgtcgttcggaacgctgtctcctcagtctacccagtactcgcagcctttaaagcctgctacacagaacactgtgacagcccaaccaccatcatcgggtatcaattggtcctcaagtacgagtacgaacacggccaatccatgggcatcttccactcccatgtctcccatgtcgtctggcatgtcaaacatgtctatgaaccagcagcagagaccaaccttaaatcaaacctcgtcatccttctctctcgctccgccgccatccggatcgacggcgttcggaagcagcgctcaatcatcatttagtattgcaccaccaccgcccagcggaattcaaaggcaaacttcaagcatgtccttcggacaaccatcttcaggctttggtgcgatgtctccaccgccaccagccgggagtatgaatagcatgatggggtcgggaatgagcatgaataatagtatgaatgcatgggcccagcagaagccacagcaacctcagcagcagcagcagcagcagcagcagcagaagagcggcttggataagtaccagagtctgatatgaagtataggattgttgagtagtcttaaagagcgtggtatagctattgaaaattaggatgtggaataatcggctgattaattattgaatagattctcgtgagagtttccgcatagtgaagcgccttggcgttgagttcgaccttgagactgcgttgcaagcgaagctggtagaatgtcgacgcaaacttgcgaatagacaaaatacattgcactaccaataccacaatgcatgcgacaacaaatggcgtgatggataaatttctgatggcggtccgaataaccagctagattaactttagggagatcgaggcaattgaacaactcagctcagcgccgacaaggttgatgagaccaccgatgacgcgatatacactgcatggacatatacatacacaaagcgcgcactcacaatatgcaaagaatcaattgaatcaatcgaatctctaaaattcctcctggaaaaaaataacgacatcggccccccgctcgaaatcgaacagggggcctccgacggcgaagttttacgtgcctcaagcctcacgagtccgaccacacagctcaacccgtaggtagccacccggagaggaaacttgccattacaaccatactcgttaacttccatcgctgacctccccgagcgatgtcgaggagcggatggtaacgagatgggagtgtggcgccacgttcgacggtagtgtcttacccacagggccagtgctttgaactgggaaattggtttgctatttgggggtttatagctgtagtggggcagactggcgcgggtggggtggttggttaggggagcgggtgttcttcggtggttgctgtgggagtgatgggtgactgggtgatggttgttgggttgaggtttgaggagcggtcgtggtgaagatggacgcgcgggcgcggcgcgttgcgttgccccgggagatgaacgcgggggatagctttgatgcggatgcgcggttatgaggttgtgcgtaatgggaagactgcacgttatgatgtatggagagatggttatggaaacgctgggagggctgacaatgagagttgcgggtcatgtctcatgcaatcaagaccatgtcaaagccgtaccttcttgtatgaaagaaagatttaatacaaaaaacaactcacattagtttttcgtatgccttaaggtgca

SEQ ID NO: 30174 - DNA, 1140 bp, Muscodor strobelii
  misc_feature: SGI cDNA ID NO. 570374
  misc_feature: Encodes the peptide sequence at SEQ ID NO 30175
atgcaagagaagattgtgcccctaatcaaagcaatcaagaccaaggaaccggctgtcatgatggctggtctcgatgtcttacgtgtcgttggcgataacgcagatgcagacttcattgctatggatatcttgccaatcctttggagcatgagtttgggtccattgctcgacctgaaacagtttcaacggttcatggaccaaatcaagtcgctatcaagaaaggtagaagatgaacaaatgaagaaactgcaagagctggccgtaacaaatggacaaccggagccagcaccgattgaagacttcatgggttttggtggtgtgagtggcacaacgtttgactcaacgaatggtggtgctacgccggatgactttgagcgtctcgtcaagggccgagagtctcggacatcaacgagtgctatggataatggctgggacgcatcgccaaacccgtcggccgccacggcttcaaaggctcctgcccaattctcctggtcaacgccaagccctaccaacaacagccagtttaatcctcccaaagcgcaggcgcagcctccctcattccggactgtaactcctgatctagcgtcgttcggaacgctgtctcctcagtctacccagtactcgcagcctttaaagcctgctacacagaacactgtgacagcccaaccaccatcatcgggtatcaattggtcctcaagtacgagtacgaacacggccaatccatgggcatcttccactcccatgtctcccatgtcgtctggcatgtcaaacatgtctatgaaccagcagcagagaccaaccttaaatcaaacctcgtcatccttctctctcgctccgccgccatccggatcgacggcgttcggaagcagcgctcaatcatcatttagtattgcaccaccaccgcccagcggaattcaaaggcaaacttcaagcatgtccttcggacaaccatcttcaggctttggtgcgatgtctccaccgccaccagccgggagtatgaatagcatgatggggtcgggaatgagcatgaataatagtatgaatgcatgggcccagcagaagccacagcaacctcagcagcagcagcagcagcagcagcagcagaagagcggcttggataagtaccagagtctgatatga

SEQ ID NO: 30175 - protein, 379 aa, Muscodor strobelii
  misc_feature: SGI Peptide ID NO. 570374
  misc_feature (1)..(379): NCBI GI: 46135995 Blast Desc: FG09513.1 [Gibberella zeae PH-1]
  misc_feature (1)..(213): NCBI GI: 145606178 Blast Desc: MGG_11895 [Magnaporthe grisea 70-15] gi|145013899|gb|EDJ98540.1| MGG_11895 [Magnaporthe grisea 70-15]
  misc_feature (1)..(269): NCBI GI: 156053433 Blast Desc: SS1G_06884 [Sclerotinia sclerotiorum 1980] gi|154704662|gb|EDO04401.1| SS1G_06884 [Sclerotinia sclerotiorum 1980]
  misc_feature (1)..(252): NCBI GI: 154292683 Blast Desc: BC1G_14726 [Botryotinia fuckeliana B05.10] gi|150845808|gb|EDN21001.1| BC1G_14726 [Botryotinia fuckeliana B05.10]
  misc_feature (1)..(242): NCBI GI: 85067727 Blast Desc: NCU04755 [Neurospora crassa OR74A] gi|28921774|gb|EAA31052.1| conserved [Neurospora crassa OR74A] gi|40882300|emb|CAF06123.1| conserved [Neurospora crassa]
  misc_feature (1)..(379): NCBI GI: 171682050 Blast Desc: protein product [Podospora anserina] gi|170940984|emb|CAP66634.1| protein product [Podospora anserina]
  misc_feature (1)..(206): NCBI GI: 256727119 Blast Desc: NECHADRAFT_91286 [Nectria haematococca mpVI 77-13-4]
  misc_feature (1)..(308): NCBI GI: 240279964 Blast Desc: protein kinase [Ajellomyces capsulatus H143]
  misc_feature (1)..(379): NCBI GI: 154270507 Blast Desc: conserved [Ajellomyces capsulatus NAm1] gi|150409912|gb|EDN05300.1| conserved [Ajellomyces capsulatus NAm1]
  misc_feature (1)..(338): NCBI GI: 189189674 Blast Desc: protein kinase domain-containing protein ppk32 [Pyrenophora tritici-repentis Pt-1C-BFP] gi|187972782|gb|EDU40281.1| protein kinase domain-containing
MQEKIVPLIKAIKTKEPAVMMAGLDVLRVVGDNADADFIAMDILPILWSMSLGPLLDLKQFQRFMDQIKSLSRKVEDEQMKKLQELAVTNGQPEPAPIEDFMGFGGVSGTTFDSTNGGATPDDFERLVKGRESRTSTSAMDNGWDASPNPSAATASKAPAQFSWSTPSPTNNSQFNPPKAQAQPPSFRTVTPDLASFGTLSPQSTQYSQPLKPATQNTVTAQPPSSGINWSSSTSTNTANPWASSTPMSPMSSGMSNMSMNQQQRPTLNQTSSSFSLAPPPSGSTAFGSSAQSSFSIAPPPPSGIQRQTSSMSFGQPSSGFGAMSPPPPAGSMNSMMGSGMSMNNSMNAWAQQKPQQPQQQQQQQQQQKSGLDKYQSLI

SEQ ID NO: 30176 - DNA, 4713 bp, Muscodor strobelii; identical to SEQ ID NO: 30173
  misc_feature: SGI EST ID NO. CUFF.71387.0
  misc_feature: Variant of the nucleotide sequence at SEQ ID NO 30174

SEQ ID NO: 30177 - DNA, 270 bp, Muscodor strobelii
  misc_feature: SGI cDNA ID NO. 570375
  misc_feature: Encodes the peptide sequence at SEQ ID NO 30178
atgaatctctttatagcatcgtttttcctgttcgttcatggatcacctcacattacccgttccgcatccggtgccgtctctttgccccgcgaccaacaaaacgccaacgtcgattgtagccaagagggtgatggactttactgcgaagctgccaagatagcgggcagcgttgctattggcaagccgattatcaacctcactgcattgatctcccaaccaaacacgcagaagctgaacctcgagatgtcctccctgagcctgctcccgtga

SEQ ID NO: 30178 - protein, 89 aa, Muscodor strobelii
  misc_feature: SGI Peptide ID NO. 570375
MNLFIASFFLFVHGSPHITRSASGAVSLPRDQQNANVDCSQEGDGLYCEAAKIAGSVAIGKPIINLTALISQPNTQKLNLEMSSLSLLP

SEQ ID NO: 30179 - DNA, 2413 bp, Muscodor strobelii
  misc_feature: SGI EST ID NO. CUFF.71391.0
  misc_feature: Variant of the nucleotide sequence at SEQ ID NO 30177
gtcgggtttcgcatttcaggaaacgtcgtcgtggggttaagtttgatagcgtcgttacacaatggtctacgggtttgagaaaaggatcgtctttgcatcctagtcctcgagcctgcgacccggagaaagccaatgctatactctcccctcacaaccatacagatcgaaagcatgtctcacaaactcaatggaatggctgtgctccccttcattcatccgatatctctagccattggtgcagccgcatgtggtcataactcacttaagagggcaaataaatgggcatgaaaactccactcccatgggcatgaacttagccatattcggcaaccccaccacctaattcggtaatttctcatctcgtcgacctcaacctctgttcaacctctctcaacgccgggtactccaacatatcaatttctattccacaatcacttgctaaccctgatttaccgcctaacccgaaccctaaccgtaccctagccaactaaccctaataactgaccagctatctcgccgaattacttcggaagcaaacggacaatgtttaagtgcgcggcagtggttcgaagttggtgtgttcggtgttgaagttgagatgtacgggcgggatttcatgcctacgaaaagtggagttttcatgcccatttatttgccctcctcacttaatccatcggtgtagtactacgacgcaagggacgaacaacatgttcccatatactcacacaagaccaaccaaacagtttgagatcgagccactcagctacaaactcacaagcatgctgccccagagaaatcatgaggaaggatcattgggacctcgagttccaacctctctggccaaatcgccatacctgcaagatatacgatgaagctatgatattgtggtatatcttagacgagcgaagggccatcttgtcttctatataaagtgccctttctgaagcccgacctattgatcgtctcctctacaatgagattgcccaaacaccaaaatatatcgacgatcgcgaccgacaaactccttccaacatgaatctctttatagcatcgtttttcctgttcgttcatggatcacctcacattacccgttccgcatccggtgccgtctctttgccccgcgaccaacaaaacgccaacgtcgattgtagccaagagggtgatggactttactgcgaaggtacttatgaatcagacgggcatacgtggccagcggatatcatacaatgctacaaccatatatggtacttcatctcaagctgccaagatagcgggcagcgttgctattggcaagccgattatcaacctcactgcattgatctcccaaccaaacacgcagaagctgaacctcgagatgtcctccctgagcctgctcccgtgacaggagctgcttgtgtttcaggcaccaattcatgcgggagctacgaaaatggatacaacacatcgatctatcaatgtgttgacggcgtcaatcactttatttcaaactgcaccgaaggcaacaatgacttgaagtgcgattgggccccagatggccagccacactgcgtcgagatcaacccgtcacctgcaatcctgcctcgagctactgcaggcgaccccccagtgattccagaccgtggagcatgtcacgatctcccacatggatattactgccgaggacccaatttggagtcggcccatgaaattgttcaatgccttagtgaggactttccctcgtttatcgccgactgtcaaaagggacttaaagtttgcagataccaacctgacggtcaaccacactgcaccgaaaataagaaggacaaggatgattcgaagcaacacctagtacctcttgagtcgcgtgacgtatctaatttcgattgtcgcggaaaacgcggacagttctgcgacggctccaagactcatccaagcacgctgatcgtggaatgtgacaacgatggacctgcacaagtagtctcagattgcgggtcatcaagcgaggtatgcgactacgacagcaatggtcagccgcaatgtttcccgccacgtccccccgtgcctccggcggagatcagctcaagggatacgggagagcttcattgtgatggaaaaccttctgggtattactgcgggtttgaattagatggcttccaggacaacaacatgctcgttcaatgccttagttcggacgttccgataactatcgtggactgtcagacgtatggaaaagtctgtaaacgagaggccgatggtgtaccacattgtgtgtagcagagcaattcactttttgtagtttcatcttagactactggtgggtttgagagtatggttagcggagaaagagaggtattgtacggattaagggaaagttgattggatgtattagatatctactagaatagagaatagcgatctcgtggtctgataatca

SEQ ID NO: 30180 - DNA, 1587 bp, Muscodor strobelii
  misc_feature: SGI cDNA ID NO. 570376
  misc_feature: Elevated expression when VOC is produced
  misc_feature: Encodes the peptide sequence at SEQ ID NO 30181
atgtcagctaatcatatcttggcaggggtcaacggcggccgccttcatgccgcccaagtctgcttagcctgtaaatccaggaaaaagcgatgtgataaagcattaccacgctgcaacttttgtacaaaaaaaggactaagttgtcgttacaccgagttaccaaaaaatcgcctagtcccacagagtcgctctcttttcgacaaggacaccaggcgtaatgtattttcagcgccagagtcaaatttcacaggcgccatatatgttgagctagcatcatccgaagcgaacatttgtgctcaggttcttcgactgatacgagagactggccagtttccagcggatatttgcacgcgttacttcgagtgcattcatcactgtctgcctgtgatatctcaagagagatttcagagtagccttatcactctgggatcaactccgtctgttgggttttctatgttgctcttgagcatcttgcttcttacctcaactccccgaccggatccgactggaccaccccaaagcaatcctcggaaaattgatcgtgtatcactctacttgactgcgcgggctctctatgcacaagtccaagcgttgtatactcccacgaaacgcctaattcaagcgggcctacttctttccatgtacgaatatgcacaaggaagaccagatactgcaattacatcgcttgcgggttgtgcccgtatggcctacgctcactgcggcaacaaattctcttcctcatcgacagagacttcgagagagcagcacatctcgagactggaaacagacagagaatatcgtcttgggatagaagaagctaccactacttggtggggcttagtcatatgcgaacgcgcgttcttatgcgacgcaacgacttccgggcaaccatgtatcacagatattccaatcggcaataatctgttgtcagcgaaatgtgacgccgtaaataagcaagacgctgaaacccgaccatcggttcagaagatcactatgttttacttgatttccgctgatgaaggtggcttcggctgtgctgctcagatcacatgctttacagataatgtattcagcgcattgcgtgttaacgactgggatacacggcttgcccagcttcgcgaactcgacaaaggtctgcaagcatatttagggttgctaatgcaggcaaggtgcaatatgataaatatgtactgccagtctatatccttaggtatcaggacgctattcgttctacacaaccatattctggagcaagttcaagagtcgcttaaagatggaggatcttcgtcggatgagttgtccaagtacgcgtatgcagcccttgatgctgcaaccaagatggttctcgacatcatacaccaccacataggaccagcacctattttgttcagatatgtcactacgacctatccctactcttcacgcgcagctttagaatacgtgtcaagaaaaatgcagtggagcgatgaagaatggctacgaaaagcaagagaggagctgaccatcgctatcaaagattacaacagttggaatagagatgaagtccccgtgggctctgagaatttacaaacaacgagttttgactga

SEQ ID NO: 30181 - protein, 528 aa, Muscodor strobelii
  misc_feature: SGI Peptide ID NO. 570376
  misc_feature (19)..(57): Pfam Id: PF00172 Pfam Desc: Fungal Zn(2)-Cys(6) binuclear cluster domain
  misc_feature (9)..(502): NCBI GI: 242818446 Blast Desc: conserved [Talaromyces stipitatus ATCC 10500] gi|218713584|gb|EED13008.1| conserved [Talaromyces stipitatus ATCC 10500]
  misc_feature (17)..(500): NCBI GI: 67904120 Blast Desc: AN9047.2 [Aspergillus nidulans FGSC A4] gi|40745223|gb|EAA64379.1| AN9047.2 [Aspergillus nidulans FGSC A4] gi|259486500|tpe|CBF84395.1| TPA: Zn(II)2Cys6 transcription
  misc_feature (20)..(511): NCBI GI: 242768982 Blast Desc: conserved [Talaromyces stipitatus ATCC 10500] gi|218724873|gb|EED24290.1| conserved [Talaromyces stipitatus ATCC 10500]
  misc_feature (16)..(285): NCBI GI: 116201833 Blast Desc: CHGG_08801 [Chaetomium globosum CBS 148.51] gi|88177319|gb|EAQ84787.1| CHGG_08801 [Chaetomium globosum CBS 148.51]
  misc_feature (17)..(455): NCBI GI: 145248207 Blast Desc: An13g02140 [Aspergillus niger] gi|134081102|emb|CAK41613.1| protein product [Aspergillus niger]
  misc_feature (20)..(509): NCBI GI: 242763068 Blast Desc: conserved [Talaromyces stipitatus ATCC 10500] gi|218723699|gb|EED23116.1| conserved [Talaromyces stipitatus ATCC 10500]
  misc_feature (16)..(452): NCBI GI: 212529462 Blast Desc: conserved [Penicillium marneffei ATCC 18224] gi|210074286|gb|EEA28373.1| conserved [Penicillium marneffei ATCC 18224]
  misc_feature (17)..(285): NCBI GI: 154297215 Blast Desc: BC1G_12443 [Botryotinia fuckeliana B05.10] gi|150842970|gb|EDN18163.1| BC1G_12443 [Botryotinia fuckeliana B05.10]
  misc_feature (17)..(319): NCBI GI: 146324477 Blast Desc: fungal specific transcription factor [Aspergillus fumigatus Af293] gi|129557266|gb|EAL89009.2| fungal specific transcription factor, [Aspergillus fumigatus Af293]
  misc_feature (9)..(318): NCBI GI: 242805651 Blast Desc: fungal specific transcription factor, [Talaromyces stipitatus ATCC 10500] gi|218715201|gb|EED14623.1| fungal specific transcription factor, [Talaromyces stipitatus ATCC
  misc_feature: Useful for introducing or modulating the production of volatile compounds
MSANHILAGVNGGRLHAAQVCLACKSRKKRCDKALPRCNFCTKKGLSCRYTELPKNRLVPQSRSLFDKDTRRNVFSAPESNFTGAIYVELASSEANICAQVLRLIRETGQFPADICTRYFECIHHCLPVISQERFQSSLITLGSTPSVGFSMLLLSILLLTSTPRPDPTGPPQSNPRKIDRVSLYLTARALYAQVQALYTPTKRLIQAGLLLSMYEYAQGRPDTAITSLAGCARMAYAHCGNKFSSSSTETSREQHISRLETDREYRLGIEEATTTWWGLVICERAFLCDATTSGQPCITDIPIGNNLLSAKCDAVNKQDAETRPSVQKITMFYLISADEGGFGCAAQITCFTDNVFSALRVNDWDTRLAQLRELDKGLQAYLGLLMQARCNMINMYCQSISLGIRTLFVLHNHILEQVQESLKDGGSSSDELSKYAYAALDAATKMVLDIIHHHIGPAPILFRYVTTTYPYSSRAALEYVSRKMQWSDEEWLRKAREELTIAIKDYNSWNRDEVPVGSENLQTTSFD

SEQ ID NO: 30182 - DNA, 6269 bp, Muscodor strobelii
  misc_feature: SGI EST ID NO. CUFF.71481.0
  misc_feature: Variant of the nucleotide sequence at SEQ ID NO 30180
tcttgctcctaaaaagtctctttacattcaaggggatcttggtagtgttggaatcatccgaaagtcggcaatatgtcagctaatcatatcttggcaggggtcaacggcggccgccttcatgccgcccaagtctgcttagcctgtaaatccaggaaaaagcgatgtgataaagcattaccacgctgcaacttttgtacaaaaaaaggactaagttgtcgttacaccgagttaccaaaaaatcgcctagtcccacagagtcgctctcttttcgacaaggacaccaggcgtaatgtattttcagcgccagagtcaaatttcacaggcgccatatatgttgagctagcatcatccgaagcgaacatttgtgctcaggttcttcgactgatacgagagactggccagtttccagcggatatttgcacgcgttacttcgagtgcattcatcactgtctgcctgtgatatctcaagagagatttcagagtagccttatcactctgggatcaactccgtctgttgggttttctatgttgctcttgagcatcttgcttcttacctcaactccccgaccggatccgactggaccaccccaaagcaatcctcggaaaattgatcgtgtatcactctacttgactgcgcgggctctctatgcacaagtccaagcgttgtatactcccacgaaacgcctaattcaagcgggcctacttctttccatgtacgaatatgcacaaggaagaccagatactgcaattacatcgcttgcgggttgtgcccgtatggcctacgctcactgcggcaacaaattctcttcctcatcgacagagacttcgagagagcagcacatctcgagactggaaacagacagagaatatcgtcttgggatagaagaagctaccactacttggtggggcttagtcatatgcgaacgcgcgttcttatgcgacgcaacgacttccgggcaaccatgtatcacagatattccaatcggcaataatctgttgtcagcgaaatgtgacgccgtaaataagcaagacgctgaaacccgaccatcggttcagaagatcactatgttttacttgatttccgctgatgaaggtggcttcggctgtgctgctcagatcacatgctttacagataatgtattcagcgcattgcgtgttaacgactgggatacacggcttgcccagcttcgcgaactcgacaaaggtctgcaagcatatttagggttgctaatgcaggcaaggtgcaatatgataaatatgtactgccagtctatatccttaggtatcaggacgctattcgttctacacaaccatattctggagcaagttcaagagtcgcttaaagatggaggatcttcgtcggatgagttgtccaagtacgcgtatgcagcccttgatgctgcaaccaagatggttctcgacatcatacaccaccacataggaccagcacctattttgttcagatatgtcactacgacctatccctactcttcacgcgcagctttagaatacgtgtcaagaaaaatgcagtggagcgatgaagaatggctacgaaaagcaagagaggagctgaccatcgctatcaaagattacaacagttggaatagagatgaagtccccgtgggctctgagaatttacaaacaacgagttttgactgaaatcaggttttattgacattatgtatatactgttatccaatatatagatcttttttctttttcaaaagcccaagatacatatggctgatataccagctttcaaatggaaactattgacctgatcccatcacagcccaatttaaggattgacgtacattggctgaatgaagttccatccgtcgatgaattgtggttttattgcctcgatgttcacatcgtctaagacgcgagcactcaaactccaattgtccaatcctcgttgataccaaaacttcgccgcatcgggcattgcagccttcgcctcttcggaagcggggatcgacttgttggaaacaatgacgccgcacgtcttacagtgagattttgcgaatttaccgcttcccatggaatattgagtagtattgtttaagccttggagggaacagcattcgttcgggaaccacaagccgacccaagcgttctgggattgcaatgtcagcagctatacatcagagtttaagtcctgaacgattgtaaactcacccgattgcaaatactgcaattacactcgaatgctgggacacccgaatcaccatctaagggtttggtcttcactgcaagggtgacggcgccacagtgacagctcccagtgtagatgcgactgccctcgagttctgcctgtggctcttggcctttgaaggctggtgcagaccaagctgggacattgtcgggctcgtatttatcaactttcaagctccagacatcgaggtcttgaatagcgcgaaccttgatctataagttagtcttatctgactttttgcaattgttatgatggagacctacatttacaccaactctgttgtccttgcccgtatcatgtccaatgaccagaaggtttgtgccacaagttgtgcaaaactataattttcggtttagtctcattgatctcatgcagtctgctacttgataattgctgttatacccacttaccttgtaatgaaaatcaccaaatgtgtactcggacaatgtgccctcgtccccttgcacgaatttgtagtcactagtaaaagaccacagtgtgcctctgcgcgtgcatgagctgcagttacagcccacagctgactcaatcttaggtaccttggtctctaagatataggccttgcaatggcagttcgcgcgataggtaacgttcgacatattggtgatgttgtgagaagaaaaacttcgtgagcaaaaggctaataaatgttgcaatgcaattgagatatgacaactttgagttgtgatttatttcgctttacttttacaattcattagctcttaatactgttgatcgtgtttacatatagttctacagcgcagcgccaagtagtccgaggaccgagcaggatcgccctaattcccccacaaaagcaggtaacttacagctcggtgattgtgtttctcaaggcgtgagtcactccggcctgggcgacgaacagcgacattgtgaaggatcacatatttcgaatgcttctacacgttccattgtgaattggtacctcactaatgatgcaagggtgcgctgtctgttcatgatccaaatcgtcacaaaatccggtacgtcggagtttggctgcattgcttacactatcaataccgttatgccgttatgccgttatgccgttatgcctgctatttcagatcggggtgtctcgaaacgaaacataacgccgattgataaagacactctcatgtcatcctaatcggactcgaaatcacgccgactctaatatcgcagaggctcgggattctgcatactggactgatctcgtgatgaggggcttgtgttacccaagacgcagcaatttagctatcgacgacggttatagcttgcattaaagatcactggcgtcatgacacgccatctagcttgtttgtcttgcttttctactgggtttatgagcatcaaaagacattgtcattgatacaagcattcatcttgtatcagattgtcgaccgtgatgtttaccagcaagtgatcaagtcattcaaattgaaacgcggtccctatccattacatgaccgagaagattgcacttgtcgacgacccctcacttgcctctcgggagctggtggatgtcgctattgctgcgtcgttccattcatccttaagggcagatgaggtccacttgacctaggtcttcgaatatggttgcaatcgcagaacgtttgttttcaaacacgctgccgattaacatcaagcatgatactgctactttccatgctctcagcgaaatcgattatagggttgctgggattgtgttagggattttggtttatatctacatatggtttctctgtggaagggagccgatatcgttcttcctcttgagcattgtgcgttgttgtcgaaggagagatgaaccagcatacatgcgtccaattgcctcaagtttaccacgggcttatggcaccgcttcaagggctgataatggccaacgagagaatgtggtatctcatcattctcatactcccgcaggagtgccaagatcaggagcgtcggctgcactgctatcaaacgtgacagcatcgaaagccgcggcaagggaacgtaccaggcagcaagagcgtcaaaggcaattagaaatagagcggcagcgcaaaatagagcaggaacggcgacgacggtcgcaacgacgatcattgtcatcggacggtgaagagtcggaggaaattcgacgacgacaacgtatacaagatactgtgtctcgcggggaatacggcgatcgtggtcatggcggcggagaggacgatagtagctcggcaccgagcgccagctccggtgacaatgatagtgacggtgacagtgactgattttgatacatctagagaaagctagagtgattcgtgggggccgttttacatacgacagaacatttaacatacaaacggaatttgcatagtggctgaaagatggttgaatgggtgataacgggttgtggaagaggtgttgaggaccgtaagcgatggattttccgtttgacttttacaagcgaatgctaaacttagatctttcgggtgcacagtatatcttcttcctttcgtatcagtttcgttcattcccctcgctccttctgctttcatgacgtcttgaagatgtttcatgttcatcactgctggtgccgtggctcgttgaaataggcaacgcgaaattgaaaatcggtcctccaattagttgtgagaacattatgtggaacgtttctcttatcgaatgtccaaggctttgaagcgtgaggagcttcctcaaatatcgaaaacgcacttgggtactgagcctccattcattatcatcgccatatcagattctctcgaatcttagatacaatgcgttgctctttgggtgcccagtgtacatatcagtctgctcgattccccgatcatcaacaacatgacttgtgtaattggaataaatagctgcaatgatgagtttcatatctaaaattgacaggtcgatggttaactcgatatcatcgcagcgggagtggcaagatacgaaccatgcatcgcaaaattagaacctaagcacatcctaccaccgctggagaagccccaaaattgtcgaacgacatctttttggttgcttagccaccgagtatagtcccatcgctccggttcgggataaatattttcatctcggtgaaggttatatgcggatgctgatatacgagtaccgcctggtatctcatatggccctatctgacaggatggtgaaggtgctactcttggctcaggtccaccagctggcgcgtaacgtctgactgtttctaggatcattgcatgaagcttaggtagactgtcaagctgtctcgaatctggcatagataacttgtcgttccccagagtcatgcttggtcgcaatgataggagctcatccctcaattcttgttgtaaacccagggactgtgaaagatgatatgacaggtacgttagtgcgactccagttgtttcctggcccgccaatacatgatcaaagacttcagatgctatagagagctctggctgcaagatggccgtgttgtatatggatgagtgctcgctattgctttggaattctttgtcgtaacctgcgagtaatgcccgtacgaccaccggctcgttagcaggggtttcgacacccgtagaactttgaagatctcgcaaagtcacatcgctcagctccttgcaccacgcttccaattcccggtttgctagccttacccaacgaggagtaaggctgatgcctaggcaaccgagcactgcggatagtctaggtagctcttgactgaaaaatccgtacccctttcgtgtagtatacagagtcagccaatgatcacgttcagctttgcgtcgaatgaaatcagcgctattcttaattccaaaacagtatgcggagataaagtccatagccacggcgcagaagagagagtggacgttaatcccatgcggtgacttgcattcggagatagacttcgccaaaagtggcatcaatctctggttcatgattatttcggattgcgcagacagcgcagtggacgttgatatgtacgacttcgagtagacatgcgaaaccatgcgcttcctcgtagaatgatggttcgatgtcacggacg

SEQ ID NO: 30183 - DNA, 1617 bp, Muscodor strobelii
  misc_feature: SGI cDNA ID NO. 570377
  misc_feature: Reduced expression when VOC is produced
  misc_feature: Encodes the peptide sequence at SEQ ID NO 30184
atggcagcgaatattcttgctcctaaaaagtctctttacattcaaggggatcttggggtcaacggcggccgccttcatgccgcccaagtctgcttagcctgtaaatccaggaaaaagcgatgtgataaagcattaccacgctgcaacttttgtacaaaaaaaggactaagttgtcgttacaccgagttaccaaaaaatcgcctagtcccacagagtcgctctcttttcgacaaggacaccaggcgtaatgtattttcagcgccagagtcaaatttcacaggcgccatatatgttgagctagcatcatccgaagcgaacatttgtgctcaggttcttcgactgatacgagagactggccagtttccagcggatatttgcacgcgttacttcgagtgcattcatcactgtctgcctgtgatatctcaagagagatttcagagtagccttatcactctgggatcaactccgtctgttgggttttctatgttgctcttgagcatcttgcttcttacctcaactccccgaccggatccgactggaccaccccaaagcaatcctcggaaaattgatcgtgtatcactctacttgactgcgcgggctctctatgcacaagtccaagcgttgtatactcccacgaaacgcctaattcaagcgggcctacttctttccatgtacgaatatgcacaaggaagaccagatactgcaattacatcgcttgcgggttgtgcccgtatggcctacgctcactgcggcaacaaattctcttcctcatcgacagagacttcgagagagcagcacatctcgagactggaaacagacagagaatatcgtcttgggatagaagaagctaccactacttggtggggcttagtcatatgcgaacgcgcgttcttatgcgacgcaacgacttccgggcaaccatgtatcacagatattccaatcggcaataatctgttgtcagcgaaatgtgacgccgtaaataagcaagacgctgaaacccgaccatcggttcagaagatcactatgttttacttgatttccgctgatgaaggtggcttcggctgtgctgctcagatcacatgctttacagataatgtattcagcgcattgcgtgttaacgactgggatacacggcttgcccagcttcgcgaactcgacaaaggtctgcaagcatatttagggttgctaatgcaggcaaggtgcaatatgataaatatgtactgccagtctatatccttaggtatcaggacgctattcgttctacacaaccatattctggagcaagttcaagagtcgcttaaagatggaggatcttcgtcggatgagttgtccaagtacgcgtatgcagcccttgatgctgcaaccaagatggttctcgacatcatacaccaccacataggaccagcacctattttgttcagatatgtcactacgacctatccctactcttcacgcgcagctttagaatacgtgtcaagaaaaatgcagtggagcgatgaagaatggctacgaaaagcaagagaggagctgaccatcgctatcaaagattacaacagttggaatagagatgaagtccccgtgggctctgagaatttacaaacaacgagttttgactga

SEQ ID NO: 30184 - protein, 538 aa, Muscodor strobelii
  misc_feature: SGI Peptide ID NO. 570377
  misc_feature (29)..(67): Pfam Id: PF00172 Pfam Desc: Fungal Zn(2)-Cys(6) binuclear cluster domain
  misc_feature (18)..(512): NCBI GI: 242818446 Blast Desc: conserved [Talaromyces stipitatus ATCC 10500] gi|218713584|gb|EED13008.1| conserved [Talaromyces stipitatus ATCC 10500]
  misc_feature (27)..(510): NCBI GI: 67904120 Blast Desc: AN9047.2 [Aspergillus nidulans FGSC A4] gi|40745223|gb|EAA64379.1| AN9047.2 [Aspergillus nidulans FGSC A4] gi|259486500|tpe|CBF84395.1| TPA: Zn(II)2Cys6 transcription
  misc_feature (30)..(521): NCBI GI: 242768982 Blast Desc: conserved [Talaromyces stipitatus ATCC 10500] gi|218724873|gb|EED24290.1| conserved [Talaromyces stipitatus ATCC 10500]
  misc_feature (26)..(295): NCBI GI: 116201833 Blast Desc: CHGG_08801 [Chaetomium globosum CBS 148.51] gi|88177319|gb|EAQ84787.1| CHGG_08801 [Chaetomium globosum CBS 148.51]
  misc_feature (27)..(465): NCBI GI: 145248207 Blast Desc: An13g02140 [Aspergillus niger] gi|134081102|emb|CAK41613.1| protein product [Aspergillus niger]
  misc_feature (30)..(519): NCBI GI: 242763068 Blast Desc: conserved [Talaromyces stipitatus ATCC 10500] gi|218723699|gb|EED23116.1| conserved [Talaromyces stipitatus ATCC 10500]
  misc_feature (26)..(462): NCBI GI: 212529462 Blast Desc: conserved [Penicillium marneffei ATCC 18224] gi|210074286|gb|EEA28373.1| conserved [Penicillium marneffei ATCC 18224]
  misc_feature (27)..(295): NCBI GI: 154297215 Blast Desc: BC1G_12443 [Botryotinia fuckeliana B05.10] gi|150842970|gb|EDN18163.1| BC1G_12443 [Botryotinia fuckeliana B05.10]
  misc_feature (27)..(329): NCBI GI: 146324477 Blast Desc: fungal specific transcription factor [Aspergillus fumigatus Af293] gi|129557266|gb|EAL89009.2| fungal specific transcription factor, [Aspergillus fumigatus Af293]
  misc_feature (19)..(328): NCBI GI: 242805651 Blast Desc: fungal specific transcription factor, [Talaromyces stipitatus ATCC 10500] gi|218715201|gb|EED14623.1| fungal specific transcription factor, [Talaromyces stipitatus ATCC
  misc_feature: Useful for introducing or modulating the production of volatile compounds
MAANILAPKKSLYIQGDLGVNGGRLHAAQVCLACKSRKKRCDKALPRCNFCTKKGLSCRYTELPKNRLVPQSRSLFDKDTRRNVFSAPESNFTGAIYVELASSEANICAQVLRLIRETGQFPADICTRYFECIHHCLPVISQERFQSSLITLGSTPSVGFSMLLLSILLLTSTPRPDPTGPPQSNPRKIDRVSLYLTARALYAQVQALYTPTKRLIQAGLLLSMYEYAQGRPDTAITSLAGCARMAYAHCGNKFSSSSTETSREQHISRLETDREYRLGIEEATTTWWGLVICERAFLCDATTSGQPCITDIPIGNNLLSAKCDAVNKQDAETRPSVQKITMFYLISADEGGFGCAAQITCFTDNVFSALRVNDWDTRLAQLRELDKGLQAYLGLLMQARCNMINMYCQSISLGIRTLFVLHNHILEQVQESLKDGGSSSDELSKYAYAALDAATKMVLDIIHHHIGPAPILFRYVTTTYPYSSRAALEYVSRKMQWSDEEWLRKAREELTIAIKDYNSWNRDEVPVGSENLQTTSFD

SEQ ID NO: 30185 - DNA, 6269 bp, Muscodor strobelii; identical to SEQ ID NO: 30182
  misc_feature: SGI EST ID NO. CUFF.71481.0
  misc_feature: Variant of the nucleotide sequence at SEQ ID NO 30183

SEQ ID NO: 30186 - DNA, 771 bp, Muscodor strobelii
  misc_feature: SGI cDNA ID NO. 570378
  misc_feature: Elevated expression when VOC is produced
  misc_feature: Encodes the peptide sequence at SEQ ID NO 30187
atgtcgctgttcgtcgcccaggccggagtgactcacgccttgagaaacacaatcaccgagcttgactacaaattcgtgcaaggggacgagggcacattgtccgagtacacatttggtgattttcattacaagttttgcacaacttgtggcacaaaccttctggtcattggacatgatacgggcaaggacaacagagttggtgtaaatgttcgcgctattcaagacctcgatgtctggagcttgaaagttgataaatacgagcccgacaatgtcccagcttggtctgcaccagccttcaaaggccaagagccacaggcagaactcgagggcagtcgcatctacactgggagctgtcactgtggcgccgtcacccttgcagtgaagaccaaacccttagatggtgattcgggtgtcccagcattcgagtgtaattgcagtatttgcaatcggaacgcttgggtcggcttgtggttcccgaacgaatgctgttccctccaaggcttaaacaatactactcaatattccatgggaagcggtaaattcgcaaaatctcactgtaagacgtgcggcgtcattgtttccaacaagtcgatccccgcttccgaagaggcgaaggctgcaatgcccgatgcggcgaagttttggtatcaacgaggattggacaattggagtttgagtgctcgcgtcttagacgatgtgaacatcgaggcaataaaaccacaattcatcgacggatggaacttcattcagccaatgtacgtcaatccttaa

SEQ ID NO: 30187 - protein, 256 aa, Muscodor strobelii
  misc_feature: SGI Peptide ID NO. 570378
  misc_feature (19)..(256): NCBI GI: 85079296 Blast Desc: NCU04342 [Neurospora crassa OR74A] gi|28917382|gb|EAA27087.1| [Neurospora crassa OR74A]
  misc_feature (66)..(256): NCBI GI: 261352510 Blast Desc: conserved [Verticillium albo-atrum VaMs.102]
  misc_feature (18)..(256): NCBI GI: 145603382 Blast Desc: MGG_06088 [Magnaporthe grisea 70-15] gi|145011621|gb|EDJ96277.1| MGG_06088 [Magnaporthe grisea 70-15]
  misc_feature (20)..(244): NCBI GI: 145240555 Blast Desc: An08g08090 [Aspergillus niger] gi|134077446|emb|CAK45700.1| protein product [Aspergillus niger]
  misc_feature (94)..(256): NCBI GI: 116196628 Blast Desc: CHGG_04912 [Chaetomium globosum CBS 148.51] gi|88180825|gb|EAQ88293.1| CHGG_04912 [Chaetomium globosum CBS 148.51]
  misc_feature (30)..(243): NCBI GI: 156061777 Blast Desc: SS1G_03034 [Sclerotinia sclerotiorum 1980] gi|154700435|gb|EDO00174.1| SS1G_03034 [Sclerotinia sclerotiorum 1980]
  misc_feature (21)..(239): NCBI GI: 171688400 Blast Desc: protein product [Podospora anserina] gi|170944162|emb|CAP70272.1| protein product [Podospora anserina]
  misc_feature (56)..(161): NCBI GI: 154292388 Blast Desc: BC1G_14683 [Botryotinia fuckeliana B05.10] gi|150846162|gb|EDN21355.1| BC1G_14683 [Botryotinia fuckeliana B05.10]
  misc_feature (112)..(248): NCBI GI: 259414880 Blast Desc: glutathione-dependent formaldehyde-activating, GFA [Silicibacter sp. TrichCH4B] gi|259349331|gb|EEW61078.1| glutathione-dependent formaldehyde-activating, GFA [Silicibacter
  misc_feature (114)..(247): NCBI GI: 110635399 Blast Desc: glutathione-dependent formaldehyde-activating, GFA [Mesorhizobium sp. BNC1] gi|110286383|gb|ABG64442.1| glutathione-dependent formaldehyde-activating, GFA [Chelativorans
  misc_feature: Useful for introducing or modulating the production of volatile compounds
MSLFVAQAGVTHALRNTITELDYKFVQGDEGTLSEYTFGDFHYKFCTTCGTNLLVIGHDTGKDNRVGVNVRAIQDLDVWSLKVDKYEPDNVPAWSAPAFKGQEPQAELEGSRIYTGSCHCGAVTLAVKTKPLDGDSGVPAFECNCSICNRNAWVGLWFPNECCSLQGLNNTTQYSMGSGKFAKSHCKTCGVIVSNKSIPASEEAKAAMPDAAKFWYQRGLDNWSLSARVLDDVNIEAIKPQFIDGWNFIQPMYVNP

SEQ ID NO: 30188 - DNA, 4761 bp, Muscodor strobelii
  misc_feature: SGI EST ID NO. CUFF.71482.1
  misc_feature: Variant of the nucleotide sequence at SEQ ID NO 30186
cgtccgtgacatcgaaccatcattctacgaggaagcgcatggtttcgcatgtctactcgaagtcgtacatatcaacgtccactgcgctgtctgcgcaatccgaaataatcatgaaccagagattgatgccacttttggcgaagtctatctccgaatgcaagtcaccgcatgggattaacgtccactctctcttctgcgccgtggctatggactttatctccgcatactgttttggaattaagaatagcgctgatttcattcgacgcaaagctgaacgtgatcattggctgactctgtatactacacgaaaggggtacggatttttcagtcaagagctacctagactatccgcagtgctcggttgcctaggcatcagccttactcctcgttgggtaaggctagcaaaccgggaattggaagcgtggtgcaaggagctgagcgatgtgactttgcgagatcttcaaagttctacgggtgtcgaaacccctgctaacgagccggtggtcgtacgggcattactcgcaggttacgacaaagaattccaaagcaatagcgagcactcatccatatacaacacggccatcttgcagccagagctctctatagcatctgaagtctttgatcatgtattggcgggccaggaaacaactggagtcgcactaacgtacctgtcatatcatctttcacagtccctgggtttacaacaagaattgagggatgagctcctatcattgcgaccaagcatgactctggggaacgacaagttatctatgccagattcgagacagcttgacagtctacctaagcttcatgcaatgatcctagaaacagtcagacgttacgcgccagctggtggacctgagccaagagtagcaccttcaccatcctgtcagatagggccatatgagataccaggcggtactcgtatatcagcatccgcatataaccttcaccgagatgaaaatatttatcccgaaccggagcgatgggactatactcggtggctaagcaaccaaaaagatgtcgttcgacaattttggggcttctccagcggtggtaggatgtgcttaggttctaattttgcgatgcatgatatgaaactcatcattgcagctatttattccaattacacaagtcatgttgttgatgatcggggaatcgagcagactgatatgtacactgggcacccaaagagcaacgcattgtatctaagattcgagagaatctgatatggcgatgataatgaatggaggctcagtacccaagtgcgttttcgatatttgaggaagctcctcacgcttcaaagccttggacattcgataagagaaacgttccacataatgttctcacaactaattggaggaccgattttcaatttcgcgttgcctatttcaacgagccacggcaccagcagtgatgaacatgaaacatcttcaagacgtcatgaaagcagaaggagcgaggggaatgaacgaaactgatacgaaaggaagaagatatactgtgcacccgaaagatctaagtttagcattcgcttgtaaaagtcaaacggaaaatccatcgcttacggtcctcaacacctcttccacaacccgttatcacccattcaaccatctttcagccactatgcaaattccgtttgtatgttaaatgttctgtcgtatgtaaaacggcccccacgaatcactctagctttctctagatgtatcaaaatcagtcactgtcaccgtcactatcattgtcaccggagctggcgctcggtgccgagctactatcgtcctctccgccgccatgaccacgatcgccgtattccccgcgagacacagtatcttgtatacgttgtcgtcgtcgaatttcctccgactcttcaccgtccgatgacaatgatcgtcgttgcgaccgtcgtcgccgttcctgctctattttgcgctgccgctctatttctaattgcctttgacgctcttgctgcctggtacgttcccttgccgcggctttcgatgctgtcacgtttgatagcagtgcagccgacgctcctgatcttggcactcctgcgggagtatgagaatgatgagataccacattctctcgttggccattatcagcccttgaagcggtgccataagcccgtggtaaacttgaggcaattggacgcatgtatgctggttcatctctccttcgacaacaacgcacaatgctcaagaggaagaacgatatcggctcccttccacagagaaaccatatgtagatataaaccaaaatccctaacacaatcccagcaaccctataatcgatttcgctgagagcatggaaagtagcagtatcatgcttgatgttaatcggcagcgtgtttgaaaacaaacgttctgcgattgcaaccatattcgaagacctaggtcaagtggacctcatctgcccttaaggatgaatggaacgacgcagcaatagcgacatccaccagctcccgagaggcaagtgaggggtcgtcgacaagtgcaatcttctcggtcatgtaatggatagggaccgcgtttcaatttgaatgacttgatcacttgctggtaaacatcacggtcgacaatctgatacaagatgaatgcttgtatcaatgacaatgtcttttgatgctcataaacccagtagaaaagcaagacaaacaagctagatggcgtgtcatgacgccagtgatctttaatgcaagctataaccgtcgtcgatagctaaattgctgcgtcttgggtaacacaagcccctcatcacgagatcagtccagtatgcagaatcccgagcctctgcgatattagagtcggcgtgatttcgagtccgattaggatgacatgagagtgtctttatcaatcggcgttatgtttcgtttcgagacaccccgatctgaaatagcaggcataacggcataacggcataacggcataacggtattgatagtgtaagcaatgcagccaaactccgacgtaccggattttgtgacgatttggatcatgaacagacagcgcacccttgcatcattagtgaggtaccaattcacaatggaacgtgtagaagcattcgaaatatgtgatccttcacaatgtcgctgttcgtcgcccaggccggagtgactcacgccttgagaaacacaatcaccgagctgtaagttacctgcttttgtgggggaattagggcgatcctgctcggtcctcggactacttggcgctgcgctgtagaactatatgtaaacacgatcaacagtattaagagctaatgaattgtaaaagtaaagcgaaataaatcacaactcaaagttgtcatatctcaattgcattgcaacatttattagccttttgctcacgaagtttttcttctcacaacatcaccaatatgtcgaacgttacctatcgcgcgaactgccattgcaaggcctatatcttagagaccaaggtacctaagattgagtcagctgtgggctgtaactgcagctcatgcacgcgcagaggcacactgtggtcttttactagtgactacaaattcgtgcaaggggacgagggcacattgtccgagtacacatttggtgattttcattacaagttttgcacaacttgtggcacaaaccttctggtcattggacatgatacgggcaaggacaacagagttggtgtaaatgttcgcgctattcaagacctcgatgtctggagcttgaaagttgataaatacgagcccgacaatgtcccagcttggtctgcaccagccttcaaaggccaagagccacaggcagaactcgagggcagtcgcatctacactgggagctgtcactgtggcgccgtcacccttgcagtgaagaccaaacccttagatggtgattcgggtgtcccagcattcgagtgtaattgcagtatttgcaatcggaacgcttgggtcggcttgtggttcccgaacgaatgctgttccctccaaggcttaaacaatactactcaatattccatgggaagcggtaaattcgcaaaatctcactgtaagacgtgcggcgtcattgtttccaacaagtcgatccccgcttccgaagaggcgaaggctgcaatgcccgatgcggcgaagttttggtatcaacgaggattggacaattggagtttgagtgctcgcgtcttagacgatgtgaacatcgaggcaataaaaccacaattcatcgacggatggaacttcattcagccaatgtacgtcaatccttaaattgggctgtgatgggatcaggtcaatagtttccatttgaaagctggtatatcagccatatgtatcttgggcttttgaaaaagaaaaaagatctatatattggataacagtatatacataatgtcaataaaacctgatttcagtcaaaactcgttgtttgtaaattctcagagcccacggggacttcatctctattccaactgttgtaatctttgatagcgatggtcagctcctctcttgcttttcgtagccattcttcatcgctccactgcatttttcttgacacgtattctaaagctgcgcgtgaagagtagggataggtcgtagtgacatatctgaacaaaataggtgctggtcctatgtggtggtgtatgatgtcgagaaccatcttggttgcagctgcatccaacatgtcagtaggttccgtgcatcgagaaagaaaacatcatatatgaaactcagccgaataaaaagaatagcccagtaatctcgatcagagagtaagatctgtcactcaccatcaagggctgcatacgcgtactt

SEQ ID NO: 30189 - DNA, 1566 bp, Muscodor strobelii
  misc_feature: SGI cDNA ID NO. 570379
  misc_feature: Encodes the peptide sequence at SEQ ID NO 30190
atgcccagcctctattcttctatcgtgctcctcgcgatcgcttgggcagtatatcaacatgtgatctatcctaccattctctcgccgctggccaggttaccaacagcacattggacatgttcattttccgactgttggatgctctgggcgaggttcaacagccgagagaatcgaacgttgaatgccgctcataagcaatatggttcgattatccgtgtcgggcccagcgaggtcagtataaatagttcagaagccgtgaagatcgtataccagggtgggttcgataaacatcaatggtattctgtttttgataattttggagtcccttgcatgttctcgtccgtgacatcgaaccatcattctacgaggaagcgcatggtttcgcatgtctactcgaagtcgtacatatcaacgtccactgcgctgtctgcgcaatccgaaataatcatgaaccagagattgatgccacttttggcgaagtctatctccgaatgcaagtcaccgcatgggattaacgtccactctctcttctgcgccgtggctatggactttatctccgcatactgttttggaattaagaatagcgctgatttcattcgacgcaaagctgaacgtgatcattggctgactctgtatactacacgaaaggggtacggatttttcagtcaagagctacctagactatccgcagtgctcggttgcctaggcatcagccttactcctcgttgggtaaggctagcaaaccgggaattggaagcgtggtgcaaggagctgagcgatgtgactttgcgagatcttcaaagttctacgggtgtcgaaacccctgctaacgagccggtggtcgtacgggcattactcgcaggttacgacaaagaattccaaagcaatagcgagcactcatccatatacaacacggccatcttgcagccagagctctctatagcatctgaagtctttgatcatgtattggcgggccaggaaacaactggagtcgcactaacgtacctgtcatatcatctttcacagtccctgggtttacaacaagaattgagggatgagctcctatcattgcgaccaagcatgactctggggaacgacaagttatctatgccagattcgagacagcttgacagtctacctaagcttcatgcaatgatcctagaaacagtcagacgttacgcgccagctggtggacctgagccaagagtagcaccttcaccatcctgtcagatagggccatatgagataccaggcggtactcgtatatcagcatccgcatataaccttcaccgagatgaaaatatttatcccgaaccggagcgatgggactatactcggtggctaagcaaccaaaaagatgtcgttcgacaattttggggcttctccagcggtggtaggatgtgcttaggttctaattttgcgatgcatgatatgaaactcatcattgcagctatttattccaattacacaagtcatgttgttgatgatcggggaatcgagcagactgatatgtacactgggcacccaaagagcaacgcattgtatctaagattcgagagaatctga

SEQ ID NO: 30190 - protein, 521 aa, Muscodor strobelii
  misc_feature: SGI Peptide ID NO. 570379
  misc_feature (31)..(517): Pfam Id: PF00067 Pfam Desc: Cytochrome P450
  misc_feature (314)..(517): Pfam Id: PF00067 Pfam Desc: Cytochrome P450
  misc_feature (18)..(519): NCBI GI: 39945246 Blast Desc: MGG_04605 [Magnaporthe grisea 70-15] gi|145021455|gb|EDK05584.1| MGG_04605 [Magnaporthe grisea 70-15]
  misc_feature (17)..(521): NCBI GI: 171681886 Blast Desc: protein product [Podospora anserina] gi|170940902|emb|CAP66552.1| protein product [Podospora anserina]
  misc_feature (9)..(519): NCBI GI: 156064283 Blast Desc: SS1G_00149 [Sclerotinia sclerotiorum 1980] gi|154691011|gb|EDN90749.1| SS1G_00149 [Sclerotinia sclerotiorum 1980]
  misc_feature (9)..(519): NCBI GI: 154312234 Blast Desc: BC1G_06150 [Botryotinia fuckeliana B05.10] gi|150850113|gb|EDN25306.1| BC1G_06150 [Botryotinia fuckeliana B05.10]
  misc_feature (18)..(518): NCBI GI: 256724210 Blast Desc: NECHADRAFT_53495 [Nectria haematococca mpVI 77-13-4]
  misc_feature (2)..(520): NCBI GI: 240111077 Blast Desc: Cytochrome P450 family protein [Coccidioides posadasii C735 delta SOWgp]
  misc_feature (17)..(521): NCBI GI: 259489292 Blast Desc: TPA: cytochrome P450, (Eurofung) [Aspergillus nidulans FGSC A4]
  misc_feature (2)..(519): NCBI GI: 238486362 Blast Desc: cytochrome P450 monooxygenase, [Aspergillus flavus NRRL3357] gi|220699298|gb|EED55637.1| cytochrome P450 monooxygenase, [Aspergillus flavus NRRL3357]
  misc_feature (7)..(521): NCBI GI: 255940870 Blast Desc: Pc16g08850 [Penicillium chrysogenum Wisconsin 54-1255] gi|211585827|emb|CAP93555.1| Pc16g08850 [Penicillium chrysogenum Wisconsin 54-1255]
  misc_feature (6)..(520): NCBI GI: 258565737 Blast Desc: conserved [Uncinocarpus reesii 1704] gi|237907314|gb|EEP81715.1| conserved [Uncinocarpus reesii 1704]
  misc_feature (97)..(490): SWISSPROT Homolog: EC 1.14.14.1 Unspecific monooxygenase
MPSLYSSIVLLAIAWAVYQHVIYPTILSPLARLPTAHWTCSFSDCWMLWARFNSRENRTLNAAHKQYGSIIRVGPSEVSINSSEAVKIVYQGGFDKHQWYSVFDNFGVPCMFSSVTSNHHSTRKRMVSHVYSKSYISTSTALSAQSEIIMNQRLMPLLAKSISECKSPHGINVHSLFCAVAMDFISAYCFGIKNSADFIRRKAERDHWLTLYTTRKGYGFFSQELPRLSAVLGCLGISLTPRWVRLANRELEAWCKELSDVTLRDLQSSTGVETPANEPVVVRALLAGYDKEFQSNSEHSSIYNTAILQPELSIASEVFDHVLAGQETTGVALTYLSYHLSQSLGLQQELRDELLSLRPSMTLGNDKLSMPDSRQLDSLPKLHAMILETVRRYAPAGGPEPRVAPSPSCQIGPYEIPGGTRISASAYNLHRDENIYPEPERWDYTRWLSNQKDVVRQFWGFSSGGRMCLGSNFAMHDMKLIIAAIYSNYTSHVVDDRGIEQTDMYTGHPKSNALYLRFERI

SEQ ID NO: 30191 - DNA, 4761 bp, Muscodor strobelii; identical to SEQ ID NO: 30188
  misc_feature: SGI EST ID NO. CUFF.71482.1
  misc_feature: Variant of the nucleotide sequence at SEQ ID NO 30189

SEQ ID NO: 30192 - DNA, 1878 bp, Muscodor strobelii
  misc_feature: SGI cDNA ID NO. 570380
  misc_feature: Encodes the peptide sequence at SEQ ID NO 30193
atggcttctccagatacactcgacatggaggccttacggatatcagaatcaccgagacttgacacgattccaaccgacatactctttataatctttggctacctagatacggcgcgaagtattgcacagcttgctgccacgtgtaaaggaatgagtatactggtgtctgcagatgcatggcgtatatttgttcttcgctattttagcggcctatcgcttccagggacttcatctgcggaggactggaaagaggccgcgcgtgtgttgacatcacagtcccaagattgggatagacgggctctcatttttcattcactcgccccgccggaaatgcgtcgagctaattcacgacgaacgcctaattttaccacccaatctatacctgcgaatgtcattgtcgatgcctacttgcgcaaagaaggaaatctagacgaagagatcgtcgtctggggtgccggcgaggaccttttagctaggactagacaaacacagaagacggcggttattgctgaaaattggcacagctacaaaggcgactatcgctctggaaaggatgatactacggcaatatcgatttggagaggcggttcctcccaagacgggaccgaatccgccgtcgcggtaggccgtgccaacggcgagctacgcttgatgtcaactaaggatacgagttttgggcagacgctgatgcaatttggtcctgcaccatcacagtcacttttccagacggagattcagagtgtcgacttaaaccacgaagatggggtgctcgcatctgccaccagagatagcctttttctttactctctactgaacaacaaccaggtgcatgaagacgatgcaacggactcgcatcatatcactcctctccacagcatctcactcaaggattcagcagagtctacgccatttgagttcattcgatgtgtaaaggcgataaaaaaggacacatttgctgtgtcgatgaataggagctttgacccgattcaaattttgaatctcactccctccgggctcctagtgaccaaagccgccaaaatgacactccattatcccggtatcgaatctggccttcgcacagtgagggcaatgctgcctatagatgcgagttcggttgctagcggaggtggcaatgtgatgctcagttcatgggacgatggaactatacgacttcaggattggaggacaccgtcgcccattgatcggatgtatcaagacaatttcgaactcgctaccccgatcaatgcgttgatctcttatggccttgagagatttgttgctggcagtgcatattcgcatatgctgaaagtctttgattttcgctggaacaagggctactatcacacggattcacttccttgcagtaaccggcagccctatccgactccgaaaccaccgaccgttgttgacgaacccgagtatgctgacgatcgaacgagatgtaatcacgtactcggtcgattttgccggtggcatgctctctcacgtcatgacttctttcgcccaaactgcaatatttacctccgttttcgcaactatgccagctcgccaatctactctctagctaagccttcagatgtgtcgcccacgatttacgcaggagtatcagggtttttggtagaagcgaacctgaagagcggtatcagcaatactcatacctctaataaaggttctccatacgtacgtcaaaaaggcaaggttgcaattctcgaaacaggcgacggcatggttattcacgatatcagtaaatgtaagcgtgtaccagaaatccgccgacagtcgttcggcgagaccgagcatagcgatacaatggcaaggaagcgtcatagattagacgaagctctacagaatccgcatgagtggctggactacctatag

SEQ ID NO: 30193 - protein, 625 aa, Muscodor strobelii
  misc_feature: SGI Peptide ID NO. 570380
  misc_feature (17)..(621): NCBI GI: 116202105 Blast Desc: CHGG_08937 [Chaetomium globosum CBS 148.51] gi|88177455|gb|EAQ84923.1| CHGG_08937 [Chaetomium globosum CBS 148.51]
  misc_feature (20)..(621): NCBI GI: 46128117 Blast Desc: FG08436.1 [Gibberella zeae PH-1]
  misc_feature (23)..(622): NCBI GI: 171681888 Blast Desc: protein product [Podospora anserina] gi|170940903|emb|CAP66553.1| protein product [Podospora anserina]
  misc_feature (1)..(625): NCBI GI: 39945248 Blast Desc: MGG_04606 [Magnaporthe grisea 70-15] gi|145021454|gb|EDK05583.1| MGG_04606 [Magnaporthe grisea 70-15]
  misc_feature (16)..(616): NCBI GI: 256733563 Blast Desc: NECHADRAFT_77806 [Nectria haematococca mpVI 77-13-4]
  misc_feature (82)..(590): NCBI GI: 85097273 Blast Desc: NCU04785 [Neurospora crassa OR74A] gi|28921902|gb|EAA31175.1| [Neurospora crassa OR74A] gi|39979196|emb|CAE85567.1| [Neurospora crassa]
  misc_feature (82)..(590): NCBI GI: 25465818 Blast Desc: NCU04785 [Neurospora crassa OR74A] gi|28921902|gb|EAA31175.1| [Neurospora crassa OR74A] gi|39979196|emb|CAE85567.1| [Neurospora crassa]
  misc_feature (23)..(546): NCBI GI: 115390899 Blast Desc: conserved [Aspergillus terreus NIH2624] gi|114193878|gb|EAU35578.1| conserved [Aspergillus terreus NIH2624]
  misc_feature (20)..(546): NCBI GI: 255940872 Blast Desc: Pc16g08860 [Penicillium chrysogenum Wisconsin 54-1255] gi|211585828|emb|CAP93556.1| Pc16g08860 [Penicillium chrysogenum Wisconsin 54-1255]
  misc_feature (20)..(552): NCBI GI: 189191004 Blast Desc: [Pyrenophora tritici-repentis Pt-1C-BFP] gi|187973447|gb|EDU40946.1| [Pyrenophora tritici-repentis Pt-1C-BFP]
MASPDTLDMEALRISESPRLDTIPTDILFIIFGYLDTARSIAQLAATCKGMSILVSADAWRIFVLRYFSGLSLPGTSSAEDWKEAARVLTSQSQDWDRRALIFHSLAPPEMRRANSRRTPNFTTQSIPANVIVDAYLRKEGNLDEEIVVWGAGEDLLARTRQTQKTAVIAENWHSYKGDYRSGKDDTTAISIWRGGSSQDGTESAVAVGRANGELRLMSTKDTSFGQTLMQFGPAPSQSLFQTEIQSVDLNHEDGVLASATRDSLFLYSLLNNNQVHEDDATDSHHITPLHSISLKDSAESTPFEFIRCVKAIKKDTFAVSMNRSFDPIQILNLTPSGLLVTKAAKMTLHYPGIESGLRTVRAMLPIDASSVASGGGNVMLSSWDDGTIRLQDWRTPSPIDRMYQDNFELATPINALISYGLERFVAGSAYSHMLKVFDFRWNKGYYHTDSLPCSNRQPYPTPKPPTVVDEPEYADDRTRCNHVLGRFCRWHALSRHDFFRPNCNIYLRFRNYASSPIYSLAKPSDVSPTIYAGVSGFLVEANLKSGISNTHTSNKGSPYVRQKGKVAILETGDGMVIHDISKCKRVPEIRRQSFGETEHSDTMARKRHRLDEALQNPHEWLDYL

SEQ ID NO: 30194 - DNA, 2104 bp, Muscodor strobelii
  misc_feature: SGI EST ID NO. CUFF.71409.1
  misc_feature: Variant of the nucleotide sequence at SEQ ID NO 30192
caattattgcactatctatctctcataccgacttctatgagaatatcaaaccactcttgagaatactcacaaccttagatcacagtattcttgtctaccttagactcatatgtcgccacaagtacaatggcttctccagatacactcgacatggaggccttacggatatcagaatcaccgagacttgacacgattccaaccgacatactctttataatctttggctacctagatacggcgcgaagtattgcacagcttgctgccacgtgtaaaggaatgagtatactggtgtctgcagatgcatggcgtatatttgttcttcgctattttagcggcctatcgcttccagggacttcatctgcggaggactggaaagaggccgcgcgtgtgttgacatcacagtcccaagattgggatagacgggctctcatttttcattcactcgccccgccggaaatgcgtcgagctaattcacgacgaacgcctaattttaccacccaatctatacctgcgaatgtcattgtcgatgcctacttgcgcaaagaaggaaatctagacgaagagatcgtcgtctggggtgccggcgaggaccttttagctaggactagacaaacacagaagacggcggttattgctgaaaattggcacagctacaaaggcgactatcgctctggaaaggatgatactacggcaatatcgatttggagaggcggttcctcccaagacgggaccgaatccgccgtcgcggtaggccgtgccaacggcgagctacgcttgatgtcaactaaggatacgagttttgggcagacgctgatgcaatttggtcctgcaccatcacagtcacttttccagacggagattcagagtgtcgacttaaaccacgaagatggggtgctcgcatctgccaccagagatagcctttttctttactctctactgaacaacaaccaggtgcatgaagacgatgcaacggactcgcatcatatcactcctctccacagcatctcactcaaggattcagcagagtctacgccatttgagttcattcgatgtgtaaaggcgataaaaaaggacacatttgctgtgtcgatgaataggagctttgacccgattcaaattttgaatctcactccctccgggctcctagtgaccaaagccgccaaaatgacactccattatcccggtatcgaatctggccttcgcacagtgagggcaatgctgcctatagatgcgagttcggttgctagcggaggtggcaatgtgatgctcagttcatgggacgatggaactatacgacttcaggattggaggacaccgtcgcccattgatcggatgtatcaagacaatttcgaactcgctaccccgatcaatgcgttgatctcttatggccttgagagatttgttgctggcagtgcatattcgcatatgctgaaagtctttgattttcgctggaacaagggctactatcacacggattcacttccttgcagtaaccggcagccctatccgactccgaaaccaccgaccgttgttgacgaacccgagtatgctgacgatcgaacgagatgtaatcacgtactcggtcgattttgccggtggcatgctctctcacgtcatgacttctttcgcccaaactgcaatatttacctccgttttcgcaactatgccagctcgccaatctactctctagctaagccttcagatgtgtcgcccacgatttacgcaggagtatcagggtttttggtagaagcgaacctgaagagcggtatcagcaatactcatacctctaataaaggttctccatacgtacgtcaaaaaggcaaggttgcaattctcgaaacaggcgacggcatggttattcacgatatcagtaaatgtaagcgtgtaccagaaatccgccgacagtcgttcggcgagaccgagcatagcgatacaatggcaaggaagcgtcatagattagacgaagctctacagaatccgcatgagtggctggactacctatagatattggtggagtactaaaatcgttgttcaaggcggacgcagtaattaatagactcattataatagtaaattgatcataagatacatttctgaatagcaa

SEQ ID NO: 30195 - DNA, 1548 bp, Muscodor strobelii
  misc_feature: SGI cDNA ID NO. 570381
  misc_feature: Encodes the peptide sequence at SEQ ID NO 30196
atgcgtcgagctaattcacgacgaacgcctaattttaccacccaatctatacctgcgaatgtcattgtcgatgcctacttgcgcaaagaaggaaatctagacgaagagatcgtcgtctggggtgccggcgaggaccttttagctaggactagacaaacacagaagacggcggttattgctgaaaattggcacagctacaaaggcgactatcgctctggaaaggatgatactacggcaatatcgatttggagaggcggttcctcccaagacgggaccgaatccgccgtcgcggtaggccgtgccaacggcgagctacgcttgatgtcaactaaggatacgagttttgggcagacgctgatgcaatttggtcctgcaccatcacagtcacttttccagacggagattcagagtgtcgacttaaaccacgaagatggggtgctcgcatctgccaccagagatagcctttttctttactctctactgaacaacaaccaggtgcatgaagacgatgcaacggactcgcatcatatcactcctctccacagcatctcactcaaggattcagcagagtctacgccatttgagttcattcgatgtgtaaaggcgataaaaaaggacacatttgctgtgtcgatgaataggagctttgacccgattcaaattttgaatctcactccctccgggctcctagtgaccaaagccgccaaaatgacactccattatcccggtatcgaatctggccttcgcacagtgagggcaatgctgcctatagatgcgagttcggttgctagcggaggtggcaatgtgatgctcagttcatgggacgatggaactatacgacttcaggattggaggacaccgtcgcccattgatcggatgtatcaagacaatttcgaactcgctaccccgatcaatgcgttgatctcttatggccttgagagatttgttgctggcagtgcatattcgcatatgctgaaagtctttgattttcgctggaacaagggctactatcacacggattcacttccttgcagtaaccggcagccctatccgactccgaaaccaccgaccgttgttgacgaacccgagtatgctgacgatcgaacgagatgtaatcacgtactcggtcgattttgccggtggcatgctctctcacgtcatgacttctttcgcccaaactgcaatatttacctccgttttcgcaactatgccagctcgccaatctactctctagctaagccttcagatgtgtcgcccacgatttacgcaggagtatcagggtttttggtagaagcgaacctgaagagcggtatcagcaatactcatacctctaataaaggttctccatacgtacgtcaaaaaggcaaggttgcaattctcgaaacaggcgacggcatggttattcacgatatcagtaaatgtaagcgtgtaccagaaatccgccgacagtcgttcggcgagaccgagcatagcgatacaatggcaaggaagcgtcatagattagacgaagctctacagaatccgcatgagtggctggactacctatag

SEQ ID NO: 30196 - protein, 515 aa, Muscodor strobelii
  misc_feature: SGI Peptide ID NO. 570381
  misc_feature (22)..(510): NCBI GI: 116202105 Blast Desc: CHGG_08937 [Chaetomium globosum CBS 148.51] gi|88177455|gb|EAQ84923.1| CHGG_08937 [Chaetomium globosum CBS 148.51]
  misc_feature (14)..(511): NCBI GI: 46128117 Blast Desc: FG08436.1 [Gibberella zeae PH-1]
  misc_feature (14)..(505): NCBI GI: 256733563 Blast Desc: NECHADRAFT_77806 [Nectria haematococca mpVI 77-13-4]
  misc_feature (22)..(480): NCBI GI: 25465818 Blast Desc: NECHADRAFT_77806 [Nectria haematococca mpVI 77-13-4]
  misc_feature (22)..(480): NCBI GI: 85097273 Blast Desc: NCU04785 [Neurospora crassa OR74A] gi|28921902|gb|EAA31175.1| [Neurospora crassa OR74A] gi|39979196|emb|CAE85567.1| [Neurospora crassa]
  misc_feature (36)..(515): NCBI GI: 39945248 Blast Desc: MGG_04606 [Magnaporthe grisea 70-15] gi|145021454|gb|EDK05583.1| MGG_04606 [Magnaporthe grisea 70-15]
  misc_feature (22)..(512): NCBI GI: 171681888 Blast Desc: protein product [Podospora anserina] gi|170940903|emb|CAP66553.1| protein product [Podospora anserina]
  misc_feature (23)..(442): NCBI GI: 189191004 Blast Desc: [Pyrenophora tritici-repentis Pt-1C-BFP] gi|187973447|gb|EDU40946.1| [Pyrenophora tritici-repentis Pt-1C-BFP]
  misc_feature (35)..(436): NCBI GI: 115390899 Blast Desc: conserved [Aspergillus terreus NIH2624] gi|114193878|gb|EAU35578.1| conserved [Aspergillus terreus NIH2624]
  misc_feature (36)..(436): NCBI GI: 169771121 Blast Desc: [Aspergillus oryzae RIB40] gi|83767889|dbj|BAE58028.1| protein product [Aspergillus oryzae]
MRRANSRRTPNFTTQSIPANVIVDAYLRKEGNLDEEIVVWGAGEDLLARTRQTQKTAVIAENWHSYKGDYRSGKDDTTAISIWRGGSSQDGTESAVAVGRANGELRLMSTKDTSFGQTLMQFGPAPSQSLFQTEIQSVDLNHEDGVLASATRDSLFLYSLLNNNQVHEDDATDSHHITPLHSISLKDSAESTPFEFIRCVKAIKKDTFAVSMNRSFDPIQILNLTPSGLLVTKAAKMTLHYPGIESGLRTVRAMLPIDASSVASGGGNVMLSSWDDGTIRLQDWRTPSPIDRMYQDNFELATPINALISYGLERFVAGSAYSHMLKVFDFRWNKGYYHTDSLPCSNRQPYPTPKPPTVVDEPEYADDRTRCNHVLGRFCRWHALSRHDFFRPNCNIYLRFRNYASSPIYSLAKPSDVSPTIYAGVSGFLVEANLKSGISNTHTSNKGSPYVRQKGKVAILETGDGMVIHDISKCKRVPEIRRQSFGETEHSDTMARKRHRLDEALQNPHEWLDYL

SEQ ID NO: 30197 - DNA, 2104 bp, Muscodor strobelii; identical to SEQ ID NO: 30194
  misc_feature: SGI EST ID NO. CUFF.71409.1
  misc_feature: Variant of the nucleotide sequence at SEQ ID NO 30195

SEQ ID NO: 30198 - DNA, 516 bp, Muscodor strobelii
  misc_feature: SGI cDNA ID NO. 570382
  misc_feature: Encodes the peptide sequence at SEQ ID NO 30199
atgaagatcttcgctcttcttgctctgcccgcgactctggcaatgccagccttccaaaccaaacagcctaatgatgccaacatcatttatcccgacttccacaaagaaccctcgtggcccggaaacttttgcagcaataaaacaagcatccaccctagcaacaatgggcatacttctgcgtacaccgattgtctcgatatcaaggcgtgggcagaaagtaatatcggcgaatgggaactcaagtcaactgtggctcccaatgctaacgacacctggcaaatgctttcgtcgatgggcagctgcgctctcctggtcaggaacactgagccggcacttgtcagcaacgttgacatctttggtcttttggacaagatttgggacgaggttggtcagaatgatggccctgttgaggtaacgggcacattaccgctatgtagagtctaccaaactcaaaccgaccaggctactgatgttcaattctggcttcgggatgcagatattgtgggcaactggtag

SEQ ID NO: 30199 - protein, 171 aa, Muscodor strobelii
  misc_feature: SGI Peptide ID NO. 570382
MKIFALLALPATLAMPAFQTKQPNDANIIYPDFHKEPSWPGNFCSNKTSIHPSNNGHTSAYTDCLDIKAWAESNIGEWELKSTVAPNANDTWQMLSSMGSCALLVRNTEPALVSNVDIFGLLDKIWDEVGQNDGPVEVTGTLPLCRVYQTQTDQATDVQFWLRDADIVGNW

SEQ ID NO: 30200 - DNA, 1296 bp, Muscodor strobelii
  misc_feature: SGI cDNA ID NO. 570383
  misc_feature: Encodes the peptide sequence at SEQ ID NO 30201
atgccttacaacgacataaagcgggatggtttcatctgtcggtttggccgatttctcgccttgccgggtggcctagaacgagaatctgtttcctcactgaaggaaatgtttcttccaaaactcacgccggccgggagcaagcgcctccgtgataatggcgacttcgtggaatgccagctcaaacattacggcgtagcctacgaagaaactgaatacactgtatatggtacaagaaatctccagaaggctctcaaagcaggacagtgtgacgaagtccccatgcatctcctcgagctattcgatgagatgcatgacgagtggctggcgcaactgacgcccgaggaaatatccgatcatccagagttcgtcatggacaaatacttcttagtcaacgggaagccaaactcaaccaagacttcagccgtggtaggcatcccattcaatcaacacagttcgtaccgtgcgggacaattgagagacgctgcgaacgagatttatggtttgcatcaagccactggccatggacctttgacgcaggcggttttcttaggctggaacgaaaaagcagtgaacgaggcagcaagcagtcacgctgacaaggaagaggaggcagagagtgctgcaaatgaagagcgcgacagggaacgcgcggagaaacacgcagattacatgaagacgatgaaccgaaagaagggacccaaagaatactcacctgttggaagctacatgatcaattgcgaagaaatcaaaacccaatggtctaacctagccggcgacatgaacatgcagattttcgagacagacaagccggaagtctttgaggcatcctttgagttcggtgttgttgagggagcgatgatcttgagtgccgacatgagatccctggaagattacatggcaaaattagaggaaagagacgacagcgaagaagtagagtacaatgaagatgaggaagacgaagagaatgacactagtatcggcggcaagagaaaaataggagcttcgagtgctcaatctcaagggcgcggacgtccagcaaagaagcctaaaaccactggtttgaagttccacttgagaactaagggccgtgagactggcgaaggagagatttggtatgtccctgaagagggaagtatcgagtttgagaacgacaagatggccaagttctcaggtggaattaatctgccttgcgttggtgtggcagtcccatttacggggcgcaagacaacagagcacgtccaaggaagcagctcatgggctgatttctcctttgatgattatggacgatggtactaa

SEQ ID NO: 30201 - protein, 431 aa, Muscodor strobelii
  misc_feature: SGI Peptide ID NO. 570383
  misc_feature (3)..(431): NCBI GI: 119482353 Blast Desc: NFIA_092690 [Neosartorya fischeri NRRL 181] gi|119409359|gb|EAW19308.1| NFIA_092690 [Neosartorya fischeri NRRL 181]
  misc_feature (6)..(391): NCBI GI: 256721149 Blast Desc: [Nectria haematococca mpVI 77-13-4]
  misc_feature (239)..(422): NCBI GI: 119183491 Blast Desc: [Coccidioides immitis RS]
  misc_feature (239)..(422): NCBI GI: 240109626 Blast Desc: AT hook motif family protein [Coccidioides posadasii C735 delta SOWgp]
  misc_feature (10)..(289): NCBI GI: 256721282 Blast Desc: [Nectria haematococca mpVI 77-13-4]
  misc_feature (203)..(423): NCBI GI: 238839601 Blast Desc: conserved [Microsporum canis CBS 113480]
  misc_feature (239)..(423): NCBI GI: 240277773 Blast Desc: conserved [Ajellomyces capsulatus H143]
  misc_feature (239)..(423): NCBI GI: 261202222 Blast Desc: conserved [Ajellomyces dermatitidis SLH14081] gi|239590422|gb|EEQ73003.1| conserved [Ajellomyces dermatitidis SLH14081]
  misc_feature (239)..(423): NCBI GI: 239612133 Blast Desc: conserved [Ajellomyces dermatitidis ER-3]
  misc_feature (124)..(363): NCBI GI: 119500904 Blast Desc: NFIA_108050 [Neosartorya fischeri NRRL 181] gi|119415374|gb|EAW25312.1| NFIA_108050 [Neosartorya fischeri NRRL 181]
MPYNDIKRDGFICRFGRFLALPGGLERESVSSLKEMFLPKLTPAGSKRLRDNGDFVECQLKHYGVAYEETEYTVYGTRNLQKALKAGQCDEVPMHLLELFDEMHDEWLAQLTPEEISDHPEFVMDKYFLVNGKPNSTKTSAVVGIPFNQHSSYRAGQLRDAANEIYGLHQATGHGPLTQAVFLGWNEKAVNEAASSHADKEEEAESAANEERDRERAEKHADYMKTMNRKKGPKEYSPVGSYMINCEEIKTQWSNLAGDMNMQIFETDKPEVFEASFEFGVVEGAMILSADMRSLEDYMAKLEERDDSEEVEYNEDEEDEENDTSIGGKRKIGASSAQSQGRGRPAKKPKTTGLKFHLRTKGRETGEGEIWYVPEEGSIEFENDKMAKFSGGINLPCVGVAVPFTGRKTTEHVQGSSSWADFSFDDYGRWY

SEQ ID NO: 30202 - DNA, 1752 bp, Muscodor strobelii
  misc_feature: SGI EST ID NO. CUFF.71403.0
  misc_feature: Variant of the nucleotide sequence at SEQ ID NO 30200
cccccagcgcgtcaacatccatgcgccgtcgaacctggttcatggcacgtcataggaaacgcgctctgtcggtacatcgtactcgctcgtttacaattacaacaaatcgagaccgagattcgctcaatgctcaggcatattttccgctcactctcacagtcaacatgccttacaacgacataaagcgggatggtttcatctgtcggtttggccgatttctcgccttgccgggtggcctagaacgagaatctgtttcctcactgaaggaaatgtttcttccaaaactcacgccggccgggagcaagcgcctccgtgataatggcgacttcgtggaatgccagctcaaacattacggcgtagcctacgaagaaactgaatacactgtatatggtacaagaaatctccagaaggctctcaaagcaggacagtgtgacgaagtccccatgcatctcctcgagctattcgatgagatgcatgacgagtggctggcgcaactgacgcccgaggaaatatccgatcatccagagttcgtcatggacaaatacttcttagtcaacgggaagccaaactcaaccaagacttcagccgtggtaggcatcccattcaatcaacacagttcgtaccgtgcgggacaattgagagacgctgcgaacgagatttatggtttgcatcaagccactggccatggacctttgacgcaggcggttttcttaggctggaacgaaaaagcagtgaacgaggcagcaagcagtcacgctgacaaggaagaggaggcagagagtgctgcaaatgaagagcgcgacagggaacgcgcggagaaacacgcagattacatgaagacgatgaaccgaaagaagggacccaaagaatactcacctgttggaagctacatgatcaattgcgaagaaatcaaaacccaatggtctaacctagccggcgacatgaacatgcagattttcgagacagacaagccggaagtctttgaggcatcctttgagttcggtgttgttgagggagcgatgatcttgagtgccgacatgagatccctggaagattacatggcaaaattagaggaaagagacgacagcgaagaagtagagtacaatgaagatgaggaagacgaagagaatgacactagtatcggcggcaagagaaaaataggagcttcgagtgctcaatctcaagggcgcggacgtccagcaaagaagcctaaaaccactggtttgaagttccacttgagaactaagggccgtgagactggcgaaggagagatttggtatgtccctgaagagggaagtatcgagtttgagaacgacaagatggccaagttctcaggtggaattaatctgccttgcgttggtgtggcagtcccatttacggggcgcaagacaacagagcacgtccaaggaagcagctcatgggctgatttctcctttgatgattatggacgatggtactaaatgataacaagatcctccataccaatcgtattgagaaggtgtaattttcgcatgagatgatcgactgagatgtggtagcacatggttcagcctcaatgttctcgtatcacgcacaacaaagctggggcggaaggcaatatggagatacaggtgcttcttgtacattaagtggctaaatttcagaaaacgacgcggtttgagcagacggaggtgtataaatacctagtttgagtcaactcttttcgcgacgttgcgcagaatgaacacaaatcactacgcctccatgtcatcc

SEQ ID NO: 30203 - DNA, 4461 bp, Muscodor strobelii
  misc_feature: SGI cDNA ID NO. 570384
  misc_feature: Reduced expression when VOC is produced
  misc_feature: Encodes the peptide sequence at SEQ ID NO 30204
atgactgagaaggacatcgaaaaacagccgcaggacggccaggaacctgtcgaagcaccaactgctctagctcctgaaactacgaagagcacacgaccttcatcggcgactacgtccctcccaacgtcaacagacaccgaagagcagcgtgaacaggcacgacagaacaaccctaatggattctctaatatcaattccggcgtctcagttgagcgagctgtgtctgacttcgctgagttgcagcgagaaatctctggcttatctcgagctagccgtgtaagcagtcgccgtgaaggtgatcctgagaaaggcaataaggccgatgtcgacggctcagagacctctaccgaagacttcgacttggaacaggttcttcgaggtggtctggacgccgaacagcaggcgggcattcgacccaagcatatcggcgtttattgggatggacttactgtgaaaggaatgggtggtatgaccaactatgtgcaaacatttcctgacgctttcgtgagcttcgtcgactactggacccctttgaagaatttgatgggctggggggcgaagggtgtggaggctactttgcttgacaacttcaggggcgtcatcaaccctggcgagatggtgttagtccttggccgacccggctctggttgcacaaccttcctcaagtccattgcgaatcagcgatggggctacactggagtgacaggtgaggtcatgtatggacctttcacccacgacgaattcgaggattaccgaggagaagccgtttataaccaagaagacgacattcaccatgctaccctaaccgttgaacagactcttggctttgctatcgacactaaagtgcctaacaagctacctgcaggtactaacaagggcaaattcaagagcgacgtcatatccaccctgctgaagatgtttaacattgagcatactaggaaaactgtcgtgggtgatgctctggttcgtggtgtctcaggtggtgagcgaaagcgtgtctctatcgcggaaatgatgatcacgaacgcgtgtgtgttgtcgtgggataacagcacccgtggcttagacgccagtactgccttggacttcataaaatcgctccgaatccagacaaacctatacaaaacctcgactttcgtatctctgtatcaagcctcggagaacatctacaagcaatttgacaaagtcctggttattgattcgggcaaacaagtatattttgggcctgctgcggaagccagaagctatttcgaaggacttggatttctaccccgaccgcgccagactactcccgattacgtgaccggctgtacggacgagttcgagagagactactccgatggatactctcctaagaacgccccccacagccccgaaactcttgccgaagctttcgcacaatctgaatacagcaagcggctcaataccgagatgtcggactacaaagctcgtctcgaacaagaaactggtaaacacgaagatttccgcacggctgtccttgagagcaagcggagtggcgccaagcactctgtttacagcgttggatttcacctccaggtctgggctttgatgaagcgacagtttgttctaaagctccaagacaagcttggtctgttcctctcatggctccgtgccattatcatcgccgtcgtgctcggtacactctatctcaacctcggaaacacgtcagccagcgctttcagtaaaggtggtctcttatttatctcgctcttgttcaatgctttccaagctttctccgaattaggatcaacaatgaccggacggcccattgtcaacaaacacaaggcatatgcgttccatagaccttcagctctgtggatagggcagatttttgttgacacggcattttctgcggtgcagattctggtcttctctatcatcgtgtacttcttgacaggcttggcaagaactgcggggcatttcttcacgttctacttgctgatccttgttggaaacattgcgatgactttgttcttccgtatcatcggctgtctcagtcctgatttcgattacgccgtcaaattcgctgtcgtgacgatcacattgtttattgtgacatctggctacttgattcaataccaatcacaacaacattggcttcgatggatattctggattaacgcactcggcctgtcgtttgcgagcttgatggcgaatgagtttggcggagcagaaattacctgctctgactcgtatctgacaccaagcggaccagggtatagtgatatcaatcatcaagtgtgtaccttggctggcgctaaggctggaagtaacattgtgagcggttccgattacgttaccttggggtatacatatgcacccaaggatctttggcgcaatttcggtatcattattgccatcattgtcttcttcttaatcatgaatgttgttctgggagaatttgtcaagttcggaatgggtggaaaccaagccaaagtttttgctcggccgaacaaggagagaacggagttaaacgaagtactcgataacaagcgtttgcaacgacaaaaatctagggccgacgactcggatcgggcactcaaaatcgagtcaacgagcgttttgacatgggaagaactgaactacgatgttcctgttcccggaggtactcgacgactcctgaacaacatttttggttactgcaagcctggcgaattgacggcacttatgggtgcctccggagctggcaagaccacgcttttggacgtcttagcttcgagaaagaacattggtgttattgctggcgatgtactagttgatggcttgaagccaggcaaagaattccagcgctcaacatcatacgcagaacaacttgacacacatgaccctactcaaacggttcgcgaagctcttcgattttcggccgacttacgacagtccttcgacactcctcggtctgaaaagtactcttatgttgaggagattatttccttgttggaaatggaacacatcgctgattgtattattggtacccccgaagctggtcttactgtcgaacaacgcaagcgtgtcaccattggtgtggaactagccgccaaaccccagctcttgctattcctcgatgagccaacttctggtctcgacagccagagtgccttcaacattgtgcgattcttgaagaagctcgccgctgctggtcaggccattctctgtacgatccaccagccaaacgctgctcttttcgagaacttcgaccggcttcttctcctacagcgtggtggtcgctgcgtctacttcggcgatatcggcaaggacgcccatatcctccgtgaatatctctcccgccacggagcgactgctggaccctctgacaacattgccgagtacatgctggaggccattggcgccggtagtgctgcacgtattggaaaccgtgactgggccgacatctgggatgaaagctctgaacttgctaacgtcaaggaccggatctctcagttcaaagagtctggcaaagcggctgctgcgcaaatcgaccccagcttgcagcgagaattcgcgtctcctcttcttcaccagatcaaggtggttgtcaagcgtacaaacgtttcatactggcgatctcctaactacctgttcacccgcttgttcaatcacattgctgttgcactgattactggtctcacatacctacaactcaacgactctaaatcatctctgcagtacaaagtcttcgtcatgttccaaatcaccgttctgcccgcgttacttttgcctcaagtcgagctcatgtttgtcatcaaacgtgccatcttcttccgtgaacagctcagcaaaatgtacagcaccttcacatttaccctcagtatggtcattgctgaacttccctactctgtgctctgctcggtggtgttcttcttacccctttactttatccctggattccagtccgaacctacgcgtgctggataccagtatttcatggtcctcatcaccgagctcttcgccatatctcttggacaggtcctcgcggctatttctccttcggccttcgtatcaagccagtacgacccgttcatcgtcattacctttgccctgttctgtggtgtcacgattccttatccctctatgcctcatttctggaaagtctggctttacgagcttgatcccttcacccgtctcatcagtggcacgatcaccacagcgttgaacggccttgtcgtcaagtgccgtgaatcggaactcaacactttcactgctcctgatggacaaaattgcggcgattacatgcagaatttcttcgatgctggcgggcctggttatctcgttaataacaatactatgaactgcgagtattgttcctacacgaatggcaatcagttctacagtgtgttcggttatgactacaaccttcgatggagggatctcggcatctttattgcctttgtcggtagcaacaccatcatcctcttcatggctgtgagtatttccaagacataa

SEQ ID NO: 30204 - protein, 1486 aa, Muscodor strobelii
  misc_feature: SGI Peptide ID NO. 570384
  misc_feature (518)..(728): Pfam Id: PF01061 Pfam Desc: ABC-2 type transporter
  misc_feature (1179)..(1390): Pfam Id: PF01061 Pfam Desc: ABC-2 type transporter
  misc_feature (891)..(1080): Pfam Id: PF00005 Pfam Desc: ABC transporter
  misc_feature (204)..(402): Pfam Id: PF00005 Pfam Desc: ABC transporter
  misc_feature (739)..(880): Pfam Id: PF06422 Pfam Desc: CDR ABC transporter
  misc_feature (33)..(1480): NCBI GI: 145611360 Blast Desc: MGG_00447 [Magnaporthe grisea 70-15] gi|29467450|dbj|BAC67162.1| ATP-binding cassette transporter [Magnaporthe grisea] gi|145018661|gb|EDK02940.1| MGG_00447 grisea
  misc_feature (13)..(1480): NCBI GI: 85089703 Blast Desc: NCU10009 [Neurospora crassa OR74A] gi|28919388|gb|EAA28834.1| NCU10009 [Neurospora crassa OR74A]
  misc_feature (51)..(1482): NCBI GI: 171681642 Blast Desc: protein product [Podospora anserina] gi|170940780|emb|CAP66429.1| protein product [Podospora anserina]
  misc_feature (43)..(1480): NCBI GI: 46127863 Blast Desc: FG08309.1 [Gibberella zeae PH-1]
  misc_feature (34)..(1480): NCBI GI: 7416055 Blast Desc: BMR1 [Botryotinia fuckeliana]
  misc_feature (34)..(1480): NCBI GI: 154324052 Blast Desc: BC1G_00425 [Botryotinia fuckeliana B05.10] gi|150842654|gb|EDN17847.1| BC1G_00425 [Botryotinia fuckeliana B05.10]
  misc_feature (14)..(1480): NCBI GI: 189209776 Blast Desc: ABC transporter CDR4 [Pyrenophora tritici-repentis Pt-1C-BFP] gi|187977313|gb|EDU43939.1| ABC transporter CDR4 [Pyrenophora tritici-repentis Pt-1C-BFP]
  misc_feature (39)..(1479): NCBI GI: 242792972 Blast Desc: ABC transporter, [Talaromyces stipitatus ATCC 10500] gi|218718655|gb|EED18075.1| ABC transporter, [Talaromyces stipitatus ATCC 10500]
  misc_feature (25)..(1483): NCBI GI: 240109578 Blast Desc: multidrug resistance ABC transporter, [Coccidioides posadasii C735 delta SOWgp]
  misc_feature (15)..(1480): NCBI GI: 148887852 Blast Desc: ABC transporter [Leptosphaeria maculans] gi|148887854|gb|ABR15508.1| ABC transporter [Leptosphaeria maculans]
  misc_feature: Useful for introducing or modulating the production of volatile compounds
  misc_feature: Useful for fungicidal and/or biocontrol applications
MTEKDIEKQPQDGQEPVEAPTALAPETTKSTRPSSATTSLPTSTDTEEQREQARQNNPNGFSNINSGVSVERAVSDFAELQREISGLSRASRVSSRREGDPEKGNKADVDGSETSTEDFDLEQVLRGGLDAEQQAGIRPKHIGVYWDGLTVKGMGGMTNYVQTFPDAFVSFVDYWTPLKNLMGWGAKGVEATLLDNFRGVINPGEMVLVLGRPGSGCTTFLKSIANQRWGYTGVTGEVMYGPFTHDEFEDYRGEAVYNQEDDIHHATLTVEQTLGFAIDTKVPNKLPAGTNKGKFKSDVISTLLKMFNIEHTRKTVVGDALVRGVSGGERKRVSIAEMMITNACVLSWDNSTRGLDASTALDFIKSLRIQTNLYKTSTFVSLYQASENIYKQFDKVLVIDSGKQVYFGPAAEARSYFEGLGFLPRPRQTTPDYVTGCTDEFERDYSDGYSPKNAPHSPETLAEAFAQSEYSKRLNTEMSDYKARLEQETGKHEDFRTAVLESKRSGAKHSVYSVGFHLQVWALMKRQFVLKLQDKLGLFLSWLRAIIIAVVLGTLYLNLGNTSASAFSKGGLLFISLLFNAFQAFSELGSTMTGRPIVNKHKAYAFHRPSALWIGQIFVDTAFSAVQILVFSIIVYFLTGLARTAGHFFTFYLLILVGNIAMTLFFRIIGCLSPDFDYAVKFAVVTITLFIVTSGYLIQYQSQQHWLRWIFWINALGLSFASLMANEFGGAEITCSDSYLTPSGPGYSDINHQVCTLAGAKAGSNIVSGSDYVTLGYTYAPKDLWRNFGIIIAIIVFFLIMNVVLGEFVKFGMGGNQAKVFARPNKERTELNEVLDNKRLQRQKSRADDSDRALKIESTSVLTWEELNYDVPVPGGTRRLLNNIFGYCKPGELTALMGASGAGKTTLLDVLASRKNIGVIAGDVLVDGLKPGKEFQRSTSYAEQLDTHDPTQTVREALRFSADLRQSFDTPRSEKYSYVEEIISLLEMEHIADCIIGTPEAGLTVEQRKRVTIGVELAAKPQLLLFLDEPTSGLDSQSAFNIVRFLKKLAAAGQAILCTIHQPNAALFENFDRLLLLQRGGRCVYFGDIGKDAHILREYLSRHGATAGPSDNIAEYMLEAIGAGSAARIGNRDWADIWDESSELANVKDRISQFKESGKAAAAQIDPSLQREFASPLLHQIKVVVKRTNVSYWRSPNYLFTRLFNHIAVALITGLTYLQLNDSKSSLQYKVFVMFQITVLPALLLPQVELMFVIKRAIFFREQLSKMYSTFTFTLSMVIAELPYSVLCSVVFFLPLYFIPGFQSEPTRAGYQYFMVLITELFAISLGQVLAAISPSAFVSSQYDPFIVITFALFCGVTIPYPSMPHFWKVWLYELDPFTRLISGTITTALNGLVVKCRESELNTFTAPDGQNCGDYMQNFFDAGGPGYLVNNNTMNCEYCSYTNGNQFYSVFGYDYNLRWRDLGIFIAFVGSNTIILFMAVSISKT

SEQ ID NO: 30205 - DNA, 5947 bp, Muscodor strobelii
  misc_feature: SGI EST ID NO. CUFF.71449.1
  misc_feature: Variant of the nucleotide sequence at SEQ ID NO 30203
gcaaattccccgacgcgggctaatcgatcccaaatgcagtgttagcgtcgtagccctggaatgtttttctagcgtgtttgcaatggtccttggtgcccgagcaggctcggatccaggtgtccctttggctcgctttggtccatgacctatccgctgccgtgcgccgatcgctgcgataatgacatcttgattatcaatcctccaaaacgcctgccatattccaatctgacaaccccccaaaggtggccccatttggtgtcgaatccccggtccgacccatcacctagggcactaaagtctaaaatgcaactgtgcaaaggtccctgaaagaagaccaggaagtgaattagagataggatatgcaggtagaacatatctctgcatggacagacaaatacaagtagtcgcgaggcgcactgagatttactccaacagccagaatccagacttactgtcttgccagtcccgaatcgacaacaacaacgtttctaggtacctacttagacctacagtaacccaggtgctacatatcgtgaaggaccagggtgctatagtttgagagctttgtggggttcgcaaactccacttcgcggcgggcgaatcctcttcttccgccgaagtactcgactctgcccagtgtggaatatttctgtgttttcctggcgtgtctctcttgatatatctgtattgcagccttgtctggggacagctttattcctctttacctggtgtttcaactctcctgtacagttggccgacctctagcttgggaagtttgtgccgttgctttgcaataacacgctcttgtgttacccttggccgagtttagatacgcctcttattagttgacccagatagttcatagagtcgcccaagctcccaatctaaagccgacttatctgatatatcgcgtcacaccctctctttcctggaaccaaatatcactgacttcacaaatacgatattgtcggaaacacatacaattggtcgctcgattgagagtattcagctccgtgctgagagcgacctgagagatgactgagaaggacatcgaaaaacagccgcaggacggccaggaacctgtcgaagcaccaactgctctagctcctgaaactacgaagagcacacgaccttcatcggcgactacgtccctcccaacgtcaacagacaccgaagagcagcgtgaacaggcacgacagaacaaccctaatggattctctaatatcaattccggcgtctcagttgagcgagctgtgtctgacttcgctgagttgcagcgagaaatctctggcttatctcgagctagccgtgtaagcagtcgccgtgaaggtgatcctgagaaaggcaataaggccgatgtcgacggctcagagacctctaccgaagacttcgacttggaacaggttcttcgaggtggtctggacgccgaacagcaggcgggcattcgacccaagcatatcggcgtttattgggatggacttactgtgaaaggaatgggtggtatgaccaactatgtgcaaacatttcctgacgctttcgtgagcttcgtcgactactggacccctttgaagaatttgatgggctggggggcgaagggtgtggaggctactttgcttgacaacttcaggggcgtcatcaaccctggcgagatggtgttagtccttggccgacccggctctggttgcacaaccttcctcaagtccattgcgaatcagcgatggggctacactggagtgacaggtgaggtcatgtatggacctttcacccacgacgaattcgaggattaccgaggagaagccgtttataaccaagaagacgacattcaccatgctaccctaaccgttgaacagactcttggctttgctatcgacactaaagtgcctaacaagctacctgcaggtactaacaagggcaaattcaagagcgacgtcatatccaccctgctgaagatgtttaacattgagcatactaggaaaactgtcgtgggtgatgctctggttcgtggtgtctcaggtggtgagcgaaagcgtgtctctatcgcggaaatgatgatcacgaacgcgtgtgtgttgtcgtgggataacagcacccgtggcttagacgccagtactgccttggacttcataaaatcgctccgaatccagacaaacctatacaaaacctcgactttcgtatctctgtatcaagcctcggagaacatctacaagcaatttgacaaagtcctggttattgattcgggcaaacaagtatattttgggcctgctgcggaagccagaagctatttcgaaggacttggatttctaccccgaccgcgccagactactcccgattacgtgaccggctgtacggacgagttcgagagagactactccgatggatactctcctaagaacgccccccacagccccgaaactcttgccgaagctttcgcacaatctgaatacagcaagcggctcaataccgagatgtcggactacaaagctcgtctcgaacaagaaactggtaaacacgaagatttccgcacggctgtccttgagagcaagcggagtggcgccaagcactctgtttacagcgttggatttcacctccaggtctgggctttgatgaagcgacagtttgttctaaagctccaagacaagcttggtctgttcctctcatggctccgtgccattatcatcgccgtcgtgctcggtacactctatctcaacctcggaaacacgtcagccagcgctttcagtaaaggtggtctcttatttatctcgctcttgttcaatgctttccaagctttctccgaattaggatcaacaatgaccggacggcccattgtcaacaaacacaaggcatatgcgttccatagaccttcagctctgtggatagggcagatttttgttgacacggcattttctgcggtgcagattctggtcttctctatcatcgtgtacttcttgacaggcttggcaagaactgcggggcatttcttcacgttctacttgctgatccttgttggaaacattgcgatgactttgttcttccgtatcatcggctgtctcagtcctgatttcgattacgccgtcaaattcgctgtcgtgacgatcacattgtttattgtgacatctggctacttgattcaataccaatcacaacaacattggcttcgatggatattctggattaacgcactcggcctgtcgtttgcgagcttgatggcgaatgagtttggcggagcagaaattacctgctctgactcgtatctgacaccaagcggaccagggtatagtgatatcaatcatcaagtgtgtaccttggctggcgctaaggctggaagtaacattgtgagcggttccgattacgttaccttggggtatacatatgcacccaaggatctttggcgcaatttcggtatcattattgccatcattgtcttcttcttaatcatgaatgttgttctgggagaatttgtcaagttcggaatgggtggaaaccaagccaaagtttttgctcggccgaacaaggagagaacggagttaaacgaagtactcgataacaagcgtttgcaacgacaaaaatctagggccgacgactcggatcgggcactcaaaatcgagtcaacgagcgttttgacatgggaagaactgaactacgatgttcctgttcccggaggtactcgacgactcctgaacaacatttttggttactgcaagcctggcgaattgacggcacttatgggtgcctccggagctggcaagaccacgcttttggacgtcttagcttcgagaaagaacattggtgttattgctggcgatgtactagttgatggcttgaagccaggcaaagaattccagcgctcaacatcatacgcagaacaacttgacacacatgaccctactcaaacggttcgcgaagctcttcgattttcggccgacttacgacagtccttcgacactcctcggtctgaaaagtactcttatgttgaggagattatttccttgttggaaatggaacacatcgctgattgtattattggtacccccgaagctggtcttactgtcgaacaacgcaagcgtgtcaccattggtgtggaactagccgccaaaccccagctcttgctattcctcgatgagccaacttctggtctcgacagccagagtgccttcaacattgtgcgattcttgaagaagctcgccgctgctggtcaggccattctctgtacgatccaccagccaaacgctgctcttttcgagaacttcgaccggcttcttctcctacagcgtggtggtcgctgcgtctacttcggcgatatcggcaaggacgcccatatcctccgtgaatatctctcccgccacggagcgactgctggaccctctgacaacattgccgagtacatgctggaggccattggcgccggtagtgctgcacgtattggaaaccgtgactgggccgacatctgggatgaaagctctgaacttgctaacgtcaaggaccggatctctcagttcaaagagtctggcaaagcggctgctgcgcaaatcgaccccagcttgcagcgagaattcgcgtctcctcttcttcaccagatcaaggtggttgtcaagcgtacaaacgtttcatactggcgatctcctaactacctgttcacccgcttgttcaatcacattgctgttgcactgattactggtctcacatacctacaactcaacgactctaaatcatctctgcagtacaaagtcttcgtcatgttccaaatcaccgttctgcccgcgttacttttgcctcaagtcgagctcatgtttgtcatcaaacgtgccatcttcttccgtgaacagctcagcaaaatgtacagcaccttcacatttaccctcagtatggtcattgctgaacttccctactctgtgctctgctcggtggtgttcttcttacccctttactttatccctggattccagtccgaacctacgcgtgctggataccagtatttcatggtcctcatcaccgagctcttcgccatatctcttggacaggtcctcgcggctatttctccttcggccttcgtatcaagccagtacgacccgttcatcgtcattacctttgccctgttctgtggtgtcacgattccttatccctctatgcctcatttctggaaagtctggctttacgagcttgatcccttcacccgtctcatcagtggcacgatcaccacagcgttgaacggccttgtcgtcaagtgccgtgaatcggaactcaacactttcactgctcctgatggacaaaattgcggcgattacatgcagaatttcttcgatgctggcgggcctggttatctcgttaataacaatactatgaactgcgagtattgttcctacacgaatggcaatcagttctacagtgtgttcggttatgactacaaccttcgatggagggatctcggcatctttattgcctttgtcggtagcaacaccatcatcctcttcatggctacccgcttcttgaactggaaccgacgataattgccgcaaactgacaagtcctaaccacaccattttagactgccaccatatctatgcatactggtgcgccttaatagttcgtgagataccatcactgtgtcatcacacagcatcgacgttcagcgtatgcatcattgttaatagatcggcgttggggaaatgatatttaaaaattagattagttggcacgataaggtgtacatgtagaggtgaaccgagaatgtcagatgtatactttattccggtccccctcggttcgagacttaattgtgacgcagaagtagtgatggatatatcgctgcaatcttccattagcaccataagttcgaggcaagaaacttttaagtgctcagcatagatatgtatcgcgtatgtcgtcgtcccctgtgtgcttggcggcgtattgataggcatttttctttacacaagttcttggacacgat

SEQ ID NO: 30206 - DNA, 4470 bp, Muscodor strobelii
  misc_feature: SGI cDNA ID NO. 570385
  misc_feature: Elevated expression when VOC is produced
  misc_feature: Encodes the peptide sequence at SEQ ID NO 30207
atgactgagaaggacatcgaaaaacagccgcaggacggccaggaacctgtcgaagcaccaactgctctagctcctgaaactacgaagagcacacgaccttcatcggcgactacgtccctcccaacgtcaacagacaccgaagagcagcgtgaacaggcacgacagaacaaccctaatggattctctaatatcaattccggcgtctcagttgagcgagctgtgtctgacttcgctgagttgcagcgagaaatctctggcttatctcgagctagccgtgtaagcagtcgccgtgaaggtgatcctgagaaaggcaataaggccgatgtcgacggctcagagacctctaccgaagacttcgacttggaacaggttcttcgaggtggtctggacgccgaacagcaggcgggcattcgacccaagcatatcggcgtttattgggatggacttactgtgaaaggaatgggtggtatgaccaactatgtgcaaacatttcctgacgctttcgtgagcttcgtcgactactggacccctttgaagaatttgatgggctggggggcgaagggtgtggaggctactttgcttgacaacttcaggggcgtcatcaaccctggcgagatggtgttagtccttggccgacccggctctggttgcacaaccttcctcaagtccattgcgaatcagcgatggggctacactggagtgacaggtgaggtcatgtatggacctttcacccacgacgaattcgaggattaccgaggagaagccgtttataaccaagaagacgacattcaccatgctaccctaaccgttgaacagactcttggctttgctatcgacactaaagtgcctaacaagctacctgcaggtactaacaagggcaaattcaagagcgacgtcatatccaccctgctgaagatgtttaacattgagcatactaggaaaactgtcgtgggtgatgctctggttcgtggtgtctcaggtggtgagcgaaagcgtgtctctatcgcggaaatgatgatcacgaacgcgtgtgtgttgtcgtgggataacagcacccgtggcttagacgccagtactgccttggacttcataaaatcgctccgaatccagacaaacctatacaaaacctcgactttcgtatctctgtatcaagcctcggagaacatctacaagcaatttgacaaagtcctggttattgattcgggcaaacaagtatattttgggcctgctgcggaagccagaagctatttcgaaggacttggatttctaccccgaccgcgccagactactcccgattacgtgaccggctgtacggacgagttcgagagagactactccgatggatactctcctaagaacgccccccacagccccgaaactcttgccgaagctttcgcacaatctgaatacagcaagcggctcaataccgagatgtcggactacaaagctcgtctcgaacaagaaactggtaaacacgaagatttccgcacggctgtccttgagagcaagcggagtggcgccaagcactctgtttacagcgttggatttcacctccaggtctgggctttgatgaagcgacagtttgttctaaagctccaagacaagcttggtctgttcctctcatggctccgtgccattatcatcgccgtcgtgctcggtacactctatctcaacctcggaaacacgtcagccagcgctttcagtaaaggtggtctcttatttatctcgctcttgttcaatgctttccaagctttctccgaattaggatcaacaatgaccggacggcccattgtcaacaaacacaaggcatatgcgttccatagaccttcagctctgtggatagggcagatttttgttgacacggcattttctgcggtgcagattctggtcttctctatcatcgtgtacttcttgacaggcttggcaagaactgcggggcatttcttcacgttctacttgctgatccttgttggaaacattgcgatgactttgttcttccgtatcatcggctgtctcagtcctgatttcgattacgccgtcaaattcgctgtcgtgacgatcacattgtttattgtgacatctggctacttgattcaataccaatcacaacaacattggcttcgatggatattctggattaacgcactcggcctgtcgtttgcgagcttgatggcgaatgagtttggcggagcagaaattacctgctctgactcgtatctgacaccaagcggaccagggtatagtgatatcaatcatcaagtgtgtaccttggctggcgctaaggctggaagtaacattgtgagcggttccgattacgttaccttggggtatacatatgcacccaaggatctttggcgcaatttcggtatcattattgccatcattgtcttcttcttaatcatgaatgttgttctgggagaatttgtcaagttcggaatgggtggaaaccaagccaaagtttttgctcggccgaacaaggagagaacggagttaaacgaagtactcgataacaagcgtttgcaacgacaaaaatctagggccgacgactcggatcgggcactcaaaatcgagtcaacgagcgttttgacatgggaagaactgaactacgatgttcctgttcccggaggtactcgacgactcctgaacaacatttttggttactgcaagcctggcgaattgacggcacttatgggtgcctccggagctggcaagaccacgcttttggacgtcttagcttcgagaaagaacattggtgttattgctggcgatgtactagttgatggcttgaagccaggcaaagaattccagcgctcaacatcatacgcagaacaacttgacacacatgaccctactcaaacggttcgcgaagctcttcgattttcggccgacttacgacagtccttcgacactcctcggtctgaaaagtactcttatgttgaggagattatttccttgttggaaatggaacacatcgctgattgtattattggtacccccgaagctggtcttactgtcgaacaacgcaagcgtgtcaccattggtgtggaactagccgccaaaccccagctcttgctattcctcgatgagccaacttctggtctcgacagccagagtgccttcaacattgtgcgattcttgaagaagctcgccgctgctggtcaggccattctctgtacgatccaccagccaaacgctgctcttttcgagaacttcgaccggcttcttctcctacagcgtggtggtcgctgcgtctacttcggcgatatcggcaaggacgcccatatcctccgtgaatatctctcccgccacggagcgactgctggaccctctgacaacattgccgagtacatgctggaggccattggcgccggtagtgctgcacgtattggaaaccgtgactgggccgacatctgggatgaaagctctgaacttgctaacgtcaaggaccggatctctcagttcaaagagtctggcaaagcggctgctgcgcaaatcgaccccagcttgcagcgagaattcgcgtctcctcttcttcaccagatcaaggtggttgtcaagcgtacaaacgtttcatactggcgatctcctaactacctgttcacccgcttgttcaatcacattgctgttgcactgattactggtctcacatacctacaactcaacgactctaaatcatctctgcagtacaaagtcttcgtcatgttccaaatcaccgttctgcccgcgttacttttgcctcaagtcgagctcatgtttgtcatcaaacgtgccatcttcttccgtgaacagctcagcaaaatgtacagcaccttcacatttaccctcagtatggtcattgctgaacttccctactctgtgctctgctcggtggtgttcttcttacccctttactttatccctggattccagtccgaacctacgcgtgctggataccagtatttcatggtcctcatcaccgagctcttcgccatatctcttggacaggtcctcgcggctatttctccttcggccttcgtatcaagccagtacgacccgttcatcgtcattacctttgccctgttctgtggtgtcacgattccttatccctctatgcctcatttctggaaagtctggctttacgagcttgatcccttcacccgtctcatcagtggcacgatcaccacagcgttgaacggccttgtcgtcaagtgccgtgaatcggaactcaacactttcactgctcctgatggacaaaattgcggcgattacatgcagaatttcttcgatgctggcgggcctggttatctcgttaataacaatactatgaactgcgagtattgttcctacacgaatggcaatcagttctacagtgtgttcggttatgactacaaccttcgatggagggatctcggcatctttattgcctttgtcggtagcaacaccatcatcctcttcatggctacccgcttcttgaactggaaccgacgataa

SEQ ID NO: 30207 - protein, 1489 aa, Muscodor strobelii
  misc_feature: SGI Peptide ID NO. 570385
  misc_feature (518)..(728): Pfam Id: PF01061 Pfam Desc: ABC-2 type transporter
  misc_feature (1179)..(1390): Pfam Id: PF01061 Pfam Desc: ABC-2 type transporter
  misc_feature (891)..(1080): Pfam Id: PF00005 Pfam Desc: ABC transporter
  misc_feature (204)..(402): Pfam Id: PF00005 Pfam Desc: ABC transporter
  misc_feature (739)..(880): Pfam Id: PF06422 Pfam Desc: CDR ABC transporter
  misc_feature (33)..(1489): NCBI GI: 145611360 Blast Desc: MGG_00447 [Magnaporthe grisea 70-15] gi|29467450|dbj|BAC67162.1| ATP-binding cassette transporter [Magnaporthe grisea] gi|145018661|gb|EDK02940.1| MGG_00447 grisea
  misc_feature (13)..(1489): NCBI GI: 85089703 Blast Desc: NCU10009 [Neurospora crassa OR74A] gi|28919388|gb|EAA28834.1| NCU10009 [Neurospora crassa OR74A]
  misc_feature (51)..(1489): NCBI GI: 171681642 Blast Desc: protein product [Podospora anserina] gi|170940780|emb|CAP66429.1| protein product [Podospora anserina]
  misc_feature (43)..(1489): NCBI GI: 46127863 Blast Desc: FG08309.1 [Gibberella zeae PH-1]
  misc_feature (34)..(1489): NCBI GI: 7416055 Blast Desc: BMR1 [Botryotinia fuckeliana]
  misc_feature (34)..(1489): NCBI GI: 154324052 Blast Desc: BC1G_00425 [Botryotinia fuckeliana B05.10] gi|150842654|gb|EDN17847.1| BC1G_00425 [Botryotinia fuckeliana B05.10]
  misc_feature (14)..(1489): NCBI GI: 189209776 Blast Desc: ABC transporter CDR4 [Pyrenophora tritici-repentis Pt-1C-BFP] gi|187977313|gb|EDU43939.1| ABC transporter CDR4 [Pyrenophora tritici-repentis Pt-1C-BFP]
  misc_feature (39)..(1489): NCBI GI: 242792972 Blast Desc: ABC transporter, [Talaromyces stipitatus ATCC 10500] gi|218718655|gb|EED18075.1| ABC transporter, [Talaromyces stipitatus ATCC 10500]
  misc_feature (15)..(1489): NCBI GI: 148887852 Blast Desc: ABC transporter [Leptosphaeria maculans] gi|148887854|gb|ABR15508.1| ABC transporter [Leptosphaeria maculans]
  misc_feature (25)..(1480): NCBI GI: 240109578 Blast Desc: multidrug resistance ABC transporter, [Coccidioides posadasii C735 delta SOWgp]
  misc_feature: Useful for introducing or modulating the production of volatile compounds
  misc_feature: Useful for fungicidal and/or biocontrol applications
MTEKDIEKQPQDGQEPVEAPTALAPETTKSTRPSSATTSLPTSTDTEEQREQARQNNPNGFSNINSGVSVERAVSDFAELQREISGLSRASRVSSRREGDPEKGNKADVDGSETSTEDFDLEQVLRGGLDAEQQAGIRPKHIGVYWDGLTVKGMGGMTNYVQTFPDAFVSFVDYWTPLKNLMGWGAKGVEATLLDNFRGVINPGEMVLVLGRPGSGCTTFLKSIANQRWGYTGVTGEVMYGPFTHDEFEDYRGEAVYNQEDDIHHATLTVEQTLGFAIDTKVPNKLPAGTNKGKFKSDVISTLLKMFNIEHTRKTVVGDALVRGVSGGERKRVSIAEMMITNACVLSWDNSTRGLDASTALDFIKSLRIQTNLYKTSTFVSLYQASENIYKQFDKVLVIDSGKQVYFGPAAEARSYFEGLGFLPRPRQTTPDYVTGCTDEFERDYSDGYSPKNAPHSPETLAEAFAQSEYSKRLNTEMSDYKARLEQETGKHEDFRTAVLESKRSGAKHSVYSVGFHLQVWALMKRQFVLKLQDKLGLFLSWLRAIIIAVVLGTLYLNLGNTSASAFSKGGLLFISLLFNAFQAFSELGSTMTGRPIVNKHKAYAFHRPSALWIGQIFVDTAFSAVQILVFSIIVYFLTGLARTAGHFFTFYLLILVGNIAMTLFFRIIGCLSPDFDYAVKFAVVTITLFIVTSGYLIQYQSQQHWLRWIFWINALGLSFASLMANEFGGAEITCSDSYLTPSGPGYSDINHQVCTLAGAKAGSNIVSGSDYVTLGYTYAPKDLWRNFGIIIAIIVFFLIMNVVLGEFVKFGMGGNQAKVFARPNKERTELNEVLDNKRLQRQKSRADDSDRALKIESTSVLTWEELNYDVPVPGGTRRLLNNIFGYCKPGELTALMGASGAGKTTLLDVLASRKNIGVIAGDVLVDGLKPGKEFQRSTSYAEQLDTHDPTQTVREALRFSADLRQSFDTPRSEKYSYVEEIISLLEMEHIADCIIGTPEAGLTVEQRKRVTIGVELAAKPQLLLFLDEPTSGLDSQSAFNIVRFLKKLAAAGQAILCTIHQPNAALFENFDRLLLLQRGGRCVYFGDIGKDAHILREYLSRHGATAGPSDNIAEYMLEAIGAGSAARIGNRDWADIWDESSELANVKDRISQFKESGKAAAAQIDPSLQREFASPLLHQIKVVVKRTNVSYWRSPNYLFTRLFNHIAVALITGLTYLQLNDSKSSLQYKVFVMFQITVLPALLLPQVELMFVIKRAIFFREQLSKMYSTFTFTLSMVIAELPYSVLCSVVFFLPLYFIPGFQSEPTRAGYQYFMVLITELFAISLGQVLAAISPSAFVSSQYDPFIVITFALFCGVTIPYPSMPHFWKVWLYELDPFTRLISGTITTALNGLVVKCRESELNTFTAPDGQNCGDYMQNFFDAGGPGYLVNNNTMNCEYCSYTNGNQFYSVFGYDYNLRWRDLGIFIAFVGSNTIILFMATRFLNWNRR

SEQ ID NO: 30208 - DNA, 5947 bp, Muscodor strobelii; identical to SEQ ID NO: 30205
  misc_feature: SGI EST ID NO. CUFF.71449.1
  misc_feature: Variant of the nucleotide sequence at SEQ ID NO 30206

SEQ ID NO: 30209 - DNA, 819 bp, Muscodor strobelii
  misc_feature: SGI cDNA ID NO. 570386
  misc_feature: Encodes the peptide sequence at SEQ ID NO 30210
atggacaagaacactgacatcgacggtcccgaggattcacatggactgatcagtaccatcgaagggatcgccattcttgtagatatcattgatgaccttcctgtttctcccccttccctatatttcgatctggagggagtcaatttgtcccgttacggtacaatttcgatcatgcaaattttcgtccagcccacaaacaccacatacctcgtcgatgtatacactctcggtgacgcagccttcacaaccgaaggcaaacactcaggcacaaccctcaagaatatcctccaatccgcttgcacaccgaaagtattcttcgatgtgcgaagcgattcagacgctctgttcgcccactacggcattgctctggagggaattcatgatatccagctcatggagctggctggtcgccgaccccctcgttcttatcttagaggcctcggaaagtgcattgagtacgaccttgaccttcccgacgacgaggttaccgagttccttgacggcaagcaggaaggcaaattgcttttcgctcccgaatacggcggctcttacgaggttttcaacgagcgcccgctaccagagaaagttcgacgctactgtaccgaggatgttcattacatggccgccctctggaagcactacaatgatcgcggttacacacctgaatgggagaagcgcttggaccatgagactagggaacgtgttcatcgatcacagtcgccggaatactgtggctttggacgacatatgacatttgctcccagtggatgggactccgtctacattaaaagcgatgatgatgacgactcagactggtag

SEQ ID NO: 30210 - protein, 272 aa, Muscodor strobelii
  misc_feature: SGI Peptide ID NO. 570386
  misc_feature (17)..(219): Pfam Id: PF01612 Pfam Desc: 3'-5' exonuclease
  misc_feature (3)..(257): NCBI GI: 170940093 Blast Desc: protein product [Podospora anserina]
  misc_feature (5)..(257): NCBI GI: 156059756 Blast Desc: SS1G_03891 [Sclerotinia sclerotiorum 1980] gi|154701677|gb|EDO01416.1| SS1G_03891 [Sclerotinia sclerotiorum 1980]
  misc_feature (15)..(257): NCBI GI: 154315768 Blast Desc: BC1G_04456 [Botryotinia fuckeliana B05.10] gi|150846852|gb|EDN22045.1| BC1G_04456 [Botryotinia fuckeliana B05.10]
  misc_feature (13)..(264): NCBI GI: 261196313 Blast Desc: 3'-5' exonuclease [Ajellomyces dermatitidis SLH14081] gi|239587693|gb|EEQ70336.1| 3'-5' exonuclease [Ajellomyces dermatitidis SLH14081] gi|239614653|gb|EEQ91640.1| 3'-5' ER-3]
  misc_feature (13)..(260): NCBI GI: 240280394 Blast Desc: 3'-5' exonuclease [Ajellomyces capsulatus H143]
  misc_feature (13)..(260): NCBI GI: 154277567 Blast Desc: [Ajellomyces capsulatus NAm1] gi|150413209|gb|EDN08592.1| [Ajellomyces capsulatus NAm1]
  misc_feature (17)..(260): NCBI GI: 225561048 Blast Desc: 3'-5' exonuclease [Ajellomyces capsulatus G186AR]
  misc_feature (12)..(254): NCBI GI: 258570519 Blast Desc: [Uncinocarpus reesii 1704] gi|237904333|gb|EEP78734.1| [Uncinocarpus reesii 1704]
  misc_feature (37)..(271): NCBI GI: 212545983 Blast Desc: PMAA_010410 [Penicillium marneffei ATCC 18224] gi|210064665|gb|EEA18760.1| PMAA_010410 [Penicillium marneffei ATCC 18224]
  misc_feature (13)..(254): NCBI GI: 226277937 Blast Desc: conserved [Paracoccidioides brasiliensis Pb01]
MDKNTDIDGPEDSHGLISTIEGIAILVDIIDDLPVSPPSLYFDLEGVNLSRYGTISIMQIFVQPTNTTYLVDVYTLGDAAFTTEGKHSGTTLKNILQSACTPKVFFDVRSDSDALFAHYGIALEGIHDIQLMELAGRRPPRSYLRGLGKCIEYDLDLPDDEVTEFLDGKQEGKLLFAPEYGGSYEVFNERPLPEKVRRYCTEDVHYMAALWKHYNDRGYTPEWEKRLDHETRERVHRSQSPEYCGFGRHMTFAPSGWDSVYIKSDDDDDSDW

SEQ ID NO: 30211 - DNA, 257 bp, Muscodor strobelii
  misc_feature: SGI EST ID NO. CUFF.71430.0
  misc_feature: Variant of the nucleotide sequence at SEQ ID NO 30209
cagctcaagtctcaagtcttcgaccgaacattggcttaataaatcgcttcgatcactgttggagtcaccaatcaacgccggtacgaaaaatactggaagaaatacttaggtctcattgctaatcattctcaggagagagcatcaatatggctgaactcactgctttcgattgctcccacgctatggacaagaacactgacatcgacggtcccgaggattcacatggactgatcagtaccatcgaagggatcgccatt

SEQ ID NO: 30212 - DNA, 987 bp, Muscodor strobelii
  misc_feature: SGI cDNA ID NO. 570387
  misc_feature: Encodes the peptide sequence at SEQ ID NO 30213
atgatgtcttcgtcctcgggcacccccgagtcttggatctcctccttctgctccctcctgggccacgaatacttcgctgaggtctcggaagagtttatcgaagatgacttcaatttgactggcttgcagacacaggtcgccatgtacaaagaggctctagagatgatactcgatgtcgagcccgaagaagacgacgaggatgaagaagaggaggacgaggaggaagacgagtccctcgagggcgtcgaacggatgcgccacagcgagcgcaggaaccacagccgcatcgccagcgacctgtccgtcatcgagtcctccgccgagatgctctacggccttatacaccagcggtttatatgctccagggtaggcattcaacagatgtcggagaagtatgagctcggtcacttcggcgtctgcccccgaagtcactgcgaacaggcacgcaccctccccgtcggcctgtccgacatccccggcgaagagaccgtcaagctcttctgtccctcctgcctcgacgtctacgtgccccccaacagccgcttccagaccgtcgacggcgccttcttcggccgcactttcggtgccctcttcctcctcaccttccccgaatacgacctcaccaagcgcggagctgacgttctcgcgggtgcacgcgtgtctgaggatgacaaggacatgctcaacggcatgtatcagtgcaatatcgccccaggcttaggcaggggtagaatctacgaaccacgcatctacggatttcgagtgtccgaagttgctcgatctggtccccggatgcagtggctaagggacaaaccagatgatctttcagaactggacgaggcgcggcgattcgcagaagagaatccagacagcgaggatgacgaggaaatgaacatgaacggccgccaggtacgaaggttaagacggcaaaggcgtaatggggcggacggtagccccatggaaacgaacggcgagtcagagctctag

SEQ ID NO: 30213 - protein, 328 aa, Muscodor strobelii
  misc_feature: SGI Peptide ID NO. 570387
  misc_feature (12)..(211): Pfam Id: PF01214 Pfam Desc: Casein kinase II regulatory subunit
  misc_feature (12)..(205): Pfam Id: PF01214 Pfam Desc: Casein kinase II regulatory subunit
  misc_feature (2)..(328): NCBI GI: 85097481 Blast Desc: casein kinase II beta subunit [Neurospora crassa OR74A] gi|30580435|sp|Q8TG12.1|CSK2B_NEUCR RecName: Full=Casein kinase II subunit beta-1; Short=CK II beta-1 casein kinase II II
  misc_feature (2)..(328): NCBI GI: 46128459 Blast Desc: FG08607.1 [Gibberella zeae PH-1]
  misc_feature (2)..(328): NCBI GI: 116202003 Blast Desc: CHGG_08886 [Chaetomium globosum CBS 148.51] gi|88177404|gb|EAQ84872.1| CHGG_08886 [Chaetomium globosum CBS 148.51]
  misc_feature (2)..(328): NCBI GI: 256733940 Blast Desc: [Nectria haematococca mpVI 77-13-4]
  misc_feature (2)..(328): NCBI GI: 261360755 Blast Desc: casein kinase II subunit beta-1 [Verticillium albo-atrum VaMs.102]
  misc_feature (2)..(328): NCBI GI: 171681640 Blast Desc: protein product [Podospora anserina] gi|170940779|emb|CAP66428.1| protein product [Podospora anserina]
  misc_feature (2)..(306): NCBI GI: 39974815 Blast Desc: MGG_00446 [Magnaporthe grisea 70-15] gi|145018662|gb|EDK02941.1| MGG_00446 [Magnaporthe grisea 70-15]
  misc_feature (2)..(325): NCBI GI: 156053481 Blast Desc: SS1G_06908 [Sclerotinia sclerotiorum 1980] gi|154704686|gb|EDO04425.1| SS1G_06908 [Sclerotinia sclerotiorum 1980]
  misc_feature (2)..(325): NCBI GI: 154292735 Blast Desc: BC1G_14752 [Botryotinia fuckeliana B05.10] gi|150845834|gb|EDN21027.1| BC1G_14752 [Botryotinia fuckeliana B05.10]
  misc_feature (2)..(324): NCBI GI: 189189630 Blast Desc: casein kinase II subunit beta [Pyrenophora tritici-repentis Pt-1C-BFP] gi|187972760|gb|EDU40259.1| casein kinase II subunit beta [Pyrenophora tritici-repentis Pt-1C-BFP]
MMSSSSGTPESWISSFCSLLGHEYFAEVSEEFIEDDFNLTGLQTQVAMYKEALEMILDVEPEEDDEDEEEEDEEEDESLEGVERMRHSERRNHSRIASDLSVIESSAEMLYGLIHQRFICSRVGIQQMSEKYELGHFGVCPRSHCEQARTLPVGLSDIPGEETVKLFCPSCLDVYVPPNSRFQTVDGAFFGRTFGALFLLTFPEYDLTKRGADVLAGARVSEDDKDMLNGMYQCNIAPGLGRGRIYEPRIYGFRVSEVARSGPRMQWLRDKPDDLSELDEARRFAEENPDSEDDEEMNMNGRQVRRLRRQRRNGADGSPMETNGESEL

SEQ ID NO: 30214 - DNA, 2084 bp, Muscodor strobelii
  misc_feature: SGI EST ID NO. CUFF.71603.1
  misc_feature: Variant of the nucleotide sequence at SEQ ID NO 30212
agcgtctttgctgcgcctcccaaaagcatcccccaccatccaccacatcgagcccaccaggccaaaaccagcattcccatacccaaatgatagacatcgagctctatcgcccggccatcgctcacgtccccaacccatatccataatcccgcggccgcccttgtatcactttgctgtctgacaatcgcccgctcccttctgtctgcgtcatgcagtcgacgtagcgctgcgagctctctcttttccctccaatcgctccagtgaattgggccaacaggggttcctgtgctccctcacccccctcctcattgtccagaggcagcccctccaacgcgccagctatactagctacaccagctacacgcgtcgtccaacctctgatccgtcccggctcctggctcctctcccatatctcctcccctcgcctcgatatgatgtcttcgtcctcgggcacccccgagtcttggatctcctccttctgctccctcctgggccacgaatacttcgctgaggtctcggaagagtttatcgaagatgacttcaatttgactggcttgcagacacaggtcgccatgtacaaagaggctctagagatgatactcgatgtcgagcccgaagaagacgacgaggatgaagaagaggaggacgaggaggaagacgagtccctcgagggcgtcgaacggatgcgccacagcgagcgcaggaaccacagccgcatcgccagcgacctgtccgtcatcgagtcctccgccgagatgctctacggccttatacaccagcggtttatatgctccagggtaggcattcaacagatgtcggagaagtatgagctcggtcacttcggcgtctgcccccgaagtcactgcgaacaggcacgcaccctccccgtcggcctgtccgacatccccggcgaagagaccgtcaagctcttctgtccctcctgcctcgacgtctacgtgccccccaacagccgcttccagaccgtcgacggcgccttcttcggccgcactttcggtgccctcttcctcctcaccttccccgaatacgacctcaccaagcgcggagctgacgttctcgcgggtgcacgcgtgtctgaggatgacaaggacatgctcaacggcatgtatcagtgcaatatcgccccaggcttaggcaggggtagaatctacgaaccacgcatctacggatttcgagtgtccgaagttgctcgatctggtccccggatgcagtggctaagggacaaaccagatgatctttcagaactggacgaggcgcggcgattcgcagaagagaatccagacagcgaggatgacgaggaaatgaacatgaacggccgccaggtacgaaggttaagacggcaaaggcgtaatggggcggacggtagccccatggaaacgaacggcgagtcagagctctagaaaaacttatctgatctcgaccgcttcaaccttcggaagatggatgaccatttcaaggagacgggagataccggttacacggctttcgacgagaagggcgagccgactgggcaatagaagactttggcggatttcgctgtcttacaagtcgtgcgaagcatggacaaggacaaggagcagcaaaggaagagagatcccattaatcgttagtggttggtactggaccaacatatcgcgacaccaacgaatgatgcataatatcaacgacgggtgtccggcattgaaataggatacctccccatgatatggagattgcatgtccaaccaatcacctcatgaaccatggaaacagacagaggcaagggggcaaacactgcagctaggtaacgactgcattgaataagatggaggccaggttgggtccgcgggattgtgtttgaaacgcatgtgttggtggcggtgtcagtaacgctatagagtgattgtcgcgaattataatacagatgcatccccagtggaaaatgcatccccagtggaaaatgcatccccagtggaaaatgcatccccagtggaaaatgcatccccagtggaaaaagactgttgattacatgcaagtcgtgaccatagatctattttgatgatgttttaatttttattaatacccga

SEQ ID NO: 30215 - DNA, 1710 bp, Muscodor strobelii
  misc_feature: SGI cDNA ID NO. 570388
  misc_feature: Reduced expression when VOC is produced
  misc_feature: Encodes the peptide sequence at SEQ ID NO 30216
atgacgacgacttataccggtcacatacagctgaactcgataacatacaacctcatgttacctatgacaatgaagaccagtctggaagacggcggtccagctccgatccctctgggcgaggccgtcattcctgagaaccagaggctcgccagcactgcggtcttcaacgcccctggtggcggtaatgaagtgaaccaggaacttgcagacgttttggacgttattgaccccgaggtatcaaccttgaacaatgttaccaatattcagaactccctctttgttccatcacttggtcggtttgtcaacagacgcccaagatataacctgactcaagccccagagcaccttcaaccaaggaaaaagggctcaaaagcatcactctccacaaggagaagctcgaaggcatcactgcagcccgaaccattccaacagggcccacagctcgagtctcctcctcccgaatatgattttgattttaatcatgcggttcttcctgatggagtatccttggaaggatggaccaaggaagaaatggccgagctgaatgatcacgttcgacatatgctgcattcacggcgctccaagttcaagcggaccatgaaggcctttggtcagtatgtaaaaacgccgcttggcgccttcgtgaccatctatgcgactctgatcacattatttggtgccgcctgggttttgttcctgatcggctggctctacgttggtgccaaacaatccgagaccatcaatgccatcgattatacccttgtcgccctgttcggtcttgtgggtgacttactggcacccttccggctcgtcgatacgtatcatatgatctttatcgcgcattactatcgcaaaacatggaagctgagaaagaagcttcaaatgtcggagttgaaagataagaacgacttgcctactaatccaagacttgaagaagctcacgacgaaatatctgtcttgactgacgtccaacaagccacactagttcaccatcagaacaagttcgctaaatcacatactttctaccgcccccacgaaaccaagacacactacgcattccccttgagtttcctcatcgctgttgtcctgctacttgatctccattcagcgctacagatttctcttggagcaacaacttggggcattgactggcacacacgaaatcccgctatcacgcccacaattctcagtgtgtccatcactgtcaacatcacagccggtattctaatcaacatcggcgggcgtaagacgcgtaaaaaggaagtcgtcgagcgaatgttcagacaagatcttacgcgtgaagcactgaaggaaatccgggagaagggaaaggaggagcaagacatacagaaacacatgaaagcggagaaagcaattcaccaaggacgacagagtgaaactttagacgaggcggttaagagccatgtccccgttcgagatagtctcgaggttgagcgttatcatgagcggcggagtatggatgtagcaaggaagagctcggatggcggccgagggagttgggacttccgtaagagtatggatgagcggagaagcaaaagtagtgagggaagcagaagcgacagcgctcgaagagccattgaccgtcaattccctaaagctgataatgggcgaaggagtttggatacgcgtcggttccgaagccctcttgcgacttcgacacctgccacacctacttccccgctggaataa

SEQ ID NO: 30216 - protein, 569 aa, Muscodor strobelii
  misc_feature: SGI Peptide ID NO. 570388
  misc_feature (62)..(518): NCBI GI: 242818192 Blast Desc: integral membrane protein [Talaromyces stipitatus ATCC 10500] gi|218713533|gb|EED12957.1| integral membrane protein [Talaromyces stipitatus ATCC 10500]
  misc_feature (62)..(465): NCBI GI: 70998402 Blast Desc: integral membrane protein [Aspergillus fumigatus Af293] gi|66851559|gb|EAL91885.1| integral membrane protein [Aspergillus fumigatus Af293] gi|159126343|gb|EDP51459.1| protein
  misc_feature (62)..(446): NCBI GI: 212530606 Blast Desc: integral membrane protein [Penicillium marneffei ATCC 18224] gi|210074858|gb|EEA28945.1| integral membrane protein [Penicillium marneffei ATCC 18224]
  misc_feature (61)..(529): NCBI GI: 121712852 Blast Desc: integral membrane protein [Aspergillus clavatus NRRL 1] gi|119402190|gb|EAW12611.1| integral membrane protein [Aspergillus clavatus NRRL 1]
  misc_feature (63)..(465): NCBI GI: 119479883 Blast Desc: integral membrane protein [Neosartorya fischeri NRRL 181] gi|119408124|gb|EAW18073.1| integral membrane protein [Neosartorya fischeri NRRL 181]
  misc_feature (61)..(439): NCBI GI: 115437946 Blast Desc: conserved [Aspergillus terreus NIH2624] gi|114188755|gb|EAU30455.1| conserved [Aspergillus terreus NIH2624]
  misc_feature (50)..(435): NCBI GI: 67523527 Blast Desc: AN2219.2 [Aspergillus nidulans FGSC A4] gi|40744720|gb|EAA63876.1| AN2219.2 [Aspergillus nidulans FGSC A4] gi|259487604|tpe|CBF86406.1| TPA: integral membrane protein
  misc_feature (62)..(448): NCBI GI: 225682736 Blast Desc: conserved [Paracoccidioides brasiliensis Pb03]
  misc_feature (62)..(448): NCBI GI: 226290173 Blast Desc: conserved [Paracoccidioides brasiliensis Pb18]
  misc_feature (50)..(432): NCBI GI: 255956147 Blast Desc: Pc21g18320 [Penicillium chrysogenum Wisconsin 54-1255] gi|211590537|emb|CAP96729.1| Pc21g18320 [Penicillium chrysogenum Wisconsin 54-1255]
  misc_feature: Useful for introducing or modulating the production of volatile compounds
MTTTYTGHIQLNSITYNLMLPMTMKTSLEDGGPAPIPLGEAVIPENQRLASTAVFNAPGGGNEVNQELADVLDVIDPEVSTLNNVTNIQNSLFVPSLGRFVNRRPRYNLTQAPEHLQPRKKGSKASLSTRRSSKASLQPEPFQQGPQLESPPPEYDFDFNHAVLPDGVSLEGWTKEEMAELNDHVRHMLHSRRSKFKRTMKAFGQYVKTPLGAFVTIYATLITLFGAAWVLFLIGWLYVGAKQSETINAIDYTLVALFGLVGDLLAPFRLVDTYHMIFIAHYYRKTWKLRKKLQMSELKDKNDLPTNPRLEEAHDEISVLTDVQQATLVHHQNKFAKSHTFYRPHETKTHYAFPLSFLIAVVLLLDLHSALQISLGATTWGIDWHTRNPAITPTILSVSITVNITAGILINIGGRKTRKKEVVERMFRQDLTREALKEIREKGKEEQDIQKHMKAEKAIHQGRQSETLDEAVKSHVPVRDSLEVERYHERRSMDVARKSSDGGRGSWDFRKSMDERRSKSSEGSRSDSARRAIDRQFPKADNGRRSLDTRRFRSPLATSTPATPTSPLE

SEQ ID NO: 30217 - DNA, 2244 bp, Muscodor strobelii
  misc_feature: SGI EST ID NO. CUFF.71560.1
  misc_feature: Variant of the nucleotide sequence at SEQ ID NO 30215
catgcctcctgcttggctaccactcactttaaactttggcgagtaactcttgattacgacaatctttgaaattttttgacgttgcaacataaacgatgcacatgctcttcttgtaataattttgcacattttcggtttctgagcgtttttggatattggcttttccctgtatcttacttcctgactgctgcctcttttgagcgcacgtctctccgaggttggagatatgtcgcgagacgagcggcatgttcgcttcaacagcaacaacaacaatgacgacgacttataccggtcacatacagctgaactcgataacatacaacctcatgttacctatgacaatgaagaccagtctggaagacggcggtccagctccgatccctctgggcgaggccgtcgtcctaagttggccgtaatacgtccccgcagagaaggtgctcgtgcaggcatggttcagattcctgagaaccagaggctcgccagcactgcggtcttcaacgcccctggtggcggtaatgaagtgaaccaggaacttgcagacgttttggacgttattgaccccgaggtatcaaccttgaacaatgttaccaatattcagaactccctctttgttccatcacttggtcggtttgtcaacagacgcccaagatataacctgactcaagccccagagcaccttcaaccaaggaaaaagggctcaaaagcatcactctccacaaggagaagctcgaaggcatcactgcagcccgaaccattccaacagggcccacagctcgagtctcctcctcccgaatatgattttgattttaatcatgcggttcttcctgatggagtatccttggaaggatggaccaaggaagaaatggccgagctgaatgatcacgttcgacatatgctgcattcacggcgctccaagttcaagcggaccatgaaggcctttggtcagtatgtaaaaacgccgcttggcgccttcgtgaccatctatgcgactctgatcacattatttggtgccgcctgggttttgttcctgatcggctggctctacgttggtgccaaacaatccgagaccatcaatgccatcgattatacccttgtcgccctgttcggtcttgtgggtgacttactggcacccttccggctcgtcgatacgtatcatatgatctttatcgcgcattactatcgcaaaacatggaagctgagaaagaagcttcaaatgtcggagttgaaagataagaacgacttgcctactaatccaagacttgaagaagctcacgacgaaatatctgtcttgactgacgtccaacaagccacactagttcaccatcagaacaagttcgctaaatcacatactttctaccgcccccacgaaaccaagacacactacgcattccccttgagtttcctcatcgctgttgtcctgctacttgatctccattcagcgctacagatttctcttggagcaacaacttggggcattgactggcacacacgaaatcccgctatcacgcccacaattctcagtgtgtccatcactgtcaacatcacagccggtattctaatcaacatcggcgggcgtaagacgcgtaaaaaggaagtcgtcgagcgaatgttcagacaagatcttacgcgtgaagcactgaaggaaatccgggagaagggaaaggaggagcaagacatacagaaacacatgaaagcggagaaagcaattcaccaaggacgacagagtgaaactttagacgaggcggttaagagccatgtccccgttcgagatagtctcgaggttgagcgttatcatgagcggcggagtatggatgtagcaaggaagagctcggatggcggccgagggagttgggacttccgtaagagtatggatgagcggagaagcaaaagtagtgagggaagcagaagcgacagcgctcgaagagccattgaccgtcaattccctaaagctgataatgggcgaaggagtttggatacgcgtcggttccgaagccctcttgcgacttcgacacctgccacacctacttccccgctggaataatggaaactgtactgcatcatttgcatttgcatttaggtacgtctaatgacgtcttttggtcatctaggtatataccccaacgcgtagatagtttctaatagaacataatgattcatgcctacctacgctgatcatgtttttattctttcgtgaaatacaaacgaattgcatccgttgcggcaatcaccacgggcttggatcag

SEQ ID NO: 30218 - DNA, 612 bp, Muscodor strobelii
  misc_feature: SGI cDNA ID NO. 570389
  misc_feature: Encodes the peptide sequence at SEQ ID NO 30219
atgtctttcaaaacaacctacctcctcatctacaacacactctccctcctcagctggtcctatatcctctacctcccaatttcccacctttacacttccgacctctcacccagcaccctaaaatccgacttacatcccctaacattcatccaatctttcgccgtgctcgaagtcctccacgccatcctgggaatcgtccgctcctcaccctcaaccaccgcgctccaaatcggaggaagaaatctagtagtatggaccgtcatgcaggccttccctgaactagtattttacggcaatgggaaaatagcgtttctaggttgtatgttagcttggggcagtagtgatgtgttaaggttcgcgtatttcgtcgctgtgcagactggagaggtgagcggggcgttgaagtggcttcggtatagtgcgtttgtgattctatatcccgtgggatttctgagcgaggcttggctggtttatctcagttttacacaggcggagggtatcagtctgccctacagggtttatcttggagctgggttgttgtcttatattcctgcgttttatattctgtatgggtatatgcttactcaaagacggaaggctttgaggaagtga

SEQ ID NO: 30219 - protein, 203 aa, Muscodor strobelii
  misc_feature: SGI Peptide ID NO. 570389
  misc_feature (51)..(203): Pfam Id: PF04387 Pfam Desc: Protein tyrosine phosphatase-like protein, PTPLA
  misc_feature (7)..(202): NCBI GI: 46120466 Blast Desc: FG04880.1 [Gibberella zeae PH-1]
  misc_feature (5)..(202): NCBI GI: 256730252 Blast Desc: NECHADRAFT_82566 [Nectria haematococca mpVI 77-13-4]
  misc_feature (6)..(202): NCBI GI: 255948852 Blast Desc: Pc22g12490 [Penicillium chrysogenum Wisconsin 54-1255] gi|211592210|emb|CAP98537.1| Pc22g12490 [Penicillium chrysogenum Wisconsin 54-1255]
  misc_feature (1)..(203): NCBI GI: 145258398 Blast Desc: An04g06650 [Aspergillus niger] gi|134074635|emb|CAK44668.1| protein product [Aspergillus niger]
  misc_feature (1)..(203): NCBI GI: 119491953 Blast Desc: NFIA_067410 [Neosartorya fischeri NRRL 181] gi|119411631|gb|EAW21574.1| conserved [Neosartorya fischeri NRRL 181]
  misc_feature (4)..(184): NCBI GI: 145609443 Blast Desc: MGG_07602 [Magnaporthe grisea 70-15] gi|145016806|gb|EDK01236.1| MGG_07602 [Magnaporthe grisea 70-15]
  misc_feature (1)..(201): NCBI GI: 145353390 Blast Desc: [Ostreococcus lucimarinus CCE9901] gi|145357381|ref|XP_001422898.1| [Ostreococcus lucimarinus CCE9901] gi|144581233|gb|ABO99290.1| [Ostreococcus lucimarinus
  misc_feature (6)..(202): NCBI GI: 261193186 Blast Desc: conserved [Ajellomyces dermatitidis SLH14081] gi|239589134|gb|EEQ71777.1| conserved [Ajellomyces dermatitidis SLH14081] gi|239613703|gb|EEQ90690.1| conserved [Ajellomyces
  misc_feature (4)..(202): NCBI GI: 261354083 Blast Desc: protein tyrosine phosphatase [Verticillium albo-atrum VaMs.102]
  misc_feature (6)..(202): NCBI GI: 212538161 Blast Desc: phosphatase-like protein (PTPLA), [Penicillium marneffei ATCC 18224] gi|210068978|gb|EEA23069.1| phosphatase-like protein (PTPLA), [Penicillium marneffei ATCC
MSFKTTYLLIYNTLSLLSWSYILYLPISHLYTSDLSPSTLKSDLHPLTFIQSFAVLEVLHAILGIVRSSPSTTALQIGGRNLVVWTVMQAFPELVFYGNGKIAFLGCMLAWGSSDVLRFAYFVAVQTGEVSGALKWLRYSAFVILYPVGFLSEAWLVYLSFTQAEGISLPYRVYLGAGLLSYIPAFYILYGYMLTQRRKALRK

SEQ ID NO: 30220 - DNA, 163 bp, Muscodor strobelii
  misc_feature: SGI EST ID NO. CUFF.71452.0
  misc_feature: Variant of the nucleotide sequence at SEQ ID NO 30218
aggcttggctggtttatctcagttttacacaggcggagggtatcagtctgccctacagggtttatcttggagctgggttgttgtcttatattcctgcgttttatattctgtatgggtatatgcttactcaaagacggaaggctttgaggaagtgacatagagt

SEQ ID NO: 30221 - DNA, 1515 bp, Muscodor strobelii
  misc_feature: SGI cDNA ID NO. 570390
  misc_feature: Encodes the peptide sequence at SEQ ID NO 30222
atggcgccctcgatcagggttgtgttcctcgctgctgctctctatgcttcacagctgagcacagcaattcctacctctcagttcacaacgaaacaaaaagcggtatcatggggctcatgcgtagaaaagtttccggaaagcaattttgcggccaatctcacttgcggcactctcgacgttcccctgaattgggaacaccccatgaacaaccggtctatatctctcggactggtccgtctggaggccacggacaaaaccaagcgaatcggctccttattcattaatcccggtggtccgggaggctccgcaacggaatccatcaatagtttgatcgccggaaacccaacttatttggaccccgagatcaccacttcgttcgacatcataggtctagatccccgcggggtcggattcagcacacctctgaagtgcgacccagcggtttttaatacgcgcgtcaagatgtttcctcgatcacagaatgagttcgacgcgctggtcaaccataacaaagagctcggtgcaagttgtctcgcgaaatcgggagagcttgtagagcatctcgataccatcagcgcagcaagagatcacgaggccgtgcgcgtggctctcggcgatgagaagataactttgcttggcttctcatatggctctcaattattcagtcaatatgctgctctttacccgcagagcatacgtgctgcggcaatcgacggaaaccttcagcattcccagtcagaggcctcgaatttgcttattgaatcaaccacttatgagactgctctgaagcatttcttcgactggtgcgacaatactgacgattgcccactcaggggaaaagacgtccaagacgtgttcacgagcatcagggatcaggcagcgaaatgtcctattcctgctcccgggtgtcacgatgtggattgtcgcgccgacctcaatgacgaagatctactatttggcgtacaatcgtttctccttctccaggttgcctggcccatactcggacagggtctgcttgaagcaagtcgcggtaacgccaccattctatccaaggttaaccagctagccgtcggcgatgttgtcgcggattcgacagcgtatgcttcttacggcattggatgccaggattggacgcacgacgcaaagtctctagccgacgtcatacagcgacaaattattggcgagacaatctctcccctcacccgcggcgcaagccagacctaccgctaccaagtcgggtgcttaggctggccagccccagtagcgaatccacctgcatccgttaattacaaaggccccgtgcctatcctccaagttcagtcagtgttcgacccgtctgataactacgcctgggccgtcggcctcgaagctgaattaggtaatcacactgttttactcacgcgtaacggcagcggacacaccagttacttcttgaatggcgaagctactcggatcatgaacgggtatctcttgaacttgactcttcccgctccgggtactatcgtggcaacgtaa

SEQ ID NO: 30222 - protein, 504 aa, Muscodor strobelii
  misc_feature: SGI Peptide ID NO. 570390
  misc_feature (126)..(492): Pfam Id: PF00561 Pfam Desc: alpha/beta hydrolase fold
  misc_feature (398)..(502): Pfam Id: PF08386 Pfam Desc: TAP-like protein
  misc_feature (126)..(273): Pfam Id: PF00561 Pfam Desc: alpha/beta hydrolase fold
  misc_feature (77)..(504): NCBI GI: 169619802 Blast Desc: SNOG_13098 [Phaeosphaeria nodorum SN15] gi|160703905|gb|EAT79425.2| SNOG_13098 [Phaeosphaeria nodorum SN15]
  misc_feature (50)..(504): NCBI GI: 67903568 Blast Desc: AN8771.2 [Aspergillus nidulans FGSC A4] gi|40741374|gb|EAA60564.1| AN8771.2 [Aspergillus nidulans FGSC A4]
  misc_feature (50)..(504): NCBI GI: 259483025 Blast Desc: TPA: conserved [Aspergillus nidulans FGSC A4]
  misc_feature (1)..(500): NCBI GI: 256728785 Blast Desc: NECHADRAFT_72599 [Nectria haematococca mpVI 77-13-4]
  misc_feature (35)..(504): NCBI GI: 46110451 Blast Desc: FG02107.1 [Gibberella zeae PH-1]
  misc_feature (35)..(501): NCBI GI: 229864051 Blast Desc: hydrolase or acyltransferase of alpha/beta superfamily [Stackebrandtia nassauensis DSM 44728] gi|229749367|gb|EEP07161.1| hydrolase or acyltransferase of DSM
  misc_feature (35)..(500): NCBI GI: 254383850 Blast Desc: TAP domain containing protein [Streptomyces sp. Mg1] gi|194342742|gb|EDX23708.1| TAP domain containing protein [Streptomyces sp. Mg1]
  misc_feature (35)..(499): NCBI GI: 260645096 Blast Desc: ase ( secreted protein) [Streptomyces scabiei 87.22]
  misc_feature (55)..(499): NCBI GI: 256673166 Blast Desc: proteinase (secreted protein) [Streptomyces sp. AA4]
  misc_feature (1)..(503): NCBI GI: 256379929 Blast Desc: TAP domain protein [Actinosynnema mirum DSM 43827] gi|255924232|gb|ACU39743.1| TAP domain protein [Actinosynnema mirum DSM 43827]
MAPSIRVVFLAAALYASQLSTAIPTSQFTTKQKAVSWGSCVEKFPESNFAANLTCGTLDVPLNWEHPMNNRSISLGLVRLEATDKTKRIGSLFINPGGPGGSATESINSLIAGNPTYLDPEITTSFDIIGLDPRGVGFSTPLKCDPAVFNTRVKMFPRSQNEFDALVNHNKELGASCLAKSGELVEHLDTISAARDHEAVRVALGDEKITLLGFSYGSQLFSQYAALYPQSIRAAAIDGNLQHSQSEASNLLIESTTYETALKHFFDWCDNTDDCPLRGKDVQDVFTSIRDQAAKCPIPAPGCHDVDCRADLNDEDLLFGVQSFLLLQVAWPILGQGLLEASRGNATILSKVNQLAVGDVVADSTAYASYGIGCQDWTHDAKSLADVIQRQIIGETISPLTRGASQTYRYQVGCLGWPAPVANPPASVNYKGPVPILQVQSVFDPSDNYAWAVGLEAELGNHTVLLTRNGSGHTSYFLNGEATRIMNGYLLNLTLPAPGTIVAT

SEQ ID NO: 30223 - DNA, 420 bp, Muscodor strobelii
  misc_feature: SGI cDNA ID NO. 570391
  misc_feature: Encodes the peptide sequence at SEQ ID NO 30224
atgtcttcgcagcaacccagcaacgcgactggatctgccggcgccgccccttccgccgctgatctcgccagcaaccgtcagaatcacggtggcggtcgctgtttggtgtgtgagaaagaggtgaagaacctaaaccagcatcacaaggagatccacattggcaatatctgccagtggccggtgaccaaacgcgaggatggcagcgtgatcaagtgcggcgatctcagccatgtgacatacgacacggacaaggagatgtggaatcatctccaaaacaaccacggcgccgtcacttacaatacctctaacggtcgcttctattgccgttggcctggaatcgacaactggtttgacaatgagcgcagcgctcggcgccttgtacgcttcgcccaacacgactcgttctacgccaataactga

SEQ ID NO: 30224 - protein, 139 aa, Muscodor strobelii
  misc_feature: SGI Peptide ID NO. 570391
MSSQQPSNATGSAGAAPSAADLASNRQNHGGGRCLVCEKEVKNLNQHHKEIHIGNICQWPVTKREDGSVIKCGDLSHVTYDTDKEMWNHLQNNHGAVTYNTSNGRFYCRWPGIDNWFDNERSARRLVRFAQHDSFYANN

SEQ ID NO: 30225 - DNA, 537 bp, Muscodor strobelii
  misc_feature: SGI cDNA ID NO. 570392
  misc_feature: Encodes the peptide sequence at SEQ ID NO 30226
atgtctgctcgccaacccaacgactcaggggtacctggcagcgccttgaggcctgcctcactccccgatcctctcaacgctccccggttcggtaacaccatcgtcagcaatagctacatcaagggcccaggcagatgctcaatctgcagcctcaaagtcaacaagctcaacgagcaccatcgggcgactcacattggcaatgtttgccaatggccgactggccacgacgcccaccacaacccaaccacttgcgatcaccgcaacgattccgaaaaggaaatgtggaagcacttcttggaccggcataatgctatcgagcaaggtgccgatggcctttggtcttgcaactggcctgctcacgagcgggactttaagatgaagcatagcgccgagcgtctcgtgcgattcatccagcacgacaacttccacaaagctctgtcagtagaacgtcgagccgacgctgcttttgctgccactaccgctgccgatgctgctgccgctgctgcttcaggtgccggtgcctctgggagcaactaa

SEQ ID NO: 30226 - protein, 178 aa, Muscodor strobelii
  misc_feature: SGI Peptide ID NO. 570392
MSARQPNDSGVPGSALRPASLPDPLNAPRFGNTIVSNSYIKGPGRCSICSLKVNKLNEHHRATHIGNVCQWPTGHDAHHNPTTCDHRNDSEKEMWKHFLDRHNAIEQGADGLWSCNWPAHERDFKMKHSAERLVRFIQHDNFHKALSVERRADAAFAATTAADAAAAAASGAGASGSN

SEQ ID NO: 30227 - DNA, 1371 bp, Muscodor strobelii
  misc_feature: SGI cDNA ID NO. 570393
  misc_feature: Encodes the peptide sequence at SEQ ID NO 30228
atgtcgcgtccggagatattaatcgtgggctgtggcatagcgggcccagcccttgcctcattcctcctcctggctgatcttccggctgcacagaaaccacatatcacaatcttggaacgatcatcaactaaaaaagctcacctcaggggccaaaatatcgacatcagaggcgctggagtaacgcttatccgtaagcttgggatcgaaaaagcgatccgcaattctctcacaggcgaagccggcgtgcaactcgttgatgagaagaacagggtatggtcgcaatctcgtgctgatactggcggtaaaatgcagggtccaacgagcgatctcgagattctgagagggagattggcggagatatgctggaaagggagtcaagccgttagtgcccgtgcagaaaaagagggcaccaagggaattgagtacgtcttcggtgatcgactggaagagatctggcaggataaagataaagtccaagtcaaattcttcaacagcggagagacaaaatcctacgatattctcatcggcgccgatggactccagagcgcaacacgcaaactagtttggggtgaagcgggcgagagcgagagaatcaagcgtctggaccagtatgggggattctttagcataccacgagctgaaacggattctgagtggcggcgttggtttcatacttctggccggagaggaatcatgattagacctgacggtaccgggaaacgaagcacgatcttcatggcagttgtgaacgacacggatccaagatttgctgaagtcgcgaagctgggcagtaagggtattgaggagcagaagaagctcctggaagagtattttactggggcgggatgggagtgcgagaggattatccgtgagatgaagaggacggatgacttttactacgacatgattgcacaggtgaagatggattcttggagtaagggaagagttgtgcttcttggtgacgctggatattgcgcatcgccaatctcaggcttaggcacaacgctggcgttttcatccgcttacacactagctggagagcttagtaaatgcttcaaagccgggtcgcttgatccttcgccggcttttgcagaatataatgcgaaagtgagaccggtcgttgatcaggctcaaaagctcgcccctggcatgcccaggctcatcaatcccgagacggcatggggggttcaatttatgcacacactggtctatttgctgtcttacacgaggatcttcatcctcatcgtcctattctttgggaagattatgaagcgaggacctgggatggcggactatgtcgctgtcgaagactacgggattcatgatacgccggatctgcatatcgagaaacatgatacgaattcgtcatga

SEQ ID NO: 30228 - protein, 456 aa, Muscodor strobelii
  misc_feature: SGI Peptide ID NO. 570393
  misc_feature (3)..(381): Pfam Id: PF01494 Pfam Desc: FAD binding domain
  misc_feature (5)..(440): NCBI GI: 169620960 Blast Desc: SNOG_13684 [Phaeosphaeria nodorum SN15] gi|111058011|gb|EAT79131.1| SNOG_13684 [Phaeosphaeria nodorum SN15]
  misc_feature (1)..(407): NCBI GI: 162457246 Blast Desc: oxidoreductase [Sorangium cellulosum 'So ce 56'] gi|161167828|emb|CAN99133.1| oxidoreductase [Sorangium cellulosum 'So ce 56']
  misc_feature (6)..(403): NCBI GI: 271965381 Blast Desc: oxidoreductase [Streptosporangium roseum DSM 43021] gi|270508556|gb|ACZ86834.1| oxidoreductase [Streptosporangium roseum DSM 43021]
  misc_feature (5)..(407): NCBI GI: 189194041 Blast Desc: flavoprotein monooxygenase [Pyrenophora tritici-repentis Pt-1C-BFP] gi|187978923|gb|EDU45549.1| flavoprotein monooxygenase [Pyrenophora tritici-repentis
  misc_feature (4)..(411): NCBI GI: 154315431 Blast Desc: BC1G_04288 [Botryotinia fuckeliana B05.10] gi|150847228|gb|EDN22421.1| BC1G_04288 [Botryotinia fuckeliana B05.10]
  misc_feature (6)..(405): NCBI GI: 269794421 Blast Desc: 2-polyprenyl-6-methoxyphenol hydroxylase-like oxidoreductase [Sanguibacter keddieii DSM 10542] gi|269096606|gb|ACZ21042.1| 2-polyprenyl-6-methoxyphenol keddieii
  misc_feature (1)..(418): NCBI GI: 256735574 Blast Desc: NECHADRAFT_103269 [Nectria haematococca mpVI 77-13-4]
  misc_feature (1)..(392): NCBI GI: 148273844 Blast Desc: monooxygenase [Clavibacter michiganensis subsp. michiganensis NCPPB 382] gi|147831774|emb|CAN02743.1| monooxygenase [Clavibacter michiganensis subsp. michiganensis
  misc_feature (6)..(407): NCBI GI: 71735249 Blast Desc: pyridine nucleotide-disulfide oxidoreductase [Pseudomonas syringae pv. phaseolicola 1448A] gi|71555802|gb|AAZ35013.1| pyridine nucleotide-disulfide syringae
  misc_feature (6)..(407): NCBI GI: 170745183 Blast Desc: monooxygenase FAD-binding [Methylobacterium radiotolerans JCM 2831] gi|170658784|gb|ACB27838.1| monooxygenase FAD-binding [Methylobacterium radiotolerans JCM 2831]
  misc_feature (8)..(381): SWISSPROT Homolog: EC 1.14.13.9 Kynurenine 3-monooxygenase
MSRPEILIVGCGIAGPALASFLLLADLPAAQKPHITILERSSTKKAHLRGQNIDIRGAGVTLIRKLGIEKAIRNSLTGEAGVQLVDEKNRVWSQSRADTGGKMQGPTSDLEILRGRLAEICWKGSQAVSARAEKEGTKGIEYVFGDRLEEIWQDKDKVQVKFFNSGETKSYDILIGADGLQSATRKLVWGEAGESERIKRLDQYGGFFSIPRAETDSEWRRWFHTSGRRGIMIRPDGTGKRSTIFMAVVNDTDPRFAEVAKLGSKGIEEQKKLLEEYFTGAGWECERIIREMKRTDDFYYDMIAQVKMDSWSKGRVVLLGDAGYCASPISGLGTTLAFSSAYTLAGELSKCFKAGSLDPSPAFAEYNAKVRPVVDQAQKLAPGMPRLINPETAWGVQFMHTLVYLLSYTRIFILIVLFFGKIMKRGPGMADYVAVEDYGIHDTPDLHIEKHDTNSS

SEQ ID NO: 30229 - DNA, 744 bp, Muscodor strobelii
  misc_feature: SGI cDNA ID NO. 570394
  misc_feature: Encodes the peptide sequence at SEQ ID NO 30230
atggcttctaagttttacgcagttatcatcggcgctggaggcggtacaggcggctctgttgcggccaagttcgcgaagacctacccggtagtcctcctggcccgaacgccagcgacctatgagagtagtgtgaaggcgatcaatgacgctggtggaaaggcaattggcatcaatgccgatgccacagacgttaactctctgaagaacgcatttgagactattgccaaggagttgccagattataagctcgcagcagctatctacaacgcttctgctggcttgaaacctaccccgtttgttgagatcgatccctctgctcttgatgcaagcatcgatgtgaatatccgagggttcttcaactttgctcaaaaagctctcccactcttagaggatgccgtcagcacgtcgcctcatcctccatctctcatcgtaacaggtgccacagcttccgtgaagggatccgcaagattcgcgactttcgctgctggaaaatgggcgaagcgagctattactcagtcaattgctcgtgaatacggacctaaaggtgtccacgtagcccacgccgtaatcgacggtgttatcacgggacctcgaacagaggcatatactggtgtgaatggaggagctccagacggaaagatcagtgcagattcgattgccgagacgtattggagcttacacacacagcatcgttctgggtttacctgggaggttgacatccgaccatatgtcgagaaatggtag

SEQ ID NO: 30230 - protein, 247 aa, Muscodor strobelii
  misc_feature: SGI Peptide ID NO. 570394
  misc_feature (5)..(179): Pfam Id: PF00106 Pfam Desc: short chain dehydrogenase
  misc_feature (7)..(179): Pfam Id: PF00106 Pfam Desc: short chain dehydrogenase
  misc_feature (1)..(247): NCBI GI: 261356705 Blast Desc: short chain dehydrogenase [Verticillium albo-atrum VaMs.102]
  misc_feature (3)..(247): NCBI GI: 171689482 Blast Desc: protein product [Podospora anserina] gi|170944703|emb|CAP70814.1| protein product [Podospora anserina]
  misc_feature (1)..(247): NCBI GI: 46110657 Blast Desc: FG02210.1 [Gibberella zeae PH-1]
  misc_feature (1)..(247): NCBI GI: 256724855 Blast Desc: NECHADRAFT_34599 [Nectria haematococca mpVI 77-13-4]
  misc_feature (2)..(247): NCBI GI: 154313996 Blast Desc: short chain dehydrogenase [Botryotinia fuckeliana B05.10] gi|150849087|gb|EDN24280.1| short chain dehydrogenase [Botryotinia fuckeliana B05.10]
  misc_feature (1)..(247): NCBI GI: 39978249 Blast Desc: MGG_07009 [Magnaporthe grisea 70-15] gi|145013408|gb|EDJ98049.1| MGG_07009 [Magnaporthe grisea 70-15]
  misc_feature (2)..(247): NCBI GI: 156060733 Blast Desc: SS1G_02509 [Sclerotinia sclerotiorum 1980] gi|154699913|gb|EDN99651.1| SS1G_02509 [Sclerotinia sclerotiorum 1980]
  misc_feature (1)..(247): NCBI GI: 116199461 Blast Desc: CHGG_07886 [Chaetomium globosum CBS 148.51] gi|88179165|gb|EAQ86633.1| CHGG_07886 [Chaetomium globosum CBS 148.51]
  misc_feature (1)..(247): NCBI GI: 70997005 Blast Desc: oxidoreductase, short chain dehydrogenase/reductase family [Aspergillus fumigatus Af293] gi|66850893|gb|EAL91219.1| oxidoreductase, short chain dehydrogenase/reductase family Af293]
  misc_feature (1)..(247): NCBI GI: 169623508 Blast Desc: SNOG_14996 [Phaeosphaeria nodorum SN15] gi|111056419|gb|EAT77539.1| SNOG_14996 [Phaeosphaeria nodorum SN15]
  misc_feature (28)..(185): SWISSPROT Homolog: EC 1.1.1.5 Acetoin dehydrogenase
MASKFYAVIIGAGGGTGGSVAAKFAKTYPVVLLARTPATYESSVKAINDAGGKAIGINADATDVNSLKNAFETIAKELPDYKLAAAIYNASAGLKPTPFVEIDPSALDASIDVNIRGFFNFAQKALPLLEDAVSTSPHPPSLIVTGATASVKGSARFATFAAGKWAKRAITQSIAREYGPKGVHVAHAVIDGVITGPRTEAYTGVNGGAPDGKISADSIAETYWSLHTQHRSGFTWEVDIRPYVEKW

SEQ ID NO: 30231 - DNA, 1268 bp, Muscodor strobelii
  misc_feature: SGI EST ID NO. CUFF.71607.1
  misc_feature: Variant of the nucleotide sequence at SEQ ID NO 30229
attaatcccctatgcctttggaatctcgatgacccgaaccgccgaatccgacctataaggctttgtttaaagttaatcgcaatattctatgcgtcgtacatcatcactgccttaaacttaggtatcaaatatttaaacatcgtactctcgccgcgatttggacgcttggtgcctcgccccatccaacttgttctagtctcactgttatatctcacccacaaatccgatatcatttcttcgcaacatcatggcttctaagttttacgcagttatcatcggcgctggaggcggtacaggcggctctgttgcggccaagttcgcgaagacctacccggtagtcctcctggcccgaacgccagcgacctatgagagtagtgtgaaggcgatcaatgacgctggtggaaaggcaattggcatcaatgccgatgccacagacgttaactctctgaagaacgcatttgagactattgccaaggagttgccagattataagctcgcagcagctatctacaacgcttctgctggcttgaaacctaccccgtttgttgagatcgatccctctgctcttgatgcaagcatcgatgtgaatatccgagggttcttcaactttgctcaaaaagctctcccactcttagaggatgccgtcagcacgtcgcctcatcctccatctctcatcgtaacaggtgccacagcttccgtgaagggatccgcaagattcgcgactttcgctgctggaaaatgggcgaagcgagctattactcagtcaattgctcgtgaatacggacctaaaggtgtccacgtagcccacgccgtaatcgacggtgttatcacgggacctcgaacagaggcatatactggtgtgaatggaggagctccagacggaaagatcagtgcagattcgattgccgagacgtattggagcttacacacacagcatcgttctgggtttacctgggaggttgacatccgaccatatgtcgagaaatggtagtagagcaggtgattattcacttgacttcccatcgcttgatattcgatatgtaatgacagacgtgacacctcagtactatcttaaattgaaactgtataaatatccctcttatccacacattgcacgagatgaacgacacgcaggcctggacaaaagatagagatgctgttccaggtgatggtggtagaggagaccggatccacttaacaacctgactcctcgtagtaggcaattgaaccgcatagtatatgagatcaataatatgaaagacaacgac

SEQ ID NO: 30232 - DNA, 2328 bp, Muscodor strobelii
  misc_feature: SGI cDNA ID NO. 570395
  misc_feature: Encodes the peptide sequence at SEQ ID NO 30233
atggtcgtcaccagtgtgtcgggtctaataactgcctttgctgtgcttcagctgggcagtcaggcaaatggacagtccgtaattacatctgatacattcttctatggccagtcacctccggtgtatccaactccgaacgctacgggaacaggaaactgggcagatgctttctcgaaagcagcagccttcgttgcccaattaacaaccgacgaaaaggtcagccttgttggcggtgccacctccgacaatggctgcgtcggatggatcgccccgatcacacggttgaatttccctggcctatgtctgagcgatgccgggaatgggcccagattgactgattttgtctcgagctggccgtcgggcttatcagttggcgctagctggaaccgcaacttgactcattctagagccgttggaatgggcgacgagtttcgtaagaagggaacgaacgttgccttgggcccagtcatcggaccactaggacgtattgcttccagtgggcgcaattgggaaggcttttcgaatgacccatacctctgtggcgccctcgcgtacgagactgttgacggcatacagtcaacaggtgtaattacttccactaagcactacatcggaaacgagcaggaaacgaatcgtaatccagaggacggtgtcgccgctgtgtctgctaatattgatgatcaaacaatgcatgagctttatctctggccctttcaagatgccgtaaaagctggcacaggaagcattatgtgttcatataatagagtcaataattcatacggctgttccaatagcaaaacccagaatggactgttgaaaacagagctaggcttccagggctttgttgtctccgattggggtgcccagcacgcaggcgtagccactgcccttgccggtctcgatatggttatgccgagggcttccccattttggggatccaacttgaccactgccgttaataatgggtcagtaccgatatctcaacttgacaatatggtaacaagggtcatggctgcatggtatcaaatgggccaagattcgggatacacaacacctggcataggttatcctaaggacgtgacaaaaccgcataccacggttaatgctaggtcaccaagtagcaaagatgtgcttctgcaaggcgctattgagggacatgtgcttgttaagaacgcaaatggtgctctaccactgaagtcaccaaatctgatatctctatacggttactcggcgccatcatacgcgagctttcaaccttcgggtcctggctggggcgggggagatgagcctgcacaatcgccagatgagcactcacaaattgcgccaaatgggacaatgatctctgggggtggctcgggagcgaacatgccagcgtacttatcgtcaccatgggaagcgttgagcagccgagcctacgaagacttcttcgcaatgaattgggattttactagcagtaaccctggtgttgatccatcgactgatgtttgtattgttgccggtaacgcctgggctactgagggggcagaccgagttggacttcacgatgactacactgatgctctcattctcaatgtcgcgtccaagtgtagtaacactattgtagtgtttcacaacgccggtgtgcgcctggttgacgggttcatcgacaatcctaacgtcaccgccgttatttttgcacatgttcctggacaagactcaggtcgtgcattgacgtcaattttgttcggcgatgtcaatccttcaggaaagctaccatactctgtacctgcgaacgagacagattatgctggattacaaaattcaactgaacctgacggcatatacgccaattttccgcagtccgatttcagcgagggtgtgtacatcgactatcgcgcctttgacgctaggaatatcacgcctcgctatgagtttggtttcgggctcagctatacgacattcgactactcagacatcactgtcgcacctaaggccacaaacagctcatcatatcccagtggaccgattctttcaggcggccaccaagatctctgggacgttgttgctaccgtttccgctactgttaccaattcaggatccgcggacggagctgaagttgcgcagctctatgttggtattcccaatggaccagttaagcaactaagaggtttcgagaagcctgttattaatgcaggtcaatcaacgattgtcaatttcgacttgacaagacgtgatttgagtacttgggatgtggtggctcaaaattggcttttgcaaagcggaacctatcagatctatgttggacgtagtagtcgtgatcttcctttgacgtctactctcatgatttaa

SEQ ID NO: 30233 - protein, 775 aa, Muscodor strobelii
  misc_feature: SGI Peptide ID NO. 570395
  misc_feature (89)..(305): Pfam Id: PF00933 Pfam Desc: Glycosyl hydrolase family 3 N terminal domain
  misc_feature (386)..(624): Pfam Id: PF01915 Pfam Desc: Glycosyl hydrolase family 3 C terminal domain
  misc_feature (5)..(775): NCBI GI: 238488403 Blast Desc: beta-glucosidase, [Aspergillus flavus NRRL3357] gi|220697827|gb|EED54167.1| beta-glucosidase, [Aspergillus flavus NRRL3357]
  misc_feature (18)..(775): NCBI GI: 39953092 Blast Desc: MGG_01885 [Magnaporthe grisea 70-15] gi|145020247|gb|EDK04376.1| MGG_01885 [Magnaporthe grisea 70-15]
  misc_feature (5)..(775): NCBI GI: 169762594 Blast Desc: [Aspergillus oryzae RIB40] gi|83770225|dbj|BAE60358.1| protein product [Aspergillus oryzae]
  misc_feature (27)..(775): NCBI GI: 171693827 Blast Desc: protein product [Podospora anserina] gi|170946862|emb|CAP73666.1| protein product [Podospora anserina]
  misc_feature (28)..(775): NCBI GI: 119494233 Blast Desc: glycosyl hydrolase, [Neosartorya fischeri NRRL 181] gi|119412174|gb|EAW22115.1| glycosyl hydrolase, [Neosartorya fischeri NRRL 181]
  misc_feature (28)..(775): NCBI GI: 70996706 Blast Desc: beta-glucosidase [Aspergillus fumigatus Af293] gi|66850743|gb|EAL91070.1| beta-glucosidase, [Aspergillus fumigatus Af293]
  misc_feature (28)..(775): NCBI GI: 145242946 Blast Desc: An11g00200 [Aspergillus niger] gi|134078691|emb|CAK48253.1| protein product [Aspergillus niger]
  misc_feature (28)..(775): NCBI GI: 159131843 Blast Desc: beta-glucosidase, [Aspergillus fumigatus A1163]
  misc_feature (23)..(775): NCBI GI: 256733341 Blast Desc: NECHADRAFT_91612 [Nectria haematococca mpVI 77-13-4]
  misc_feature (7)..(775): NCBI GI: 67900818 Blast Desc: AN7396.2 [Aspergillus nidulans FGSC A4] gi|40742577|gb|EAA61767.1| AN7396.2 [Aspergillus nidulans FGSC A4] gi|259483242|tpe|CBF78465.1| TPA: beta-glucosidase (Eurofung)
  misc_feature (26)..(663): SWISSPROT Homolog: EC 3.2.1.21 Beta-glucosidase
MVVTSVSGLITAFAVLQLGSQANGQSVITSDTFFYGQSPPVYPTPNATGTGNWADAFSKAAAFVAQLTTDEKVSLVGGATSDNGCVGWIAPITRLNFPGLCLSDAGNGPRLTDFVSSWPSGLSVGASWNRNLTHSRAVGMGDEFRKKGTNVALGPVIGPLGRIASSGRNWEGFSNDPYLCGALAYETVDGIQSTGVITSTKHYIGNEQETNRNPEDGVAAVSANIDDQTMHELYLWPFQDAVKAGTGSIMCSYNRVNNSYGCSNSKTQNGLLKTELGFQGFVVSDWGAQHAGVATALAGLDMVMPRASPFWGSNLTTAVNNGSVPISQLDNMVTRVMAAWYQMGQDSGYTTPGIGYPKDVTKPHTTVNARSPSSKDVLLQGAIEGHVLVKNANGALPLKSPNLISLYGYSAPSYASFQPSGPGWGGGDEPAQSPDEHSQIAPNGTMISGGGSGANMPAYLSSPWEALSSRAYEDFFAMNWDFTSSNPGVDPSTDVCIVAGNAWATEGADRVGLHDDYTDALILNVASKCSNTIVVFHNAGVRLVDGFIDNPNVTAVIFAHVPGQDSGRALTSILFGDVNPSGKLPYSVPANETDYAGLQNSTEPDGIYANFPQSDFSEGVYIDYRAFDARNITPRYEFGFGLSYTTFDYSDITVAPKATNSSSYPSGPILSGGHQDLWDVVATVSATVTNSGSADGAEVAQLYVGIPNGPVKQLRGFEKPVINAGQSTIVNFDLTRRDLSTWDVVAQNWLLQSGTYQIYVGRSSRDLPLTSTLMI

SEQ ID NO: 30234 - DNA, 1941 bp, Muscodor strobelii
  misc_feature: SGI EST ID NO. CUFF.71489.0
  misc_feature: Variant of the nucleotide sequence at SEQ ID NO 30232
gttgaaaacagagctaggcttccagggctttgttgtctccgattggggtgcccagcacgcaggcgtagccactgcccttgccggtctcgatatggttatgccgagggcttccccattttggggatccaacttgaccactgccgttaataatgggtcagtaccgatatctcaacttgacaatatggtaacaagggtcatggctgcatggtatcaaatgggccaagattcgggatacacaacacctggcataggttatcctaaggacgtgacaaaaccgcataccacggttaatgctaggtcaccaagtagcaaagatgtgcttctgcaaggcgctattgagggacatgtgcttgttaagaacgcaaatggtgctctaccactgaagtcaccaaatctgatatctctatacggttactcggcgccatcatacgcgagctttcaaccttcgggtcctggctggggcgggggagatgagcctgcacaatcgccagatgagcactcacaaattgcgccaaatgggacaatgatctctgggggtggctcgggagcgaacatgccagcgtacttatcgtcaccatgggaagcgttgagcagccgagcctacgaagacttcttcgcaatgaattgggattttactagcagtaaccctggtgttgatccatcgactgatgtttgtattgttgccggtaacgcctgggctactgagggggcagaccgagttggacttcacgatgactacactgatgctctcattctcaatgtcgcgtccaagtgtagtaacactattgtagtgtttcacaacgccggtgtgcgcctggttgacgggttcatcgacaatcctaacgtcaccgccgttatttttgcacatgttcctggacaagactcaggtcgtgcattgacgtcaattttgttcggcgatgtcaatccttcaggaaagctaccatactctgtacctgcgaacgagacagattatgctggattacaaaattcaactgaacctgacggcatatacgccaattttccgcagtccgatttcagcgagggtgtgtacatcgactatcgcgcctttgacgctaggaatatcacgcctcgctatgagtttggtttcgggctcagctatacgacattcgactactcagacatcactgtcgcacctaaggccacaaacagctcatcatatcccagtggaccgattctttcaggcggccaccaagatctctgggacgttgttgctaccgtttccgctactgttaccaattcaggatccgcggacggagctgaagttgcgcagctctatgttggtattcccaatggaccagttaagcaactaagaggtttcgagaagcctgttattaatgcaggtcaatcaacgattgtcaatttcgacttgacaagacgtgatttgagtacttgggatgtggtggctcaaaattggcttttgcaaagcggaacctatcagatctatgttggacgtagtagtcgtgatcttcctttgacgtctactctcatgatttaatcattgattttgatgctactatattacgcggattgatgttggactgatgggaatgggaaatgagaatggtaataccgaactactattagtcaagctaatacatcgctaaaaatgtcaagtgacctcggcaaactctttttatattactaaacggcaggaatggcaatatgagacttgcgaacgacttatcatcgccaaaatatcattaccgtgaatccttgaccagttgtattttggatagaagtgtgacatttagtaaaaacccgtctctacaagcctgccgacctaccaaccactaaaagtctctgtagatacagctaacgtcgaatgccaagctgcacaacagaaagcaagaaatcccgagctgcattgagaacagagagatcacttatcaatctcgagcatacgaagttgataagagacca

SEQ ID NO: 30235 - DNA, 879 bp, Muscodor strobelii
  misc_feature: SGI cDNA ID NO. 570396
  misc_feature: Elevated expression when VOC is produced
  misc_feature: Encodes the peptide sequence at SEQ ID NO 30236
atggcgcctgtgtacaaagtggcattgattcaactgcatcccaagccgatgcaagcggcccaaaacttcgaaaaagccgaatcgttcatccgaaaagcggctgccaagggtaccaacttggcagtcctcccggagtaccacctgaactcgtgggttccggacgaaccggggttcaaagaaacctgcgcagagtcccccgcgtacttgcagaaatatcaggctttagcgaaagagttgagcatcaatattgtgccaggaacaatccttgagactgtggacgatacaatacagaacattgcctacttcatatcgtcagatggtgaaattgccggaagatatcagaagaaaaacctatggcatccagagcgccaccacctcgtctcgtcggcgcatgagccccacgttgcgttcgacacgccgctgggccgcgtgggcctcctgatctgctgggacatcgcttttccggaggcatttcgcgagctcatcgcggatggagcgaagatcattatcgtgcctacattctggaccatgcgcgacgtgaatgacgaaggcttcgcgctcaatcctgacagcgaagcattgtttcttaacagtaccgtcgtggcccgcacttttgaaaatacatgcgctgtcgtcttttgtaacgctggtgggccgcccgagaatggcgacgatacaacgtttgcaggtctaagtcaagtcggaatgccacatatcgggggcttaggccgtttgggccgcgctgaagacatgtctattgtcgacctcgatacagatgtccttagaattgccgaagacaactacaaagtcagaaaagacatggaaaccgaagggtggcactacgaatacacgcggatcagagatgaggcgaagccatga

SEQ ID NO: 30236 - protein, 292 aa, Muscodor strobelii
  misc_feature: SGI Peptide ID NO. 570396
  misc_feature (6)..(174): Pfam Id: PF00795 Pfam Desc: Carbon-nitrogen hydrolase
  misc_feature (1)..(291): NCBI GI: 189204646 Blast Desc: PTRG_08326 [Pyrenophora tritici-repentis Pt-1C-BFP] gi|187985757|gb|EDU51245.1| PTRG_08326 [Pyrenophora tritici-repentis Pt-1C-BFP]
  misc_feature (1)..(283): NCBI GI: 46126919 Blast Desc: FG07837.1 [Gibberella zeae PH-1]
  misc_feature (2)..(288): NCBI GI: 261359635 Blast Desc: hydrolase [Verticillium albo-atrum VaMs.102]
  misc_feature (1)..(269): NCBI GI: 154293651 Blast Desc: nitrilase [Botryotinia fuckeliana B05.10] gi|150845239|gb|EDN20432.1| nitrilase [Botryotinia fuckeliana B05.10]
  misc_feature (1)..(283): NCBI GI: 256724558 Blast Desc: NECHADRAFT_88256 [Nectria haematococca mpVI 77-13-4]
  misc_feature (22)..(287): NCBI GI: 156047713 Blast Desc: SS1G_09546 [Sclerotinia sclerotiorum 1980] gi|154693941|gb|EDN93679.1| SS1G_09546 [Sclerotinia sclerotiorum 1980]
  misc_feature (1)..(283): NCBI GI: 119499075 Blast Desc: hydrolase, carbon-nitrogen family, [Neosartorya fischeri NRRL 181] gi|119414459|gb|EAW24398.1| hydrolase, carbon-nitrogen family, [Neosartorya fischeri NRRL 181]
  misc_feature (1)..(283): NCBI GI: 121719159 Blast Desc: hydrolase, carbon-nitrogen family, [Aspergillus clavatus NRRL 1] gi|119404504|gb|EAW14880.1| hydrolase, carbon-nitrogen family, [Aspergillus clavatus NRRL 1]
  misc_feature (1)..(283): NCBI GI: 255955529 Blast Desc: Pc21g15050 [Penicillium chrysogenum Wisconsin 54-1255] gi|211590228|emb|CAP96402.1| Pc21g15050 [Penicillium chrysogenum Wisconsin 54-1255]
  misc_feature (21)..(283): NCBI GI: 159125970 Blast Desc: hydrolase, carbon-nitrogen family, [Aspergillus fumigatus A1163]
  misc_feature (5)..(172): SWISSPROT Homolog: EC 3.5.1.3 Omega-amidase
  misc_feature: Useful for introducing or modulating the production of volatile compounds
MAPVYKVALIQLHPKPMQAAQNFEKAESFIRKAAAKGTNLAVLPEYHLNSWVPDEPGFKETCAESPAYLQKYQALAKELSINIVPGTILETVDDTIQNIAYFISSDGEIAGRYQKKNLWHPERHHLVSSAHEPHVAFDTPLGRVGLLICWDIAFPEAFRELIADGAKIIIVPTFWTMRDVNDEGFALNPDSEALFLNSTVVARTFENTCAVVFCNAGGPPENGDDTTFAGLSQVGMPHIGGLGRLGRAEDMSIVDLDTDVLRIAEDNYKVRKDMETEGWHYEYTRIRDEAKP

SEQ ID NO: 30237 - DNA, 1867 bp, Muscodor strobelii
  misc_feature: SGI EST ID NO. CUFF.71542.1
  misc_feature: Variant of the nucleotide sequence at SEQ ID NO 30235
tttcaatacttgaatcacggaaacatatctgaccggagtgagttcaattttttcgacataacacataaggacgagacgagcagcatccctcatagacgtagtccggtcggtattttccgcacaacgctgtgggaatatattgagctgagttgccttgcgacgcaacttgacgaccatcgaagattctctgttctagcatcaactgcttcttcgtgaccaatgctcttgctggaagcagagctgtctatggatcgcggtatctgaaagatgttttggggatttttgctttcgcgctatggagcgggaggtggggtcttaggaagccaacgttcccgtccatctcttaggtacacactgaacgacttcgctcttctgtttcaagcatctgtcttggcaaatttctcagcgcccagggtttttgtaaaatactgcctcatactacctctaatttcgacatggcgcctgtgtacaaagtggcattgattcaactgcatcccaagccgatgcaagcggcccaaaacttcgaaaaagccgaatcgttcatccgaaaagcggctgccaagggtaccaacttggcagtcctcccggagtaccacctgaactcgtgggttccggacgaaccggggttcaaagaaacctgcgcagagtcccccgcgtacttgcagaaatatcaggctttagcgaaagagttgagcatcaatattgtgccaggaacaatccttgagactgtggacgatacaatacagaacattgcctacttcatatcgtcagatggtgaaattgccggaagatatcagaagaaaaacctatggcatccagagcgccaccacctcgtctcgtcggcgcatgagccccacgttgcgttcgacacgccgctgggccgcgtgggcctcctgatctgctgggacatcgcttttccggaggcatttcgcgagctcatcgcggatggagcgaagatcattatcgtgcctacattctggaccatgcgcgacgtgaatgacgaaggcttcgcgctcaatcctgacagcgaagcattgtttcttaacagtaccgtcgtggcccgcacttttgaaaatacatgcgctgtcgtcttttgtaacgctggtgggccgcccgagaatggcgacgatacaacgtttgcaggtctaagtcaagtcggaatgccacatatcgggggcttaggccgtttgggccgcgctgaagacatgtctattgtcgacctcgatacagatgtccttagaattgccgaagacaactacaaagtcagaaaagacatggaaaccgaagggtggcactacgaatacacgcggatcagagatgaggcgaagccatgatggtacatttgacaaaatgcatttgtaaataagcatcccagtagtagggctctgggacatcttataatgcccatctgattgattcgaagctgtgagagacgacgtatatgataatgtcggtcaatcacatggattttacaagaaattgaagccccgaattgaaaacttacatgagtaataatgctaacagtacggcatgttagatcctttctgaagtagataattccgagacaagtataggctactacaatagcaaatctatgtgaagtcgacattatgttgttcggcacgcccagggagagaatatccaacgcaaggaacatagtattcttacaccaacttgcatcttgttctcttggtgaagaccaattcggtgataatgaacgaaggaatgtccgtgacccgagtccagatttgccttccttcgaacaattcataatttctaagttatccttttctattcgcaaagactgctatcttgaacttcagagttggcctctaatacttgctcggtcaagtcaccgagttacccc

SEQ ID NO: 30238 - DNA, 3321 bp, Muscodor strobelii
  misc_feature: SGI cDNA ID NO. 570397
  misc_feature: Elevated expression when VOC is produced
  misc_feature: Encodes the peptide sequence at SEQ ID NO 30239
atgggcgccgccaaagtatggagcgtcttcggcgtggaggaactgaggaattcctctggcacggcccatctaagtggtgtgcgcaagatgcagttgaaacaagcagagagtgctggcgcactcgtcgacctggtcacattacctgagtctcagacgaaacgcgtcgagtacaagaaacagtcgtcaagtctaccttttggtcaagctgtacctctcgcctcgatatctggccctacctatgttactggccagttgctcgtccaacaggtcgcctatgctttatctgataaaatcttcttgtactcccccgagacttttgacttagatgttgccgtgaaaatgtgggcaacaagccaggacaaaaacattcacggcgattccactactgttctgccgcttcagattcgttctggcgctggtgcctttgcgctaggctatatattctccaaggacttcgacctttccaaacgccatgttcctcagacgctccttgcaccatcgctcagcttgcgtcacttgcggtctgctctggatcagctgtctctcttgtatggtgtagctagtcccttcgttggccatatcgcagccgtagactacgcttcggacagcggtctcatcgcagaatatggtagcgccttgcagattgctgaggagctcggcttggctcttgtgtcaagcgattctgcgtacgagtctcaacatatgtccctctttgccactctggtagcgaagattcttcccactttgcatatatacgacggtgttcgcacatcccgtgagacgttgagggtgatcgatgccctcagccagacaggcattgccaatgtgttcaacaagctgtcacaatcgattgatagcctgaacacacgtcttgatagtgctggcaaggtgtacgagcttcttcaagccttcaatggagagcttggaacagattatgagccttttgagtatgtgggccacgactcccccgatacagttttcgttgttttcggcagtgtggaggctcagctcgctaagcaagttgtccgcaaacttgcagctgacggcgcaaaggtcggcgccgttgctgttagaatctaccgtccatttatcgaggaagctttcatcaaagttcttccgtcatccacccaacacgtggctgttcttggccaggttgtcaacgatgcagccgtgtcggacaactctatccagtctgtcctatactcggatgtcttaacctctattgcttttgcatctaaatgggcctcatctcctgctgtgtcagatgtcaaatactcagcagcgcaaattctgaccccatcaactttcgcttccctcctgtcgcagaccacgggcaaatccactgtggacgccaaggtggaattgccacagctcaagtctgttgatcagtacgtctttttggagaccgataactccgctgcacttttggctcctactatcgttggcgatttcctgtctcaagattacaatagcaacatctacgtaggcgagtctcatgataatcttgtgcaaggtggtatagtccgaacagatcttcgatcctcacagaagactatcgacgctccataccccaccgaggaagcagatgtggtggtcgtcggtgacgagagaatcttgaaggaagtggctacttcgcagaacgtaaaaaatagtggaaagctgttagttcgactaccaagcctgaaagatgaagatcttgagaagaggatacctgctgccgtgcgtcaggacatccagaagagggagatttctctttatgtgctcgatactgcactctcgcctgcctttgagggagatgccgatgctgcccgtttgctcattgaacttgccttcctcaaactggctaaaccagacacaaagcctgagtcgctcaaaaagctggctgaaaaggatggaaacatcacgattgtcgaagaatgcgttgatgctcttacacagtgcctcaagcagattgaaaccccagaatcatgggcgatagccgagaatgaatccgcgttgactatcatcaagagtctgaagacaaacagcttcatcccatttggaaaggaagagacggaagcagatttgcagctcgatgactggcaagccgctgcaaaaggcctggtatttaaagaagcctacaataccaatatcagtctgcgacctgaccagacggttaagacttacactattcacgtgaaggagaaccgcaggttgactcccactacatatgatcgcaatatcttccatattgagttcgaccttggcaattcaggcctgacttacaagattggagaagctctaggcattcacgccgaaaacgacccggaaatggtcaatgagttcatccaatcatacggcctcgacgccgatgccttagtgcaagtcccgtctagagatagccaaggtgttgccgaaactcgaactgtctatcagaccttgacccaaaacattgacatcttcggaaagcccccgaagcgattctacgagagcttggccgagtatgccacggatgatcttgagaagaagaaacttgccgctctcggtgctcaggagggcgccgacgaattcaaacgtcgctcagaagaggatacagttacatatgccgatatcttggaagagttcaagtcggctcgtctcagctttcccgatcttgctcgcatcattggacctttgaagcgccgtgaatattccattgcttcagctcaagccgtcacgcctaacgctgtcgccctcatgatagttgtcgttgattgggtcgatacaaagggcaggactcgctatggacaagctacacgctacttgagccgccttcctgttggcactgccatcaccgcgtctgtgaaaccgtcggtcatgaagctgcctgtccgcgacgatgcacctcttattatggcaggtttgggtactggtcttgctcccttccgcgccttcgttcagtaccgagctatgcagaaggcgcagggcaaggaaattggtgccattttgctgtatcttggttcacgccaccaacgcgaagaatatctttacggcgaggaatgggaagcttatctggatgcaggcgtcatcacgcttctcggagctgctttctcacgtgatcaaccgcagaagatctacatccaagaccgcatgcgacagactatcaacgacattgtcaaggcctacatcaagcaggaaggatccttctatctttgtggccccacatggcctgtgcctgatgtcactgacgttctcaaagaagctatcgctcatgaggctaagatgacgagccgtaaggtcgatcctaccaaggagatcgaccgcctcaaggaagatgggcgatacgtacttgaagtctactaa

SEQ ID NO: 30239 - protein, 1106 aa, Muscodor strobelii
  misc_feature: SGI Peptide ID NO. 570397
  misc_feature (714)..(927): Pfam Id: PF00667 Pfam Desc: FAD binding domain
  misc_feature (957)..(1069): Pfam Id: PF00175 Pfam Desc: Oxidoreductase NAD-binding domain
  misc_feature (474)..(649): Pfam Id: PF01558 Pfam Desc: Pyruvate ferredoxin/flavodoxin oxidoreductase
  misc_feature (957)..(1060): Pfam Id: PF00175 Pfam Desc: Oxidoreductase NAD-binding domain
  misc_feature (30)..(1106): NCBI GI: 39973849 Blast Desc: MGG_00929 [Magnaporthe grisea 70-15] gi|145018117|gb|EDK02396.1| MGG_00929 [Magnaporthe grisea 70-15]
  misc_feature (30)..(1106): NCBI GI: 171682526 Blast Desc: protein product [Podospora anserina] gi|170941222|emb|CAP66872.1| protein product [Podospora anserina]
  misc_feature (48)..(1106): NCBI GI: 256733468 Blast Desc: [Nectria haematococca mpVI 77-13-4]
  misc_feature (72)..(1106): NCBI GI: 85086379 Blast Desc: NCU04077 [Neurospora crassa OR74A] gi|28918786|gb|EAA28456.1| NCU04077 [Neurospora crassa OR74A]
  misc_feature (48)..(1106): NCBI GI: 46128171 Blast Desc: FG08463.1 [Gibberella zeae PH-1]
  misc_feature (58)..(1106): NCBI GI: 261359385 Blast Desc: sulfite reductase flavoprotein component [Verticillium albo-atrum VaMs.102]
  misc_feature (49)..(1106): NCBI GI: 156046815 Blast Desc: SS1G_09491 [Sclerotinia sclerotiorum 1980] gi|154693886|gb|EDN93624.1| SS1G_09491 [Sclerotinia sclerotiorum 1980]
  misc_feature (49)..(1106): NCBI GI: 154313964 Blast Desc: BC1G_04925 [Botryotinia fuckeliana B05.10] gi|150849071|gb|EDN24264.1| BC1G_04925 [Botryotinia fuckeliana B05.10]
  misc_feature (13)..(1106): NCBI GI: 116202741 Blast Desc: CHGG_09255 [Chaetomium globosum CBS 148.51] gi|88177773|gb|EAQ85241.1| CHGG_09255 [Chaetomium globosum CBS 148.51]
  misc_feature (72)..(1106): NCBI GI: 238501668 Blast Desc: assimilatory sulfite reductase [Aspergillus flavus NRRL3357] gi|220692305|gb|EED48652.1| assimilatory sulfite reductase [Aspergillus flavus NRRL3357]
  misc_feature (65)..(1106): SWISSPROT Homolog: EC 1.8.1.2 Sulfite reductase (NADPH)
  misc_feature: Useful for introducing or modulating the production of volatile compounds
MGAAKVWSVFGVEELRNSSGTAHLSGVRKMQLKQAESAGALVDLVTLPESQTKRVEYKKQSSSLPFGQAVPLASISGPTYVTGQLLVQQVAYALSDKIFLYSPETFDLDVAVKMWATSQDKNIHGDSTTVLPLQIRSGAGAFALGYIFSKDFDLSKRHVPQTLLAPSLSLRHLRSALDQLSLLYGVASPFVGHIAAVDYASDSGLIAEYGSALQIAEELGLALVSSDSAYESQHMSLFATLVAKILPTLHIYDGVRTSRETLRVIDALSQTGIANVFNKLSQSIDSLNTRLDSAGKVYELLQAFNGELGTDYEPFEYVGHDSPDTVFVVFGSVEAQLAKQVVRKLAADGAKVGAVAVRIYRPFIEEAFIKVLPSSTQHVAVLGQVVNDAAVSDNSIQSVLYSDVLTSIAFASKWASSPAVSDVKYSAAQILTPSTFASLLSQTTGKSTVDAKVELPQLKSVDQYVFLETDNSAALLAPTIVGDFLSQDYNSNIYVGESHDNLVQGGIVRTDLRSSQKTIDAPYPTEEADVVVVGDERILKEVATSQNVKNSGKLLVRLPSLKDEDLEKRIPAAVRQDIQKREISLYVLDTALSPAFEGDADAARLLIELAFLKLAKPDTKPESLKKLAEKDGNITIVEECVDALTQCLKQIETPESWAIAENESALTIIKSLKTNSFIPFGKEETEADLQLDDWQAAAKGLVFKEAYNTNISLRPDQTVKTYTIHVKENRRLTPTTYDRNIFHIEFDLGNSGLTYKIGEALGIHAENDPEMVNEFIQSYGLDADALVQVPSRDSQGVAETRTVYQTLTQNIDIFGKPPKRFYESLAEYATDDLEKKKLAALGAQEGADEFKRRSEEDTVTYADILEEFKSARLSFPDLARIIGPLKRREYSIASAQAVTPNAVALMIVVVDWVDTKGRTRYGQATRYLSRLPVGTAITASVKPSVMKLPVRDDAPLIMAGLGTGLAPFRAFVQYRAMQKAQGKEIGAILLYLGSRHQREEYLYGEEWEAYLDAGVITLLGAAFSRDQPQKIYIQDRMRQTINDIVKAYIKQEGSFYLCGPTWPVPDVTDVLKEAIAHEAKMTSRKVDPTKEIDRLKEDGRYVLEVY

SEQ ID NO: 30240 - DNA, 1236 bp, Muscodor strobelii
  misc_feature: SGI cDNA ID NO. 570398
  misc_feature: Encodes the peptide sequence at SEQ ID NO 30241
atgaagctctttcaagcctcgtccatcctccttcttgccagctgcgcagagagctcagccattgaacgccgacaaagtggcggtggcggattcggaggtgggcaacccattgacgggaatgggaaaggcgctcccatacttggcggcacaaatcatcaacttgacctccagaatcccgacaatctcggacagcagagtaccgacaacggcgtcgtgccaaatctcaagtggagcttttctgactccagaacacgcattttgaatggcggctgggtacgagaatcagtgatcaccgacttacctagtagccacgacatctcggctgcccagcagcatctgactaagggctcaattcgtgagcttcattggcatcgtgttgcagaatggggttatgtgtatgcgggttccatcttagtctcagccgtcgacgagaatggacaatatcaggttgccaagctcgaagtcggcgacatttggtatttccccaagggcgaagcacatactgtccagggattggaagatcaaaacgagttcctgcttgtattcgacgatgggaacttcgatgccgttggcacaacattcaacatagatgattggataacgcacacaccgaaatcagtactggccaagaacttcgggctacctgagtctgtgttcggcacggtgccctcaccgaacccttacattgtgaatgctacgcttgatccacataatgtcacgggcggcaatggtccattgactggaaatgcttcctacgtatactatgcgaaggatcatccgcttgaggacgttcctggccagggtggtactcttcggattattgataccaccacgtttcccgtagccactacaatcgctgccacggttgttaccttggttccaggaggtctccgagagttacattggcatccaaatgccgaggagtggttgtacttccacaacgggaccgcgagggcaactgtcttcatcggcaacgcagctgctcgtacttttgattttagtgctggcgatactgccgtgtttccagacaatagtggtcactacatcgaaaacacatctgagacagaagacctaatttggatcgagatctataagagcgaccgcgttaaggacatttcgcttacacaatggctcgccttgacgcctgccgacattgtcgcgaatgttcttaagatccccatcgagactgccgagagtctgaagaaagagaagcagatccttgtcaaagggcagtaa

SEQ ID NO: 30241 - protein, 411 aa, Muscodor strobelii
  misc_feature: SGI Peptide ID NO. 570398
  misc_feature (79)..(220): Pfam Id: PF00190 Pfam Desc: Cupin
  misc_feature (255)..(398): Pfam Id: PF00190 Pfam Desc: Cupin
  misc_feature (288)..(364): Pfam Id: PF07883 Pfam Desc: Cupin domain
  misc_feature (109)..(182): Pfam Id: PF07883 Pfam Desc: Cupin domain
  misc_feature (267)..(398): Pfam Id: PF00190 Pfam Desc: Cupin
  misc_feature (1)..(411): NCBI GI: 238507243 Blast Desc: oxalate decarboxylase oxdC, [Aspergillus flavus NRRL3357] gi|220689536|gb|EED45887.1| oxalate decarboxylase oxdC, [Aspergillus flavus NRRL3357]
  misc_feature (1)..(411): NCBI GI: 169786265 Blast Desc: [Aspergillus oryzae RIB40] gi|83776341|dbj|BAE66460.1| protein product [Aspergillus oryzae]
  misc_feature (7)..(410): NCBI GI: 67526211 Blast Desc: AN3563.2 [Aspergillus nidulans FGSC A4] gi|40740581|gb|EAA59771.1| AN3563.2 [Aspergillus nidulans FGSC A4] gi|259481914|tpe|CBF75880.1| TPA: conserved [Aspergillus FGSC
  misc_feature (1)..(411): NCBI GI: 169614710 Blast Desc: SNOG_10502 [Phaeosphaeria nodorum SN15] gi|111060776|gb|EAT81896.1| SNOG_10502 [Phaeosphaeria nodorum SN15]
  misc_feature (29)..(408): NCBI GI: 240107955 Blast Desc: Cupin family protein [Coccidioides posadasii C735 delta SOWgp]
  misc_feature (29)..(408): NCBI GI: 119188119 Blast Desc: CIMG_04107 [Coccidioides immitis RS]
  misc_feature (29)..(408): NCBI GI: 258568230 Blast Desc: conserved [Uncinocarpus reesii 1704] gi|237906305|gb|EEP80706.1| conserved [Uncinocarpus reesii 1704]
  misc_feature (34)..(409): NCBI GI: 238841898 Blast Desc: oxalate decarboxylase oxdD [Microsporum canis CBS 113480]
  misc_feature (31)..(408): NCBI GI: 238840224 Blast Desc: oxalate decarboxylase [Microsporum canis CBS 113480]
  misc_feature (26)..(346): NCBI GI: 116178848 Blast Desc: CHGG_00052 [Chaetomium globosum CBS 148.51] gi|88184349|gb|EAQ91817.1| CHGG_00052 [Chaetomium globosum CBS 148.51]
  misc_feature (43)..(409): SWISSPROT Homolog: EC 4.1.1.2 Oxalate decarboxylase
MKLFQASSILLLASCAESSAIERRQSGGGGFGGGQPIDGNGKGAPILGGTNHQLDLQNPDNLGQQSTDNGVVPNLKWSFSDSRTRILNGGWVRESVITDLPSSHDISAAQQHLTKGSIRELHWHRVAEWGYVYAGSILVSAVDENGQYQVAKLEVGDIWYFPKGEAHTVQGLEDQNEFLLVFDDGNFDAVGTTFNIDDWITHTPKSVLAKNFGLPESVFGTVPSPNPYIVNATLDPHNVTGGNGPLTGNASYVYYAKDHPLEDVPGQGGTLRIIDTTTFPVATTIAATVVTLVPGGLRELHWHPNAEEWLYFHNGTARATVFIGNAAARTFDFSAGDTAVFPDNSGHYIENTSETEDLIWIEIYKSDRVKDISLTQWLALTPADIVANVLKIPIETAESLKKEKQILVKGQ

SEQ ID NO: 30242 - DNA, 2087 bp, Muscodor strobelii
  misc_feature: SGI EST ID NO. CUFF.71518.0
  misc_feature: Variant of the nucleotide sequence at SEQ ID NO 30240
ggacaatatcaggttgccaagctcgaagtcggcgacatttggtatttccccaagggcgaagcacatactgtccagggattggaagatcaaaacgagttcctgcttgtattcgacgatgggaacttcgatgccgttggcacaacattcaacatagatgattggataacgcacacaccgaaatcagtactggccaagaacttcgggctacctgagtctgtgttcggcacggtgccctcaccgaacccttacattgtgaatgctacgcttgatccacataatgtcacgggcggcaatggtccattgactggaaatgcttcctacgtatactatgcgaaggatcatccgcttgaggacgttcctggccagggtggtactcttcggattattgataccaccacgtttcccgtagccactacaatcgctgccacggttgttaccttggttccaggaggtctccgagagttacattggcatccaaatgccgaggagtggttgtacttccacaacgggaccgcgagggcaactgtcttcatcggcaacgcagctgctcgtacttttgattttagtgctggcgatactgccgtgtttccagacaatagtggtcactacatcgaaaacacatctgagacagaagacctaatttggatcgagatctataagagcgaccgcgttaaggacatttcgcttacacaatggctcgccttgacgcctgccgacattgtcgcgaatgttcttaagatccccatcgagactgccgagagtctgaagaaagagaagcagatccttgtcaaagggcagtaatgcacaaaagtgaccgttagaggatctgtcatatacttcatgggagtgccggcgattttaccagtgggattacaattggcctacttggggggcttcttagttttcgagagatcttagcaaagttgacgtatcaataatatctaatgcttatttaacatctcctatcaattggttgcgaagttgacgagtatgaagtagacaccaaaacagtcctctgccaaagaataagaagcgatttgaccaaagcaggatcgggtgatcgcgcttcacaacttatgtccgaactcgaaataggaaaacacgaccgtgaacgccaagcttagccagctcaagtttccaaccttaaaatccaaaagttggcgatgctgttcaatagtcagggtaaccattgtaagccatcaccggctgccctctggtgtacgtgttccatgtgaagaaatccatgaatgctagtatggtctgccctaattgaatgagaaacatagggatgaggttgtattgccatcctctcattattgagagatgatgctcgatctcatggcgactgtcgagtagattgaggcgaagaagagccgagaaccaattctgaggagcccatgagtctctggggtatttcgcgccgttgagagtagatgccaatgccgtatcaatcctctgattttttcgagaatctgtcacatcaaacacgtaacccaaagctccgatcgtcaagagcaaggcggggatgttaagagatagccagaggtagtatagaaactttctgaagccgttaaaccgtcctttaagctgcgcgcggctacgtagccaaagagaaaggataccgccgaggccgatgaccacaaacgccgtgccagctgcaccattactcgtatggccctgattgacgaggagattctcgggaagtctagcaatcgagtgttccgatccgttcgctgaaaatcggtaggtagcttgactaacggttcggtttagccagcctactgtgctactaatgaaagacagttcgatgattgagtcaatcataagtagaccaatgaaggccttcagggctatcgatgttgcagagaacctgcgcggttgccgcatgaacgattccttcatggaggatgccatttcttcgagatactgctagacttacggtatctagtccagacatccgatcaacaccagacttctacgattggcatcatcaaatgttttatacacgtcctgcccttcccatcgctgtccgctcggctgacgccacgttttaccggtggaatgagacgttccaattttaggtttcc

SEQ ID NO: 30243 - DNA, 1848 bp, Muscodor strobelii
  misc_feature: SGI cDNA ID NO. 570399
  misc_feature: Encodes the peptide sequence at SEQ ID NO 30244
atgctttctacaccagcacagtgggatttggactttgaggcagtgtatcgaaaattgatctcagacgtatttggactgggacctagtcagatatccttcatcacagaaattgtagctttagcacagtacatgtgcaaagagaatcccgagttccttgtaggacagggcggagacgcagatcgcgcaacctcactattcatcgatgctggcggacatacatgtagcactctgatcgcgaaaacggtccatcagcctacaagtacacctacattctacgggtgcgatgacccactagctgctcctggtggaagcgaagcgtgggagtactatgtcgcgaagacctgtatcgaactgattgaaatggaaatagagccgtctaggaagttcgcccctgaggatcgccaaaatctcttggatgatttcaatcgcgaaaaagggtggtttttaagaacagataacgccgatactttcacttggcgctttttcaaacgagacggcgaaagagctgaagtgagattgagcctacaggacgtgaaactctgtttccacaaagctcttcaaaaacctatagcactgattagcagaaaaatacaggaggtcgcgaaggactcgcctcattgtcgggtgattgttaccgggggcacatctcgtcatgaactcttccgtactatagtcatgaagctctgcaaacttgctgcgcttaccagcgacccggtgttcgttgcaaccgacgaagactggggagtgcagtactacaatatgcgaattgcccagggcgccgcatttgctgctgctggtccgaaaacgatccaaaatttcctcgagggtgcggttttatgtcttcaaatgcgacagggctgtaaatcatccttaactttcacgggtcaggaatgggattctgccgcgactcgcctacttgcaaatggccactcagaagtggtagaaatctatttgacagggaaagatggattacggcttgtcggcgacccatttgacgcaggacataatgccgtgcctgtcaaacgatgtttcatcgtcctggaccttgggattcccttgctgggccattggcaattcgagttgacgccattagcaccagaaaaatctacgaggcttcggtttacggccagccggcggctgagggtaagaggacgcctgcaggaggtcttcaataggagctgggttttcccgcttcacatcaatagggggaccaacaccctccacataggtgatgaagaccaagacatcaccgagctgagtgcgcagatccagcaggcgcttgcaaactcatataaagagacgtcaacccgaagaagaaagcgaggggacaagacaccgcagccgcagcggccgaacaagaatactgagccaacctcaacctcacatctagcagaaatagatggccaccaacgatttcccgaattaagcaaatcgtacaccatctccacgaggacggctctacatgaggatccgtcaagagaagtcgcaaggttccaagaaattgcgctcaagtctctcaatcaccagagagctcaagcggccttgggttctggcagtccagaccgttcctcgccgctctcatcgctcgcttctcaatcgacatacacaatgcaagagagcagagaccagcagcatatggctcccgtagcacagatgagtccgaatttgcaggactacgctgaaaaaatgcaccaagagtattcgcttgttcaggagactgcgaacagtccatgtcctggcatcaagagggagcgttcagagacgccaccattggacttcacagcccacttgccagaaagacggacacggataccttcacggcggtattatccatttgtcattgaatga

SEQ ID NO: 30244 - protein, 615 aa, Muscodor strobelii
  misc_feature: SGI Peptide ID NO. 570399
  misc_feature (1)..(409): NCBI GI: 85109335 Blast Desc: NCU06263 [Neurospora crassa OR74A] gi|28924507|gb|EAA33631.1| [Neurospora crassa OR74A]
  misc_feature (2)..(243): NCBI GI: 164425796 Blast Desc: NCU04919 [Neurospora crassa OR74A] gi|157071068|gb|EAA30131.2| [Neurospora crassa OR74A]
  misc_feature (2)..(404): NCBI GI: 39959999 Blast Desc: [Magnaporthe grisea 70-15] gi|145014352|gb|EDJ98920.1| [Magnaporthe grisea 70-15]
MLSTPAQWDLDFEAVYRKLISDVFGLGPSQISFITEIVALAQYMCKENPEFLVGQGGDADRATSLFIDAGGHTCSTLIAKTVHQPTSTPTFYGCDDPLAAPGGSEAWEYYVAKTCIELIEMEIEPSRKFAPEDRQNLLDDFNREKGWFLRTDNADTFTWRFFKRDGERAEVRLSLQDVKLCFHKALQKPIALISRKIQEVAKDSPHCRVIVTGGTSRHELFRTIVMKLCKLAALTSDPVFVATDEDWGVQYYNMRIAQGAAFAAAGPKTIQNFLEGAVLCLQMRQGCKSSLTFTGQEWDSAATRLLANGHSEVVEIYLTGKDGLRLVGDPFDAGHNAVPVKRCFIVLDLGIPLLGHWQFELTPLAPEKSTRLRFTASRRLRVRGRLQEVFNRSWVFPLHINRGTNTLHIGDEDQDITELSAQIQQALANSYKETSTRRRKRGDKTPQPQRPNKNTEPTSTSHLAEIDGHQRFPELSKSYTISTRTALHEDPSREVARFQEIALKSLNHQRAQAALGSGSPDRSSPLSSLASQSTYTMQESRDQQHMAPVAQMSPNLQDYAEKMHQEYSLVQETANSPCPGIKRERSETPPLDFTAHLPERRTRIPSRRYYPFVIE

SEQ ID NO: 30245 - DNA, 183 bp, Muscodor strobelii
  misc_feature: SGI EST ID NO. CUFF.71533.0
  misc_feature: Variant of the nucleotide sequence at SEQ ID NO 30243
cttaactttcacgggtcaggaatgggattctgccgcgactcgcctacttgcaaatggccactcagaagtggtagaaatctatttgacagggaaagatggattacggcttgtcggcgacccatttgacgcaggacataatgccgtgcctgtcaaacgatgtttcatcgtcctggaccttgggat

SEQ ID NO: 30246 - DNA, 978 bp, Muscodor strobelii
  misc_feature: SGI cDNA ID NO. 570400
  misc_feature: Encodes the peptide sequence at SEQ ID NO 30247
atgttctccctcaagaaactcgcactcgccgtgctccccatcctcgggacggcactaggctacgccaacccaaagtcatgcacaggaacctgccacaacgcccacgacccatcgatcatccgacgctcttcagatggacaatacttccgcttctcgaccggcggtaagatcgccatccacaaggcgcctgctatcacaggtccctggacataccaaggagccgcgattcccgccgggtcttccatcaatcttgctgggaaccaagatctctgggcaccagacgtccacctagtaggaagcacatactacctctactactccgtctcaaccttcggttcccaatccagcgcaatcggctacgcaacttccacaaccctcgaatacgggtcctggacggaccacggcacaaccggcgtatcctcctcctcgggcaaaccctacaacgccatcgacccaaacctagtcctcgcggggtcaacctactacctaacattcggctccttctggtcagacctctaccaagtgcaaatgtcctccacaccctcgaaacccgcatccggcgtaacctcctaccaagtagcctacgacccggccggttcccactccgtcgaaggggcatacgtcttccagtacgggagctattattaccttttctactcgcacggtcaatgctgtggctacgactccagtcgcccagcttccggggatgaatacaagatcatggtctgtaggtcgacatcccctactagcggatacgtggataagagcggtaaggcctgtactagcggcggcggcaccgttgtcctggctagtcacgataatgtgtatggacccggtggtcagggtgtctatcaggatcctacttatggtcccattctttactaccattatgttgatatcactgttgggtacgctgatggcgacaagttctttggctggaacactatcgacttctccagcggatggccagtggtttaa

SEQ ID NO: 30247 - protein, 325 aa, Muscodor strobelii
  misc_feature: SGI Peptide ID NO. 570400
  misc_feature (27)..(323): Pfam Id: PF04616 Pfam Desc: Glycosyl hydrolases family 43
  misc_feature (69)..(226): Pfam Id: PF04616 Pfam Desc: Glycosyl hydrolases family 43
  misc_feature (1)..(325): NCBI GI: 255946555 Blast Desc: Pc20g15730 [Penicillium chrysogenum Wisconsin 54-1255] gi|211588780|emb|CAP86902.1| Pc20g15730 [Penicillium chrysogenum Wisconsin 54-1255]
  misc_feature (5)..(325): NCBI GI: 145241582 Blast Desc: Pc20g15730 [Penicillium chrysogenum Wisconsin 54-1255] gi|211588780|emb|CAP86902.1| Pc20g15730 [Penicillium chrysogenum Wisconsin 54-1255]
  misc_feature (5)..(325): NCBI GI: 1168269 Blast Desc: ABNA_ASPNG RecName: Full=Arabinan endo-1,5-alpha-L-arabinosidase A; AltName: Full=Endo-1,5-alpha-L-arabinanase A; Short=ABN A; Flags: niger]
  misc_feature (1)..(325): NCBI GI: 11036970 Blast Desc: AF300878_1 endo-alpha-1,5-arabinanase precursor [Aspergillus aculeatus]
  misc_feature (9)..(325): NCBI GI: 119490178 Blast Desc: extracellular endo-1,5-alpha-L-arabinase, [Neosartorya fischeri NRRL 181] gi|119411162|gb|EAW21105.1| extracellular endo-1,5-alpha-L-arabinase, [Neosartorya fischeri NRRL 181]
  misc_feature (16)..(325): NCBI GI: 256724343 Blast Desc: NECHADRAFT_53602 [Nectria haematococca mpVI 77-13-4]
  misc_feature (1)..(325): NCBI GI: 70998885 Blast Desc: extracellular endo-1,5-alpha-L-arabinase [Aspergillus fumigatus Af293] gi|66851801|gb|EAL92126.1| extracellular endo-1,5-alpha-L-arabinase, [Aspergillus fumigatus Af293] A1163]
  misc_feature (4)..(325): NCBI GI: 67524153 Blast Desc: AN2534.2 [Aspergillus nidulans FGSC A4] gi|40745483|gb|EAA64639.1| AN2534.2 [Aspergillus nidulans FGSC A4] gi|259487963|tpe|CBF87045.1| TPA: endoarabinanase (Eurofung)
  misc_feature (14)..(325): NCBI GI: 121706302 Blast Desc: extracellular endo-1,5-alpha-L-arabinase, [Aspergillus clavatus NRRL 1] gi|119399560|gb|EAW09988.1| extracellular endo-1,5-alpha-L-arabinase, [Aspergillus clavatus NRRL 1]
  misc_feature (8)..(325): NCBI GI: 116205714 Blast Desc: CHGG_02150 [Chaetomium globosum CBS 148.51] gi|88182747|gb|EAQ90215.1| CHGG_02150 [Chaetomium globosum CBS 148.51]
  misc_feature (5)..(325): SWISSPROT Homolog: EC 3.2.1.99 Arabinan endo-1,5-alpha-L-arabinosidase
MFSLKKLALAVLPILGTALGYANPKSCTGTCHNAHDPSIIRRSSDGQYFRFSTGGKIAIHKAPAITGPWTYQGAAIPAGSSINLAGNQDLWAPDVHLVGSTYYLYYSVSTFGSQSSAIGYATSTTLEYGSWTDHGTTGVSSSSGKPYNAIDPNLVLAGSTYYLTFGSFWSDLYQVQMSSTPSKPASGVTSYQVAYDPAGSHSVEGAYVFQYGSYYYLFYSHGQCCGYDSSRPASGDEYKIMVCRSTSPTSGYVDKSGKACTSGGGTVVLASHDNVYGPGGQGVYQDPTYGPILYYHYVDITVGYADGDKFFGWNTIDFSSGWPVV

SEQ ID NO: 30248 - DNA, 2931 bp, Muscodor strobelii
  misc_feature: SGI EST ID NO. CUFF.71947.0
  misc_feature: Variant of the nucleotide sequence at SEQ ID NO 30246
gtgcaattgaacactcaaaaatgcttggaagtaatccagagatggtgattccgctcaagtgaacatgaaacaagagctagccccaaaaacatcacaaattgctaataacagaacaaatatagtcagccaaaccctcggaacgaagctccaacaccacgcaaacctcccaccacgggcaaattacgcggatcttttcctccaatcaccacaccaccatcactcaaaacatcaaacttccaaatccagaaaccatttcccatccgcagccaccggcgccgcggtagcatacacaagatattttcccgtgtgccaaaagacatcctcactaaaaggcatcgccattcgccatgtccggccaccatgggaaacgtcgcgttccacgctgtcgatggtttcggtttccagaatagaacagcgtcagtgacagcagtgaaccaaacaccatgttctccctcaagaaactcgcactcgccgtgctccccatcctcgggacggcactaggctacgccaacccaaagtcatgcacaggaacctgccacaacgcccacgacccatcgatcatccgacgctcttcagatggacaatacttccgcttctcgaccggcggtaagatcgccatccacaaggcgcctgctatcacaggtccctggacataccaaggagccgcgattcccgccgggtcttccatcaatcttgctgggaaccaagatctctgggcaccagacgtccacctagtaggaagcacatactacctctactactccgtctcaaccttcggttcccaatccagcgcaatcggctacgcaacttccacaaccctcgaatacgggtcctggacggaccacggcacaaccggcgtatcctcctcctcgggcaaaccctacaacgccatcgacccaaacctagtcctcgcggggtcaacctactacctaacattcggctccttctggtcagacctctaccaagtgcaaatgtcctccacaccctcgaaacccgcatccggcgtaacctcctaccaagtagcctacgacccggccggttcccactccgtcgaaggggcatacgtcttccagtacgggagctattattaccttttctactcgcacggtcaatgctgtggctacgactccagtcgcccagcttccggggatgaatacaagatcatggtctgtaggtcgacatcccctactagcggatacgtggataagagcggtaaggcctgtactagcggcggcggcaccgttgtcctggctagtcacgataatgtgtatggacccggtggtcagggtgtctatcaggatcctacttatggtcccattctttactaccattatgttgatatcactgttgggtacgctgatggcgacaagttctttggctggaacactatcgacttctccagcggatggccagtggtttaaaagctgcaacagcttttatgatggatccatgtatataccaggtgacatatttcgcttcttggatatttattaaataccgagctgaatataacatggctgtcaatctgccttcgatttgcacgatcgaaggttactcgtcgactccatgtaaaaataagaacttacttatgcgatttgtgaagtaaatgctcacctttctcttggagtctaatcttgtttagttaattgtgatatcaatcgcctgtcacaattacacaggtagagaccgaagcaaggcgaacgcatgctaatgatgctagaaggatgtacaatgcaatatttagcttagacaatcttatcgaatggcctggccgcttttcctaattctccctaatacaaggatacctcgtggacacatgagttaagcctttccagcagtgttgaaatcttccagagcctcttgaacacgggccttcatcgtcttttcaccctcacggacccagacacgggggtcgtacttcttcttgttgggcttgccagggccctcagggttgccaacctgggtcttcaggtagtcaatgttcttggtgatgtattcacggtggccgcagaggtaagcccactgcagatcggtgtcgaggttgaccttgcagacaccgtagctgatagccttcttgaactcctccttgctggaaccggaaccaccgtggaagacgaagaagacgggcttggactcggcagtgacgttgagcttcggagcgacgtaatcctggtgcttcccgagaagctcgggccggagcttgacgttgccaggcgaatagacaccgtggacgttgccgaaaccagcagcaatgctgaagtacttggagatcttgctcagggtctcgtggatttgccagatgtcctcgggctgggtatacagcgagttgttatcgacatcctcgttgttgacaccgtcttcctcaccaccggtgataccgacctccatctctaaccagagaccgagaggggcagatcgcttgaggtacttggaggtaatggcaatgttgtcttccaagctctcctcagacaggtcaatcatgtgactggagaacagagaggtgccatttgccttgtggaaagcctcatcggcatccagcatgccatcgagccatggcagcagcttcttggcgcagtggtcggtgtgtagaatgacggggacgccgtagagaggagcaacgttgcgaacgtggtgagcggcagctgcagagagatagcgaacgttagcgattgaaacaaatcaaaaaattatcactagcgtaaagatccggaatcgaggcaacttaccaatggcgccggcgatggaagcctcctgattggtgttgtcaatgccctttccggcaaagaaagcagcaccaccctgagagcactggataatgatgggagacttggcgtcacgagcagcttccaaagtcgcattgacggtggaagacgatgtgacatttacggcgggtatagcaaagttgttctccttggcgtatgacaggagctg

SEQ ID NO: 30249 - DNA, 1083 bp, Muscodor strobelii
  misc_feature: SGI cDNA ID NO. 570401
  misc_feature: Encodes the peptide sequence at SEQ ID NO 30250
atggctacgcaagcgctcggtctgaagcccggtgtcatctatggcgaggatgtctacaagctcctgtcatacgccaaggagaacaactttgctatacccgccgtaaatgtcacatcgtcttccaccgtcaatgcgactttggaagctgctcgtgacgccaagtctcccatcattatccagtgctctcagggtggtgctgctttctttgccggaaagggcattgacaacaccaatcaggaggcttccatcgccggcgccattgctgccgctcaccacgttcgcaacgttgctcctctctacggcgtccccgtcattctacacaccgaccactgcgccaagaagctgctgccatggctcgatggcatgctggatgccgatgaggctttccacaaggcaaatggcacctctctgttctccagtcacatgattgacctgtctgaggagagcttggaagacaacattgccattacctccaagtacctcaagcgatctgcccctctcggtctctggttagagatggaggtcggtatcaccggtggtgaggaagacggtgtcaacaacgaggatgtcgataacaactcgctgtatacccagcccgaggacatctggcaaatccacgagaccctgagcaagatctccaagtacttcagcattgctgctggtttcggcaacgtccacggtgtctattcgcctggcaacgtcaagctccggcccgagcttctcgggaagcaccaggattacgtcgctccgaagctcaacgtcactgccgagtccaagcccgtcttcttcgtcttccacggtggttccggttccagcaaggaggagttcaagaaggctatcagctacggtgtctgcaaggtcaacctcgacaccgatctgcagtgggcttacctctgcggccaccgtgaatacatcaccaagaacattgactacctgaagacccaggttggcaaccctgagggccctggcaagcccaacaagaagaagtacgacccccgtgtctgggtccgtgagggtgaaaagacgatgaaggcccgtgttcaagaggctctggaagatttcaacactgctggaaaggcttaa

SEQ ID NO: 30250 - protein, 360 aa, Muscodor strobelii
  misc_feature: SGI Peptide ID NO. 570401
  misc_feature (14)..(360): Pfam Id: PF01116 Pfam Desc: Fructose-bisphosphate aldolase class-II
  misc_feature (4)..(358): NCBI GI: 261360732 Blast Desc: fructose-bisphosphate aldolase [Verticillium albo-atrum VaMs.102]
  misc_feature (6)..(355): NCBI GI: 145611652 Blast Desc: MGG_00223 [Magnaporthe grisea 70-15] gi|145018909|gb|EDK03188.1| MGG_00223 [Magnaporthe grisea 70-15]
  misc_feature (3)..(359): NCBI GI: 156052787 Blast Desc: SS1G_06561 [Sclerotinia sclerotiorum 1980] gi|154704339|gb|EDO04078.1| SS1G_06561 [Sclerotinia sclerotiorum 1980]
  misc_feature (6)..(358): NCBI GI: 256721971 Blast Desc: fructose-bisphosphate aldolase [Nectria haematococca mpVI 77-13-4]
  misc_feature (3)..(359): NCBI GI: 154314989 Blast Desc: fructose-bisphosphate aldolase [Botryotinia fuckeliana B05.10] gi|150848374|gb|EDN23567.1| fructose-bisphosphate aldolase [Botryotinia fuckeliana B05.10]
  misc_feature (6)..(358): NCBI GI: 85090389 Blast Desc: fructose-bisphosphate aldolase [Neurospora crassa OR74A] gi|164423897|ref|XP_001728093.1| fructose-bisphosphate aldolase, variant [Neurospora crassa OR74A] RecName: aldolase;
  misc_feature (3)..(359): NCBI GI: 258563798 Blast Desc: fructose-bisphosphate aldolase, class II [Uncinocarpus reesii 1704] gi|237908151|gb|EEP82552.1| fructose-bisphosphate aldolase, class II [Uncinocarpus reesii 1704]
  misc_feature (6)..(359): NCBI GI: 111606549 Blast Desc: fructose biphosphate aldolase [Coccidioides posadasii] gi|240108278|gb|EER26452.1| Fructose 1,6-bisphosphate aldolase, [Coccidioides posadasii C735 delta SOWgp]
  misc_feature (6)..(359): NCBI GI: 119187213 Blast Desc: CIMG_03654 [Coccidioides immitis RS]
  misc_feature (4)..(359): NCBI GI: 46111777 Blast Desc: FG02770.1 [Gibberella zeae PH-1]
  misc_feature (6)..(358): SWISSPROT Homolog: EC 4.1.2.13 Fructose-bisphosphate aldolase
MATQALGLKPGVIYGEDVYKLLSYAKENNFAIPAVNVTSSSTVNATLEAARDAKSPIIIQCSQGGAAFFAGKGIDNTNQEASIAGAIAAAHHVRNVAPLYGVPVILHTDHCAKKLLPWLDGMLDADEAFHKANGTSLFSSHMIDLSEESLEDNIAITSKYLKRSAPLGLWLEMEVGITGGEEDGVNNEDVDNNSLYTQPEDIWQIHETLSKISKYFSIAAGFGNVHGVYSPGNVKLRPELLGKHQDYVAPKLNVTAESKPVFFVFHGGSGSSKEEFKKAISYGVCKVNLDTDLQWAYLCGHREYITKNIDYLKTQVGNPEGPGKPNKKKYDPRVWVREGEKTMKARVQEALEDFNTAGKA

SEQ ID NO: 30251 - DNA, 2826 bp, Muscodor strobelii
  misc_feature: SGI EST ID NO. CUFF.71948.1
  misc_feature: Variant of the nucleotide sequence at SEQ ID NO 30249
cacagcgacctagcaacgggccgagattgagggcagatttgtggaagatctggtggtaatttaaagacaacaaacagaattgttctgtcgatgcggtcataggggccaatttttatatgtgctatgtgtgcagcgtggacctgactagcaagaatgcccctcctctgtgccaggaaaaggttctgctgcagcttctgagactgcgcgaacatgcgatattattatgttcatgggttgagagggttgactccggtccaatccgtttttgctccttagtacgttaggttatctcatgctgtgctttgcgcctagaacaggtgaataccacaggccaaccacaaaccataaaccataaatccagatttattcgtgactgctgctttcttccctctctccaatctccatctccgtaaacacctctaccaatcccctcatacccaaacttcacgcatattgctctgaagcaatatctatatcctgaattcttattccctgctgtctcttaaacactgaggctgacaccttttgatatttaccccacctcttcctcatatttcttcacacgacaccatggctacgcaagcgctcggtctgaagcccggtgtcatctatggcgaggatgtctacaagctcctgtcatacgccaaggagaacaactttgctatacccgccgtaaatgtcacatcgtcttccaccgtcaatgcgactttggaagctgctcgtgacgccaagtctcccatcattatccagtgctctcagggtggtgctgctttctttgccggaaagggcattgacaacaccaatcaggaggcttccatcgccggcgccattgctgccgctcaccacgttcgcaacgttgctcctctctacggcgtccccgtcattctacacaccgaccactgcgccaagaagctgctgccatggctcgatggcatgctggatgccgatgaggctttccacaaggcaaatggcacctctctgttctccagtcacatgattgacctgtctgaggagagcttggaagacaacattgccattacctccaagtacctcaagcgatctgcccctctcggtctctggttagagatggaggtcggtatcaccggtggtgaggaagacggtgtcaacaacgaggatgtcgataacaactcgctgtatacccagcccgaggacatctggcaaatccacgagaccctgagcaagatctccaagtacttcagcattgctgctggtttcggcaacgtccacggtgtctattcgcctggcaacgtcaagctccggcccgagcttctcgggaagcaccaggattacgtcgctccgaagctcaacgtcactgccgagtccaagcccgtcttcttcgtcttccacggtggttccggttccagcaaggaggagttcaagaaggctatcagctacggtgtctgcaaggtcaacctcgacaccgatctgcagtgggcttacctctgcggccaccgtgaatacatcaccaagaacattgactacctgaagacccaggttggcaaccctgagggccctggcaagcccaacaagaagaagtacgacccccgtgtctgggtccgtgagggtgaaaagacgatgaaggcccgtgttcaagaggctctggaagatttcaacactgctggaaaggcttaactcatgtgtccacgaggtatccttgtattagggagaattaggaaaagcggccaggccattcgataagattgtctaagctaaatattgcattgtacatccttctagcatcattagcatgcgttcgccttgcttcggtctctacctgtgtaattgtgacaggcgattgatatcacaattaactaaacaagattagactccaagagaaaggtgagcatttacttcacaaatcgcataagtaagttcttatttttacatggagtcgacgagtaaccttcgatcgtgcaaatcgaaggcagattgacagccatgttatattcagctcggtatttaataaatatccaagaagcgaaatatgtcacctggtatatacatggatccatcataaaagctgttgcagcttttaaaccactggccatccgctggagaagtcgatagtgttccagccaaagaacttgtcgccatcagcgtacccaacagtgatatcaacataatggtagtaaagaatctgcagcacacatcattagtcaaaatatccaaaactaaatcaaccagtaaacatagagtacttacgggaccataagtaggatcctgatagacaccctgaccaccgggtccatacacattatcgtgactagccaggacaacggtgccgccgccgctagtacaggccttaccgctcttatccacgtatccgctagtaggggatgtcgacctacagaccatgatcttgtattcatccccggaagctgggcgactggagtcgtagccacagcattgaccgtgcgagtagaaaaggtaataatagctcccgtactggaagacgtatgccccttcgacggagtgggaaccggccgggtcgtaggctacttggtaggaggttacgccggatgcgggtttcgagggtgtggaggacatttgcacttggtagaggtctgaccagaaggagccgaatgttaggtagtaggttgaccccgcgaggactaggtttgggtcgatggcgttgtagggtttgcccgaggaggaggatacgccggttgtgccgtggtccgtccaggacccgtattcgagggttgtggaagttgcgtagccgattgcgctggattgggaaccgaaggttgagacggagtagtagaggtagtatgtgcttcctactaggtggacgtctggtgcctg

SEQ ID NO: 30252 - DNA, 762 bp, Muscodor strobelii
  misc_feature: SGI cDNA ID NO. 570402
  misc_feature: Encodes the peptide sequence at SEQ ID NO 30253
atgacttcgcagtccttgaatggagctacaaaccttgcgcctatagacatcctcgtcacagatacctacgagacaaatcccgaacaactcggtcttccatccggcgctgcagtggtatcggcaaaccgatacataggcttcggccaatccgcaacccaggaagaaatccacgttggcagttcgccggaagtttgtcccgctgttttgatcacgccgccgttggcagagaaccaagttcttgttgtgaaaggcgcggaggcggtactgaatattgtgggacaacggcggtatatcaaagttgtagagcaggatgagagggccacggattggagtcagcgcaccatgctgtccatggatgctctagagattgatatgcaatccgacgaagatggattaccggatctagcgcctcagaatctggaaagagagatatgcaaagttacggctgcgttttcgtcaggggagtatgaggttgtgtattgtccgctttggggctgtggagcattctgcggtgatccgtttgtgaagattttgcttctttggcatgctgcgtcgactgcgaggactccgctcaggattttgtgtgatgagggattgagtggtgttgcgacgcggttgaggagtcttgtggaagctgtacgaggaatttgtgaagatacgcgggacttgatgggggcgattagagaggttccgagggagacgaagagacttgatacttttggggctttgatggaggtgttgagtcggagcgatgaggtgtga

SEQ ID NO: 30253 - protein, 253 aa, Muscodor strobelii
  misc_feature: SGI Peptide ID NO. 570402
  misc_feature (12)..(240): NCBI GI: 171682530 Blast Desc: protein product [Podospora anserina] gi|170941224|emb|CAP66874.1| protein product [Podospora anserina]
  misc_feature (19)..(205): NCBI GI: 119174974 Blast Desc: CIMG_09421 [Coccidioides immitis RS]
  misc_feature (12)..(219): NCBI GI: 46134301 Blast Desc: FG09290.1 [Gibberella zeae PH-1]
  misc_feature (22)..(243): NCBI GI: 261200495 Blast Desc: poly(ADP-ribose) glycohydrolase isoform [Ajellomyces dermatitidis SLH14081] gi|239593720|gb|EEQ76301.1| poly(ADP-ribose) glycohydrolase isoform [Ajellomyces dermatitidis
  misc_feature (11)..(181): NCBI GI: 256727719 Blast Desc: NECHADRAFT_34348 [Nectria haematococca mpVI 77-13-4]
  misc_feature (7)..(190): NCBI GI: 115390941 Blast Desc: [Aspergillus terreus NIH2624] gi|114193899|gb|EAU35599.1| [Aspergillus terreus NIH2624]
  misc_feature (22)..(124): NCBI GI: 239607403 Blast Desc: poly(ADP-ribose) glycohydrolase isoform [Ajellomyces dermatitidis ER-3]
  misc_feature (41)..(252): NCBI GI: 242025480 Blast Desc: polyA glycohydrolase, [Pediculus humanus corporis] gi|212518693|gb|EEB20414.1| polyA glycohydrolase, [Pediculus humanus corporis]
  misc_feature (41)..(187): NCBI GI: 27806491 Blast Desc: poly (ADP-ribose) glycohydrolase [Bos taurus] gi|55584077|sp|O02776.1|PARG_BOVIN RecName: Full=Poly(ADP-ribose) glycohydrolase gi|2062407|gb|AAB53370.1| poly(ADP-ribose) [Bos
  misc_feature (28)..(177): NCBI GI: 284091210 Blast Desc: [Naegleria gruberi]
  misc_feature (41)..(187): SWISSPROT Homolog: EC 3.2.1.143 Poly(ADP-ribose) glycohydrolase
MTSQSLNGATNLAPIDILVTDTYETNPEQLGLPSGAAVVSANRYIGFGQSATQEEIHVGSSPEVCPAVLITPPLAENQVLVVKGAEAVLNIVGQRRYIKVVEQDERATDWSQRTMLSMDALEIDMQSDEDGLPDLAPQNLEREICKVTAAFSSGEYEVVYCPLWGCGAFCGDPFVKILLLWHAASTARTPLRILCDEGLSGVATRLRSLVEAVRGICEDTRDLMGAIREVPRETKRLDTFGALMEVLSRSDEV

SEQ ID NO: 30254 - DNA, 1804 bp, Muscodor strobelii
  misc_feature: SGI EST ID NO. CUFF.71545.0
  misc_feature: Variant of the nucleotide sequence at SEQ ID NO 30252
aaaagcgccaccatgttgatattcgacaatcaaatatcaggacaactctgtcacgatgatttaaaggcagtagttgctgtagtggtacataaaccgaatccaatggcatggcaaatataaataatgaatacattctaccctgctctccagcatttaagtgtttcgatcgcttcagtatacttgatgatagtacatatctcgaagacgacaatgataaggtcgctttttggtctatactagaaacgctactcaaacagcccgtatcaacaccaaatcaactggttgaacttctagacaccattgccgtcacgctccgagatacctctggtcctgcaggtgactacgaactcctcagatcattcatcaccgacctaggtccagaattcttcgactcaacgtggccagacattgtcaaactcgctctcgagctaccagagcactttacaagcggcagcttacctgtactcaatctacccgactcgtatagtaaggcgacatcgacactgagtttacctcgacgagcagcagcatgtctagtcgttcatcaatttctctgtacgctacgcgcaccgggctggagagatgaatgtcacgatttcagtatctggtttgcatctgaacagcgccataaggcagcttgtaggatatacctcaaatgcctgatcacgtacttgaaagctgttctttcctccccgctcaccagatcggactcgtgtatatcgtatactctacgatgtgcagacatgacttcgcagtccttgaatggagctacaaaccttgcgcctatagacatcctcgtcacagatacctacgagacaaatcccgaacaactcggtcttccatccggcgctgcagtggtatcggcaaaccgatacataggcttcggccaatccgcaacccaggaagaaatccacgttggcagttcgccggaagtttgtcccgctgttttgatcacgccgccgttggcagagaaccaagttcttgttgtgaaaggcgcggaggcggtactgaatattgtgggacaacggcggtatatcaaagttgtagagcaggatgagagggccacggattggagtcagcgcaccatgctgtccatggatgctctagagattgatatgcaatccgacgaagatggattaccggatctagcgcctcagaatctggaaagagagatatgcaaagttacggctgcgttttcgtcaggggagtatgaggttgtgtattgtccgctttggggctgtggagcattctgcggtgatccgtttgtgaagattttgcttctttggcatgctgcgtcgactgcgaggactccgctcaggattttgtgtgatgagggattgagtggtgttgcgacgcggttgaggagtcttgtggaagctgtacgaggaatttgtgaagatacgcgggacttgatgggggcgattagagaggttccgagggagacgaagagacttgatacttttggggctttgatggaggtgttgagtcggagcgatgaggtgtgagacatggggaaggtctgtagttaagtgcgtcgagaccttcgatgcgataagtgttacgaagcaacatcggtgatgttgctctggcgatcgatgactgagggaacgccaaccgactgttgtggcgacatcttggtttcccagacactaccccaggaaccgcacgaccttatcaattccaataaaacggtcgcccatcacccgtagtgggttcaatggttcaatggtatgattgaaggcatatttcattactagaatgtatctctgaagtatcctgttcgaatactatagatcgaaaaaat

SEQ ID NO: 30255 - DNA, 1476 bp, Muscodor strobelii
  misc_feature: SGI cDNA ID NO. 570403
  misc_feature: Reduced expression when VOC is produced
  misc_feature: Encodes the peptide sequence at SEQ ID NO 30256
atgtctcgtctcaaaccagcttcgttgaccgagacacacgatcttatttgtgtcggattcgggccggcaagtcttgctatcgctgtcgcactcaatgactcgattgagtcgggaaatttggcgagaagtagcgcgccaaaagtactgtttctcgagaagcaggctcgatttgcctggcatgccggtatgctcttgccaggggcgaaaatgcagatttcttttatcaaggatatggcaacactgagagatccgacttcaaagtttaccttcctcaactatctccatgaaaataaccgactggtcgagttcacaaatttgagcacatttcttcccgccagaacagaatacgaagactatctccgatggtgcgcagaacacttcgacgatgtcgtcaaatatggcagcgaagtcatctcagtgtcaccgcagaaatcgactggtacttataactctgtatcccgcttcactgtcacatatcgtgacgtcaacactggagttcaacttacgagcacagcgaaaaacgtgctagtagctattggcggtcaggcgtcgatacccaagcctctaccatccaaccacccacgagttatccactcttcccagtatgcacacttggtcccaaaaatgctcaatcagcgtgacgccccatatcgtgttgctgtcgttggtgcgggccagagcgcagcagaaatcttcaataacattcaaacattatacccgaactcgcaaacctcacttattatgagatccgagtttttgaaacccagtgatgactcgccatttgtaaactcgatattcaacccatcctatgtggacgaccttttcgaaagaccagcgaaccttcggcattccgtgttggcagatgctcgggctacgaactacggagtcgttcgactagaattaatcgaacacttgtatgagcgcatgtatgaccaacagcgagagctcggcaatgatgagaagaaatggccgcatcgtattctaggatcaacggctatcacaggggtcgatgcccagtcagacaaggtgaagttgacagttgcgcctctcggtgcgggagctggagaagaggttttcgactgtgatctcgttgtcactgccacagggtaccagcggcaggctcatctgaccatgatggaagacgtatatgatctcttgcctgaaacatccacttcgatctccgccttgaccaagtatgatacttgtatcaaaggccgccctgtcaatgtgtctcgtgattacagcgtacagtttgcccctgggaaggtctcctcaggctctggcatctaccttcaagggtgtaatgagggaacacatgggttgagtgatactcttctgtctatcctatccgtacgatccggagagatcgtcaactcgatttttggaaacaaaggcgaacaacacattgagcaacagaaaacgccaagtaggcggatccaacacgttcaagaggatagataccgtgccaggttgtag

SEQ ID NO: 30256 - protein, 491 aa, Muscodor strobelii
  misc_feature: SGI Peptide ID NO. 570403
  misc_feature (11)..(462): NCBI GI: 164424501 Blast Desc: NCU07117 [Neurospora crassa OR74A] gi|157070541|gb|EAA31064.2| NCU07117 [Neurospora crassa OR74A]
  misc_feature (14)..(461): NCBI GI: 256724833 Blast Desc: [Nectria haematococca mpVI 77-13-4]
  misc_feature (4)..(461): NCBI GI: 46121987 Blast Desc: FG05371.1 [Gibberella zeae PH-1]
  misc_feature (4)..(462): NCBI GI: 171682946 Blast Desc: protein product [Podospora anserina] gi|170941432|emb|CAP67083.1| protein product [Podospora anserina]
  misc_feature (48)..(461): NCBI GI: 261361474 Blast Desc: L-ornithine 5-monooxygenase [Verticillium albo-atrum VaMs.102]
  misc_feature (6)..(440): NCBI GI: 145607389 Blast Desc: MGG_04212 [Magnaporthe grisea 70-15] gi|145014956|gb|EDJ99524.1| MGG_04212 [Magnaporthe grisea 70-15]
  misc_feature (2)..(464): NCBI GI: 115386048 Blast Desc: ATEG_06879 [Aspergillus terreus NIH2624] gi|114190563|gb|EAU32263.1| ATEG_06879 [Aspergillus terreus NIH2624]
  misc_feature (3)..(467): NCBI GI: 71000844 Blast Desc: L-ornithine N5-oxygenase SidA [Aspergillus fumigatus Af293] gi|50845194|gb|AAT84594.1| L-ornithine N5 monooxygenase [Aspergillus fumigatus] gi|61229500|gb|AAX40989.1| L-ornithine
  misc_feature (3)..(471): NCBI GI: 119480517 Blast Desc: L-ornithine N5-oxygenase SidA [Neosartorya fischeri NRRL 181] gi|119408441|gb|EAW18390.1| L-ornithine N5-oxygenase SidA [Neosartorya fischeri NRRL 181]
  misc_feature (3)..(466): NCBI GI: 67539306 Blast Desc: AN5823.2 [Aspergillus nidulans FGSC A4] gi|32709393|gb|AAP56238.1| ornithine monooxygenase [Emericella nidulans] gi|40739142|gb|EAA58332.1| AN5823.2 [Aspergillus FGSC ;
  misc_feature (14)..(462): SWISSPROT Homolog: EC 1.14.13.59 L-lysine 6-monooxygenase (NADPH)
  misc_feature: Useful for introducing or modulating the production of volatile compounds
MSRLKPASLTETHDLICVGFGPASLAIAVALNDSIESGNLARSSAPKVLFLEKQARFAWHAGMLLPGAKMQISFIKDMATLRDPTSKFTFLNYLHENNRLVEFTNLSTFLPARTEYEDYLRWCAEHFDDVVKYGSEVISVSPQKSTGTYNSVSRFTVTYRDVNTGVQLTSTAKNVLVAIGGQASIPKPLPSNHPRVIHSSQYAHLVPKMLNQRDAPYRVAVVGAGQSAAEIFNNIQTLYPNSQTSLIMRSEFLKPSDDSPFVNSIFNPSYVDDLFERPANLRHSVLADARATNYGVVRLELIEHLYERMYDQQRELGNDEKKWPHRILGSTAITGVDAQSDKVKLTVAPLGAGAGEEVFDCDLVVTATGYQRQAHLTMMEDVYDLLPETSTSISALTKYDTCIKGRPVNVSRDYSVQFAPGKVSSGSGIYLQGCNEGTHGLSDTLLSILSVRSGEIVNSIFGNKGEQHIEQQKTPSRRIQHVQEDRYRARL

SEQ ID NO: 30257 - DNA, 3674 bp, Muscodor strobelii
  misc_feature: SGI EST ID NO. CUFF.71549.0
  misc_feature: Variant of the nucleotide sequence at SEQ ID NO 30255
gaaataacaaattttttcttgtctggtcctcggcacgtcggtcttcttacctttgcggagactcgaccaatgcccgtgtcaagttagatttcatccgccatgccgtttcgactcgaatctacccagaaccaccaggagcttgcctgcaaggcagctcaaaatacaaataacggcattgacagtttgacacctattgcaaacggccttggctccttttccagacatagttatttaaactcgtgctgtacacagtacaaagtgaagaaattcgacttcttgcaataaataacatggcgaagcaatacacaatggagaagggttcaagagctcttccgttctctcaacttggaagaacaaatcgcttacgctaccgaccacataacagcgtggttggagcagagatttgacacatacgtgcataaactagaacccgagacgcagggtttctcgtgggtcgattaatggtctggcacctctcagagtctgcaactacgtcggactaataacatgaatgaaggatgtcgtggcatcttggtcattgtacgagctgctaagcccttggggcagctgtacctccgaattctttcttttaccaaatcctcggaagcccaaccagctggttgagcagtctttcatcctgctaacagtttcgaaagctaccagagtcggcgtgttccttcaatggaaaaaaaaaaacaaaaaaatattgctagttgacgccagtgcctaacagtcgtggataaacgagatgcgagcgactattctaaaccacttcggacgacgaacgaatccgtgtcacaaattcacaaattgcaagaccaaaatagcgctaagatctaacaacagaggacaaaaaacacgcaatttagcgttacgacatgccgggatgccatcatcgggatggcggcaagcctctcttagcttcatgcagattcatcttatcagatccgaagataatgccgatatcgccatccccccattcttccctatactaacatgtcgacatcaccaccaaagtatctttctctccttgttagtcatagattcctcccttgatgcggtatatccatcagccaatcgtgccctaagcttgctgttcttgtgacccgctctctttctagatctcaatggatgatatcattttcagggtataatggggtaccacatattgtcgcctcgcatagcaagattgttcgtgtaccagcgatgacatagcacaagcatgactgcctgtgttatgggcttcgaaggactcgatgagccccttcacttgtccaagcttctcttagatcctaccggactagatgctcgaaagaggtatttgcgtcaagcgatgagaggagcagtggagattccagtttcgttgagacccctcgaacgaagcatcggccgactaatattatatagcttggcacgcctcgtaccttgtcccccatcggtacgatgaaagaatttctacgacgctaagacggtgtcgacgacatatgggacgagactccttctccactggattgcctcctctagtatgtatgccttacccacgtttggtccctggagatttcccagtttgtcttaggatgcgtcacaagcgttctgggaagcaacgatatactgagacctgattttgtagcttccttgtgggtataagatttgccttcatatgtacagactgtaataagaacccggaaaccccatgcttttgagagaatattgtactttgtccattctacattcttcgtagagccgtagcctgactcttgcctccaatcttccaatcttgccgcaattgaagcattacttctcatcgtcgcaattgataatactcaaacttggcgggtttagagctaccatcgactattgtttgacaaatttgcctctcaatattacgtccaagcaaacaactgacaagacacgtcgtgacacctcacaacttcacgactacccctctcgcctctcactcttgactaaggagtatcacctccgagaagagtctagcaatagaatattgtgagcgacacgaccacaaacaccatgtctcgtctcaaaccagcttcgttgaccgagacacacgatcttatttgtgtcggattcgggccggcaagtcttgctatcgctgtcgcactcaatgactcgattgagtcgggaaatttggcgagaagtagcgcgccaaaagtactgtttctcgagaagcaggctcgatttgcctggcatgccggtatgctcttgccaggggcgaaaatgcagatttcttttatcaaggatatggcaacactgagagatccgacttcaaagtttaccttcctcaactatctccatgaaaataaccgactggtcgagttcacaaatttgagcacatttcttcccgccagaacagaatacgaagactatctccgatggtgcgcagaacacttcgacgatgtcgtcaaatatggcagcgaagtcatctcagtgtcaccgcagaaatcgactggtacttataactctgtatcccgcttcactgtcacatatcgtgacgtcaacactggagttcaacttacgagcacagcgaaaaacgtgctagtagctattggcggtcaggcgtcgatacccaagcctctaccatccaaccacccacgagttatccactcttcccagtatgcacacttggtcccaaaaatgctcaatcagcgtgacgccccatatcgtgttgctgtcgttggtgcgggccagagcgcagcagaaatcttcaataacattcaaacattatacccgaactcgcaaacctcacttattatgagatccgagtttttgaaacccagtgatgactcgccatttgtaaactcgatattcaacccatcctatgtggacgaccttttcgaaagaccagcgaaccttcggcattccgtgttggcagatgctcgggctacgaactacggagtcgttcgactagaattaatcgaacacttgtatgagcgcatgtatgaccaacagcgagagctcggcaatgatgagaagaaatggccgcatcgtattctaggatcaacggctatcacaggggtcgatgcccagtcagacaaggtgaagttgacagttgcgcctctcggtgcgggagctggagaagaggttttcgactgtgatctcgttgtcactgccacagggtaccagcggcaggctcatctgaccatgatggaagacgtatatgatctcttgcctgaaacatccacttcgatctccgccttgaccaagtatgatacttgtatcaaaggccgccctgtcaatgtgtctcgtgattacagcgtacagtttgcccctgggaaggtctcctcaggctctggcatctaccttcaagggtgtaatgagggaacacatgggttgagtgatactcttctgtctatcctatccgtacgatccggagagatcgtcaactcgatttttggaaacaaaggcgaacaacacattgagcaacagaaaacgccaagtaggcggatccaacacgttcaagaggatagataccgtgccaggttgtaggcacatatgctacgacacaatgtctctattgcacggtctctttgtaattgcacagcaaaataatgcatgggtttagacttgaaaataattgggttgtgggatgtctagccgagactttcaaaatattattgcttacgattatttgaaaaatatctcctcttcttcgc

SEQ ID NO: 30258 - DNA, 222 bp, Muscodor strobelii
  misc_feature: SGI cDNA ID NO. 570404
  misc_feature: Encodes the peptide sequence at SEQ ID NO 30259
atgtctcacaacggtggcctctctgcgcgtgttattacatctgatgacaaatgtgtttcaccaaatattgctgcgaaggcttacgtggactctatcgacatcgagatagcatctaacgggacatcgttagatattggtgttttctccagctcccgcattctcacatctccggaagcacaggagatgattgaagctcttgtgaacgagatcgatgaaatgtag

SEQ ID NO: 30259 - protein, 73 aa, Muscodor strobelii
  misc_feature: SGI Peptide ID NO. 570404
MSHNGGLSARVITSDDKCVSPNIAAKAYVDSIDIEIASNGTSLDIGVFSSSRILTSPEAQEMIEALVNEIDEM

SEQ ID NO: 30260 - DNA, 13147 bp, Muscodor strobelii
  misc_feature: SGI EST ID NO. CUFF.71663.0
  misc_feature: Variant of the nucleotide sequence at SEQ ID NO 30258
gcctgcttggactcgccatattcccatgttccgagctctgaaacattcccaccagaatggcagaaagagattcaactattatgtgctcatgagagctcaattgtcgctaacacaacgacgcatatgaccctaaatcccgaggaagactggagccaaatagaaatgaggattcgccgggtactcgcaaagcttactggtattcctatgcacaacatcaaacgatcggttccaatttatcggtacgggcttgacagtatcgcagctatccaattagcagctctgctgcgccaagagggtgtcgatgtgtccgctatcgatgtcattgagcacccttcctgtgctggaattgcctctgtcctcgaggctcaaaagattgagcatttttatgagccgttcaacttcataagctttggaagcgagttaaaaggagatatacttcgcaccggaatcgatttggaggccatcgagacaatactgccatgcacatatacccagcagggtttgctttcgcaatttctggaatccgagggaagcttgtatttcaactacaccagctgggaattgaaggatatcgaggaacctgaaaaagctgccgagtcatgggccaagctcacagcggatcatcaaattcttcgaactggttttgtcgcaacaaatcatccagacagttcattcgcaatgattgtatacaacatagatagcgtctcaacaccggcgtcaattgatatcaccaacaacttcaacgtcaaacaatggcgcacccaggctgtgtcaaactcacttcaaagtctaaaacggcctccatggcaagtcgtcgtcgtcaaatcaaacaatacgacagggaaagcaacgctcacaatgcatcttgcgatacaccatgctctttatgatgctttcacactgagaatacttctcaattcatggtcagagattatgataaatgatagtaaacaggaagacctgtccatgcagcccgccctgtcccattatttcaatatccttcgatctacgcaatccgctggcgagaatttctggcgtcagaaggccgatatttttgcaactcaccgattcccagtgctgacaccatcacatatttatacaaatgccaccctttcaacgtcaatccgctgtcacaaggctacatctgccattcgccaggctgcccaagacgcgggtatcacggtccaagcggcgttgcaggccgcatggagtcgactgcttagtgcgtataccggagagtcgcgcgtcacatttggggttgtccttgacgggcggacagcaatcgagacaaaacagtcgacactacctatgattgttactgtgccgatcattgcggagacttctcctatagacaacgatttgctccaacagatgatgcaatataacaacgagtctcgtcgtttccagttcatgccaatcactcaaattcaacgttgcctcggtaccacacagtcgctgtttgacactatgctgatttaccaaaccgctgataccgatggtcagccaggtctacttgaagttttagaagacattggattcgtcgagtacccagtatcgctcgaagtagaagacgaacaatctgacaaaacacgcttgaatttgacgttcaaagcgaaattgatgccgtctgaacaggctttgttacttcttcaacagttcgaccatatcctcatgtctctattgggtttcgacgaggatgtcgttccagcccctacgtctttatattctcatctcccgccagtaaacgaacatcttactgtcgaagccaatttcctacatgagcttaccgagcagtcagcacacctgcggccgatggccgttgctctcgaattcgtcaacagcataacaaacacggtcgaatctcaaagttggacataccgccaattagatgatttaggtaaccaggtggccaattttatcatcgagcggggggtcaagcccggtagtatcattgcaacatgctttaataaatgccccattgcgtattttgcccatcttgggatactcaaggctggatgcgcactcctttgtctggatgcctcggcccctagagcacgccagcaatttattctcgaggactcgaatgcagcaatcctacttactgaagagccactagactggatgttgaatgtttctcttcatatctaccgtcttgatgaaaacgaaatatcgtcccagcctgctcatcgcccaacgttggcccgtcccttattatcttcagatacgtcttattgtctatacacatctggtacaacaggcacacctaaaggatgcttaataacgcatgagaacgctgttcaggccatggctgctttcaaaattctctttactggacattggggctgcaattcgagatggctacagttcgccgcattccacttcgacgtatccatcttggaacagtattggtcatggtacgttggaataactgtcgttggagcttcgaaagatctcattcttagtgacttaacgggtactatttcgaaacttgggataacccatatcgatttgactcccagcctggcgaggcttaccaatcctgaggaatgcccaagcctgtgtcaaggtatattcattacgggaggagagaagctacgatctgacattttgcacacatggggctcccggagagtcatctacaatgcctacggtccaacagaagcgactattggcgtaacgatgcagctccgcgtgcctgaaaatggccgaccttccaacataggaaatcttttcccgaatgtaggagcttatgtcttcaaacctgggacagaaacaccggtattaagaggtggagttggagaactttgcctgtctggtaaacttgttggaaaaggatatctgaaccgtgttgacctcacgaaggagcgattcccgaccctggcgactacaggagaacgtgtctaccgaactggtgatctagtgcgagtgttgtatgatgactcgcttgattttcttggccgtgcggatgatcaggtaaaacttcgaggacaacggttggagattggcgaaatcaatcacgctattcgagagcaattggcccaaaagcttgctgatgtgtgcactatggtcgcgaagcggcgagatcaagagactgatattctggtatcatttatcgccatgacgtctgggccggaaatggatgctcagctacacgcctattccgacaaagacagtttggatcttgcccggatcgcacaagatgcttgtcggaatcgactgtccaactacatggttccaacatatatactacgtgtctctcacattcctctatctacgaacaacaaggtcgacgttaatcgcttgaaggctctgttctctgaactttctcacgaaaagctacaagtacacgcaagccccgtcagcgcaactcgtcaatcacttgatgcattagaaaatattgtggttcgagcattatcacaagtcgtgcgcatcgaacatcaaaatattacgccaaacagcacgatatttgagcttggtatagattcaattacagcgggacgattgtccaaacaactcagaatctgcggatttccttctgctagtccatcgttgctaatgcgccatcccaaaatcggtcatctctctcgagctttgcagcaatctaacgactttaccaataatcccttgcagatggagcaggcaattcaagccttgagacatcgatatcttagcttagtgtgcaggaacctcgacttagaagcagaccaggtggaatacatcgcaccgtgtacaccattacaagagggtatccttgcacggtctattgctcctgagagtatgttcgcatattttattcagttccaactccatctaagttccgttgtatcagttaggcgccttcaagccgctctcaagcatatcatttcctctcattctattctgagaactgcttttgttgagacttcgaatggataccttcaagtagctattaaaaacaagtctctaagctgggttgaaattgaatgcaatgtggtcgattttgacaagacgattgctgaaagacaccatcaatgggctggaagtcgaggtcaaaatcttcgatgtcctttcgaggtcgactgcgtcgagtgtggtgggaaacatttcctattgctgaggatatttcatgcaatatacgatgcccgcagtcttcagctcattttacaacacttgaaagcagagtatcaaggcttacctttcaatactggtccagccttcttgccagtcttgtttcaagggccactcatggatcaccaaatttctcatccgttctggaaatcaatgcttcaagatcatcatccgcagttgatgcctagtattattgatcaaccgaactcagatagtgctgtcgcgcagaaaatgataacactacctgatctagaaggaatacgcaaaagcctgcaggtaacgcatcagacaatcttgcagtctgcttggttgagcacattgcgtcaatacttttcaactcctcctaccatcggagttgttgtctccggacgatcacttcctattgatgatatagacattgtcgtcgggcccttattcaatacgttgccgttgcgaacaaatttcactgaaagcatgacctgggaatctctgaccaggaacatccaagagctaaacaacgacatattaacgtttgcccatacaccactacgcgatatacagaagctgtgtgctggtggccagccacttttcgatactctgttcaccttcgatgccgataacagtacaactcccgacaccgacgatgagttatggtgtatcaaagaggccgccggtagtccagactatccattagccatcgaggtcatacttgtttcagaggggactcttcggatcactttggtggcacaaagtaatattgccgatgacgacacccttgaggcgcttcttacccaattcgttgagtctatacgtctactccttgcttcacctaaagactcgatcccgccaactacatatgaggcctcacatacaagaactgaagatagttactcttcactgcattcggatacgagtgagagtggcatgacatcttcggggacgtcgaatacggattttgtttgggacaacagagcattgcagattcgccaagaaatcgctactcttgctgatgtggaagaccatgcaattaatcgactcactaacatatttgcacttggacttgacagtatcgatgtcattaaactctctggaagactcaaaaggctgggctacgatgtgtctatgggagccattatgaagaacccctcttttgagaatattctatctcacctcgtaattcaaggactgcgcgatgaggaatcactggattctggaaatatgagagacgttgttgcgatactgcaagatcattttgcacagcgaccattcacggttccagatattcatatcattctgccgccgactccgctccaggactctatgatggcagcaatgacggctactaaatttcaaacctatttcaatcatgacgttttggaacttgcgccagatgtcgatcaaggtcgattgaaagccgcattatgtaccgtatacgaaaactcgccaatactgcgtacaattttcgtcgagattgatgacccaagggtcgattttgctcacagccaagtcgtacagaccagggaacttgagatcatgcctacaattcagatatccagtcccgatgaaattgagacactaatcgctcgagctcgatcccgagcattagcaagcaatggcatagaccatctattccaagtacaattcgcagagtctccaactcaacgttatctcgtcctctccattgcacacgcgctatatgacgggcagtccttgcaaatgcttcacgaagatattcgagcagcgtacgatgacaaattcacatgccgaccgttctattcgtcgtatctctcacacttgatacatcagagcacgactggggcgatggacttctgggcaaaacttctacatgatgcacggcctacaatactctctccgaaaatcagcaatgccagaccagactcagtctcaagcgccgaaagagcttcgaaaagtagcgttgcaattatcagatcattgagtaagagctatagcatcacgccgcaggtacttattcaaggatgctggtctgtggtactagcttcattaacaaagtcactcgacgtagtttttggcgtggtcttgtcagggagagactctgaagaggcccaaaagctaatgtttcccacgatgaacacaattgctctgaggaccgtgttgcacggaacaataactacgtatctgcaatacttgcaagacatcatgtcgacagtcgtcgcttttcaaagtactccgctccgtgatattcaaaaagcttccaaagtccggggtagtccactattcaacactctttttctcctacagagttccgaccgagatcggtcgcactgcgatggcttcctaacatcaatacaatcggcctcgaaagctgagtatccagtttgcgtcgagatggaactcactgaaacagacgctatttggcgcgtagcatgcgatgaatcatatctgtcttcgcgggatgcagagaatttgatcgcgtatctagaagccgttctagattatttctcacggcaaccacatgcgcagatgctggaggtagatccgaagaatccgaagaaaatctccctttgcgggctcgagccagtttttcttaccggcacgtcgcacaacgagccaatctccactgagatagtaaagcctattttgcaagagtcttcctctctatccccagatgattgcgacacatgtctgtatgttttgtccgagatatcgcacatcgaccagcgagagatttctctcgaacattctatatttcatcttggtttcgactctataagtgcaatcaaagcaagctcaatgcttcgaaagcgtggcttacaaatatcggtcagagacttaactacggcatcttcactgcgtcaaatactgcagcacatacacaaatctgaggacgagccagtgtataggttgtcaaatattacctcggatctcgattacagtgtaggcggcaagaacattggtttggtcctcgaccgttgcaacataaaggaggagtcgattgaagcaatcctgccagccatctcaatgcaagttcacatgctcagtacatggcacgaaagccggggcttggtgttcttccctacgttcggattcaaaatttcaggtccaaccaacaagcaaatcgtgtctcgagcatggatgtctctcatcagtgacattgcaatgttaagaactcatttagttgcaaccacctccactgacacgccggtcctgcaagtcatcctcaaacctgaatccctcaaagaaccaccaatgaaagtcgtggagtctaatgggacatggactatcagccatgctcctacgccattcgcagctgttcaaataacaggaaataaatctagcgaagtctacctgtaccttcgaatccaccatgctctgtatgatgctataagtctaccactaatattggatcggtttgtcgatctttgtggtccctctccgcaacctgctcgacgctcagataaggccgtctggcatcatttcgtcgcatcacagctcgatccgtccacaaagacaaaacgaagatctttctggacctcgtatctggagggaaatctcgtttctcgcctcaaatctccctctgcagtcagccatcatgaccaggtatgtcgaaccaccgagttcctgccccgggcgcttggcaatgcgacaaaacttcgaaatacgagctctacatacggagtatccgttcaagctttggtttttgctgcatgtgctaggttcattgtgaagaggagtcatagagaatcaagtcttgatcatagccacgactgccttttcgggatatatctttcaaatcgttcagcattccctgaacttgcagatataccgtttccaacactcaacattctccctctaagagtgagaggtccatgcaatcggcctattcaaaccatcgcattggagattcaaaaagacatcctcgagatcgggagctcgacaaacacaacggttagtttatgggagatataccaatggacaggcctacaaatcgatacatttgtcaatttcctgcccttccctagtgacgatactcgaaatggcgagaagactattactctcaacaagctaccagccgacgatttcgttatgtctcacaacggtggcctctctgcgcgtgttattacatctgatgacaaatgtgtttcaccaaatattgctgcgaaggcttacgtggactctatcgacatcgagatagcatctaacgggacatcgttagatattggtgttttctccagctcccgcattctcacatctccggaagcacaggagatgattgaagctcttgtgaacgagatcgatgaaatgtagatacaatttcctacagaatgtatgaatgagatatttgcactaaacctcctaccagatggagttgccaatctcgacacgcagtttagaactctgttatgttatcgaagcgtactttcccctgtaaaccatagcttagtgtcgacatacttttcaaagtcattctcttacgttttcaattgagtccaaagtgcagcttctcaattgataagagatcaaacatgataaaatttctatgctctgccctcttatgttctaacccgaacaatcttgaacagatgaaggaagtagcctggccatgccaagaagcattgccaagtcactaagtgcatgcaaccccacgagcctgtgaggtactagggattcaacctgcttgatgatctcttggtattgcctgccgaaccggagcacgccattcatgaggaattatcatcagttaacaatattagacaattttccgtctcaacacacaagtgatgagcagcctactgcccatgcagccgcagcgcgcgaagtcaagcacctagtagcaaagtccatacagtaattttgtgtttcttttagcttcccctccgtatcaaactaatatcgactcaacaacatccatatgtccacaaatttgagaatgatctaaatctcaacaaagaacagcgcaaagtcgcgtgtaataggcagcaatacgccaagggttacaaaactgcaggaatgatacggaacaccgtctcaacaactactaacggaaggcgtgctgaaaatgaccgcgtcgagacgtcaatatgatgctttgagagtgagagtaaccccagaattagcaccgtttacatgactagggtttatcaggggatggaaaatatccagtccctaccctgcagcctcagttcttcgagtaaactgttcgcctgatgaagctcaacctcgtgttgtgcctcgctgcgagcgaggaggttacaatcactccgacacggcgtgttctgcagcttattgcatttcatcccccgtctcgtctaggaaggtagcgagccgatccccgggcgcaggtcaaagcagagagcggatagcggaaataagaaggatagatgcgggctattctttaaagaaggtcatagtgatgtcgcgtgaggattaatggacacagcagaattaatacctttttgttgtcccgattggacggaaaataccaccttaagaatgcgctagaagacctgagactgatgagggactttaagttgttggagaacatatttcgctttattgcaacttgttaatttaacatcatctatcgtcgatttcataccaaataagaagtgttcctattgtatttgtttgcgcaaacccttgaacggctgaatatccaaattcctggtgtcggggtagctcacacgagctcgttcgtctgatagttcatgacaagtcagtatgtcaggatgctgtaatagggcagggttacattgcatcccacccctccatgcagcacgagaaagcttcgcctgagctggtctggcctggactttgcagctatgctgatcttgcggctttattgactgggatcgtccctatctcggcatcccgtcgtctcggtttcgcgagcctcgtcacccacctgacgattctggatgattgcgattggctcctttgaggctagggtaaagatagcaactgggaaaggtatgtcttcgcttggcctcgattactcaatggtgatcaacttatctttcctaaaaggctcttggcaacgctgaagaagggcttggcagttctatgagctagaccgtgagtagaatgtgggatggtacgcgataagctccgcatctgtgctcataccatatttctcaacatcaagagaacgacagagaggaagcccatgccgcggttcggaaagcagtgttggaacatctatttcatattattgctcttcttaggcaacgaacgaggcctccttccatctctgcatgatgcgccgttggcatactcgggattgaacggggtggcgtttcctgccgtcctccgtctcctggtcggtggtgaagaatgcgggtgaagcttggttgacccccaggttccggcagtagacaactagggtcttgattgattctactgccggtagcccacacgtaatctgcacgtaattggacggcagatccctgagactgttcatattgggctcttctgcgccccttgaggcacagcgaatttgacctgatgtcgcgatcctgtgagggcggtggtatcgtcccatgcataatcgggtatctcggctgccgtgccttgctagtgcgttccttcctagccgcgtccgcatccactcccgtagcatcgctcagcatctgtcagctccgatccatctcaccttcttcttccagagctcgtgtatatcaagaaatagagcttctctccctgctgccaagagaaacgacatgatttcacctccaatgaatctcgtgaagttatcacgagagcggccgtattattcctgccaagagagacaggcgaagctaatcatgtaaggaaacacccgctaccaacaccgcctcgaagtcggcaatggggtccaaaaaggcagctggaatgtgcaaatattttggtcttgcacagcgtcgcggagggatgaacatctatataaagtcagtagcccaacgaggggcaggatggtcgatggtaggaggcagtcgcttttgcttgacctcaagatagactcagacgtgacagtcaatccgccgccatgaagtccgcagtagttcttggcctcctcggagcttcgctcccggcccttgctcacccggcgccggactcgacctacagcccggaggtacgaaagcgcatggtagacctaaatgcgtatcgaatcacgcaaaatgctgaatacagcaaccaaggagctaccagcaccaacgaggctatgctcgtctccaagcgtgagacatacgtcgagactgctactgctgtcttgaagtcggttgttcccggtgcgacattccgtctcgtggaagaccactatgtcggtaccaatggcattgcccacgtgaacttcaagcagactgtccacggaatcgacatcgataacgcggatttcaacgtcaacgtcgccaaagatggttccgtcttctcgtacggaaactcgttctacacgggagaaattcccgcggagaaccccctgcataagcgtgctttctcagacgctgctgaggctttccacggcgcaaactccatgctcagccttggactgtccggacaagccactgctgaggctgttgagggtgtcgagacttacaagatcaagggcatttctggttccgagaaggttcccgaggcacgcctcgtctacttcgccaagcctgacaactctttgaccttgacctggcgagtcgaaactgatttgctcgacaactggctgctgtcatatgtcgatgccaccaccaacgagcaagttcatggtgtcgttgactgggttgcgtcggctacttttgaggtctacccctggggcgtgaatgaccctactgagggttcgcgtactgttctgaccgacccctgggacactcaagactctccgttcacctggctctccgatggcaccactcactacgataccactcgtggcaacaacgccattgcgcaaaccaacccaagcggtggaacttcatacttgaacaactacagaccctcaagcgcaacagatgacttcgactacgactggagcaccagctggtcacccccatctgtctacgccaacgcttctgtaacgcagcttttctacactgctaacacataccacgatgttctttacgatctcggcttcactgagccggccgggaacttcgaggccaacaacaacggcaagggtggtgtcgctggtgactacgtcatcctaaacgctcaggatggatctggcaccaacaacgccaactttgctacccccgttgacggacagatgggccgcatgcgcatgtacatctggacttactccacgcccaaccgtgactgtgctttcgaagctggtgtaatcatccacgaatacacccacggtgtctccaaccgcctcactggtggaccccaaaacgtcaactgcctccagaccaccgaggccggtggcatgggtgaaggttggggtgacttcatggctaccgccatccgtctacaacctagcgatactcgcgaaactgactatcccatcggcgcctgggtatacaacaacccggccggtatccgctcctacctctactctaccagcacgacgaccaacccccagacctacacctctgccaacgctctcaacgaggtccacgccatcggcacgatctgggccaacatgctctacgaggttatgtggaacctcattgacaagcacggcttgagcactgctaagaagcccgtgttcgactctaacggtgtcccgaccgacggcaagttcttgaccatgaagctcgtcatcgacggcatggctcttcaaccatgcaaccccaacatgccccaggcccgtgacgccatcctcgacgccgacactgccttgacgggcggtgataacctgtgcgagatctggaccgccttcgccaagcgtggtctcggatctggcgccaagttcggcaccactcgcactggaagcactaccatccccgctggagtttgctagatttaatgtctaattaccatgtttttggctatagtgctttgtaaagacatagcttgggtacagagactggataggcagcatagcggttttgcatattctcatagaatgatatgagatgaagaataataaagtaaagaataatgaaatatgttc

SEQ ID NO: 30261 - DNA, 1905 bp, Muscodor strobelii
  misc_feature: SGI cDNA ID NO. 570405
  misc_feature: Elevated expression when VOC is produced
  misc_feature: Encodes the peptide sequence at SEQ ID NO 30262
atgaagtccgcagtagttcttggcctcctcggagcttcgctcccggcccttgctcacccggcgccggactcgacctacagcccggaggtacgaaagcgcatggtagacctaaatgcgtatcgaatcacgcaaaatgctgaatacagcaaccaaggagctaccagcaccaacgaggctatgctcgtctccaagcgtgagacatacgtcgagactgctactgctgtcttgaagtcggttgttcccggtgcgacattccgtctcgtggaagaccactatgtcggtaccaatggcattgcccacgtgaacttcaagcagactgtccacggaatcgacatcgataacgcggatttcaacgtcaacgtcgccaaagatggttccgtcttctcgtacggaaactcgttctacacgggagaaattcccgcggagaaccccctgcataagcgtgctttctcagacgctgctgaggctttccacggcgcaaactccatgctcagccttggactgtccggacaagccactgctgaggctgttgagggtgtcgagacttacaagatcaagggcatttctggttccgagaaggttcccgaggcacgcctcgtctacttcgccaagcctgacaactctttgaccttgacctggcgagtcgaaactgatttgctcgacaactggctgctgtcatatgtcgatgccaccaccaacgagcaagttcatggtgtcgttgactgggttgcgtcggctacttttgaggtctacccctggggcgtgaatgaccctactgagggttcgcgtactgttctgaccgacccctgggacactcaagactctccgttcacctggctctccgatggcaccactcactacgataccactcgtggcaacaacgccattgcgcaaaccaacccaagcggtggaacttcatacttgaacaactacagaccctcaagcgcaacagatgacttcgactacgactggagcaccagctggtcacccccatctgtctacgccaacgcttctgtaacgcagcttttctacactgctaacacataccacgatgttctttacgatctcggcttcactgagccggccgggaacttcgaggccaacaacaacggcaagggtggtgtcgctggtgactacgtcatcctaaacgctcaggatggatctggcaccaacaacgccaactttgctacccccgttgacggacagatgggccgcatgcgcatgtacatctggacttactccacgcccaaccgtgactgtgctttcgaagctggtgtaatcatccacgaatacacccacggtgtctccaaccgcctcactggtggaccccaaaacgtcaactgcctccagaccaccgaggccggtggcatgggtgaaggttggggtgacttcatggctaccgccatccgtctacaacctagcgatactcgcgaaactgactatcccatcggcgcctgggtatacaacaacccggccggtatccgctcctacctctactctaccagcacgacgaccaacccccagacctacacctctgccaacgctctcaacgaggtccacgccatcggcacgatctgggccaacatgctctacgaggttatgtggaacctcattgacaagcacggcttgagcactgctaagaagcccgtgttcgactctaacggtgtcccgaccgacggcaagttcttgaccatgaagctcgtcatcgacggcatggctcttcaaccatgcaaccccaacatgccccaggcccgtgacgccatcctcgacgccgacactgccttgacgggcggtgataacctgtgcgagatctggaccgccttcgccaagcgtggtctcggatctggcgccaagttcggcaccactcgcactggaagcactaccatccccgctggagtttgctag

SEQ ID NO: 30262 - protein, 634 aa, Muscodor strobelii
  misc_feature: SGI Peptide ID NO. 570405
  misc_feature (84)..(135): Pfam Id: PF07504 Pfam Desc: Fungalysin/Thermolysin Propeptide Motif
  misc_feature (246)..(634): Pfam Id: PF02128 Pfam Desc: Fungalysin metallopeptidase (M36)
  misc_feature (17)..(630): NCBI GI: 66363476 Blast Desc: metalloproteinase 10 [Coccidioides posadasii] gi|240109138|gb|EER27307.1| Extracellular elastinolytic metalloproteinase precursor, [Coccidioides posadasii C735 delta
  misc_feature (17)..(630): NCBI GI: 119182038 Blast Desc: CIMG_06073 [Coccidioides immitis RS]
  misc_feature (17)..(633): NCBI GI: 74629663 Blast Desc: MEP3_MICCA RecName: Full=Extracellular metalloproteinase 3; AltName: Full=Fungalysin MEP3; Flags: Precursor gi|259495588|sp|C5FNU8.1|MEP3_NANOT RecName: 3; MEP3; 3
  misc_feature (16)..(630): NCBI GI: 66363474 Blast Desc: metalloproteinase 9 [Coccidioides posadasii]
  misc_feature (8)..(630): NCBI GI: 74629662 Blast Desc: MEP1_MICCA RecName: Full=Extracellular metalloproteinase 1; AltName: Full=Fungalysin MEP1; Flags: Precursor gi|24412835|emb|CAD35289.1| metalloprotease, MEP1
  misc_feature (17)..(630): NCBI GI: 254810397 Blast Desc: MEP1_TRITO RecName: Full=Extracellular metalloproteinase 1; AltName: Full=Fungalysin MEP1; Flags: Precursor gi|219816460|gb|ACL37332.1| metalloprotease 1
  misc_feature (17)..(630): NCBI GI: 74620701 Blast Desc: MEP1_TRIRU RecName: Full=Extracellular metalloproteinase 1; AltName: Full=Fungalysin MEP1; Flags: Precursor gi|22652145|gb|AAN03636.1|AF407185_1 secreted 1 rubrum]
  misc_feature (17)..(630): NCBI GI: 74612198 Blast Desc: MEP1_ARTBE RecName: Full=Extracellular metalloproteinase 1; AltName: Full=Fungalysin MEP1; Flags: Precursor gi|33520309|gb|AAQ21097.1| metalloprotease MEP1
  misc_feature (5)..(630): NCBI GI: 259495601 Blast Desc: MEP1_ARTBE RecName: Full=Extracellular metalloproteinase 1; AltName: Full=Fungalysin MEP1; Flags: Precursor gi|33520309|gb|AAQ21097.1| metalloprotease MEP1
  misc_feature (17)..(630): NCBI GI: 74612200 Blast Desc: MEP5_MICCA RecName: Full=Extracellular metalloproteinase 5; AltName: Full=Fungalysin MEP5; Flags: Precursor gi|259495594|sp|C5FX29.2|MEP5_NANOT RecName: 5; MEP5;
  misc_feature: Useful for introducing or modulating the production of volatile compounds
MKSAVVLGLLGASLPALAHPAPDSTYSPEVRKRMVDLNAYRITQNAEYSNQGATSTNEAMLVSKRETYVETATAVLKSVVPGATFRLVEDHYVGTNGIAHVNFKQTVHGIDIDNADFNVNVAKDGSVFSYGNSFYTGEIPAENPLHKRAFSDAAEAFHGANSMLSLGLSGQATAEAVEGVETYKIKGISGSEKVPEARLVYFAKPDNSLTLTWRVETDLLDNWLLSYVDATTNEQVHGVVDWVASATFEVYPWGVNDPTEGSRTVLTDPWDTQDSPFTWLSDGTTHYDTTRGNNAIAQTNPSGGTSYLNNYRPSSATDDFDYDWSTSWSPPSVYANASVTQLFYTANTYHDVLYDLGFTEPAGNFEANNNGKGGVAGDYVILNAQDGSGTNNANFATPVDGQMGRMRMYIWTYSTPNRDCAFEAGVIIHEYTHGVSNRLTGGPQNVNCLQTTEAGGMGEGWGDFMATAIRLQPSDTRETDYPIGAWVYNNPAGIRSYLYSTSTTTNPQTYTSANALNEVHAIGTIWANMLYEVMWNLIDKHGLSTAKKPVFDSNGVPTDGKFLTMKLVIDGMALQPCNPNMPQARDAILDADTALTGGDNLCEIWTAFAKRGLGSGAKFGTTRTGSTTIPAGVC

SEQ ID NO: 30263 - DNA, 13147 bp, Muscodor strobelii; identical to SEQ ID NO: 30260
  misc_feature: SGI EST ID NO. CUFF.71663.0
  misc_feature: Variant of the nucleotide sequence at SEQ ID NO 30261

SEQ ID NO: 30264 - DNA, 1548 bp, Muscodor strobelii
  misc_feature: SGI cDNA ID NO. 570406
  misc_feature: Encodes the peptide sequence at SEQ ID NO 30265
atgtcgtcctcagagaatcccaagccattgaccaagcgagccgtagcaggctccttcctcttcaagtatgatggcgacgaggcaagtggcaatcagaaagtaaaagtcgcgttattcagacggagcgagaaagtgaggacttatcaacataaatatgcacctctctcaggtagcgtcgaagaatccgacgcctcaccactggcaacagcactaagggagattcacgaagagacgaccctcccagcgtcttctctccagctcttgcgcgtcgggaaaccgtattcttttgtcgatgagagtatcgatagggagtggcagattaatccctttgcgtttcggcttaaaggcgtaaatgagggcggagttggcgaagaaggtattaagctggattgggagcatgaggggtgggagtggtttgatcccgcggatgttataagaaaggatggagagggtggtgtgccgaaacttgtcaatagtttgcgacgcgtgtggcccgagggtgatcttggctcaagggcgggagagatgttgaatgagggtttgaagaaattggctgaggaccgggagagtggtgcgagggaacttgctagaaccggtatctggacattgagagatgtgatttggcaactggatacgacaagagaggttcgagaatggaactggtggaatacagtgaagatgtcggcgtggcatatttgtcaagcgagaccggcgatgggttccgccatcacgagtgcgattctaaaggctttggatgctgttgagagtatccgtcccagtggtgatctgacagaggaggatatcccacggatgttgaatgctttgctggagcaggtggctgccagggccggaaccgcagagatggtcggaaagtcattctcaaattatctgatcaaacatatgatcgagctgagacgattgtccgacagccatatatcgatcctcaccttatcctccagttcgacgatcgtcaattgtctggagggcattactaaagagcttgggatcaaacttgatatacggattcttgagtcaaggcccctttgtgaaggcatatcgcttgcttcgaagctagtggagagcagcgatgtgccgaagatcacgatttactctgatgccgcggttgccagggcggcacaaggcgttgatcttgttctcctgggcgcagatcgaattagttcccagggtgatgtcagcaacaaagttggatctctccccgccgtccttgctgctcgtcacgtagcgccgaacgcaaaagttgttgtcctaagtgacacagacaaaattgcggagcctcagacactcgacgaacatcatgatgaggagaatgatccgtcagaactcagcagggcatgggtagatacgaaaggggcgcaaactgttgagaatcacgagatgattacgatcaagaacccatactttgagtgggtgcctgcaatcctcatcgatgcatatgcaactgagcaaggcatatggagcgtgaagcagatcgctgaacgggcgcagtggattgagaaggagaagaagaggttctttgatgggttgtga

SEQ ID NO: 30265 - protein, 515 aa, Muscodor strobelii
  misc_feature: SGI Peptide ID NO. 570406
  misc_feature (12)..(163): Pfam Id: PF00293 Pfam Desc: NUDIX domain
  misc_feature (188)..(494): Pfam Id: PF01008 Pfam Desc: Initiation factor 2 subunit family
  misc_feature (343)..(413): Pfam Id: PF01008 Pfam Desc: Initiation factor 2 subunit family
  misc_feature (9)..(515): NCBI GI: 256724942 Blast Desc: NECHADRAFT_76935 [Nectria haematococca mpVI 77-13-4]
  misc_feature (1)..(515): NCBI GI: 145231513 Blast Desc: An02g00980 [Aspergillus niger] gi|134056137|emb|CAK96312.1| protein product [Aspergillus niger]
  misc_feature (4)..(515): NCBI GI: 238490364 Blast Desc: translation initiation factor eIF-2B subunit family protein [Aspergillus flavus NRRL3357] gi|220696832|gb|EED53173.1| translation initiation factor eIF-2B subunit family protein
  misc_feature (12)..(513): NCBI GI: 71002162 Blast Desc: translation initiation factor eIF-2B subunit family protein [Aspergillus fumigatus Af293] gi|66853400|gb|EAL93724.1| translation initiation factor eIF-2B subunit family protein
  misc_feature (6)..(512): NCBI GI: 164424488 Blast Desc: NCU11341 [Neurospora crassa OR74A] gi|157070535|gb|EDO65063.1| NCU11341 [Neurospora crassa OR74A]
  misc_feature (6)..(515): NCBI GI: 242805525 Blast Desc: translation initiation factor eIF-2B subunit family protein [Talaromyces stipitatus ATCC 10500] gi|218715175|gb|EED14597.1| translation initiation factor eIF-2B
  misc_feature (6)..(515): NCBI GI: 255933293 Blast Desc: Pc12g13090 [Penicillium chrysogenum Wisconsin 54-1255] gi|211582736|emb|CAP80936.1| Pc12g13090 [Penicillium chrysogenum Wisconsin 54-1255]
  misc_feature (12)..(515): NCBI GI: 119481713 Blast Desc: translation initiation factor eIF-2B subunit family protein [Neosartorya fischeri NRRL 181] gi|119409039|gb|EAW18988.1| translation initiation factor eIF-2B
  misc_feature (10)..(515): NCBI GI: 115383754 Blast Desc: conserved [Aspergillus terreus NIH2624] gi|114196116|gb|EAU37816.1| conserved [Aspergillus terreus NIH2624]
  misc_feature (10)..(515): NCBI GI: 212545637 Blast Desc: translation initiation factor eIF-2B subunit family protein [Penicillium marneffei ATCC 18224] gi|210064492|gb|EEA18587.1| translation initiation factor eIF-2B
MSSSENPKPLTKRAVAGSFLFKYDGDEASGNQKVKVALFRRSEKVRTYQHKYAPLSGSVEESDASPLATALREIHEETTLPASSLQLLRVGKPYSFVDESIDREWQINPFAFRLKGVNEGGVGEEGIKLDWEHEGWEWFDPADVIRKDGEGGVPKLVNSLRRVWPEGDLGSRAGEMLNEGLKKLAEDRESGARELARTGIWTLRDVIWQLDTTREVREWNWWNTVKMSAWHICQARPAMGSAITSAILKALDAVESIRPSGDLTEEDIPRMLNALLEQVAARAGTAEMVGKSFSNYLIKHMIELRRLSDSHISILTLSSSSTIVNCLEGITKELGIKLDIRILESRPLCEGISLASKLVESSDVPKITIYSDAAVARAAQGVDLVLLGADRISSQGDVSNKVGSLPAVLAARHVAPNAKVVVLSDTDKIAEPQTLDEHHDEENDPSELSRAWVDTKGAQTVENHEMITIKNPYFEWVPAILIDAYATEQGIWSVKQIAERAQWIEKEKKRFFDGL

SEQ ID NO: 30266 - DNA, 2124 bp, Muscodor strobelii
  misc_feature: SGI EST ID NO. CUFF.71558.0
  misc_feature: Variant of the nucleotide sequence at SEQ ID NO 30264
atcaccaacagcttaaaaagccgggagaagtaataccaccatgcacaatggtgtattcaggcatatcttgccagtcctgacaaaacagtcttcgatatacttacctcgatcattccttccacggctgaactatgctcacaagcgcctaatgtcgtcctcagagaatcccaagccattgaccaagcgagccgtagcaggctccttcctcttcaagtatgatggcgacgaggcaagtggcaatcagaaagtaaaagtcgcgttattcagacggagcgagaaagtgaggacttatcaacataaatatgcacctctctcaggtagcgtcgaagaatccgacgcctcaccactggcaacagcactaagggagattcacgaagagacgaccctcccagcgtcttctctccagctcttgcgcgtcgggaaaccgtattcttttgtcgatgagagtatcgatagggagtggcagattaatccctttgcgtttcggcttaaaggcgtaaatgagggcggagttggcgaagaaggtattaagctggattgggagcatgaggggtgggagtggtttgatcccgcggatgttataagaaaggatggagagggtggtgtgccgaaacttgtcaatagtttgcgacgcgtgtggcccgagggtgatcttggctcaagggcgggagagatgttgaatgagggtttgaagaaattggctgaggaccgggagagtggtgcgagggaacttgctagaaccggtatctggacattgagagatgtgatttggcaactggatacgacaagagaggttcgagaatggaactggtggaatacagtgaagatgtcggcgtggcatatttgtcaagcgagaccggcgatgggttccgccatcacgagtgcgattctaaaggctttggatgctgttgagagtatccgtcccagtggtgatctgacagaggaggatatcccacggatgttgaatgctttgctggagcaggtggctgccagggccggaaccgcagagatggtcggaaagtcattctcaaattatctgatcaaacatatgatcgagctgagacgattgtccgacagccatatatcgatcctcaccttatcctccagttcgacgatcgtcaattgtctggagggcattactaaagagcttgggatcaaacttgatatacggattcttgagtcaaggcccctttgtgaaggcatatcgcttgcttcgaagctagtggagagcagcgatgtgccgaagatcacgatttactctgatgccgcggttgccagggcggcacaaggcgttgatcttgttctcctgggcgcagatcgaattagttcccagggtgatgtcagcaacaaagttggatctctccccgccgtccttgctgctcgtcacgtagcgccgaacgcaaaagttgttgtcctaagtgacacagacaaaattgcggagcctcagacactcgacgaacatcatgatgaggagaatgatccgtcagaactcagcagggcatgggtagatacgaaaggggcgcaaactgttgagaatcacgagatgattacgatcaagaacccatactttgagtgggtgcctgcaatcctcatcgatgcatatgcaactgagcaaggcatatggagcgtgaagcagatcgctgaacgggcgcagtggattgagaaggagaagaagaggttctttgatgggttgtgagaatgtactgtatatgtaacctggcacaacgaaaatgaaacggtaaaaaagggcgaagaatcgcggttcgaacaggtgtccttgagagaactgagcggaggcttcgagcggccccgagactctgcaaaaccctgcacgcaccagcatcgcgcaaaagaacagaagcagaacaaagagagaaaaaaactaaaaaaaacttgagaaatttacaaaaagaatcctgaacggtcagaagccattgctcttcgagcggaccggaaaacatacagaggatcattttcctggcgactaatttaccattctgcgacactaccggttaggccacaggagtttgatgggaacgtcaattagtaaggcgtacattaacgggttccatataccttagagctactcaagctgcgcagactacgcgcgttgtgattggcggc

SEQ ID NO: 30267 - DNA, 1656 bp, Muscodor strobelii
  misc_feature: SGI cDNA ID NO. 570407
  misc_feature: Encodes the peptide sequence at SEQ ID NO 30268
atggccatgaacctggatctctcaaatgcttcggtcatgaaagacgagcaagggcggcccttcatcatcgtcagagaccagggcaagaagaagcgccagtacggcaacgaagctgtcaagtcacacatcctcgccgcccgcaccgtcgccaacatcgtcaagacctccctcggcccccgcggcctcgacaagatcctcatctcccccgacggcgacatcaccgtcaccaacgatggcgccaccattctgcagcagatggaggtctccaaccacgtagccaagcttctcgtcgagctgtccaaatcacaagatgacgagatcggtgacggaactaccggtgtcgtcgtcttggccggcgctctcctcgaacaggctgccgatctcatagataagggcatccaccccatccgcatagcagacggctacgaccaggcttgtgatatcgcagtccaggagctcgacaggatatcagacaccatagagttcagcaagacagacaccgcaaacctcgtcaaggtcgcccgcacgagtctgggaagcaagatcgtgtccaagtcgcacgatcagttcgccaacatcgccgtcgacgccgttctctccgtcgccgatctcgagcgtaaagatgtcgacttcgatatgatcaaggtcgacggcaaggtaggcggcgcattagaagacaccatcctcgtcaagggtgtcatcgtcgacaaggacttctcccaccctcagatgccctctgaagtcaaggacgccaagatcgccattctcacatgcgccttcgagcccccgaaacccaagacgaagcacagactagacatctcctcggtcgaggaatacaagaagatgcaggcctacgagcgcgagaagttcgtcgagatgattcaacagatcaaggacgctggcgccaatcttgctatttgccagtggggtttcgacgacgaggcgaaccaccttcttctccagaacgagctacctgctgtcaggtgggtaggtggccccgatatcgagcttattgccattgccacgaatggcagaatagtacccagatttgaggacttgagaccagagaaattgggcactgcaggtatcgtcagggaattggagtttggtactacgagggagaagatgctggtcatagaagagtgcgccaatgcaagagctgtcacagtctttgttcgtggcagcaacaagatgatcattgacgaagcccgtcgatccttgcacgacgctctctgcgtagtccgcaacttggtccgcgacaaccgtgttgtgtacggtggtggtgccgcagaaatcgcctgttccctagccgttgaggacgcagccgtcaagacgccaggtctcgagcaatacgcgatgcgcgcgttcgccgaggcccttgacgccgtgcctatggccctagccgagaacagcggtatgaacccgatcgcgacactggctgaggtcaagtcgcagcaagtccgcgctgcccccgaaaccagaggaagactaggtgtggactgcatgaataagggatctaatgacatgaaggaggcttttgtcattgatcctcttattggcaagaagcagcagcttatgcttgctacccagctgtgcagaatggtgctcaaggtcaataatgtcattgtcagcggatctggagatcaggactactag

SEQ ID NO: 30268 - protein, 551 aa, Muscodor strobelii
  misc_feature: SGI Peptide ID NO. 570407
  misc_feature (49)..(546): Pfam Id: PF00118 Pfam Desc: TCP-1/cpn60 chaperonin family
  misc_feature (1)..(551): NCBI GI: 171682508 Blast Desc: protein product [Podospora anserina] gi|170941213|emb|CAP66863.1| protein product [Podospora anserina]
  misc_feature (1)..(551): NCBI GI: 145606158 Blast Desc: conserved [Magnaporthe grisea 70-15] gi|145013879|gb|EDJ98520.1| conserved [Magnaporthe grisea 70-15]
  misc_feature (7)..(551): NCBI GI: 261359410 Blast Desc: T-complex protein 1 subunit epsilon [Verticillium albo-atrum VaMs.102]
  misc_feature (2)..(551): NCBI GI: 256727677 Blast Desc: [Nectria haematococca mpVI 77-13-4]
  misc_feature (9)..(551): NCBI GI: 46135899 Blast Desc: FG09465.1 [Gibberella zeae PH-1]
  misc_feature (12)..(551): NCBI GI: 164426665 Blast Desc: T-complex protein 1 subunit epsilon [Neurospora crassa OR74A] gi|157071427|gb|EAA27329.2| T-complex protein 1 subunit epsilon [Neurospora crassa OR74A]
  misc_feature (27)..(551): NCBI GI: 116202647 Blast Desc: conserved [Chaetomium globosum CBS 148.51] gi|88177726|gb|EAQ85194.1| conserved [Chaetomium globosum CBS 148.51]
  misc_feature (7)..(551): NCBI GI: 156060519 Blast Desc: conserved [Sclerotinia sclerotiorum 1980] gi|154699806|gb|EDN99544.1| conserved [Sclerotinia sclerotiorum 1980]
  misc_feature (1)..(551): NCBI GI: 261198232 Blast Desc: T-complex protein 1 subunit epsilon [Ajellomyces dermatitidis SLH14081] gi|239595481|gb|EEQ78062.1| T-complex protein 1 subunit epsilon [Ajellomyces dermatitidis SLH14081]
  misc_feature (1)..(551): NCBI GI: 259487261 Blast Desc: TPA: t-complex protein 1, epsilon subunit, (AFU_orthologue; AFUA_6G07540) [Aspergillus nidulans FGSC A4]
MAMNLDLSNASVMKDEQGRPFIIVRDQGKKKRQYGNEAVKSHILAARTVANIVKTSLGPRGLDKILISPDGDITVTNDGATILQQMEVSNHVAKLLVELSKSQDDEIGDGTTGVVVLAGALLEQAADLIDKGIHPIRIADGYDQACDIAVQELDRISDTIEFSKTDTANLVKVARTSLGSKIVSKSHDQFANIAVDAVLSVADLERKDVDFDMIKVDGKVGGALEDTILVKGVIVDKDFSHPQMPSEVKDAKIAILTCAFEPPKPKTKHRLDISSVEEYKKMQAYEREKFVEMIQQIKDAGANLAICQWGFDDEANHLLLQNELPAVRWVGGPDIELIAIATNGRIVPRFEDLRPEKLGTAGIVRELEFGTTREKMLVIEECANARAVTVFVRGSNKMIIDEARRSLHDALCVVRNLVRDNRVVYGGGAAEIACSLAVEDAAVKTPGLEQYAMRAFAEALDAVPMALAENSGMNPIATLAEVKSQQVRAAPETRGRLGVDCMNKGSNDMKEAFVIDPLIGKKQQLMLATQLCRMVLKVNNVIVSGSGDQDY

SEQ ID NO: 30269 - DNA, 2329 bp, Muscodor strobelii
  misc_feature: SGI EST ID NO. CUFF.71756.2
  misc_feature: Variant of the nucleotide sequence at SEQ ID NO 30267
gggccgtcaagatcggggggtcgagttgtcgggggtgcctgttcaaattatttctagaatctggacaagacaagcaccagcccaccagcccaccacaagaagcagtctggtgcctcaaccgcagcttcccaacacaacttctttccttgagacgggaccggcctgcagcttgagcgcatccacttcactttccccaagtctcaagctcgagagagctacaaaagtcagacaagatggccatgaacctggatctctcaaatgcttcggtcatgaaagacgagcaagggcggcccttcatcatcgtcagagaccagggcaagaagaagcgccagtacggcaacgaagctgtcaagtcacacatcctcgccgcccgcaccgtcgccaacatcgtcaagacctccctcggcccccgcggcctcgacaagatcctcatctcccccgacggcgacatcaccgtcaccaacgatggcgccaccattctgcagcagatggaggtctccaaccacgtagccaagcttctcgtcgagctgtccaaatcacaagatgacgagatcggtgacggaactaccggtgtcgtcgtcttggccggcgctctcctcgaacaggctgccgatctcatagataagggcatccaccccatccgcatagcagacggctacgaccaggcttgtgatatcgcagtccaggagctcgacaggatatcagacaccatagagttcagcaagacagacaccgcaaacctcgtcaaggtcgcccgcacgagtctgggaagcaagatcgtgtccaagtcgcacgatcagttcgccaacatcgccgtcgacgccgttctctccgtcgccgatctcgagcgtaaagatgtcgacttcgatatgatcaaggtcgacggcaaggtaggcggcgcattagaagacaccatcctcgtcaagggtgtcatcgtcgacaaggacttctcccaccctcagatgccctctgaagtcaaggacgccaagatcgccattctcacatgcgccttcgagcccccgaaacccaagacgaagcacagactagacatctcctcggtcgaggaatacaagaagatgcaggcctacgagcgcgagaagttcgtcgagatgattcaacagatcaaggacgctggcgccaatcttgctatttgccagtggggtttcgacgacgaggcgaaccaccttcttctccagaacgagctacctgctgtcaggtgggtaggtggccccgatatcgagcttattgccattgccacgaatggcagaatagtacccagatttgaggacttgagaccagagaaattgggcactgcaggtatcgtcagggaattggagtttggtactacgagggagaagatgctggtcatagaagagtgcgccaatgcaagagctgtcacagtctttgttcgtggcagcaacaagatgatcattgacgaagcccgtcgatccttgcacgacgctctctgcgtagtccgcaacttggtccgcgacaaccgtgttgtgtacggtggtggtgccgcagaaatcgcctgttccctagccgttgaggacgcagccgtcaagacgccaggtctcgagcaatacgcgatgcgcgcgttcgccgaggcccttgacgccgtgcctatggccctagccgagaacagcggtatgaacccgatcgcgacactggctgaggtcaagtcgcagcaagtccgcgctgcccccgaaaccagaggaagactaggtgtggactgcatgaataagggatctaatgacatgaaggaggcttttgtcattgatcctcttattggcaagaagcagcagcttatgcttgctacccagctgtgcagaatggtgctcaaggtcaataatgtcattgtcagcggatctggagatcaggactactagagatcgaaaatttggatgagtagtgtttcaagaaagaagacgcagtcacgatgaaaactgcttcactgcggcgtcccaccccagggagcatgaagcatgcacgcggtgaggccagatgatgtgggcgatactaatgtggcatctcgagcaatgtcataactccggctcaagagacagatgtctatccgtacctatctaaagatatagggaaagaaaggatactgttggatgtggtggttgtagatagagccccgtctatgagatgatgaggcgggctgtcaaggatataaacaaaatcgagagataccttttagagctgcctctactccctaagcttccttccgcttcctgattgagaaagtctttgttctattctcatactacgagaacgacgctgtagcttcagatattctcaagtattatgtgcaattacctagaga

SEQ ID NO: 30270 - DNA, 477 bp, Muscodor strobelii
  misc_feature: SGI cDNA ID NO. 570408
  misc_feature: Encodes the peptide sequence at SEQ ID NO 30271
atgtcccagtctcaatggaaaaggccgacctgggccgaaatgctcgagcagaataagcaatggcgggcttcgaacaagcataatggatatcccaagatcgacgacgcaatggaggctgggtttgcgcctccgggggttttcatcggtgagtatttgtcccctgaggttatgtcttgtatagacccccgtgcttctccggaggaattacttgggcttcagggacatgaagcattcatagtcggcgatttaggaggaagaatcgggaatgcgattcgggagttgctgtaccttgattatactacgcaggagcgtgtgcttactgatattgtcattattcatcatactgactgtggcctgacgcaccaccacggcgacgaagtctcctctgatctcaagtctacactcattggtattcctggagatttgtcattccctacttatgatgggagttctgttgagaagtacgttcctttctaa

SEQ ID NO: 30271 - protein, 158 aa, Muscodor strobelii
  misc_feature: SGI Peptide ID NO. 570408
  misc_feature (9)..(122): NCBI GI: 242783861 Blast Desc: conserved [Talaromyces stipitatus ATCC 10500] gi|218720418|gb|EED19837.1| conserved [Talaromyces stipitatus ATCC 10500]
  misc_feature (13)..(144): NCBI GI: 162449584 Blast Desc: carbonate hydratase [Sorangium cellulosum 'So ce 56'] gi|161160166|emb|CAN91471.1| carbonate hydratase [Sorangium cellulosum 'So ce 56']
  misc_feature (19)..(118): NCBI GI: 242789964 Blast Desc: conserved [Talaromyces stipitatus ATCC 10500] gi|218718058|gb|EED17478.1| conserved [Talaromyces stipitatus ATCC 10500]
  misc_feature (25)..(135): NCBI GI: 156741318 Blast Desc: carbonic anhydrase [Roseiflexus castenholzii DSM 13941] gi|156232646|gb|ABU57429.1| carbonic anhydrase [Roseiflexus castenholzii DSM 13941]
  misc_feature (43)..(158): NCBI GI: 256723746 Blast Desc: NECHADRAFT_97324 [Nectria haematococca mpVI 77-13-4]
  misc_feature (38)..(120): NCBI GI: 111222223 Blast Desc: FRAAL2803 [Frankia alni ACN14a] gi|111149755|emb|CAJ61447.1| [Frankia alni ACN14a]
  misc_feature (56)..(158): NCBI GI: 148657787 Blast Desc: carbonic anhydrase [Roseiflexus sp. RS-1] gi|148569897|gb|ABQ92042.1| carbonic anhydrase [Roseiflexus sp. RS-1]
  misc_feature (56)..(147): NCBI GI: 212527820 Blast Desc: carbonic anhydrase, [Penicillium marneffei ATCC 18224] gi|210073465|gb|EEA27552.1| carbonic anhydrase, [Penicillium marneffei ATCC 18224]
  misc_feature (59)..(133): NCBI GI: 212545609 Blast Desc: conserved [Penicillium marneffei ATCC 18224] gi|210064478|gb|EEA18573.1| conserved [Penicillium marneffei ATCC 18224]
  misc_feature (13)..(132): NCBI GI: 108805156 Blast Desc: carbonic anhydrase [Rubrobacter xylanophilus DSM 9941] gi|108766399|gb|ABG05281.1| carbonic anhydrase [Rubrobacter xylanophilus DSM 9941]
MSQSQWKRPTWAEMLEQNKQWRASNKHNGYPKIDDAMEAGFAPPGVFIGEYLSPEVMSCIDPRASPEELLGLQGHEAFIVGDLGGRIGNAIRELLYLDYTTQERVLTDIVIIHHTDCGLTHHHGDEVSSDLKSTLIGIPGDLSFPTYDGSSVEKYVPF

SEQ ID NO: 30272 - DNA, 144 bp, Muscodor strobelii
  misc_feature: SGI EST ID NO. CUFF.71566.0
  misc_feature: Variant of the nucleotide sequence at SEQ ID NO 30270
gggacatgaagcattcatagtcggcgatttaggaggaagaatcgggaatgcgattcgggagttgctgtaccttgattatactacgcaggagcgtgtgcttactgatattgtcattattcatcatactggtatgtgctttctccc

SEQ ID NO: 30273 - DNA, 3585 bp, Muscodor strobelii
  misc_feature: SGI cDNA ID NO. 570409
  misc_feature: Encodes the peptide sequence at SEQ ID NO 30274
atgccccaagaccaatgggaagagtataaggacacgatacaatgcctttacttacttgataatctcaagttagaagatgtgtgcagtcaaatgaaggaaaaatatggattcgacaagaaaaaatctcagtacgagtacaagctcaagaaatggggcatcaagaaaaaccgcacccgtgaagaatggctgtacattgcgcatagagttcagaagagaaatcaggagggcaaaatgtccaatgtcaggctctctggcatgctgttaccctcagccaaagttcgccgagaagtacaacgatataggtcaatcccaactgctagtcaattcaggatgcgtgatcatagccctcagagcccagaccaaaatatcatccgtgtagcaactccagatgttccaaatttccgtagcccatggcctcaaagccttccatggctaaaatttacaatgctcttcgacttcgagcttttccagtcatctgagtcgacgaaacttttgacaacgagtactgcccttgcatctgcgcagggagtagtttcaaatcctccagatgtttgcaaagaggtcagtgctcgccttcgcttcatcccgcacaactgcgacggagagggccaagactcctatgcatctttgtgcagaggcggcgcagcagcaatcgcgacagggttgctcaagatcattctttaccatttagcaaataaggatctccgaacggcgaatgtgtcccgcctatcccatggctatcataatgacattttcatacttcggtgtctcgattggttcacagaaaatagggctgagtggctgggtcacctgcttgaaatacattctccaaccaccgacgccatcgtcgaagctatatacgaatgcgcaattcggcagaagaggcatgcgctggtaaagcagttgattcaagctggagtggatttaaattcgaaagtaaattaccattggaaccccgatcaccgcacggatgcggaacgaggcaggttacaaatagaaatgtaccacgacccggattgtaactatacaatatgtagtggcttagaagtcgccattcgaaagtccgatgtgtgtcttgcaaatatcctcctcgaagctggcgcaaaattcgatactcacgacccgccattgacggagcaaatcgcaatgttcatggaagaggaggtagctttagagtttaccaaatcgctcttagaccgcggcttctacttcgatttagaggaaatgctcacaatagcaattatacaacagcataatcatcttgcgaactttttgatggaaatgctccgccaaagcgcaactcttcagcagcacatcttccaccgatttgctagaccatttggaaaatttggtgtttcaattcgtcataaaccctactccgcccggctgctggtaaagccttcattgctgtatgtcgccattatttcgaacaacacatctatggtcaagatcatccttgatctgactctcagttctatggcaatgagtgacaaacgcatactcaaggatatatttgttattgcatctttggcaggggatgctagaacaattgagcgtttagttgacctagacttggaatgggatggagaatggcccgacggcattagccctctcgtgggaacagcgtggaatcctgactttcgaattgtggaaatggttgtaagtgctggtgcatactcagctgacgatatcgagtactatggggaggggtcacatagaccgttacctatccatgttgctgcacgagctgggaattcaaatctagtagaatggttagttcgtcgagggagagtacttaacgcacaattcattcgagagaggccctgggattggcttgttttcccggatatcgggaactcgcgtatgtcaaaaccatgtatcgaaacgccccttcagcttgccattcaaagcggcgacctcgcaactattgcccaactatctcatgcagaattacttggtggcgagcttatcagcgcaaccagactaggaaatgaagcggtcatatcaacgcttctgcaaagaggggcaaatgttctcgcgtcaattgatgaggacaatgtgcttcgagcggctgctgagactggagatttaaacatcatgttgttgtatttctcatctgggggaacatataaatcttcggctcttctagaagctgttaaggccgcggtggcctcgcaggacgcgtcgattgtacggcttctagcttcacatcgacatgtagaggtaatcgacagttttgagtcgtccgcactggttttagctgcctggagatcacaaacatcgctcatcaatattttactagacaccaaatttctaccggactctgtgcaatctttctatgagatcaagcatctccaagatagtgactctcgcatatggccgcccacagcttcgatgtacccgaaaggtgtaacacctttgtatgccatggctgcaaaaggtgacaggggactcctcgaacgactcattcaggcaggttactcagctcaacagacaggcatatctcctagcgcccgtttgggtccggaatataaatctgcactgtccctttttgcgtcgtacttccctcctacaaaggatgatcctaagaggacacagcacctacttcatgaatacttatgtctccgtgccccccagcaaatagaacagtgcatttcctgcctggagagttttgaatttagcatcgaatccaggacgtctttacaacgagcggctgagtataccgatatccgtccaatccgtcttctcattgacaaaggcgccaacataaatgctatggcagcacaagatagaggcgctacagcgctacaagtcactgccatctatggacatatacacatcgctcgacttctcttggctcatggagcgcacgtgaatgcacctggcgcaaaattctttggacggacagccctcgagggagcatcagagcatggaaggctggacatggtccagcttttactagatcacggtgcacaattggaaggggccttaagaatacattatatccgatctatagcatatgcgaagaaggagggccactttgcgctggcaaaacttctccaaaaatttggtggttggtcagaccgagatcaagagatctgccggagtagaaatatcttgaatgatgggggatactttgtttacacgtccgaaactcaggattggcatttccgacatgttgaatacgcggatgaacagttcgatgatctctgtagctggtcatctgcgtcatcatccagcgacgaaacgaatagttcacacagttcggaaatagagtacttcccgcaagctgagaaaagtagagaagcttccgaaatagcgtctgaagaaaacggcgtgcggttgcaagatgcccagccgaatgatatcaatagcttcacgcacatggaacttgaacgcatacatcaggatgtacaatgggacattgacacggaaggagatctaggtgacagcagcaataggtatacacaaccccgcgatgaggcaggggacataggattttcacttgggcgatatctcatcgaaagcgaggaaggaagccgcttctggtttgaagacaacatggaggactgctgggctagctga

SEQ ID NO: 30274 - protein, 1194 aa, Muscodor strobelii
  misc_feature: SGI Peptide ID NO. 570409
  misc_feature (931)..(963): Pfam Id: PF00023 Pfam Desc: Ankyrin repeat
  misc_feature (966)..(993): Pfam Id: PF00023 Pfam Desc: Ankyrin repeat
  misc_feature (629)..(1032): NCBI GI: 225684431 Blast Desc: conserved [Paracoccidioides brasiliensis Pb03]
  misc_feature (649)..(1094): NCBI GI: 256730275 Blast Desc: NECHADRAFT_82615 [Nectria haematococca mpVI 77-13-4]
  misc_feature (898)..(1092): NCBI GI: 145252920 Blast Desc: An16g06710 [Aspergillus niger] gi|134083528|emb|CAK47005.1| protein product [Aspergillus niger]
  misc_feature (468)..(1023): NCBI GI: 67516937 Blast Desc: AN0750.2 [Aspergillus nidulans FGSC A4] gi|40746236|gb|EAA65392.1| AN0750.2 [Aspergillus nidulans FGSC A4] gi|259488972|tpe|CBF88858.1| TPA: [Aspergillus nidulans FGSC
  misc_feature (899)..(1032): NCBI GI: 115492243 Blast Desc: [Aspergillus terreus NIH2624] gi|114197609|gb|EAU39309.1| [Aspergillus terreus NIH2624]
  misc_feature (656)..(1023): NCBI GI: 238843722 Blast Desc: ankyrin repeat protein [Microsporum canis CBS 113480]
  misc_feature (564)..(1028): NCBI GI: 240110365 Blast Desc: ankyrin repeat containing protein [Coccidioides posadasii C735 delta SOWgp]
  misc_feature (577)..(1019): NCBI GI: 258565299 Blast Desc: [Uncinocarpus reesii 1704] gi|237907095|gb|EEP81496.1| [Uncinocarpus reesii 1704]
  misc_feature (1)..(314): NCBI GI: 67516937 Blast Desc: AN0750.2 [Aspergillus nidulans FGSC A4] gi|40746236|gb|EAA65392.1| AN0750.2 [Aspergillus nidulans FGSC A4] gi|259488972|tpe|CBF88858.1| TPA: [Aspergillus nidulans FGSC
  misc_feature (764)..(1023): NCBI GI: 169619886 Blast Desc: SNOG_13142 [Phaeosphaeria nodorum SN15] gi|160703918|gb|EAT79469.2| SNOG_13142 [Phaeosphaeria nodorum SN15]
MPQDQWEEYKDTIQCLYLLDNLKLEDVCSQMKEKYGFDKKKSQYEYKLKKWGIKKNRTREEWLYIAHRVQKRNQEGKMSNVRLSGMLLPSAKVRREVQRYRSIPTASQFRMRDHSPQSPDQNIIRVATPDVPNFRSPWPQSLPWLKFTMLFDFELFQSSESTKLLTTSTALASAQGVVSNPPDVCKEVSARLRFIPHNCDGEGQDSYASLCRGGAAAIATGLLKIILYHLANKDLRTANVSRLSHGYHNDIFILRCLDWFTENRAEWLGHLLEIHSPTTDAIVEAIYECAIRQKRHALVKQLIQAGVDLNSKVNYHWNPDHRTDAERGRLQIEMYHDPDCNYTICSGLEVAIRKSDVCLANILLEAGAKFDTHDPPLTEQIAMFMEEEVALEFTKSLLDRGFYFDLEEMLTIAIIQQHNHLANFLMEMLRQSATLQQHIFHRFARPFGKFGVSIRHKPYSARLLVKPSLLYVAIISNNTSMVKIILDLTLSSMAMSDKRILKDIFVIASLAGDARTIERLVDLDLEWDGEWPDGISPLVGTAWNPDFRIVEMVVSAGAYSADDIEYYGEGSHRPLPIHVAARAGNSNLVEWLVRRGRVLNAQFIRERPWDWLVFPDIGNSRMSKPCIETPLQLAIQSGDLATIAQLSHAELLGGELISATRLGNEAVISTLLQRGANVLASIDEDNVLRAAAETGDLNIMLLYFSSGGTYKSSALLEAVKAAVASQDASIVRLLASHRHVEVIDSFESSALVLAAWRSQTSLINILLDTKFLPDSVQSFYEIKHLQDSDSRIWPPTASMYPKGVTPLYAMAAKGDRGLLERLIQAGYSAQQTGISPSARLGPEYKSALSLFASYFPPTKDDPKRTQHLLHEYLCLRAPQQIEQCISCLESFEFSIESRTSLQRAAEYTDIRPIRLLIDKGANINAMAAQDRGATALQVTAIYGHIHIARLLLAHGAHVNAPGAKFFGRTALEGASEHGRLDMVQLLLDHGAQLEGALRIHYIRSIAYAKKEGHFALAKLLQKFGGWSDRDQEICRSRNILNDGGYFVYTSETQDWHFRHVEYADEQFDDLCSWSSASSSSDETNSSHSSEIEYFPQAEKSREASEIASEENGVRLQDAQPNDINSFTHMELERIHQDVQWDIDTEGDLGDSSNRYTQPRDEAGDIGFSLGRYLIESEEGSRFWFEDNMEDCWAS

SEQ ID NO: 30275 - DNA, 426 bp, Muscodor strobelii
  misc_feature: SGI cDNA ID NO. 570410
  misc_feature: Encodes the peptide sequence at SEQ ID NO 30276
atgacagaaatcaattttgtctccgaagctggctcgtttcacgagcacatgtcctcatctaaggacagccgcaaaaagcccgtcctaattctagtggacatgccgcctgagactcgcaacaagatatataagcttgccgtcattcccaatgaccataacgatctctttgtccgcttcgtcggaaggtccacggagaccggcaagaagaagatcttgctcccgcctcccctggcccaagtgaatcgactgattggcttagaggtgccgtatttctactacagtagttgttatttcgagatcgttcttgatatcgagcgcgctgtcaacggaggcaacgatcctctggctgtaggggacgctcagggaggtatcggcattggagatgtctacccgttgattgagattgcctggacgcaaggtggctaa

SEQ ID NO: 30276 - protein, 141 aa, Muscodor strobelii
  misc_feature: SGI Peptide ID NO. 570410
MTEINFVSEAGSFHEHMSSSKDSRKKPVLILVDMPPETRNKIYKLAVIPNDHNDLFVRFVGRSTETGKKKILLPPPLAQVNRLIGLEVPYFYYSSCYFEIVLDIERAVNGGNDPLAVGDAQGGIGIGDVYPLIEIAWTQGG

SEQ ID NO: 30277 - DNA, 2163 bp, Muscodor strobelii
  misc_feature: SGI cDNA ID NO. 570411
  misc_feature: Encodes the peptide sequence at SEQ ID NO 30278
atgtggcattgtttagcgatcgtattgggcatcatatcgttgatcagtcgcgttcagtcacaatgctacacaactcctgggaacgtcgtgttgtgcgatagttacccgaatatcttccccgaatgcgaagccgagaacctgaatctctgcaagcaggcattgagcaaaatttccagcggcgagacctatcacgatgacaaaccagctataaccgccacagcaggcgatctgacttgctatgctctttatgactgtgggacgaccgatgagccagacgtttcaggcgcggacttgataaacggacttcagaaaatcatcgatagctgcccgaccgtttgcgcaatctaccagatcaagcaatgttgcgctgtgcgtttctacatcctgagctcgagcacgggcggtgaacctcctcctcctgtatctgtgacgccaatagagccgtcgacatcaggtagcatagtagtctaccctacagtctcagctgtgacaagctctgctgcccaggcctcttccgtggtagtcgcggcgcaacaggcggtttctgcgtggtctgcagaaccaacgaacagcaatctagccatcgccgcccagagcgctattgataatgcactcttagtcgcacaaaatgtcaccgacttagccgctgcgtacgcctcggcaccaaatgcgctcaactcccttgtggcctgggtctcgtctttattctcagcctccttgtctgcagcgacggcggtatcagcactatctgcagccgcggcggtagctttggctgcagcgatagaggcagcagccattgcgaatgaggctgccattgcagcagtggatacaccgagctcgtcgacgagcacatccacgtcttcagtctgtagcttttgcctcgcttgcgtcgatggtgtggtgccggcgcctacgtcaacgatgtccgcagatctagatggtgactcggatacgactacgttagacccgtacccaacacctacagctgctaaacgagatcatcttgtgatctctcctatagtcgtggaagtcagacaggttcagccgtatcccgccgaatcaatacaaaagagatactatgaagatattcaagactccgataacattgacaacaaacagctacaggaaatagaggagagtgtccagacattggaacgccggggtctgcaagatcgcagcgcatcactctgcaaggtcgacgtgggcaaatccgtcccgaacgcatattcatggacaagcacgggaaacaaccgatacgcgccgtactacgactactggatgtccaaggcgtgccaaggctcattcaatttcggtattgagaacgcgacaacggtagcagggctagacttactactgccaatgaacaccgcctactctactgcgatgcctcgctacgcaacggaacacgtctacgaaatccagcagatcaagcgatttttcaactggctgcccaccaacgaagttgctcttcagccatattacacgggtgccaagccggctgatatgttctgtaacaaagtgatcaagaagctcttcatcacgaagacaagatggacaacgaccaaatggtacacgcccgagggagccacctcgggctgggtacagcccatccaggatatctactctaacctcgagggctcattccggtcgaacaatccagacggcgaatttgtctacctagccaaaaatctgaacagcatgaaagaagtattcttctccggcgcatcacccagcttcgaggtgacgtacgccgacactctagaccaagtagcgcgcgccgtactactagcgaaatacctgcaagatccgctcgtagcgggtatatataaagacgtcagtgacaggatacgcagtcgatttatgtactttggaaacgcatgcaagaatgccaatacgcagataggcaagaagctacagaatataaactgggaagacaggtacgacacgtgggaaagggcgtatatcaccgggctgagccagagaatgagcacgttcatcagggatgggctgcttaaggcactggcccagatcacggtggctattcccaaggcgcaaaatgctggcacgaggatgaagttgactatgttgcaggctgacgtgcagaggcaacaggcagcgcttaatgcgcctggagtgacgaacttagatgttctacgacgctga

SEQ ID NO: 30278 - protein, 720 aa, Muscodor strobelii
  misc_feature: SGI Peptide ID NO. 570411
MWHCLAIVLGIISLISRVQSQCYTTPGNVVLCDSYPNIFPECEAENLNLCKQALSKISSGETYHDDKPAITATAGDLTCYALYDCGTTDEPDVSGADLINGLQKIIDSCPTVCAIYQIKQCCAVRFYILSSSTGGEPPPPVSVTPIEPSTSGSIVVYPTVSAVTSSAAQASSVVVAAQQAVSAWSAEPTNSNLAIAAQSAIDNALLVAQNVTDLAAAYASAPNALNSLVAWVSSLFSASLSAATAVSALSAAAAVALAAAIEAAAIANEAAIAAVDTPSSSTSTSTSSVCSFCLACVDGVVPAPTSTMSADLDGDSDTTTLDPYPTPTAAKRDHLVISPIVVEVRQVQPYPAESIQKRYYEDIQDSDNIDNKQLQEIEESVQTLERRGLQDRSASLCKVDVGKSVPNAYSWTSTGNNRYAPYYDYWMSKACQGSFNFGIENATTVAGLDLLLPMNTAYSTAMPRYATEHVYEIQQIKRFFNWLPTNEVALQPYYTGAKPADMFCNKVIKKLFITKTRWTTTKWYTPEGATSGWVQPIQDIYSNLEGSFRSNNPDGEFVYLAKNLNSMKEVFFSGASPSFEVTYADTLDQVARAVLLAKYLQDPLVAGIYKDVSDRIRSRFMYFGNACKNANTQIGKKLQNINWEDRYDTWERAYITGLSQRMSTFIRDGLLKALAQITVAIPKAQNAGTRMKLTMLQADVQRQQAALNAPGVTNLDVLRR

SEQ ID NO: 30279 - DNA, 588 bp, Muscodor strobelii
  misc_feature: SGI EST ID NO. CUFF.71599.0
  misc_feature: Variant of the nucleotide sequence at SEQ ID NO 30277
gccacagcaggcgatctgacttgctatgctctttatgactgtgggacgaccgatgagccagacgtttcaggcgcggacttgataaacgggtgagtaatacatcagatcagccaatccatctcattcggttgcatgaatctccttctgacagctcaatagacttcagaaaatcatcgatagctgcccgaccgtttgcgcaatctaccagatcaagcaatgttgcgctgtgcgtttctacatcctgagctcgagcacgggcggtgaacctcctcctcctgtatctgtgacgccaatagagccgtcgacatcaggtagcatagtagtctaccctacagtctcagctgtgacaagctctgctgcccaggcctcttccgtggtagtcgcggcgcaacaggcggtttctgcgtggtctgcagaaccaacgaacagcaatctagccatcgccgcccagagcgctattgataatgcactcttagtcgcacaaaatgtcaccgacttagccgctgcgtacgcctcggcaccaaatgcgctcaactcccttgtggcctgggtctcgtctttattctcagcctccttgtctgcagcgac

SEQ ID NO: 30280 - DNA, 2094 bp, Muscodor strobelii
  misc_feature: SGI cDNA ID NO. 570412
  misc_feature: Reduced expression when VOC is produced
  misc_feature: Encodes the peptide sequence at SEQ ID NO 30281
atggctttagcaacgcagtacgagggcgtattgcccttacacatggtccagaaacccccgttcatggtgcaggatatgagcgttgccgaagtcgaaggagagactagaccttaccgacatgccaaggccaaggatgggttcattacacggccttctcccgaacagaccacgatctacgagctattcacagctacggccaagaaatacgccgataaagccgctatcggttctcgcagcctcataaagacacatgttgagaagaagaaagttcccaaggttgtggatggcgtcaagaccgaggtcgagaaacagtggacttatttcgagctgagcccgtacaagttccttacgcacaaggagtatgctacgagagccctgaacttgggtgctgggttgcggaaattgggaattgagccgggcgatagagtgcatatctttgcgaccactagcgcaaactggctctgcatgtcccacggctgttcctcccaatccatcaccatcgccaccgcatacgataccctaggccccgacgccgtcgagtactctctcacgcaaaccgaggccaaagccatgtacaccgatccccacctcttcaagaccgcgagccgcccgctgaagaacgcaaagagcgtcaagttcttgatttacaacgactctaccaacatccccatatccgacgaagaattcagtgaattccgagaagccaattctcacctcacaatcatgtcctacaccgagctcgtcgagctaggagccgaatacccccacgagcccacaccgccaaaggcgtctgatctatgctgcataatgtacacctcgggctcctccggaacacccaagggtgtacccatcacgcacgaaaatctagtcgcgggcgtcatgggtctatggagcgtcatcgaagaaacagttacggcgaaagaagtaatcctcgcctacctaccgctagcccacatcctcgagatggcggtggaaaacatcgtcatgatgatcggcgggacgctcggttacgggtcaccgaggacattatcagatacttctgtgaagaattgtgcgggcgatatgcgagaactcgctccgacagtcatggtcggcgttccgcagatctgggagacgatacggaaaggcatcgagagcagagtcaactccggaagtgtcataacgaagaatttgttttggggcgcgtacaacctcaagtctatgctagtctctgctggattaccaggtggtttcctactcgatgctttggtgttcaacaaagtccggcatctaactggcggaagggtgagattcctttttaacggtggtagtggcatatctgagggaactcttcaattcgtcagcatggtgcttgcgcccatggtcaccgggtacggattgaccgagacctgcgcaaacggatctctgggctgccccttgcagtggacgcccaatgctatcggtcctgtgccgcccagcatggagattaaacttgtttctctgccggatgttggatattccaccaagactacgccaccccaaggagagattctacttaggggtgcgccggtggcgaagagctattacaagaatcccgaagaaacagccaaagccttcacggacgacggatggttcaagacaggcgatatcggcgaaatcgacaccaacgggcacatcaaagtcatcgaccgcgtcaagaatctagtcaagatgcagggcggggagtacatcgcgctggagaaactcgaggcgatttacagagggtcgcagtacgtcaataatatcatgatacacggggattcgagcgcgcctaaaccgattgcggttgtggcgccgaatgagaaacctctgcatgagttggcgaagagtttaggtgttgaggagcagggggcagcgggggataagagggttagggataaggtgctggcagatttgaatgcggtggggaagaaggcggggttgagtggcatggagatgtgtgctggtgttgttgttgttgaggaggagtggacgcctgcttctggcctcgttacggcgacgcagaaggtgaatcgtagagcgttgagggatcattataagatggagatcgagaagtgtgtcaagcagtcttcttga

SEQ ID NO: 30281 - protein, 697 aa, Muscodor strobelii
  misc_feature: SGI Peptide ID NO. 570412
  misc_feature (117)..(590): Pfam Id: PF00501 Pfam Desc: AMP-binding enzyme
  misc_feature (12)..(694): NCBI GI: 116202669 Blast Desc: CHGG_09219 [Chaetomium globosum CBS 148.51] gi|88177737|gb|EAQ85205.1| CHGG_09219 [Chaetomium globosum CBS 148.51]
  misc_feature (3)..(693): NCBI GI: 85085775 Blast Desc: NCU03929 [Neurospora crassa OR74A] gi|7899418|emb|CAB91708.1| related to long-chain-fatty-acid--CoA ligase [Neurospora crassa] gi|28918661|gb|EAA28332.1| NCU03929
  misc_feature (11)..(693): NCBI GI: 171682488 Blast Desc: protein product [Podospora anserina] gi|170941203|emb|CAP66853.1| protein product [Podospora anserina]
  misc_feature (8)..(692): NCBI GI: 261359415 Blast Desc: long-chain-fatty-acid-CoA ligase [Verticillium albo-atrum VaMs.102]
  misc_feature (9)..(694): NCBI GI: 256734114 Blast Desc: [Nectria haematococca mpVI 77-13-4]
  misc_feature (44)..(696): NCBI GI: 256719956 Blast Desc: NECHADRAFT_89468 [Nectria haematococca mpVI 77-13-4]
  misc_feature (9)..(696): NCBI GI: 46128331 Blast Desc: FG08543.1 [Gibberella zeae PH-1]
  misc_feature (9)..(696): NCBI GI: 256729020 Blast Desc: NECHADRAFT_68906 [Nectria haematococca mpVI 77-13-4]
  misc_feature (10)..(696): NCBI GI: 240107562 Blast Desc: Long-chain-fatty-acid-CoA ligase, [Coccidioides posadasii C735 delta SOWgp]
  misc_feature (10)..(696): NCBI GI: 119177850 Blast Desc: CIMG_07819 [Coccidioides immitis RS]
  misc_feature (32)..(690): SWISSPROT Homolog: EC 6.2.1.3 Long-chain-fatty-acid--CoA ligase
  misc_feature: Useful for introducing or modulating the production of volatile compounds
MALATQYEGVLPLHMVQKPPFMVQDMSVAEVEGETRPYRHAKAKDGFITRPSPEQTTIYELFTATAKKYADKAAIGSRSLIKTHVEKKKVPKVVDGVKTEVEKQWTYFELSPYKFLTHKEYATRALNLGAGLRKLGIEPGDRVHIFATTSANWLCMSHGCSSQSITIATAYDTLGPDAVEYSLTQTEAKAMYTDPHLFKTASRPLKNAKSVKFLIYNDSTNIPISDEEFSEFREANSHLTIMSYTELVELGAEYPHEPTPPKASDLCCIMYTSGSSGTPKGVPITHENLVAGVMGLWSVIEETVTAKEVILAYLPLAHILEMAVENIVMMIGGTLGYGSPRTLSDTSVKNCAGDMRELAPTVMVGVPQIWETIRKGIESRVNSGSVITKNLFWGAYNLKSMLVSAGLPGGFLLDALVFNKVRHLTGGRVRFLFNGGSGISEGTLQFVSMVLAPMVTGYGLTETCANGSLGCPLQWTPNAIGPVPPSMEIKLVSLPDVGYSTKTTPPQGEILLRGAPVAKSYYKNPEETAKAFTDDGWFKTGDIGEIDTNGHIKVIDRVKNLVKMQGGEYIALEKLEAIYRGSQYVNNIMIHGDSSAPKPIAVVAPNEKPLHELAKSLGVEEQGAAGDKRVRDKVLADLNAVGKKAGLSGMEMCAGVVVVEEEWTPASGLVTATQKVNRRALRDHYKMEIEKCVKQSS

SEQ ID NO: 30282 - DNA, 3393 bp, Muscodor strobelii
  misc_feature: SGI EST ID NO. CUFF.71615.0
  misc_feature: Variant of the nucleotide sequence at SEQ ID NO 30280
attggattaagggaaatgagagatagcttcgaagatttttacagaccaaacaacacagtaagttgaaaattacacagcattcttgccaaggatcatgtgttgccgagttcgatatcacacaagggatcggagacggaggagacgtcggcgtgagcgaatgcctcggcattctggagttaagaagtggcacgggcaccatcgtaaagttaaatttcgagttcctacagtagcgccaacgttggcccaggggggcgatgaaaacaagacgccgtatgtggagcaatgggcgtttaacttttccggtctcttgggatcaggagtattggcaagaggcatttgctgggaatggcctggtaaaatagagtgaggtatccgtattctgtacgtagagtgaggttcccgcctggcccacgcactgccctgactgccccgctgacgttgtatttgacccctgtccccacattcccgactggtacagtgctatgaatggagctatgaatgacgctggaaaattcaaggtgagtgcaacatttgaaaatcggtggttctattgcgataaatattcccactcttcacattcactcgtcacatacaagacctctttcaaaacttcagattgaagtgtgcagactcatctattgatttataacccgggtcgccgtaatctctaagccgcaacactagtgccaaccttaatcctgcgcgtcgccgaggtctcaggtgctcaacttacacgagacctgctgctgccttggagctgaccgaagcgagctctcgctacaacctcgctgagcaaattcacgctctccttctttcttccatctctgagcttcgagaacgacgacattggcagacaggatggctttagcaacgcagtacgagggcgtattgcccttacacatggtccagaaacccccgttcatggtgcaggatatgagcgttgccgaagtcgaaggagagactagaccttaccgacatgccaaggccaaggatgggttcattacacggccttctcccgaacagaccacgatctacgagctattcacagctacggccaagaaatacgccgataaagccgctatcggttctcgcagcctcataaagacacatgttgagaagaagaaagttcccaaggttgtggatggcgtcaagaccgaggtcgagaaacagtggacttatttcgagctgagcccgtacaagttccttacgcacaaggagtatgctacgagagccctgaacttgggtgctgggttgcggaaattgggaattgagccgggcgatagagtgcatatctttgcgaccactagcgcaaactggctctgcatgtcccacggctgttcctcccaatccatcaccatcgccaccgcatacgataccctaggccccgacgccgtcgagtactctctcacgcaaaccgaggccaaagccatgtacaccgatccccacctcttcaagaccgcgagccgcccgctgaagaacgcaaagagcgtcaagttcttgatttacaacgactctaccaacatccccatatccgacgaagaattcagtgaattccgagaagccaattctcacctcacaatcatgtcctacaccgagctcgtcgagctaggagccgaatacccccacgagcccacaccgccaaaggcgtctgatctatgctgcataatgtacacctcgggctcctccggaacacccaagggtgtacccatcacgcacgaaaatctagtcgcgggcgtcatgggtctatggagcgtcatcgaagaaacagttacggcgaaagaagtaatcctcgcctacctaccgctagcccacatcctcgagatggcggtggaaaacatcgtcatgatgatcggcgggacgctcggttacgggtcaccgaggacattatcagatacttctgtgaagaattgtgcgggcgatatgcgagaactcgctccgacagtcatggtcggcgttccgcagatctgggagacgatacggaaaggcatcgagagcagagtcaactccggaagtgtcataacgaagaatttgttttggggcgcgtacaacctcaagtctatgctagtctctgctggattaccaggtggtttcctactcgatgctttggtgttcaacaaagtccggcatctaactggcggaagggtgagattcctttttaacggtggtagtggcatatctgagggaactcttcaattcgtcagcatggtgcttgcgcccatggtcaccgggtacggattgaccgagacctgcgcaaacggatctctgggctgccccttgcagtggacgcccaatgctatcggtcctgtgccgcccagcatggagattaaacttgtttctctgccggatgttggatattccaccaagactacgccaccccaaggagagattctacttaggggtgcgccggtggcgaagagctattacaagaatcccgaagaaacagccaaagccttcacggacgacggatggttcaagacaggcgatatcggcgaaatcgacaccaacgggcacatcaaagtcatcgaccgcgtcaagaatctagtcaagatgcagggcggggagtacatcgcgctggagaaactcgaggcgatttacagagggtcgcagtacgtcaataatatcatgatacacggggattcgagcgcgcctaaaccgattgcggttgtggcgccgaatgagaaacctctgcatgagttggcgaagagtttaggtgttgaggagcagggggcagcgggggataagagggttagggataaggtgctggcagatttgaatgcggtggggaagaaggcggggttgagtggcatggagatgtgtgctggtgttgttgttgttgaggaggagtggacgcctgcttctggcctcgttacggcgacgcagaaggtgaatcgtagagcgttgagggatcattataagatggagatcgagaagtgtgtcaagcagtcttcttgagcgaaccgatttggttggggaagtggcttgtattattgcggttctgggagaggagagaatggtatatatgtgtttgagaggatacgattttgtattgatacctagagttgcgcttgtttggtatctgacgttgtgtttgagagtagaataagggggacagatggggatgtaatgaatatatcctgtcataagtttttttgttgccaggtgagtgtgagtttctggatgatctggttggtacagggggtacataaaagggcaacatctggggtggaaagatagattggtaggtgcggcggagagtcagtatggagtagagaggtgaaggttgacccagaaaatcggtgtgttgagactgaacaggaaagaaaggttaaaaaggatgttatatgcctctggccgctatcttgaagtgagaatttaaagtctattattgtctga

SEQ ID NO: 30283 - DNA, 1729 bp, Muscodor strobelii
  misc_feature: SGI cDNA ID NO. 570413
  misc_feature: Encodes the peptide sequence at SEQ ID NO 30284
atgaagaacgaatcgacttcccttgtgagccaggatcatgtctctcaaggcgatttcctcggtcatgcaaaccctggggatgagacggactttactcgtaggcgctctaagcttgaccgtctagatcagtggatgatagacttttgggtgttcgagttcgcgtcgtggatcgtcagctccgctctgcttgccggcgtggtcgctacgctttaccttcatcaaaataagccactgccggattggcctctaagtatcacagtcaacgcgctcatctcgcttctgtcggctctttcgacctctgctctgattgtcgttgtgaccagcgtgatcggacagggaggatggatagcactagcgtcagcgagaagaccgttgtcgcagttagacgtatatgatggcgctggtcgcggtccgttaggctctgcccttttcttgttaaagacgagaccatctttgatctcattaggacccctcgtcatgatagctagtctccttacgaacccttttatccagcagatcaccaacatcgaacttactgaggtttcgtctaacacgaccacaatttctaccttggtaaactatccaaacatcgacggtaccggtttggacttgcataacccgctgggctccctttacgctcctagtgaggcaatctccggcttctacagcgggctctacttccacggcgacctaacagaccctcatacccgagacgcgctgcagcagaagccagtatgtctatcggggaactgcacctacccggccttcgacagtctcgccgtctgcagtgcttgtgcgaacatctcaagctatctcaagctcaatagcacaaaggacaagtcgggtacgaccgacctttgggaacttcccaacggacattccgttgacagcaatttactcgtgggaacgggagctagctatcacccgctgaagctcgaggccggtctgccaatcgtcaacgtaaccgccatccagccgtacgtagacgccaagggcaacacttacgccgcaacggcgcaagagtgcatgctatattggtgtttgaatcggtactcatcagccgtcaagcagggcatcctctacgaaactgtcgtcgatagcaccaaatggggatacaccattaacgcggacgttttggagaatgactcttatatattccagcctaattacacatcacgagctgctgtgccagcggaggaccccaagacgacattcaacgttagcaaatggggctctgcggccctgactgacctcgcggctcccgttctgacgctagaggcgtactcgtactctgtatacacgagcaccgtcgatatcgagaaagggctgggatcgtatactacgttccccggagtaccgctgaacatgtcaccaacgttcgaagcgatggcccttgcgctaacgacggccgttaggacgtggaagtatgatgactcgacgctgaggattgtggaagggcaatcccttaatggagttccctttttgagggtccgatggaagtggatcgcgttgccggtggcgctgcagattgttacgctatttttgctgtgctatatggtcgtgcagacggcacagaaacggctgccggtttggaaggcgtcggtttgggctaagctatttctaggtatcagggctagggaggttattccggatcagttgcctgggcagttggttgatatgaagagggttgctatagaggttgagtctcgagggatgatggggaacttag

SEQ ID NO: 30284 - protein, 576 aa, Muscodor strobelii
  misc_feature: SGI Peptide ID NO. 570413
  misc_feature (39)..(551): NCBI GI: 145236391 Blast Desc: An06g00150 [Aspergillus niger] gi|134075297|emb|CAK44931.1| protein product [Aspergillus niger]
  misc_feature (49)..(568): NCBI GI: 115400213 Blast Desc: [Aspergillus terreus NIH2624] gi|114191361|gb|EAU33061.1| [Aspergillus terreus NIH2624]
  misc_feature (47)..(543): NCBI GI: 169612752 Blast Desc: SNOG_09502 [Phaeosphaeria nodorum SN15] gi|111061647|gb|EAT82767.1| SNOG_09502 [Phaeosphaeria nodorum SN15]
  misc_feature (49)..(565): NCBI GI: 164425452 Blast Desc: NCU05801 [Neurospora crassa OR74A] gi|157070931|gb|EAA30825.2| NCU05801 [Neurospora crassa OR74A]
  misc_feature (45)..(543): NCBI GI: 169599855 Blast Desc: SNOG_02753 [Phaeosphaeria nodorum SN15] gi|111068364|gb|EAT89484.1| SNOG_02753 [Phaeosphaeria nodorum SN15]
  misc_feature (22)..(539): NCBI GI: 159125812 Blast Desc: conserved [Aspergillus fumigatus A1163]
  misc_feature (22)..(539): NCBI GI: 70985502 Blast Desc: conserved [Aspergillus fumigatus Af293] gi|66845885|gb|EAL86219.1| conserved [Aspergillus fumigatus Af293]
  misc_feature (49)..(543): NCBI GI: 85093286 Blast Desc: NCU08172 [Neurospora crassa OR74A] gi|28921111|gb|EAA30428.1| [Neurospora crassa OR74A]
  misc_feature (33)..(358): NCBI GI: 119189317 Blast Desc: CIMG_04706 [Coccidioides immitis RS]
  misc_feature (4)..(543): NCBI GI: 225560573 Blast Desc: conserved [Ajellomyces capsulatus G186AR]
MKNESTSLVSQDHVSQGDFLGHANPGDETDFTRRRSKLDRLDQWMIDFWVFEFASWIVSSALLAGVVATLYLHQNKPLPDWPLSITVNALISLLSALSTSALIVVVTSVIGQGGWIALASARRPLSQLDVYDGAGRGPLGSALFLLKTRPSLISLGPLVMIASLLTNPFIQQITNIELTEVSSNTTTISTLVNYPNIDGTGLDLHNPLGSLYAPSEAISGFYSGLYFHGDLTDPHTRDALQQKPVCLSGNCTYPAFDSLAVCSACANISSYLKLNSTKDKSGTTDLWELPNGHSVDSNLLVGTGASYHPLKLEAGLPIVNVTAIQPYVDAKGNTYAATAQECMLYWCLNRYSSAVKQGILYETVVDSTKWGYTINADVLENDSYIFQPNYTSRAAVPAEDPKTTFNVSKWGSAALTDLAAPVLTLEAYSYSVYTSTVDIEKGLGSYTTFPGVPLNMSPTFEAMALALTTAVRTWKYDDSTLRIVEGQSLNGVPFLRVRWKWIALPVALQIVTLFLLCYMVVQTAQKRLPVWKASVWAKLFLGIRAREVIPDQLPGQLVDMKRVAIEVESRGMMGNL

SEQ ID NO: 30285 - DNA, 639 bp, Muscodor strobelii
  misc_feature: SGI cDNA ID NO. 570414
  misc_feature: Encodes the peptide sequence at SEQ ID NO 30286
atggtctactacttcacttcaaatgttgtcgatccgcccgccaacatctatgtagggaaggacaagttcgagaatgaggagctgatcaaacacggctgggaggaggatgtctgggtatacaagctctcatcggcacatatatacctccgcctgcctgaaggatcatcatgggagtccattccagcagatctggtcaccgacctagggcagctcaccaaagcaaattccattgaggggaataagaaggataacatcaccatcatatatacgccctggtccaacctcaagaaggatggtagcatggctgtcgggcaagttagcttcaaggaccagagaaaagtcaagcggatcttgattgcgcagagagagaaccccattgtgaatcgactgaataagaccagggtggaaaaggttaagccagatctggcaggcgagaaggaggagtatctaaagcagattcgcaagagagatcaggctgctcggcaagagaggaaaaaagaagaagctcaactcatgaaggaaagacaggagaagaagtggcagaaggatcatgcctacgacgatatgttcagcgaggagaacatggaggcttcaagtaaccagaacagagcggagaactgggaggaggatttcatgtaa

SEQ ID NO: 30286 - protein, 212 aa, Muscodor strobelii
  misc_feature: SGI Peptide ID NO. 570414
  misc_feature (7)..(97): Pfam Id: PF05670 Pfam Desc: Domain of function (DUF814)
  misc_feature (1)..(212): NCBI GI: 39968835 Blast Desc: MGG_02510 [Magnaporthe grisea 70-15] gi|145013871|gb|EDJ98512.1| MGG_02510 [Magnaporthe grisea 70-15]
  misc_feature (1)..(212): NCBI GI: 28881354 Blast Desc: conserved [Neurospora crassa]
  misc_feature (1)..(212): NCBI GI: 85110565 Blast Desc: NCU06750 [Neurospora crassa OR74A] gi|28925205|gb|EAA34286.1| NCU06750 [Neurospora crassa OR74A]
  misc_feature (1)..(212): NCBI GI: 261354205 Blast Desc: coiled-coil domain-containing protein [Verticillium albo-atrum VaMs.102]
  misc_feature (1)..(212): NCBI GI: 171689542 Blast Desc: protein product [Podospora anserina] gi|170944733|emb|CAP70844.1| protein product [Podospora anserina]
  misc_feature (1)..(212): NCBI GI: 256726523 Blast Desc: [Nectria haematococca mpVI 77-13-4]
  misc_feature (1)..(212): NCBI GI: 169611300 Blast Desc: SNOG_08760 [Phaeosphaeria nodorum SN15] gi|111062808|gb|EAT83928.1| SNOG_08760 [Phaeosphaeria nodorum SN15]
  misc_feature (1)..(212): NCBI GI: 189205995 Blast Desc: coiled-coil domain-containing protein 25 [Pyrenophora tritici-repentis Pt-1C-BFP] gi|187975425|gb|EDU42051.1| coiled-coil domain-containing protein 25 [Pyrenophora Pt-1C-BFP]
  misc_feature (1)..(212): NCBI GI: 259481678 Blast Desc: TPA: DUF814 domain protein, (AFU_orthologue; AFUA_1G08820) [Aspergillus nidulans FGSC A4]
  misc_feature (1)..(212): NCBI GI: 255939574 Blast Desc: Pc16g01820 [Penicillium chrysogenum Wisconsin 54-1255] gi|211585179|emb|CAP92852.1| Pc16g01820 [Penicillium chrysogenum Wisconsin 54-1255]
MVYYFTSNVVDPPANIYVGKDKFENEELIKHGWEEDVWVYKLSSAHIYLRLPEGSSWESIPADLVTDLGQLTKANSIEGNKKDNITIIYTPWSNLKKDGSMAVGQVSFKDQRKVKRILIAQRENPIVNRLNKTRVEKVKPDLAGEKEEYLKQIRKRDQAARQERKKEEAQLMKERQEKKWQKDHAYDDMFSEENMEASSNQNRAENWEEDFM

SEQ ID NO: 30287 - DNA, 917 bp, Muscodor strobelii
  misc_feature: SGI EST ID NO. CUFF.71712.0
  misc_feature: Variant of the nucleotide sequence at SEQ ID NO 30285
tctcacacaaaacacaaacgacagttccacgtagacaagctctcatcggcacatatatacctccgcctgcctgaaggatcatcatgggagtccattccagcagatctggtcaccgacctagggcagctcaccaaagcaaattccattgaggggaataagaaggataacatcaccatcatatatacgccctggtccaacctcaagaaggatggtagcatggctgtcgggcaagttagcttcaaggaccagagaaaagtcaagcggatcttgattgcgcagagagagaaccccattgtgaatcgactgaataagaccagggtggaaaaggttaagccagatctggcaggcgagaaggaggagtatctaaagcagattcgcaagagagatcaggctgctcggcaagagaggaaaaaagaagaagctcaactcatgaaggaaagacaggagaagaagtggcagaaggatcatgcctacgacgatatgttcagcgaggagaacatggaggcttcaagtaaccagaacagagcggagaactgggaggaggatttcatgtaatcttcacaaagccccctttggacagtgaaccccgattacgacttacagctggctacctactatgcactatgatgtgtgttgtataacgcatcgacttccattacgactaaagggttcctatcttccgaacctaccctcgtcgtcaccggctgctttatcatatgctaatgaatgagcttagcatacctaccttgtcacaatttcccccggagttgcgactgttataggtcgcttcgggtatttgaaggacgtaaacggaatgcctaactaacatatcgaatcagacgccctcgaccggacttatcctaagacgttgaatggttgaaccccgcccagtcgccagtcacatccacaaaggcaag

SEQ ID NO: 30288 - DNA, 1035 bp, Muscodor strobelii
  misc_feature: SGI cDNA ID NO. 570415
  misc_feature: Reduced expression when VOC is produced
  misc_feature: Encodes the peptide sequence at SEQ ID NO 30289
atggcacccagactgccagcccgctgggccacggccctgacctcaccctcgacctcgcgcgtcctcataacacccacccgcaccttcctcccccgaacagcaaagcgcggcgtcaaatacggctggtccacggccccaaagcgcggcaagccgaaccgcttcaaccaggtatccatgggcataccagcgcccaccaccggtcccgccgccgccctcaagcgcaaggcccagtccacgcccatccggaccggtgtcctcgcagagaagaagggcgtatcggcaatgtacgacacgacgaagggcacgcgaacaccctgcacaatcctccagctcgaccaatgccaggtcgtagcacagaagacacgcgccaagaacggatactgggcactgcagattggctccggtcacaagcaagccgataacaccacatcgcctatgctggggtactacgaagccaagggtatagcacccaagcgccatctcgccgagttcaaagtccgcggcgaagaaggactgctacccgtaggcgtccagttatctccagactggttcaaagtcggccaattcgtcgacgcacggagtaattccagaggtatgggattcgccggtggtatgaagcggcacgggttcgccggtcaggaggcgtctcacggtaactcgaagaatcaccgaaccatcggttccgccggtccgtcgcagggcagcggttcacgtgtgttgcccggcaagaagatgccgggtcgcatgggcaatgaacgagtcaccgtccagaatctccgcgttctgaaagtcgataatgagctcgggatcgtagtgattaagggccatatcgccggacccaagggctgtctcgtccagatcgccgacgcgatcaagaaaccaccgcccgtcgacacattcctcgccaaggcgaagacggcgttattgcagcggaataaggggcatgctgagaggttagagatggcgagggtgatgcatatggatctgaagaaggttagagagaggctacagatgacgcccaggatgcctttctaa
